United States Patent Application Publication US 2007/0192889 A1 - sequence listing, part 7

SEQ ID NO: 14461 - DNA, 2202 bp, Oryza sativa
  Clone ID: TFbOSC420832j.C1.o1.fg
atggcgaagactatggaacatgaacggcgaggggcgagagatcgtgcgagtaccttgtcaagccagaggcctcttgggcgaagggtgcagggcgaagagtatataccggaggaagatgacttcgccacagcaagttcgcccccgcgagggccgaagaagcctttccgtcccatcaaccccagggaccgtaaggccgacgatcgcccgatggcccatcaggggcccatgagtccttattacattatgtacccatgtaaatgtccctttcataagggcaaccatgatgcggacatcactatctcggatacacacaacaatcctccaacggtcattcaaggaccgataacaagagctcgaacaatggaggggacaaggagacacttggagaaggacttagacccatggaggaccatcggggacgtccaagtcaaggtggaggcccaaaccaagtcaacgtcgggtgcaattcggagtccaggaccagtctacactaaaacgggcgcccagcattactatctgtcattggattgtgtaccactcatattcgtatatttggccttcctagctccacttattacttctggacagcacaggttcttgatccctgcaatcactgactacgccttccaggtatcctttgctttgctggtaacgaaggacatcacggaggccgttgcaaagtctgtccaagatgccttcactaaaatcggcttcctgaaccacatggagaggttggacaagcggatatccacgctaactgatcgggtcgccgcgttggagacaccttccaatgaggaagtggtgagtggtgatgacgatgctcatccggaagacacggtgtatgattccagtggctatattgacgcaccggctacaaggcaagcacagctacgacgtcgcctacgcacaaactgcataggtatgggtggcactcgccaccaacaaggtaataataataatcgtgtgtccgatgatccttatgctaaggttaagtttaaaataccatctttttcgggatattatgatgctgagaaataccttgattgggagatgacagtagaacaaaagtttaatgcccaccttgtacccgagcaacatagagttagacaagccagtagtgagttcaaggattttgctattatgtggtgggttgggttaactgctgagggggtactacctactacttgggaagaacttaaggtagctatgcgcaataggtttgttcctccatcttatcatagagatttgcgcaagaaactgatgcgtttggaacaaggggataaatctgtacaggattactatggtgagctacaaaagggtttgtttcggtttgctatgcttgcagagaaggaattacaggggcgcgaccatcagggcaagagcaaggcaagcacatacactccgcgcacgacgccatctgcggcactgcccaaggccgtctcttttcgggtgtcctcccagccagcgggcaagcgaccagctgcatccggagcttctgcggcaccaaaaccatctccaccaccacgaccagcagagtcaggtaaaggttccacgcaggtacccgccaagagtgcctcatctgtcgcctcgacgggacgcattcagtgccaccgttgccaagggtttgggcatgtgcagaaagattgccctagtcaacgggcctatgttgctacagaagatggctacatcaccacctccgacatggaagaggaagagggggaagaagaagttgaggatgaggatggcgaagtctttggtcgtgatgacacaacggactacaggaccaacattgtgcagtgggtgctcagcatgcaggtagctgcaacacacttggtgagttctgatttggtcgagaagcttggcttgactacacttacacatccacacccttaccatattcagtggttaaacgattccggaagagcaaagcaagtggctaaatctgtttttccacctaaaaaggataagatttcacctagttctaaggttgagggaattaagttgaagggtggtgttatgcttgcaactaaatgtgacattgctgaaatgtcagatgatgatatgtgctatttcttgatatgcaaacaagccttggtttctttagatgatattgctagttcgatacctcctgttgttactaaccttttgcagaagtatgaggatgtctttccagctgagatacccccaggattccgcctatga

SEQ ID NO: 14462 - DNA, 3870 bp, Oryza sativa
  Clone ID: TFbOSC900041j.C1.o10.fg
atggagaggttggacaagcggatatccacgctaactgatcgggtcgccgcgttggagacaccttccaatgaggaagtggttaagttaaaaataccatctttttcgggatattatgatgctgagaaataccttgattgggagatgacagtagaacaaaagtataatgcccaccttgtacccgaacaacatagagttagacaagccagtagtgagttcaaggattttgctattatgtggtgggctgggttatctgatgagggggtcctacctactacttgggaagaacttaaggtagctatgcgcgataggtttgttcctccatcttatcatagagatttacgcaagaaactgatgcgtttggaacaaggggataaatctgtacaggattactatggtgagctacaaaagggtgtgagacgctgtggcatagtggagggggtcgaggatgctatttgtcgtttttattctggtttgagggaggaaattcataacattgttgattgtaaggaatttaactctgtcaaccagttgtttcggtttgctatgcctgcagagaaggaattacaggggcgcgaccatcagggcaagagcaaggcaagcacatacactccgcgcacgacgccatctgcgggattgcccaaggccgtctcttttcgggcgtcctcccagccagcgggcaagcgaccagctgcatccggagcttctgcggcaccaaaaccatttccaccaccacgaccagcagagtcaggtaaaggttccacgcaggtacccgccaagagtgcctcatatgtcgcctcgacaggacgcattcagtgccaccgttgccaagggtttgggcatgtgcagaaagattgccctagtcaacgggcctatgttgctacagaagatggctacatcaccacctctgacatggaagaggaagaggaggaagaagaagttgaggatgaggatggcgaaatctttggtcgtgatgacacaacggactacagaaccatcattgtgcagcgggtgctcagcacgcagatttttttcgtcatcaacaaccgtcgtgcacgtgtgatcattgatggaggtagctgcaacaacttgtggttaaacgattccggaagagcaaaggtaacacaggtttgtagggtttcgttttccattggctcatatgcagattctgttgattgcgatgtggttcctatgcaagcttgttcacttttgttgggccgtccttgggaacatgataatgatgctacacaccatggtaggagtaataaatacacttttgtgcataatgggaagaaaattactttgctacctttgacccctgctgaaattgtagaagctgataaagagcgagctgctagtttgaaacttgatgaatctgaaaatcagcaagtggctaaatctgtttttccacctaaaaaggataagctttcacctagttctaaggttgagggaattaagttgaagggtggtgttatgattgcaacgaaatgtgaaattgctgaaatttcagatgatgatatgtgttatttcttgatatgcaaacaagccttggtttctttagatgatattgctagttcgatgcctcctgttgttactaaccttttgcaggagtatgaggatgtctttccagctgagatacccctaggattgccacccatgagagggatagagcatcaaattgatttgattccaggagcatcattgccaaaccgtgctgcttatcgaaccaacccagaggagactaaggaaattcagcggcaagttcaagaccttttggaccgctggtatgtacgtcaaagccttagtccctgtgtagttcctgtaattttggttcctaagaaagatggttcttggcgaatgtgtgttgattatagagccattaataatattactatccgatatcgtcatcctattcctaggtcagacgacatgcttgatgaattgtgtggctctataattttcacaaagattgacttgcgtagtggctatcaccaaattagaatgaaacttggagatgaatggaaaacagcttttaaaactaaatttggtttgtatgagtggttagtaatgccttttggtttgactaatgcacctagtacattcatgcgcttaatgaatgaggttttaaggccttttattggacgatttgtggtagtgtactttgatgacatattgatttatagcaagtctttcgatgaacacatggatcatttacgtgctgtttttaatgctctacacgatgcacgtttgtttgctaaccttgaaaactgcatcttttgcacggaacgagtctcttttcttggatatgtagttactccacagggaattgaggtggatgagtcgaaaattgaagccataaagagttggccggttccccaaaccatcacacagctgaggagctttcttggtcttgcaggattctaccgccgtttcgtcaaagatttcagtatttttgctgcaccattgaacgagttgacgaagaaaggggtggtcttccattggggaaagacacaggagcagtcatttgacactttgaaggacaagcttacacacgcaccattgctacaacttccaaactttggtaagacttttgagttagaatgtgatgctagtggagttggcattggaggtgtgttgatgcaagatggtaagcctgttgcatactttagcgagaagttgcatggtcctgttttgaattattccacgtatgataaggaattgtatgctcttgaagcgcatggaggagggttgatcggacattttggagctaagaagacgaaagatgttttggccatgcatttcttttggccaaggatgcgaaaggatgttgagagaactaagagggggagggatagtatttttgtggtggtggatcgtttttctaagatggcacatttcataccatatcataaaagtgatgatgctgttcatattgctgatctgtttttccatgagattgttcgcttgcatggtatgccttttactattgtttcagatcgtgatgcaaaattcttaagtcatttctggcgcacgctatggaacaagttgggtacaaagctattgttttctacaacatgtcaaccacaaacagatggacaaacggaggtagtcaactgcactttgggtaccatgttgagggctattttaaagaaaaatttgaagatgtgggaagaatgtttgcctcatgtggagtttgcatacaatcggacaatacattctactaccaaggtaagtccttttcaggtagtgtatggtttcaacccttgtgcttcaattgatattttgcctttacctactagtgagagggttcataatgatgataaggcacacgctgaatttattttgtcaatgcatgagtcaaccaagttcaacattgaaaagatgactgaaaagtatagaattgctggtagtaaagttgagaagattaatgataatgcatataaacttgagttgcctcccgagtttggggtcagtcccacgtttaacatttcagatttgaagccacacttgggagaagaggatgagcttgagtcgaggacgacttcaattcaagagggggaggatgatgcggacatcactacctcggatacacacaacaatcctccaacggtcattcaaggaccgataacaagagctcgtgcgcgacaattaaatttagaggtgagctcgttcctatgttcttctttgtatgaattcgagaatagattgctacctaatgattatattgtgctttggaacaatggaggggacaaggagacactaggagaaggacttacagccatggaggatcatcggggatgttcaagtcaaggtggaggcccaaaccaagtcgacgtctggtgcaattcggagttcaggaccaatctgcactaa

SEQ ID NO: 14463 - DNA, 4568 bp, Oryza sativa
  Clone ID: TFbOSC900370j.C1.o2.np
ccaagagcaactacgaactctccaacaaaatactcaaaaggacatcacggaggctgttgcaaagtctgtccaagatgccttcactaaaatcggcttcctaaaccacatggagaggttggacaagcggatatccactctaactgatcgggtcgccgtgttggagacaccttccaatgaggaagtggtgagtggtgacgacgatgctcatcctgaagacacggtgtatgattccagtggcatggctacgacgtcgtctacgcacaaaccgcacaggtatgggtggcactcgccaccaacaaggtaataataatgatcgtgtgcccgatgatccttatgctaaggttaagtttaaaataccatcttttttgggatatgatgatgctaaaaaataccttgattgggagatgacagtagaacaaaagtttaatgtccaccttgtacccgagcaacatagagttagacgagccagtagtgagttcaaggattttgctattatgtggtgggctgggttatctgatgagggggtactacctactacttgggaagaacttaaggtagctatgcgcgataggtttgttcctccatcttatcatagagatttacgtaagaaactgatgcgtttggaacaaggggataaatctgtacaggattactatggtgagctacagaagggtgtgagacgctgtggtatagtggagggggtcgaggatgctatttgtcgtttctacactagtttgagggaggaaattcagaacattgttgattataaggaatttaactctgtcaaccagttgtttcgatttgctatgcttgcagagaaggaattacaggggcgcgaccatcagggcaagagcaaggcaagcacatacactctgcgcacgaccgtctcttttcgggcgtcccagccagcgggcaagcgaccagcagcatccggagcttctgcggcaccaaaaccatctccaccaccacgaccagcagagtcaagtaaaggttcctcgcaggtacccgccaagagtgcctcatctgtcacctcgacgggacgcattcagtgccaccgttgccaaggatttgggcatgtgcaaaaagattgccctagtcaacgggcctatgttgctacagaagatggctacatcaccacctccgacatggaagaggaagaggaggaagaagaagttgaggacgaggatggcgaagtttttggtcgtgatgacacaacggactacagaaccatcattgtgcagcgggtgctcagcacgcaggtacagcagcatgacaggttgcaacgccataatttgttttagatttttttcgtcatcaacaactgtcgtgcacgtgtgatcattgatggatgtagctgcaacaacttggtgagttctgatttggtcaataagcttggcttgactacatgtacacatccacatccttaccatattcagtggttaaacgattccggaagagcaaaggtaacacaggtttgtagggtttcgttttccattggctcatatgcagattctgttgattgcgatgtggttcctatgcaagcttgttcacttttgctggggcgtccttgggaacatgataatgatgctacacatcatggtaggagtaataaatacacttttatgcataatgggaagaaaattactttgctacctttgacccctgctgaaattgtagaagctgataaagaacgagctgctagtttgaaagttgatgaatctgaaaatcagcaagtggctaaatctgtttttccacctaaaaaggataagctttcacctagttctaaggttgagggaattaagttgaagggtggtgttatgcttgcaacgaaatgtgacattggtgatatttcaaatgatgatatgtgctatttcttgatatgcaaacaagccttggtttctttagatgatattgctagttcgatacctcctgttgttactaaccttttgcaggagtatgaggatgtctttccagctgagatacccccaggattgccacccatgagagggatagagcatcaaattgatttgattccaggagcatcattgccaaaccgtgctgcttatcgaaccaacccagatgagactaaggaaattcagtggcaagttcaagacctttaggaccgcgggtatgtacgtcaaagccttagtccctgtccagttcctgtaattttggttcctaagaaagatggttcttggcgaatgtgtgttgattgtagagccattaataatattactatccgatattgtcatcctattcctaggttagacgacatgcttgatgagttgtgtggctatattattttcacaaagattgacttgcgtagtggctatcaccaaattagaatgaaacttggagatgaatggaaaacagcttttaaaactaaatttggtttgtatgagtggttagtaatgccttttggtttgactaatgcacctagtactttcatgagcttaatgaatgaggttttaaggccttttattggacgatttgtggtagtgtactttgatgacatattgatttacagcaagtctttggatgaacacatggatcatttacgtgctgtttttaatgctctacgcgatgcacgtttgtttgctaaccttgaaaagtgcatcttttgcatggaacgagtctcttttcttggatatgttgttactccacagggaattgaggtggatgagtcgaaaattgaagccatcaggagttggtcggttccccaaaccatcacacaggtgaggagctttcttggtcttgcaggattctaccaccgtttcgtcaaagattttagtacttttgctgcaccattgaacgagttgacgaagaaaggcgtggtcttccattggggaaagacacaggagaagtcctttgacattttgaaggagaagcttacgcatgcacctttgctacaacttccaaactttggtaagacttttgagttagaatgtgatgctactggagttggcattggaggtgtgttgatgcaagatggtaagcctgttgcatactttagcgagaagttgcatggtcctattttgaattattccacatatgataaggaattgtatgctcttgtacgttccttagaaacgtggcgtcattatttttggcctaaagaatttgttattcactccgatcacgaatcgcttcaatatcttcgctctcaaaataatttgaatcgtagacatgcaaaatgggttgaatttattgaatcttttccttatgttatcaaacacaagaaagggaaagataatgtgattgcagatgctttgtctaggcgctatactttcttatcccaacttgaatgtcggatttttggacttgaatcaattaaagaacaatatgcacttgatcctgattttaatgaagtgatgataaattgtaaagagggacgtacttggaacaaatttgtgatcaatggtgggtttgtttatagagctaaccgtctatgcattccagttggttccgttcgtcttttgttgatacaggaagcgcatggaggagagttgatgggacattttggagctaagaagacggaagatgttttggccatgtatttcttttggccaaggatgagaaaggatgttgacaggttcatggcacgttgcaccacttgtcagaaagctaagtctcatttgaatccacatggtttgtatatgcctcttcctgtaccttctattccttgggcagatatttctatggactttgttttgggattgtctagaactaagagggggagggatagtatttttgtagtggtggatcatttttctaagatggcacatttcataccatgtcataaaagtgatgatgctgttcatattgctgatctatttttccatgagattgttcgcttgcatggtatgccttctattgtttcagatcgtgatgcaaaattcttaagtcatttctggcgcacgctatggaacaagttgggtacaaagctattgttttctacaacatgtcacccacaaacagatggacaaacggaggtagtcaaccgcactttaggtaccatgttgagggctattttgaagaaaaatttgaagatgtgggaagaatgtttgcctcatatggagtttgcatacaatcgggcaacacattctactaccaaggtaagttcttttcaggtagtgtatggtttcaaccctcgtgctccaattgatatgttgcctttacctactagtgagagggttcataatgatgctaaggcacgcgctgaatttattttgaaaatgcatgagtcaaccaagttcaacattgaaaagatgactgaaaagtatagaattgctggtagtaaaagtaggcaagaggttaagcttgaaccgggtgatttagtttggttgcacttgagaaatgatagatttccggaattgagaaagtctaagttgatgcctcgtgctgatggcccttttaaaattgttgagaagattaatgataatgcatataaacttgagttgcctcccgagtttggggttagtcccacgtttaacatttcagatttgaagccatacttgggagaagagtatgagcttgagtcgaggacgacatcaattcaagagggggag

SEQ ID NO: 14464 - DNA, 531 bp, Oryza sativa
  Clone ID: TFbOSC401057j.C1.o6.gm
atggccggtgccacgggttggcgggcgatcaagtttttgggtagcgcttcaagcgcgactgctcctgttctttgcgactactgctgctgcatcgatgcctttaccatcatgtcaacaaagattggagacaaggaggtgaacgacatcaacagaggagaaggcgagggcaaagacaactggggcaaaaagatcgagggagattctagcgccaatttggtgcagaagaagaaccctcatgcatcccacaacaacaacaagaaagtcaaacctgacgtcaaacccaatgctacaaccaattttaagaagaaagacaagggaaaggcaaagggcgactactttgtgtgtggtaagcctgggcattgggccaaggattgtcttgagcacaaagacaaaaagtctgcaaacatgtctattagcgagggcggaggaacatcggggtatggtcaggagaggttcctccttgttgttgggaaacggatcgacgccgacgagcacggaaacggcggttaccagagaactacgatacaatga

SEQ ID NO: 14465 - DNA, 5385 bp, Oryza sativa
  Clone ID: TFbOSC400839j.C1.o11.np
agctagtgtggcacttgattgatcatctccacaccgggtcattgcttgttactcttggaggttgccgcctcctagacggcttgtggaggagttgcccggtgacctctccgagaagattgtggaggaggcccggcgccggctttgctatcaccggcacgcccttgacggagattgatcaccgcaacctccaactcaatgcccaagcaatgaatgttttgttcaactctttgagccaagaggagtttgatagagtgagccaccttgagaccgcatatgagatttggaacaagttggcaagttggcgaagatccatgagggcacaagcgagtacaaggatgccaagcttcatttcctcaagatccaatatgagacattctccatgttgcctcatgagagtgtgaatgacatgtatgggaggctcaatgtcattgtgaatgatctcaaggggcttggggcaaactacaccgatcttgaggttgcccaaaagatgcttagggctctaccggggaagtatgagacccttgtcaccatgctcatcaactccgacatgtcaaggatgacacccgcaagcctcttggggaagatcaacaccaatgacatgtacaagttgaagaagaaggagatggaggaagcctcaccttccaagaagtgcattgctctccaagccgaagttgaagacaagggcaagggcaaagagagaggaaggggctccaactccagtaggagaagaaatagaagacccaacaagactctctccaacttgaagtgctttgagtgtggtgagaagggacactttacttccaagtgcccttccaaggatgatggagacaagtcatccaagaagaagagtggaggctataagctcatgaagaagctcaagaaggaaggcaagaagattgaggcattcatcggggaatgggactcaaatgaggagagctccgcctcatccgggtccgaggaagaaggtggtgaggatgcaagctccaagaagaagaagatggccgttgttgccatcaaggaggctctatcactcttcgctccactttgtctcatggcaaagggctcctctaaggtaacatctcttagtgatagtgagagtgatgatgattgtgatgatgtttcctatgatgagcttgtgagtatgtttgaggagctccatgcttatagtgagaaggagattgtcaagttcaaggccctaaaaaaggatcatgcttctttagaggtcttgtatgaggaactaaagacctctcatgagagactcactatttctcatgagaagcttaaggaagctcatgacaacctcctttccactactcaacatggagctctcattgatgttggcatatcttgtgatttgcttgatgatagtgctacttgccatattgctcatgttgcatcatctagcatttctacctcttgtgatggtcttgtggatatgcctagctctagctctagctcttgtatttctatttgtgatgcctcacttgttgttgagaacaatgagcttaaggagcaagtggccaagctcaacaagagtttggagaggtgcttcaagggaagactcatgatggtagcattgttgctagatatgtgggttcccctatactcggtggtgaactaccgcaccggtgggagccattgggtgcttgatagtggatgcactcaacacatgaccggtgatagggctatgttcaccacatttgaagtaggagggaatgaacaagagaaagtgacttttggagacaatagcaaaggaaaggtaattgggttagttgcaaaaacttcattgggttggctttagcataggaggctagcccatgttggcatgaatcaattgagcaaactttcaaaacgtgatctagttgtgggcttgaaagatgtgaagtttgagaaagataagctttgtagtgcttgtcaagccggcaagcaagttgcatgttctcatcctactaagagtatcatgtccacatctagaccattggagctcttgcatatggatttgtttggcccaacaacctataagagcatcggtgtggagaggaaaaatcgtacattgattgagatggcaaggactatgcttgatgaatatggtgtttccgattccttttgggcggaagccataaacaccgcttgccatgcaaccaattggctttatttgcatcgtctcttgaaaaagacttcctatgagctaattgttgggaggaagccaaatgttgcctattttcgagtttttggttgcaagtgttatatttaccgaaagggtgttagactaaccaaatttgaaagtcggtgtgatgaagggtttcttctaggttatgcttcaaatagcaaggcataccgggtctacaacaagaataaaggtattgtggaagaaatcgtcgatattcaatttgatgaaactaatggctcccaagaggggcacgagaatttggatgatgtaggtgatgaaggcttgatgagagctatgaagaacatgtctattggagatgtcaagcctattgaagtggaagacaagccatccacctccactcaagataagccatctacttccgctacgccaagtcaagctcaagttgaggtggaggaggagaaagcacaagatccacctatgcctccaaggatacacaccgctctttccaaggatcacccaattgaccaagtgttgggtgacataagtaagggtgttcaaactcgatctcgtgtcgcttcgatttgtgaacattactcgtttgtttcttgtcttgagccaaaacatgtaaatgaagctctttgtgatccggatggatgaatgctatgcatgaagagctcaacaactttgcaagaaacaaggtgtggactttggttgaaagacctagagaccacaatgtcatagggacaaagtgggtctttagaaacaaacaagatgagaacgggttggtggtgagaaacaaggcaaggttggtggcacaaggtttcacacaagttgaaggtttggacttcggtgaaacttttgcccccgtggcaagacttgaggctattcgcatccttcttgcatttgcatcatgttttgatataaaactatttcaaatggatgtgaaaagtgcttttctaaatggtgaaattgccgaacttgtctttgttgaacaacctcccggttttgaagatcctaaaaatcctaaccatgtttataaactctcaaaagctctttatggtctaaaacaagctcctagggcttgatatgaaagattgagagattttcttttgtcaaaggatttcaaaattggaaaagttgacaccacccttttcacaaaaatcattggtgatgatttctttgtgtgtcaaatttatgttgatgacatcatattcggttctactaatgaggtattttgcaaggaatttggtgatatgatgtctagggaatttgagatgtccatgattggagagttgagcttcttccttggacttcaaatcaaccaactcaaggatgggacgtttgtgagccaaaccaagtacatcaaggatttactgaagaggtttggcttggaggatgcgaagcccatcaagacacctatggcaaccaacgggcatctcgaccttgatgagggaggtaaactggtagatttaaagctttatcgttccatgattggtagtttgctttaccttatcgcatctaggccggatagcatgtttagtgtttgcatgtgtgcacggtttcaagccgctcctaaggaatgtcacttggtggccgtgaaaaggattctaagatatttaaagcattcctctactattggcttgtggtacccaaaaggtgctaagtttaagcttgttggctattccgattcggattataccggttgcaaagtggatagaaagagcacatccggtagttgccaaatgcttagtagatcccttgtgtcatggtcatccaagaaacaaaactccgtagccctctctaccgctgaggcggaatatgtttcggcggaatctagattcttagttttggccaaaatgagatttatccccaaaataagattgagaaggaatttgagaaaagtttcaaaacaaagttgcggcggtctgaccgggcggcatgctcgcggtctgactggctgtggccgtcggtctgaccggccatcggtccgcggtctgactgcccctgactggccgatgatgcctccccgcactcgccatggtcgttgtgcgcccactccggatcccgtgagtgagcctgaggaatcgagcggagaggattacgctcaaagtgatgaagaggttgaagcaaatattgagggggctagtgaggaggcaagtggagatgatgacagtggaagtggagaggatgaggatgaaggaagtgatgatatgcacgttgatccctccatctagtttgatgtgaacatgaggaatccatcgcagtataccatcttgaggcatcatgatcagtttttaaggcctcgggacaccccggatccccgttttcacaccgctttccagaagttgtgggtggctggggactataatgagatgaagtggatgtccgataccctccagtgttctatctctcggaggcaattctggcggctcctcaatattcgcctagactttggatatgatttgcatgaggagcacactcacaatccgctctccatagactatctctctcagttttatgaagatggagtgcggtacacacatgggaaggttgccggattgaggactatccccagtgtggttaacaggattgtgagagccactatcctccctcgccttggcaacaatgatgacattagaggggtggcttggcacatcatcgatacgatcattcagggtcgtcagttcgacattgtgtctctcatgatgcaggagattgccatctccaaggggacattcactcagggaatctattatgccccttacatcatgaggttgattcaagacaagcttggggctgctggcaaaatttgaagaagcacaagcagtacaagccccgccttcagcttggagctccacatgcttaggatggtgccctcttctcatcttggagctagctcaagctcagcacctcctcctcctcatgggtatgatccaaatgctttcttccatccacagtatacttactttggaattcaacccaatgaatatttcaacccggtacttggggctattaataccctaagtaaaagtattcaacgcttgtctaccgggcatgaagcatgacatgaggatgttcgtggcttgcgcacggatgttggagacttgaatgcttccatggggagattgcacactagagtgggtacattggattctcaagtccaaatgttggagagctcccaagcatttgtgtatcatcgtcgtcgtgatgctcctcatccttccacttcggcgcgtcctccttctcctccacaa

SEQ ID NO: 14466 - DNA, 1482 bp, Oryza sativa
  Clone ID: TFbOSC21755j.C1.o8.gm
atggtgagggagagaaaggtgcgggagagccccctgggcgcacggggatctggcggctcggtgcgaaagctgaacggcggcagttacaagcccggccgtcctccaggcgcggtgatcctccaccgccggccgacctcatccccatcctttctcccgccgtctggtcgccgctatttgaggtgcgccgggcggtggctcggtggagcggttgagcgacggctgtcggctaggagcagcgacagagttggaagctcggtgcagaaggtgaacggcgacggtgacaagccggccgtcctccattcgtggcaatccatcaccatcggccaacctcatccccgtcttctctcttgccgtctggtcgtcgccattcgagatgtgtcgcccgggaaagagatccaggaggggagcactttgtggggtgatttatccttgattctaaaatgggaggatagctggcaccagcgtggtggtgcgtgggagtacggcgaggagaatgcacgaggaggacaaggtcgagctggtgcgattgactacttcctctacatcgacgcgcgctacttcgcgagagttctttcgacttctcagcatcttcttccgctgcacagcgcgtcgagtgctcttgcaccatccaattttaacttgcggtctattcttgagaaagagaagttgactggaacaaacttcatggattggtatcgcaacctgagaattgttctcaggcaagagcacaaagagtttgtgcttacacagccttttccagctgacttgcccaacaatgctcctgttgctaaacgtagggagcatgaaaggcgatgcaatgaataccttgatataagctgtctcatgcttgctactatgtcccctgagtttcaaaggcaatatgaggcattggatgctcatacaataatcacgagactacgtaacatgtttgaggaccaagcaagagctaagaggtttaatacctcaaagtccttgtttgcgtgcaggcttgcagaaggtaatccagtgagcccacatgtgatcaaaatgattggttacaccgagagtctggataagcttggctttcccctaagccgagagttggctactgatttgattctccagtcgctccctcccagctttgagccgttcataatgaatttcaacatgaacaacctgaacaggaccttggcagaattgcatgggatgctaaagactaccgaggaaagcattaagaaaaactccaaccatgtgatggttatgcataagcacaagcccaacaacaagaaaagtggtcaaaagagaaagctaaactctgatgagatcacgagtactagcaactctaagaccaaggttcaaaagacagggctcgctaaggatgcagagtgcttcttttgcaaggagacaggtcattggaagagaaactgtaagaaatacctagagcagctcaagcagaagcagcaggatggaaagagttccacctcaggggctgaaaagaagtag

SEQ ID NO: 14467 - DNA, 1768 bp, Oryza sativa
  Clone ID: TFbOSC28635j.C1.o1.fg
gatagatgtcggacatctatgtgcggagattattggtttacttgacaagatcatggcagctcctgcatcatccaattttaacttgcggtctattcttgagaaagagaagttgactggaataaacttcatggattggtatcgcaacctgagaactgttctcaggcaagagcacaaagagtttgtgcttacagagccttttccagctaacttgcccaacaatgctcctgctgctcaacgtagggagcatgaaaagcgatgcaatgattatcttgatacaagctatctcatgcttgctactatgtcccctgagcttcaaaggaaatatgatgcattggatgctcatacgataatcacgagactacgtaacatgtttgaggaccaagcaagagctgagaggtttaatacctcaaagtccttggttgcgtgcaggctagcagaaggtaatccaatgagcccacatgtgatcaaaatgattggttacgccgagagtctggataagcttggttttccccttagccgagagttggttactgatttgattctccagtcgctacctcccagctttgagccgttcataatgaatttcaatatgaacaacctgaacaggaccttggcagaattgcatgggatgctaaagactgctgaggaaagcattaagaaaaactccaaccatgtgatagttgtgcataagcgcaagcccaacaacaagaaaagttgtcaaaagagaaagctaaactctgatgagatcacgagtactagcaactctaagaccaaggttcaaaagacagggcccgctaaggatgcagagtgcttcttttgcaaggagacaggtcattggaagagaaactgtaagaaatacctagagcagttcaagcagaagcagcaggatggaaagagttccacctcagtctataacattaatgcaaaaaggcaacgtcctaatgatttgaatcccacttttatttggcattgtcgcttgggtcatataaatgagaaacgcatggagaagcttcatagagatggacttctacactcttttgattttaaatcatttgagacatgcgaatcttgtttacttggcaaaatgacaaaggcacctttcacgggtcaaagtgaaagggcaagtgaactattgggactagtacatactgatgtatgtggaccaatgagctcaactgccaaaggtggttttgggtactttattacctttaccgctgactttagtagatatggttatgtctacttaatgaggcataagtctgagtactttgaaaagttcaaggaatttcagaatgaggtacaaaatcatttgggcaagacaatcaagtatctacgatttgatcgtggtggaaagtacttgagcctagaatttggcaatcatctaaaggaatgtgcaattgttccacaactcactccgccaggaacgcctcagtggaatggggtgtctgaacggaggaatcgtacattgttggacatggtacgatcaatgatgagccaaactgatctgccgctaagcttttggggttacgctctagagacagttgcgttcacactaaacagggttccatcaaaatcagtggataagacaccatatgagatatggactgggaagcgtcccagtttgtctttcctaaagatttggggctgtgtggtctatgtaaaacgtttgcaatcagacaaactcacacctaaatcagataaatgcttctttgtgggatatcctaaggaaacgaaaggatattatttttataatcgggaagagggcaaa

SEQ ID NO: 14468 - DNA, 3552 bp, Oryza sativa
  Clone ID: TFbOSC28818j.C1.o1.fg
atggagatccaatatgagcatacttcgtatagggatccaaataggagtcttacgggccttggaggcccgagtgatggatcctatatattcgtgaggggtgtgaccggtggaggcattgcatcaccgcgtcgagtggtaacgatatatgatctaatacttgcttggttcctggtttatgcgatagaaatgtttgatttatgctatcgtagcttacgcttatcccaacagtggatagatgtcggacatctatgtgcggagattattggtttacttgacaagatcatggcagctcctgcatcatccaattttaacttgcggtctattcttgagaaagagaagttgactggaataaacttcatggattggtatcgcaacctgagaactgttctcaggcaagagcacaaagagtttgtgcttacagagcctttacaagctaacttgcccaacaatgctcctgctgctcaacgtagggagcatgaaaagcgatgcaatgattatcttgatacaagctatctcatgcttgctactatgtcccctgagcttcaaagaaaatatgatgcattggatgctcatacgataatcacgagactacgtaacatgtttgaggaccaagcaagagctgagaggtttaatacctcaaagtccttggttgcgtgcaggctagcagaaggtaatccaatgagcccacatgtgatcaaaatgattggttacgccgagagtctggataagcttggttttccccttagccgagagttggttactgatttgattctccagtcgctacctcccagctttgagccgttcataatgaatttcaatatgaacaacctgaacaggaccttggcagaattgcatgggatgctaaagactgctgaggaaagcattaagaaaaactccaaccatgtgatagttgtgcataagcgcaagcccaacaacaagaaaagttgtcaaaagagaaagctaaactctgatgagatcacgagtactagcaactctaagaccaaggttcaaaagacagggcccgctaaggatgcagagtgcttcttttgcaaggagacaggtcattggaagagaaactgtaagaaatacctagagcagttcaagcagaagcagcaggatggaaagagttccacctcagtctataacattaatgcaaaaaggcaacgtcctaatgatttgaatcccacttttatttggcattgtcgcttgggtcatataaatgagaaacgcatgcagaagcttcatagagatggacttctacactcttttgattttaaatcatttgagacatgcgaatcttgtttacttggcaaaatgacaaaggcacctttcacgggtcaaagtgaaagggcaagtgaactattgggactagtacatactgatgtatgtggaccaatgagctcaactgccaaaggtggttttgggtactttattaccttcaccgctgactttagtagatatggttatgtctacttaatgaggcataagtttgagtactttgaaaagttcaaggaatttcagaatgaggtacaaaatcatttgggcaagacaatcaagtatctacgatttgatcgtggtggaaagtacttgagcctagaatttggggatcatctaaaggaatgtgcaattgttccacaactcactccgccaggaacgcctcagtggaatggggtgtctgaacgaaggaatcgtacattgttggacatggtacgatcaatgatgagccaaactgatctgccgctaagcttttggggttacgctctagagacagttgcgttcacactaaacagggttccatcaaaatcagtggataagacaccatatgagatatggactggaaagcgtcccagtttgtctttcttaaagatttggggctgtgtggtctatgtaaaacgtttgcaatcagacaaactcacacctaaatcagataaatgcttctttgtgggatatcctaaggaaacgaaaggatattatttttataatcgggaagagggcaaagtgtttgtcgcccgacacggtgttttcttggaaaaagagtttatttcaagacaggatagtgggagcatggtgcaacttgaagaaattcaagaaacaccggaaaacgcttcaacgtccacacaaccacaagctgagcaagatgttgttcaacaggttgaacaagttgttgttgaaccagttgtggaagcaccggcttcacgaagatccgataggatacgacgtacacctgcgagtttggaactattggttgatccacctaatggtgtaaaagccattgagtgcaaatgggtctttaagaaaaagacagatgtagatggaaattttaacatctacaaggcacgattggtggcgaaaggtttcagacaaattcaaggtgttgattatgatgaaactttctcaccagtcgccatgctaaaatctattcggattgttttagcgattgctgcctatttcgattatgagatatggcaaatggatatcaaaatagctatccacaatggaaatctcgatgaggatgtgtacatgacacaacccaagggatttgttgatccacaatcagctaaaaagatatgcaaattgcagaaatccatttatgggttgaagcaagcatctcggagttggaatattcgtcttgacaaagtagtcaaggcgttgggctttgtcaaaaacgaagaagaggcttgtgtatacaagaagattagtgggagcgcactggtgtttctaatcctatatgtagatgacatattattgattgggaacgatattcttatgcttgaatccgttaagacatcgttgaaaaatagtttttcaatgaaggacttaggggaagcaacatatattctgggcataaggatctatagagatagatcaaagaggctaattggattaagccagagtacatacattgaaagattcatcatgtatgctatgctatgtacacgtccagatgtttcatattcacttagtgcaacaagccgataccaatcagatccatgtgagagtcactggatagctgtaaagaatatcctgaagtacttgagaagaactaaggatatgttcctagtcaatggaggacaggaagagctcgttgtaaatggttacaccgacgcaagcttccaaactgacaaagatgattttagatcacagtctggatttgtgttctgcctgaatggaggcgctgtgagttggaagagttccaagcaagatacagtgtctaattatacaacagaagccgaatacattgcctcttctgaagcagcaaaggaggctgtttggataaagaaattcatttctcgactaggtgtggtgactagtgcttctagcccaatggacctctattgcgataatagtggtgccattgcgcaagccaaggagcctagatcgcatcaaaagtccaaacacattttacggcggtatcacctcattcgcgagatagtgggtagaggagatgtgaagatatgcaaaatacatacggatttgaatgttgcagatccgttgacaaagccactccctcagcctaagcatgaggcacacactagggcaatgggtatatga

SEQ ID NO: 14469 - DNA, 1707 bp, Oryza sativa
  Clone ID: TFbOSC2957j.C1.o1.fg
atggagatccaatatgagcatacttcgtatagggatccaaataggagtcttacgggccttggaggcccgagtgatggatcctatatattcgtgaggggtgtgaccggtggaggcattgcatcaccgcgtcgagtggtaacgatatatgatctaatacttgcttggttcctggtttatgcgatagaaatgtttgatttatgctatcgtagcttacgcttatcccaacagtggatagatgtcggacatctatgtgcggagattattggtttacttgacaagatcatggcagctcctgcatcatccaattttaacttgcggtctattcttgagaaagagaagttgactggaataaacttcatggattggtatcgcaacctgagaactgttctcaggcaagagcacaaagagtttgtgcttacagagccttttccagctaacttgcccaacaatgctcctgctgctcaacgtagggagcatgaaaagcgatgcaatgattatcttgatacaagctatctcatgcttgctactatgtcccctgagcttcaaaggaaatatgatgcattggatgctcatacgataatcacgagactacgtaacatgtttgaggaccaagcaagagctgagaggtttaatacctcaaagtccttggttgcgtgcaggctagcagaaggtaatccaatgagcccacatgtgatcaaaatgattggttacgccgagagtctggataagcttggttttccccttagccgagagttggttactgatttgattctccagtcgctacctcccagctttgagccgttcataatgaatttcaatatgaacaacctgaacaggaccttggcagaattgcatgggatgctaaagactgctgaggaaagcattaagaaaaactccaaccatgtgatagttgtgcataagcgcaagcccaacaacaagaaaagttgtcaaaagagaaagctaaactctgatgagatcacgagtactagcaactctaagaccaaggttcaaaagacagggcccgctaaggatgcagagtgcttcttttgcaaggagacaggtcattggaagagaaactgtaagaaatacctagagcagttcaagcagaagcagcaggatggaaagagttccacctcagtctataacattaatgcaaaaaggcaacgtcctaatgatttgaatcccacttttatttggcattgtcgcttgggtcatataaatgagaaacgcatggagaagcttcatagagatggacttctacactcttttgattttaaatcatttgagacatgcgaatcttgtttacttggcaaaatgacaaaggcacctttcacgggtcaaagtgaaagggcaagtgaactattgggactagtacatactgatgtatgtggaccaatgagctcaactgccaaaggtggttttgggtactttattacctttaccgctgactttagtagatatggttatgtctacttaatgaggcataagtctgagtactttgaaaagttcaaggaatttcagaatgaggtacaaaatcatttgggcaagacaatcaagtatctacgatttgatcgtggtggaaagtacttgagcctagaatttggcaatcatctaaaggaatgtgcaattgttccacaactcactccgccaggaacgcctcagtggaatggggtgtctgaacggaggaatcgtacattgttggacatg

SEQ ID NO: 14470 - DNA, 1008 bp, Oryza sativa
  Clone ID: TFbOSC33768j.C1.o1.fg
atggtcttcctcgtatggttgaagatgatggatgatactctgacaactggaagcatcaggagtacagagggggaaaagagacgtttagcagaggcttcacttgcctacaactgtgagaggatagatgtcggacatctatatgcggagattattggtttacttgacaagatcatggcagctcctgcaccatacaattttatcttgcagtctattcttgagaaagagaagttgactggaacaaacttcatggattggtattgcaacctgagaattgttctcaggcaagagcacaaagagtttatgcttacacaaccttttccagctgacttgcccaacaatgctcctgttgctcaacgtagggagcatgaaaggcgatgcaatgaataccttgatataagctgtctcatgcttgctactatgtcccctgagcttcaaaggcaatatgaggcattggatgctcatatgataatcacgggactacgtaacatgtttgaggaccaagcaagagctgagtggtttaatacctcaaagtccttgtttgcgtgcaggcttgtagaagaattgcatgggatgctaaagactgtcgaggaaagcattaagaaaaactccaaccatgtgatggttatgcataagcgcaagcccaacaacaagaagagtggtcaaaagagaaagctaaactctgatgagatcacgagtacaagcagctctaagaccaaggttcaaaagacagggcccgctaaggatgcagagtgcttcttttgcaaggagacaggtcattggaagagaaactgtaagaaatacctacagcagctcaagcagaagcagcaggatggaaagagttccacctcaggtattaatgttatagaaattaatcttgctacttcctttactgattcttgggtatttgataccgggtcagttgctcacatatgcaaatcgttgcaagggctgaaaagaagtaggagcttagtgtcacaccctgaagttcctttcccaagcctaaattga

SEQ ID NO: 14471 - DNA, 2643 bp, Oryza sativa
  Clone ID: TFbOSC400763j.C1.o50.fg
atggcgacggtgacgtcgggcgacggcatcgggcaaagcagcgtcggcagcaggcagcgggcgtcggcgatgggagcaggtggcgggcatcgattatggaagtgcatggccatgccaaaggtgattgaggagtcaatcacaagttatataatctatcaacagaagttgactgaaacaaacttcatggattggtatcgcaaccttagaattgttctcagtcaagagcacaaagagtttgtgcttagagagccttttccagctaacttgcccaacaatgcttctgctgctcaacaaagggagcatgaaaagcgatgcaatgattatcttgatataagctgtctcatgcttgctactatgtcccctgaacttcaaaggcaatatgaggcattggatgctcatacgataatcacgggactacgtaacatgtttgaggaccaagcaagagctgagaggtttaatacctcaaagtccttgtttgcgtgcaggcttgcagaagataaatgtgggcaaaagtctgccgcaaagacttatagtatcttagagtttgtgagagataatggtcgtgttcggatcaaatcaactggcacgctaatacatccgaaggcgaggaccttggcagaattgcatgggatgctaaagactgccgaggaaagcattaagaaaaactccaaccatgtgatggttatgcataagcgcaagcccaacaacaagaagagtggtcaaaagagaaagctaaactctgatgagatcacgagtactagcaactttaagaccaaggttcaaaagacagggcccgctaaggatgcggagtgcttcttttgcaaggagacagggcattggaagagaaactgtaagaaatacctagagcagctcaagcagaagcagcaggatggaaagagttccacctcaggtattaatgttatagaaattaatcttgctacttcctctactgattcttgggtatttgataccgggtcagttgctcacatatgcaaatcgttgcaggggctgaaaagaagtaggagcttagcaagagacgaagtggatattcgcgtgggcaatggaccaagagttgctgctgttacgatatggtatgtctacttaatgaggcataagtctgagtcctttgaaaagttcaaggaatttcagaatgaggtacaaaatcatttgggcaagacaatcaagtatctacgatctgatcgtggtggagagtacttgagcctagaatttggcaatcatctaaaggaatatggaattgttccacaactcactccgccaggaacgcctcagtggaatggggtgtctgaacggaggaatcgtacattgttggacatggtgcgatcaatgatgagccaaactgatctgccactaagcttttggggttacgctctagagacagctgcattcacactaaacagggttccatcaaaatcagtagataagacaccatatgagatatggactgggaagcgtcccagtttgtctttcctaaagatttggggttgtgagttgtggaagcaccggcttcacgaaggtccaataggatatggcatacacctgcgagcgattgctgcctatttcgattatgagatatggcaaatggatgtcaaaacagctttcctcaatggaaatctcgatgaggatgtgtacatgacacaacccaagggatttgttgatccacaatcagctaaaaagatatgcaaattgcagaaatccatttatgggttgaagcaagcatctcggagttggaatattcgttttgacaaagtagtcaaggcgttgggctttgtcaaaaatgaagaggagtcttgtgtatacaagaagattagtgggagcgcactggtgttgaagaggttcaacatgcaagattctaagaaaggtttcttaccaatgtcacatggcattaatcttggcaagaatcagtgtcctcaaacgactgatgagcgaaacaagatgagtgtgattccatatgcctcggcaatcggatccatcatgtatgctatgctatgtacacgtctagatgtttcatatgcacttagtgcaacaagccgataccaatcagatccaggtgagagtcactggatagctgtaaagaatatcctaaagtacttgagaagaactaaggatatgttcctagtctatgcaggacaggaagagctcgttgtaaatggttacactgacgcaagcttccaaaccgacaaagatgattttagatcgcagtctggatttgtgttctgcctaaatggaggcgctgtgagttggaagagttccaagcaagatacagtggctgattctacaacagaagccgaatatattgccgcttctgaagcagcaaaggaggctgtttggataaagaaattcgtttctcaactaggtgtgatgactagtgcttctagccctatggacctctattgcaataatagtggtgccattgcacaagccaaggagcctagatcgcatcaaaagtccaaacacattttacggcggtatcacctcattcgcgagatagtgggtagaggagatgtgaagatatgcaaaatacatacagatttgaatgttgcagatccgttgacaaagccactccctcagcctaagcatgaggcacacactagggcaatgggtataagatacattcatgattga

SEQ ID NO: 14472 - DNA, 1980 bp, Oryza sativa
  Clone ID: TFbOSC400770j.C1.o42.fg
atggcacctcctgtaccatccaattttaacttgcggtctatttttgagaaagagaagttgactggaacaaacttcatggattggtatcgcaacctgagaattgttctcaggcaagagcacaaagagtttgtacttacacagccttttccagctgacttacccaacaatgctcctgctgctcaacgtagggagcatgaaaggcgatgcaatgaataccttgatataagctgtctcatgcttgctactatgtcccctgagcttcaaaggcaatatgaggcattggatgcccatacgataatcacgggactacgtaacatgtttgaggaccaagcaagagctgagaggtttgcagaaggtaatccagtgagcccacatgtgatcaaaatgattggttacaccgagagtctggataagcttggttttccctttagccgagagttggctactgatttaattctccagtcgctccctcccagctttgagctgttcataatgaatgtcaacatgaataacctgaacaggaccttgacagaattgcatgggatgttaaagactgccgaggaaagcattaagaaaaactccaaccatgtgatggttatgcataagcgcaagcccaacaacaagaagagttgtcaaaaaagaaagctaaactctgatgagatcacgagtactagcaactctaagaccaaggttcaaaagacagggcccgctaaggatgcagagtgcttcttttgcaaggagacaggtcattggaagagaaactgtaagaaatacctagagcagctcaagcagaagcagcaggatggaaagagttccatcttaggtattaatgttatagaaattagtcttgctacttactctactgattcttgggtatttgataccggatatggttatgtctacttaatgaggcataagtctgagtcctttgaaaagttcaaggaatttcagaatgaggtacaaaattatttgggcaagacaatcaagtatctacgatctgatcgtggtggagagtacttgagccttgaatttggcaatcatctaaaggagtgtggaattatttcacaactcactccgccaggaacgcctcagtggaatggagtgtctgaacggagtaatcgtacattgttgaacatgttgtggaagcactggcttcacgaaggtccgaaaggatacggcgtacacctgcgagacaaagttgaacctactacctatgacgaagcaatggtgggaccagactctgagaaatggcttgaagccatgaaatccgaaatagaatccatgcatgtcaatcaagtttggaacttggttaatccacctgatggtgtaaaagccattgagtgcaaatgggtctttaagaaaaagacagatgtagatggaaatgttcacatttacaagacacgattggtggtgaaaggtttcagacaaattcaagatgtttcatatgcacttagtgcaacaagccgataccaatcagatccaggtgaaagtcactggatagctgtaaagaatatcctgaaatacttgagaagaactaatgatacgttcctagtctatggaggagaggaagagctcgttgtaaatggcgctatgagttggaagagttctaagcaagatacagtggctgattctacaagagaagccgaatacattgtcgcttctgaagcagcaaaggaggctgtttggataaagaaatttgtttctcaactaggtgtgatgactagtgcttctggccctatggacctctattgcgataatagtggtgccattgtgcaaaccaaggagcctagatcgcatcaaaagtccaaacacattttacaacggtatcacctcattcgtgagatagtaggtagaggagatgtgaagatatgcaaaatacatacggatttgaatgtcgcagatcagttgacaaagccactacctcagccaaagcatgaggcacacactagggcaatgggaataagatacattcatgattga

SEQ ID NO: 14473 - DNA, 3968 bp, Oryza sativa
  Clone ID: TFbOSC400770j.C1.o70.np
atcatggcagctcctgtaccatccaattttaacttgcggtctattcttgagaaagagaagttgaatggaacaaactttatggattggtatcgcaacctaagaattgttctcaggcaagagcacaaatagtttgtgcttgcacagccttttccagctgacttgcccaacaatgctcctgctgctcagcgtagggagcatgaaaagcgatgcaatgattattttgatataagctgtctcatgcttgctactatatcccctgagcttcgaaggcaatatgagacattggatgctcatacgataatcacgggactacataacatgtttgaggaccaagcaagagctgagaggtttaatacctcaaattccatgtttgtgtgcaggcttgcagaaggtaatccagtgagcccacatgtgatcaaaaatgattggttacaccgagagtctggaaaaacttggttttccccttagccgagagttggctactggtttgattctccagtcgcttcctcctagctttgagccattcatcttgaatttcaacatggacaacctgaataggaccttggccgaattgcatgggatgctaaagactgcagatgaaagcattaagaaaaactcaaccatgtgatggttatgcataagcgcaaacccaataacaagaagagtggtcaaaagagaaagctaaactctgatgagatcacgagtactagcaactctaaggtcaaggttcaaaagatagggcccgctgaggatgcagagtgtttcttttgcaaggaaacaggtcattggaagagaaattgtaagaaataccttgagcagctagcagatctcgcattccaaggtttatcaacacctatcaacaactactctcggcgcctcgctaccctctttcctgaggtttttacttatcatccggcggaatttggcacctgacgcggggctgcatcggtttagttcgatctccggcgaaggggtaagtcctacgttccgccggccctggtgaatctattggctacgttggtgttgttcaagccttcaaggctgcatcgcttcgatctcttggatcgctctggtttggttggtatatttgcctacctgatatctcaattctatctctaattgcattgtgtttagagacgcatcggtttagttggaactatctcggttaggtccgatcttctgtcttagctgatatatctctacaatcacaatgttgttcttaatagcttatacattgtgaatcttgatggatgttcagtctataacattaatgcgaaaagacaacgtcctaatgatttgaatcccacttttatttggcattgtcacttgagtcatataaaagagaaacgcatggagaagcttcataaagatgaagatggatttctatactcttttgattttgaatcatttgagacatgtgaatcgtgtttacttgacaaaacgacaaaggcacctttcacggatcaaagtgaaagggcaagtgaactattggcactagtacatactgatgtatgtggaccaatgagtcaactaccagaggtggttttgggtactttattacctttaccgattactttagtagatatggttatgtctacttaatgaggcataagtctgagtcctttgaaaagttcaaggaatttcataatgaggtacaaaatcatttggtcaagacaatcaagtatctacgatctgatcgtggtggagagtacttgagccttgaatttggcaatcatctaaaggagtgtggaattgttccacaactcactccgctaggaacgcctcaatggaatgggttgtctgaacggaggaatcgtatgttgttggacatggtgcgatcaatgatgagccaaactgatctcccgctaagcttttggggttacgctttagagacagctgcgttcacactaaacaggattccatcaaaatcagtggataagacaccatattagatatggacagggaagcgtcctagtttgtctttcctaaagatttggggctgtgaggcctatgtaaaacgtttgcaatcggacaaactcacacctaaatcagataaatgcctctttgtggggtatcctaaggaaacgaaaggatattatttttataatcgggaagaaggcaaagtgtttgtcgcccgacacggtgttttcttggaaaaagagtttatttcaagaaaggatagtgggagcatggtgcgacttgaagaaattcaggaaacaccggaaaacgcttcaacgtccacacaaccacaacaaggtgagcaagatgttggtcaacaggttgaacaagtggttgttcaaccagctgtggaagcaccggcttcacgaagatccgaaaggaaacggcgtacacctgcaacgtatgcgttgttaactacaagacaacgtgatatattgttgttagacaacgatgaacctactacctatgaggaagcaatggtgggaccagactctgagaaatggcttggagccatgaaatccgaaatagaatccatgcatgtcaatcaagtttgcaaattggttgatccacctgatggtgtaaaagccattgagtgtaaatgggtctttaagaaaaagacagatgtagatagaaatgttcacatctataaggcacgattggtggtgaaaggtttcagacaaattcaaggtgttgattatgatgaaactttctcgccagtcaccatgctaaaatctgttcggattgttttagcgattgatgcctatttcgattatgagatatggcaaatggatgtcaaaacagctttcctcaatggaaatctctatgaggatgtgtacatgacacaacccaagggatttgttgatccacaatcagctaaaaagatatgcgagttgcagaaatccatttatgggttgaagcaagtatctcggagctggaatattcgttttgacgaagtagtcaaggcattgggctttgtcaaaaacgaagaagagccttgtgtatacaagaagattagtgggagcgcactggtgtttctaatattatatgtagatgacatattgctgattgggaatgatattcctatgcttgaatccgtcaagacatcgttgaaaaatagtttttcaatgaaggacttaggggaagcagcatatattctgggcataaggatctatagagatacatcaaagaggctaattggattaagccagagtacgtacattgacaaggtgttgaagaggttcaacatgcaagattctaagaaaggtttcttaccgatgtcacatggcattaatcttggcaagaatcagtgtcctcaaacaagatgagtgtgattccatacgcttcggcaattggatccatcatatatgccatgttatgtacacgtccagatgtttcatatgcacttagtgcaacaagccgataccaatcagctctaggtgagagtcactggatagctataaagaatatcctgaagtacttgagaagaactaaggatatgttcctagtctatggaggacaggaagagctcgttgtaaatggttacactgatgcaagcttccaaaccgaccaaagatgattttagatcgtaatctggatttgtgttatgcctgaatggtggcgttgtgagttggaagagttccaagcaagatacagtcgctgattctacaacataagccgaatacattgcctcttctgaagtagcaaaggaggctgtttggataaagaaatttgtttctcaattgggtgtgatgactagtgcttccagccctatggacctctattgcgataatagtggtgccattgcgcaagccaaggagcctagatcgcatcaaaagtccaaacacattttacggcggtatcacctcatacgcgagatagtgggtagaggatttgtgaagatatgcaaaatacatacagatttgaatgttgcagatccgttgacaaagccactccctcagcctaagcatgaggcacacaatagggcaatgggtataagatacgtgcatgat

SEQ ID NO: 14474 - DNA, 2991 bp, Oryza sativa
  Clone ID: TFbOSC401355j.C1.o12.fg
atggtcaccgccggcgaccaccggcgcggcggagcggcacccgagagagcggagggaagggggaaggcgaaagggcggtcttcggctcaccccgggtcgacggcgacgacgggaacggcggccgaagcggaggaaggcggcggcgcgattcgggacggcgagggcgacggtgctccggcggtcggcgagcgaatcggaggagcggacggggtcgacgacgacgcggcgaagccgaaggaggtgacgccgagtggggaggaggtccggagcgacgacggcggcgaaccggagctcggcggcgacggcggagagaaggtgcgacggatagatgtcggacatctatatgcggagattattggtttacttgacaagattatggcagctcatgcaccatccaattttaacttgcggtctattcttgagaaagagaagttgactggaacaaacttcatggattggtatcgcaacctgagaattgttctcaggcaagagcacaaagagtttctgcttatacagccttttccagctgacttgcccaacaatgctcctgctgctcaacgtaggaagcatgaaaggcgatgcaatgattaccttgatataagctgtctcatgcttgctactatgtcccctgagcttcaaagccaatatgaggcattggatgctcatacgataatcacgggactacgtaacatgtttgaggaccaagcaagagctgagaggtttaatacctcaaagttcttgtttgcgtacaggcttgcacaaggtaatccagtgagcccacatgtgatcaaaatgattggttacaccgagagtctggataagcttggttttccccttagccgagagttggctactgatttgattctccagtcgctccctcccagctttgagccgttcattatgaatttcaacatgaacaacctgaacaggaccttggcagaattgcatgggatgctaaagactgccgaggaaagcattaagaaaaactccaactatgtgatggttatgcataagctcaagcccaacaacaagaagagtggtcaaaagagaaagctaaactctgatgagatcacgagtactagcaactgtaagaccaaggttcaaaagacagggcccgctaaggatgcagagtgcttcttttgcaaggagacaggtcattggaagagaaactgtaagaaatacctagagcagctcaagcagaagcagcaggatggaaagagttccacctcagctttgtgtaagaacgttatctctgcttcttgtttgcaagcagagggttatggttttagatctgtggacaatggttgttcagtctattataatgacattttctatttccatgcacccatgatgaatggcttatacattgtgaatcttgatggatgttcagtctataacattaatgcaaaaagacaacgtcctaatgatttgaatcccacttttatttggcattgtcgcttgggtcatataaatgagaaacgcatggagaagcttcatagagatggacttctacactcatttgattttgaatcatttgagacatgtgaatcttgtttacttggcaaaatgacaaaggcacctttcacgggtcaaagtgaaagggcaagtgaactattggcactagtacatactgatgtatgtggaccaatgagctcaactgccagaagtggttttgggtactttattacctttaccgatgactttagtagatatggttatgtctacttaatgaggcataagtctgagtcctttgaaaagttcaaggaatttcagaatgaggtacaaaatcatttgggcaagacaatcaagtatctacgatctgatcatggtggagagtacctgagacttgaatttgagtttatttcaagaaaggatagtgggagcatggtgcgacttgaagaaattcatgaaacaccagaaaacgcttcaacgtccacacaaccacaacaagctgagcaagatgttgttcaacaggttgaacaagttgttgttgaaccagttgtggaagcaccggcttcacgaaggtccgaaaggatacggcgtacacctgcgaggtatgcattgttaactacaggacaacgtgatatattgttgttagacaacgatgaacctactacctatgaggaagcaatgaaatccattcatgggttgaagcaagcatctcggagttggaatattcgttttgatgaagtagtcaaggtgttaggctttttcaaaaacgaacaagagccttgtgtatacaagaagattagtggaagcgcactggtgtttctaatcctatatgtagatgacatattattgattgggaatgatattcctattcttgaatccgttaagacattgttgaaaaatagtttttcaatgaaagacttaggggaagcagcatatattctgggcataaggatctatagagatagatcaaagaggctaattggattaagccagagtacatacattgacaaggtgttgaagaggttcaacatgcaagattctaagaaaggtttcttaccgatgtcacatgacattaatcttggcaagaatcagtgtcctcaaacgactgatgagcgaaacaagatgagtgtgattccatatgcctcggcaatcggatccatcatgtatgctatgctatgtacatgtccagatgtttcatatgcacttagtgcaacaaaccgataccaatcagatccaggtgagagtcactggatagctgtaaagaatatcttgaagtacttgagaagaactgaggatatgttcctagtctatggaggacaggaagagctcgttgtaaatggttacactgatgcaagcttccaaaccgacaaagatgattttagatcgcggtctggatttgtgttctgcctcaatggaggcgttgtgagttggaagagttccaagcaagatacagtggctgattctacaacagaagccgaatatattgccgcctctgaagcagcaaaggatgctgtttggataaagaaatttgtttcttaa

SEQ ID NO: 14475 - DNA, 4164 bp, Oryza sativa
  Clone ID: TFbOSC401416j.C1.o1.fg
atggagatccaatatgagcttacttcggatagggatccgaataggagtcctatgggccttggaggcccgagtgatggatcctatatattcgtgaggggtgtgaccggcggaggcattgcatcactactcactaaggctgagcgcgattgtgttcatcggatagtcagatgtccactggaaccgcacgccaatgagaaaaacgagccaatgagattgactcggtttcggcttaattcaattacgccgttaaggatagatgtcggacatctatatgcggagattattggtttacttgacaagatcatggcagctcctgcaccatccaaatttatcttgcggtctattcttgagaaagagaagttgactggaacaaacttcatggattggtatcgcaacctgagaattgttcttaggcaagagcacaaagagtttgtgcatacacagccttttccagctgacttgccaaacaatgctcctgctgctcaacgtagggagcatgaaaggcgatgcaatgaataccttgatataagctgtctcatgcttcctactatgtcccctgagcttcaaaggaaatatgaggcattggatgctcatatgataatcacgggactacgtaacatgtttgaggaccaagcaagagctgagaggtttaatacctcaaagtccttgtttgcgtgcaggcttgcagaaggtaatccagtgagcccacatgtgatcaaaatgattggttacaccgagagtctgcataagcttggctttccccttagccgagagttggctactgatttgattctccagtcgcttcctcccagctttgagccgttcataatgaattccaacatgaataacctgaacaggaccttgccagaattgcatgggatgctaaagactgccgagaaaagcattaagaaaaactccaaccatgtgatggttatgcataagcgcaagcccaacaacaagaaaagtggtcaaaagagaaagctaaactctgatgagatcacgagtactagcaactctaagaccaaggttcaaaagacagggcccgctaaggatgcagagtgcttcttttgcaaggagacgggtcattggaagagaaactgtaagaaatacctagagcagctcaagcagaagcagcaagatggaaagagttccacctcaggtattaatgttatagaaattaatcttgctacttcctctactgattcttgggtatttgataccgggtcagttgctcacatatgcaaatcgttgcaggggctgaaaagaagtaggagcttagcaagaggcaaagtggacattcgcgtgggcaatggagcaagagttgctgctgttgcggtcggcactatgccattatctttaccgtcaggattagttttggagttaaataattgttattgcattccagctttgtgtaagaacgttatctctgcttcttgttggcaagcagagggttatgattttagatctgtggacaatggttgttcagtctattataatgacattttctattgccatgcacccatgatgaatggcttatacattgtgaatcttgatggttgtttagtctataacattaatgcaaaaaggcaacgtcctaatgatttgaatcccacttttatttggcattgtcgcttgggtcatataaatgagaaacgcatggagaagcttcatagagatggacttctacactcgtttgattttgaatcatttgagacatgtgaatcttgtttacttagcaaaatgacgaaggcacctttcacgggtcaaagtgaaagggcaagtgaactattgggactagtacatactgatgtatgtggaccaatgagctcaactgccagaggtggttttgggtactttattacctttaccgatgactttagtagatatggttatgtctacttaatgaggcataagtctgagtcctttgaaaagttcaaggaatttcaaaatgaggtacaaaatcatttggacaagacaatcaagtatgtacgatctgatcgtggtggagagtacttgagccttgaatttggcaatcatctaaaggagtgtggaattgttctacaactcactccgccaggaacgcctcggtggaatggggtgtctgaacggaggaatcgtacattgttggacatggtgcgatcaatgatgagccaaactgacctgccgctaagcttttgggattacgctctagagacagctgcgttcacactaaacagggttccatcaaaatcagtggataagacaccatatgagatatggactgggaagcgtcccagtttttctttcctaaagatttggggctgtgagttctatgtaaaacgtttgcaatcggacaaactcacacctaaatcagataaatgcttctttgtggggtatcctaaggaaatgaaaggatattatttttataaccgggatgagagcaaagtgtttgtcgcccgacacagtgttttcttggaaaaagagtttatttcaagaaaggatagtgggaccatggtgcaacttgaagaaattcaggaaacaacggaaaacgcttcaacgtccacacaaccacaagctaagcaagatgttgttcaacaggttgaacaagttgttgttgaactagttgtggaagcaccggcttcacgaaggtccgaaaggatatggtgtacaactgcgaggtatgcgttgttaactacaggacaacgtgatatattgttgttagacaacgatgaacctactacctatgagaaagcaatggtgggaccagactctgagaaatggcttggagccatgaaatccgaaatagaatacatgcatgtcaatcaagtttggaacttggttgatccacctgatggtgtaaaagccattgagtgcaaatgggtctttaagaaaaagacagatgtagatggaaatgttcacatctacaaggcacgattggtggcgaaaggtttcagacaaattcaaggtgttgattatgatgaaactttctcgccagtcgccatgctaaaatctattcgaattgttttagcaattgctgcctatttcgattataagatatggcaaatggatgtcaaaacagctttcctcaatggaaatctcgatgaggatgtgtacatgacacaacccaagggttttgttgatccacaatcagctaaaaagatatgcaaattgcagaaatccatttatgggttgaagcaagcatctcggagttggaatattcgttttgacgaagtagtcaaggcgttgggctttgtcaaaaacaaagaagagccttgtgtatacaagaagattagtgggagcgcactggtgtttctaatcctatatgtagatgacatattattgattgggaacgatattcctatgcttgaatccgttaagacatcgttgaaaaatagtttttcaatgaaggacttaggggaaacagcatatattctgggcataaggatctatagagatacatcaaagaggctaattggattaagccagagtacatacattgacaagaatcagtgtcctcaaacgactgatgagcgaaacaagatgagtgtgattccatatgcctcggcaatcggatccatcattgcaacaagccgataccaatcagatccaggtgagagtcgctggatagctgtaaagaatatcctggagtacttgagaagaagtaaggatatgttcctagtctatggaggacaggaagagcgcgttgtaaatggttacaccgacgcaagcttccaaaccgacaaagatgattttagatcgcagtctggatttgtgttctgcctgaatggaggcgctgtgagttggaagagttccaagcaagatatagtggttgattctacaacagaagccgaatacattgccgcttctgaagcagcaaagaaggctgtttggataaagaaattcgtttctcaactaggtgtgatgactagtgcttctagccctatggacctctattgcgataatagtagtgccattgcgcaagccaaggagcctagatcgcatcaaaagtccaaacacattttacggcggtatcacctcattcgcgagatagtggatagaggagatgtgaagatatgcaaaatacatacggatttgaatgttgcagatccgttgacaaaaccactccctcagcctaagcatgaggcacacactagggcaatgggtataagatacgttcatgattga

SEQ ID NO: 14476 - DNA, 986 bp, Oryza sativa
  Clone ID: TFbOSC401555j.C1.o4.gm
atgtcccctgagcttcaaaggcaatatgaggcattggatgctcatacgataatcacgggactacgtaacatgtttgaggaccaagcaagggctgagaggtttaatacctcaaagtccttgtttgcgtgcaggcttgcagaaggtaatccagtgagcccacatgtgatcaaaataattggttacaccgagagtctggataagcttggctttccccttagccaagagttggctactgatttgattctccagtcgctccctcccagttttgagccattcataatgaatttcaacatgaacaacctgaacaggaccttggcagaattgcatgggatgctaaagactgccgaggaaagcattaagaaaaactccaaccatgtgatggttatgcataagcgcaagcccaacaacaggaagagtggtcaaaagagaaagctaaactctgatgagatcacgagtacaagcaactctaagaccaaggttcaaaagacagtgcccgctaaggatgcagagtgtttcttttgcaaggagacaggtcattggaagagaaactgtaagaaatacctagagcagctcaagcagaagcagcaggatggaaagagttccacctcaggggctgaaaagaaatatggttatgtctacttgatgaggcataagtctgagtcctttgaaaagttcaaggaatttcaaaatgagatacaaaatcatttgggcaagacaatcaagtatctacgatctgatcgtggtggagagtacttgagccttgaatttggcaatcatctaaaggagtgtggaattgttccacaactcactccgccaggaacgcctcagtggaatggggtgtctgaacggaggaatcgtacattgttggacatggaaacaccagaaaacgctccaacgtccacacaaccacaagctgagcaagatgttgttcaacaggttgaacaagctgttgttgaaccagttgtggaagcaccggcttcacgaag

SEQ ID NO: 14477 - DNA, 3288 bp, Oryza sativa
  Clone ID: TFbOSC401834j.C1.o18.fg
atgccaaaggtgattgaggagtcaatcacaagttactatcaacagatcatggcagctcctgcaccatccaattttaacttgcggtctattcttgagaaagagaagttcactggaacaaacttcatggattggtatcgcaacctgagaattgttctcaggcaagagcacaaagagtttgtgcttacagagtcttttccagctaacttgcccaacaatgctcctgctgctcaacgtagggagcatgaaaagcgatgcaatgattatcttgatataagccgtctcattcttgctactatgtcccctgagcttcaaaggcaatatgaggcattggatgctcatacgataatcacgggactacgtaacatgtttgagggccaagcaagagctgagaggtttaatatctcaaagtccttgtttgcgtgcaggctagtagaaggtaatccagtgagcccacatgtgatcaaaatgattggttacaccgagagtctggataagcttggctttccccttagccgagagttggctactgatttgattctccaatcgctccctcctagctttgagccgttcataatgaatttcaacatgaacaacctgaatagggccttggtagaattgcctgggatgctaaagactgccgaggaaagcattaagaaaaactccaaccatgtgatggttatgcataagcgcaagcccaacaacaagaaaagtggtcaaaagagaaagctaaactctgatgagatcacgagtactagcaattctaagaccaaggttcaaaagacagggcccgctaaggatgcagagtgcttcttttgcaaggagacaggtcattggaagagaaactgtaagaaatacgtagagcagctcaagcagaagcagcaagatggaaagaattccacctcagagggttatggttttagatctgtggacaatggttgtccagtctattataatgacattttctacttccatgcacccatgatgaatggcttatacattgtgaatcttgatggatattcagtctatgacattaatgcaaaaaggcaacgtcctaatgatttgaatcccacttttatttggcattgttgcttgggtcatataaatgagaaacgcatggagaagcttcatagagatggacttctacactcttttgattttgaatcatttgagacatgcgaatcttgtttacttggcaaaatgacaaaggcacctttcacgggtcaaagtgaaagggcaagtgaactattgggactaatacatactgatgtatgtggaccaatgagctcaactgacagaggtggttttgggtactttattacctttatcgatgactttagtagatatggttatgtctacttaatgaggcataagtctgagtcttttgaaaagttcaaggaatttcagaatgaggtacaaaatcatttgggcaagacaatcaagtatctacgatctgatcgtggtggagagtacttgagcctagaatttggcaatcatctaaaggaatgtggaattgttccacaactcactccgccaggaatgcctcagtggaatggggtgtctgaacggaggaatcgtacattgttggacatggtgcgatcaatgatgagccaaactgatctgccgctaagcttttggggttacgctctagagacagctgcattcacactaagcagggttccatcaaaatcagtggataagacaccatatgagatatggactgggaagcgtcccagtttgtctttcctaaagatttggggctgtgaggtctatgtaaaacgtttgcaatcggacaaactcacacctaaatcagataaatgcttctttgtggggtatcctaaggaaacgaaaggatattatttttataatcaggaagagggcaaagtgtttgtcgcccgacacggtgttttcttggaaaaagagtttatttcaagaaaggatagtgggagcatgttgtggaagcaccggcttcatgaaggtccgataggatacggcgtacacctgcgagacaatgatgaacctactacctttgaggaagcaatggtgggaccagactctgagaaatggtttggagccatgaaatccgaaatagaatccatgcatgtcaatcaagtttggaacttggttgatccacctgatggtgtaaaagccattgagtgcaaatgggtctttaagaaaaagacagatgtagatggaaatgttcacatctacaaggcacggttggtggcgaaaggtttcatctacaaggcacggttggtggcgaaaggtttcagacaaattcaaggtgttgattatgatgaaactttctcgccagtcgccatgctaaaatctattcggattgttttagcgattgctgcctatttcgattatgagatatggcaaatggatgtcaaaacagctttccttaatggaaatcccgatgaggatgtgtacatgacacaacccaagggttttgttgatccacaatcagctaaaaagatatgcaaattgcagaaatccatttatgggttgaagcaagcatctcggagttggaatattcgttttgacgaagtactcaaggcgttgggctttgtcaaaaacgaagaagagccttgtgtatacaagaagattagtgggagcgcactggtatttctaatcctatatgtagatgacatattattgattgggaacgatattcctatgcttgaatccgttaagacatcattgaaaaacagtttttcaatgaaggacttaggggaagcagcatatattctgggcataaggatctatagagatagatcaaagaggctaattggattaagccagagtacatacattgacaaggtgttgaagaggttcaacatgcaagattctaagaaaggtttcttaccgatgtcacatggcattaatcttggcaagaatcagtgtcctcaaacgactgatgagcgaaacaagatgagtgtgattccatatgcctcggcaatcggatccatcatgtatgctatgctatgtacacgtccagatgtttcatatgcacttagtgcaacaagccaataccaattagatccaggtgagagtcactggatagttgtaaagaatatcctgaagtacttgagaagaactaaggatatgttcctagtctatggaggactggaagagctcgttgtaaatggttacactgacgcacgcttccaaaccgacaaagatgattttagatcgcagtctggatttatgttctgcctgaatggaggcgctgtgagttggaagagttccaaacaagatacagtggctgattctacaacagaagcctaa

SEQ ID NO: 14478 - DNA, 2039 bp, Oryza sativa
  Clone ID: TFbOSC417977j.C1.o3.fg
atggcgtacggcacgacgagctcggcgaaccggcggagctcccttaaagcatccatggagaaccaagaaattgcagagattgtagcagttgttgcgtgcgagcagggtgtgtttcgatcgatgcgtattgcgtcgtacgagcaagctgaagctggtgacgttggcgagcgaggcgccggcagagctggaccgagttccgccggaggaagctggtccggcgagacgcagcagcctcttcgcctccaccgccgccgccgtggctccgtcctctccgtctccgccgcgtcggacggcgagcagtggcttcctcccacgtccacggtttgcctcctccatgtcgatcttgggttgatgtttgcggcccaatcccaatggattagcccgacttggattgaaaacccagcccacattcggttaagcctggaatgggttgaatccaggcctaccacggcctttcaccctcaccccggcccaggaaaaagaataacatctacgctgttgcggcgactgcggagacggcggcgacggaacgctctctcctccggctgtccgtccccctccctcgtggggtcgcgcctccctccagaggcacggcccgacgacagaagcgggatggcgtatgcgaaggaccaagcaagagctgagaggtttaatacctcaaagtctttgtttgcgtgcaggcttggagaaggtaatccagtgagcccacatgtgatcaaaatgattggttacaccgagagtctggataagcttggttttccccttagccgagagttggctactgatttaattctccagtcgctccctcccagctttgagctgttcataatgaatttcaacatgaacaacctgaacaggaccttggcagaattgcatgggatgctaaagactgccgaggaaagcattaagaaaaactccaaccatgtgatggttatgcataagcgcaagcccaacaacaagaagagtggtcaaaagagaaagctaaactttgatgagatcacgagtactagcaactctaagaccaaggttcaaaagacagggcgcgctaaggatgcagagtgcttcttttgcaaggagacaggtcattggaagagaaactgtaagaaatatctagagcagctcaagcagaagcagcaggatggaaagagttccaccttaggtattaatgttatagaaattaatcttgctacatcctctactgattcttgggtatttgataccagaggtggttttgggtattttattacctttaccgatgactttagtagatatggttatgtctacttaatgaggcataagtctgagtcctttgaaaagttcaaggaatttcagagtgaggtacaaaatcatttgggcaagacaatcaagtatatacgatctgatcgtggtggagagtacttgagccttgaatttggcaatcatataaaggagtgtggaattgttccacaactcactccgccaggaacgcctcagtggaatggggtgtctgaacggaggaatcgtacattgttggacatggtgcgatcaatgatgagccaaactgatctaccgttaagcttttggggttacgctctagagacagctgcattcacactaaacagagttccatcaaaatcagtggataagtcaccatatgagatatggatagggaagtgtcccagtttgtctttcctaaagatttggggttgtgaggtgtatgtaaaacgtttgcaatcggacaaactcacacctaaatcagataaatgcttctttgtggggtatcctaaggaaacgaaaggatattatttttataatcgggaagagggcaaagtgtttgtcgcccgacacggtgttttcttggaaaaagagtttatttcaagaaaggatagtgggagcatggtgcgacttgaagaaattcaggaaacaccggaaaacgcttcaacatgcacacaaccacaacaagctgagcaagatgttgttcaagaacaagttgttgttgaaccagttgtggaagcaccagcttcacgaaggtttgaaaggatacggcgtacacctgcgag

SEQ ID NO: 14479 - DNA, 3552 bp, Oryza sativa
  Clone ID: TFbOSC900184j.C1.o14.fg
atggagatccaatatgagcatacttcgtatagggatccaaataggagtcttacgggccttggaggcccgagtgatggatcctatatattcgtgaggggtgtgaccggtggaggcattgcatcaccgcgtcgagtggtaacgatatatgatctaatacttgcttggttcctggtttatgcgatagaaatgtttgatttatgctatcgtagcttacgcttatcccaacagtggatagatgtcggacatctatgtgcggagattattggtttacttgacaagatcatggcagctcctgcatcatccaattttaacttgcggtctattcttgagaaagagaagttgactggaataaacttcatggattggtatcgcaacctgagaactgttctcaggcaagagcacaaagagtttgtgcttacagagccttttccagctaacttgcccaacaatgctcctgctgctcaacgtagggagcatgaaaagcgatgcaatgattatcttgatacaagctatctcatgcttgctactatgtcccctgagcttcaaaggaaatatgatgcattggatgctcatacgataatcacgagactacgtaacatgtttgaggaccaagcaagagctgagaggtttaatacctcaaagtccttggttgcgtgcaggctagcagaaggtaatccaatgagcccacatgtgatcaaaatgattggttacgccgagagtctggataagcttggttttccccttagccgagagttggttactgatttgattctccagtcgctacctcccagctttgagccgttcataatgaatttcaatatgaacaacctgaacaggaccttggcagaattgcatgggatgctaaagactgctgaggaaagcattaagaaaaactccaaccatgtgatagttgtgcataagcgcaagcccaacaacaagaaaagttgtcaaaagagaaagctaaactctgatgagatcacgagtactagcaactctaagaccaaggttcaaaagacagggcccgctaaggatgcagagtgcttcttttgcaaggagacaggtcattggaagagaaactgtaagaaatacctagagcagttcaagcagaagcagcaggatggaaagagttccacctcagtctataacattaatgcaaaaaggcaacgtcctaatgatttgaatcccacttttatttggcattgtcgcttgggtcatataaatgagaaacgcatggagaagcttcatagagatggacttctacactcttttgattttaaatcatttgagacatgcgaatcttgtttacttggcaaaatgacaaaggcacctttcacgggtcaaagtgaaagggcaagtgaactattgggactagtacatactgatgtatgtggaccaatgagctcaactgccaaaggtggttttgggtactttattacctttaccgctgactttagtagatatggttatgtctacttaatgaggcataagtctgagtactttgaaaagttcaaggaatttcagaatgaggtacaaaatcatttgggcaagacaatcaagtatctacgatttgatcgtggtggaaagtacttgagcctagaatttggcaatcatctaaaggaatgtgcaattgttccacaactcactccgccaggaacgcctcagtggaatggggtgtctgaacggaggaatcgtacattgttggacatggtacgatcaatgatgagccaaactgatctgccgctaagcttttggggttacgctctagagacagttgcgttcacactaaacagggttccatcaaaatcagtggataagacaccatatgagatatggactgggaagcgtcccagtttgtctttcctaaagatttggggctgtgtggtctatgtaaaacgtttgcaatcagacaaactcacacctaaatcagataaatgcttctttgtgggatatcctaaggaaacgaaaggatattatttttataatcgggaagagggcaaagtgtttgtcgcccgacacggtgttttcttggaaaaagagtttatttcaagacaggatagtgggagcatggtgcaacttgaagaaattcaagaaacaccggaaaacgcttcaacgtccacacaaccacaagctgagcaagatgttgttcaacaggttgaacaagttgttgttgaaccagttgtggaagcaccggcttcacgaagatccgataggatacgacgtacacctgcgagtttggaactattggttgatccacctaatggtgtaaaagccattgagtgcaaatgggtctttaagaaaaagacagatgtagatggaaattttaacatctacaaggcacgattggtggcgaaaggtttcagacaaattcaaggtgttgattatgatgaaactttctcaccagtcgccatgctaaaatctattcggattgttttagcgattgctgcctatttcgattatgagatatggcaaatggatatcaaaatagctatccacaatggaaatctcgatgaggatgtgtacatgacacaacccaagggatttgttgatccacaatcagctaaaaagatatgcaaattgcagaaatccatttatgggttgaagcaagcatctcggagttggaatattcgtcttgacaaagtagtcaaggcgttgggctttgtcaaaaacgaagaagaggcttgtgtatacaagaagattagtgggagcgcactggtgtttctaatcctatatgtagatgacatattattgattgggaacgatattcttatgcttgaatccgttaagacatcgttgaaaaatagtttttcaatgaaggacttaggggaagcaacatatattctgggcataaggatctatagagatagatcaaagaggctaattggattaagccagagtacatacattgaaagattcatcatgtatgctatgctatgtacacgtccagatgtttcatattcacttagtgcaacaagccgataccaatcagatccatgtgagagtcactggatagctgtaaagaatatcctgaagtacttgagaagaactaaggatatgttcctagtcaatggaggacaggaagagctcgttgtaaatggttacaccgacgcaagcttccaaactgacaaagatgattttagatcacagtctggatttgtgttctgcctgaatggaggcgctgtgagttggaagagttccaagcaagatacagtgtctaattatacaacagaagccgaatacattgcctcttctgaagcagcaaaggaggctgtttggataaagaaattcatttctcgactaggtgtggtgactagtgcttctagcccaatggacctctattgcgataatagtggtgccattgcgcaagccaaggagcctagatcgcatcaaaagtccaaacacattttacggcggtatcacctcattcgcgagatagtgggtagaggagatgtgaagatatgcaaaatacatacggatttgaatgttgcagatccgttgacaaagccactccctcagcctaagcatgaggcacacactagggcaatgggtatatga

SEQ ID NO: 14480 - DNA, 6147 bp, Oryza sativa
  Clone ID: TFbOSC900190j.C1.o9.fg
atgccgcgctacaagcccgagtacttgtttggtaccgaaggatttgtccaagagttgcgtacgatgtccttcctcatagggtttggaattgcccttttgtatgccctgatccctcatgaccgtgatgaagagaagtgccgagtcaaagtcaccttgaacaacaatcgtgaagatattccatctgtgatgttcgaggctggaggaggaagctacattcatgcttgtcaggaggtggcaaggatcgccataggagagctccgagaaagctacaatgatcggttggccgacaccgagtatcgctaccatcctcgtcaaccccaaggaagtgatcgtggcagctaccttgaaccagctgggatcgagaacgacgctaccagaaggcatttggttgagatgctgtgggctatggatgaaacccgcactaagattgtgatagccgctcatgatcgtgaagattggaatcggggaaagatctgcaagctagaagacaagatggtgctcactcgcagcaacgggaagggccccaacagcaacaacaacaataacaacaacgccgagaatcccacactcgcccaggtcttggcccaacaagcacagttgatgaatctgatgatgcagcaactccaaaatcagcagaaccaagggaataatcatgcgcctcctcagaacatgttggcagagtttcttcgcgtgaggccacctgttttctctagcaccactaatccggtcgaagctggtgattggctgcacaccatagaaaagaagttggatctgctccagtgcacagaccaggagaaggtctccttcgcgtcacaccagctgcatggccctgcttcggagtggtgggatcacttccgcctcaacaggactacccctgaacctatctcttggcttgaattcaccactgctttccgaaagacgcatataccatcgggattggtgtctctcaagaacaaggagttcaggtcgctcacacagggttctcgcacagtcacggagtacctgcacgagtttaatcgtctagagaagttcttggaagaacttaatgatgagctctcttaccccctcatgactggagattatcatgatttccagaagctagtggataaagctattcgtcaggaggacaaatacaatcgcatggagcagaattttgcgggaaatcatgggatggaggtagaggagcttagacgtcctttgatggttagtactccgagtaaccaagcactctcctcacaacgtagcccctcgatcagaatagagatccaaggtgtacccttcctggccaaccttattctgttagaatctaaagatcttgatgtcatcctagggatggactggttagccagatataaaggtctgatagattgtgccaatagaaaagtaaccctcaccagcaatgaaggtcaagttgtaactgttcatgcattgccttctgaacctctaaggtcaagtctaaaccaaatgactttggaagagattcctatagtccaggagtaccccgatgtgttccctgatgatttgcctggtgccaccgttttctccaagatagatcttcgatcagggtatcaccagttgaggatcaaagaggaagatatacctaagacggcttttactactcggtacgggctgtttgaatgcacagttatgtcttttagacttaccaatgcccctgctttcttcatgaacttgatgaacaaggtgtttatggaatacctggataagttcgtggttgtctttattgatgatattctcatatattctcaaaccaaagaagagcatgaaaaacatcttcgtcttgcattagagaagctgcgagaacatcagttgtatgccaagtttagcaaatgtgaattctggttgtctgaagtgaagttccttggtcacgtcatctcagcaggaggagttgccattgatcctagtaacgtggaatccgtaaccaactggaaacaaccaaagatagtttcagagattcgcagtttcctaggcctcgcaggatattatcggaggtttatagagaatttttccaagattgctaagcccatgacacgattacttcaaaagcatgtaaagtacaagtggtcagaagaatgtgagcagagttttcaagagttgaagaatcgcttaatatcagctcttattttgattttgcctgatccaaagaagggttttcaagtgtattgcgatgcatccaagcttgggttaggttgtgttctgatgcaagatgggaaggtggttgcctatgcatctcgtcagttacgtccgcatgagaagaactaccctactcatgatcttgagttagctgcagtggttcatgcgttgaagatttggcgtcactaccttttcggcacccgtacagaggtgtatacggatcacaaaagtttgaagtatatctttacccaaccagatctgaacatgagacagcggagatggttggaatggattaaggattatgacctgggaattcattgtcacccgggaaaggctaatgtcgtagcagatgcccttagcaggaaaggcttttgtaatgctatggaaggccgacagttgcctttggaattgtgcaaggaatttgaaaggttgaatctgggaatcgtcagtaaaggctttgttgcagctttagaagcgaagcctactctcattgatcaagtcagagaagcccaaatcaatgatcctgatattctcgagatcaagaagaatatgagaagaggtaaagctatcggtttcttggaggatgagcaaggaactgtatggttgggtgagagaatctgtgtcctagacaacaaagatttgaaagacgcaattctaaaggaagcccatgatactttatactccattcaccctggtagtattaagatgtaccaggatctcaaggaaagattttggtgggcaagtatgaagcgtgaaattgcagaatacgtagcagtatgtgatgtttgtcagcgagtcaaggcggaacatcagaaacccgcaggtttgctgcagcctttgaagattcttgaatggaagtgggaggaaatcggtatggatttcattactagactacccagaacgtcgtcaggccatgactctatttgggtaatagtcgacagacttaccaaagcggctcatttcattccagtgagagccacctattccgggagtcgtttggcggaattgtatatggcaaggattgtgtgtttgcatggtgttcctaagaagatcgtatccgatcggggaagtcagtttacctcaaaattttggaagaagcttcaggaggagatgggttccacgctgaatttcagtactgcttatcattcgcagacggatggacagaccgaaagagtaaatcagatattggaagacatgttgagagcttgtgttttagacttcggtggaagttgggataagaatttgccttacgcagaattctcatacaacaatagttaccaagctagtctacagatggctccttatgaagcactgatagatgtcggacatctatatgcggagattattggtttacttgacaagatcatggcagcttctgcaccatctaattttaacttgcggtctattcttgagaaagagaagttgactggaacaagcttcatggattggtatcgcaacctgagaattgttctcaggcaagagcacaaagagtttgtgcttacacaaccttttctagctgacttgcccaacaattctcctgctgctcaacgtatggagcatgaaaggcgatgcaaggaataccttgatataagctgtctcatgcttgctactatgtcccctgagcttgaaaggcaatatgaggcattggatgctcatacgataatcacgggactacgtaacatgtttgaggaccaagcaagagctgagaggtttaatacctcaaagtccatgtttgcatgcaggcttgcagaaggtaatccagtgagcccacatgtgatcaaaataattggttacaccgagagtctggataagcttggctttccccttagccaagagttggctactgatttgattctccagtcgctccctcccagctttgagccgttcataatgaatttcaacatgaacaacctaaacaggaccttggcagaattgcatgggatgctaaagactgccgaggaaagcattaagaaaaactccaaccatgtgatggttatgcataagcgcaagcccaacaacaagaagagtggtcaaaagagaaagctaaactctgatgagatcatgagtactagcaactctaagaccaaggttcaaaagacagggcccgctaaggatgcagagtgcttcttttgcaaggagacaggtcattggaagagaaactgtaagaaatacctagagcagctcaagcagaagcagaaggatggaaagagttccacctcaggtattaatgttatagaaattaatattgctacttcctctactgattattgggtatttgataccagaggtggttttgggtactttattacctttaccgacgactctagtagatatggttatgtctacttaatgaggcataagtctgagtcctttgaaaatttcaaggaatttcagaatgaggtacaaaatcatttgggcaagacaatcaagtatctacgatctgatcgtggtggagagtgcttgagccttgaatttggcaatcatctaaaggagtatggaattgttccacaactcactccaccaggaacacctcagtggaatggggtgtctgaacggaggaatcgtacattgttggatatgttgtggaagcaccggcttcacgaaggtccgataggatacggcgtacacctgcgagacaacgatgaacctactacctatgaggaagaaatggtgggaccagactctgagaaatggcttggagccatgaaatccgaaacagaatctatgcatgtcaatcaaatttggaactctgttgatccacctgatggtgtaaaagccattgagtgcaaatgggtctttaagaaaaagatagatgtagatggaaatgttcacatctacaaggcacgattggtggcaaaaggtttcagacaaattcaagcgattgctgcctatttcgattatgagatatggcaaatggaagtcaaaacagctttcctcaatggaaatctcaatgaggatgtgtacatgacacaacccaagggatttgttgatccacaatcagctaaaaagatatgcaaattgcagaaatccatttatgggttgaagcaagcatctcggagttggaatattcgttttgacgaagtagtccaggcgttgggcttcttcaaaaacgaagaagagccttgcgtatacaagaagattagtgggagcgcactggtgtttctaatcctatatgtagatgacatattattgattgggaatgatattcctatacttgaatccgttaagacatcgttgaaaaatagtttttcaatgaaggacttaggggaagccgcatatattctgggcataaggatctatagagatagatcaaagaggctaattggattaagccagagtacatacattgacaaggtgttgaagatgttaaacatgcaagattctaagaaaggtttcttaccaatgccacatggcattaatcttggcaagaatcagtgtcctcaaacgactgatgagcgaaacaagatgagtgtgattccatatgcctcggcaatcggatccattattgattcctcgacaagggtttctacacatataccacgctacaagcctgagtacttgttcggtaccgaaggatttgtccaggagttgcgtacgatgtctttcctcataggatttgggattgcccctttgtatgcccagatccctcatgatcgtgatgaagagaagtgccgggtcaaagtcactttgaacagtaatcctgaagatataccatcagggatgttcgaggctggaggtggaagctacattcatgcttgtcaggaggtggcaaggatcaccataggagagctccgcgaaagctacaacgatcggttggccgacaccgagtatcgctaccatcctcgtcaaccccaggggagtgaccgtggtagctaccttgaacctgcggggatcgagaacgatgctaccacgaggcatttggttgagatgctgtgggctatgaatgaaactgtcgcgaccggaaaaattgccttttcccgaacgctagtgtattaa

SEQ ID NO: 14481 - DNA, 3977 bp, Oryza sativa
  Clone ID: TFbOSC900201j.C1.o17.np
atcatggcagctcctgcaccatccagttttaacttgcggtctattcttgagaaagagaagttgactggaacaaacttcatggattggtatcgcaacctgagaattgttcagacaagagcacaaagagtttgtgcttacacagccttttccaactgacttgcccaataatgctcctgctgctcaacatagggagcatgaaaagcgatgcaatgattatcttgatataagctgtctcatgcttgctactatgactcctgagcttcaaaggcaatatgaggcattggatgctcatacgataatcacgggattacgtaacatgtttgaggagcatgcaagagctgagaggtttaatacctcaaagtccttgtttgcgtgcaggcttacagaaggtaatccagtgagcccatatgtgatcaaaatgattggttacaccgagagtctagataagcttggttttccccttagccgagagttggctactgatttgattctccagttgctccctcccagctttgagccattcataatgaatttcaacatgaacaacctgaacaggaccttggcagaattgcatgggatgctaaagactgctgaggaaagcattaagaaaaactccaaccatgtgatggttatacataacgcaagcccaacaacaagaaaagtggtcaaaagataaagctaaactctgatgagatcacgagtactagcaactctaagaccaaggttcaaaagacagggcccactaaggatgcagagtgcttcttttgcaaggagacaggtcattggaagagaaactgtaagaaatacctagagcagctcaagcagaagcagcaggatggaaagagttccatctcaggtattaatgttatagaaattaatcttgctactttctctactgattcttaggtatttgatacctggtcagttgctcacatatgcaaatcattgcaggggctaaaaagaagtaggaacttagcaagaggcgaagtggacattcgcgtgggcaatggagcaagagttgctgctgttgcggtcggctctatgctattatctttaccgtcaggattagttttggagttaaataattgttattgcattccagctttgtgcaagaacgttatctctgcttcttgtttgcaagcagagggttatggttttagatctgtggacaatggttgtttagtctattataatgacattttctattcccatgcacccattatgaatggcttatacattgtgaatcttgatggatgttcagtctataacattaatgcaaaaaggcaacgtcctaatgatttgaatcccacttttatttggcattgtcgcttgggtcatataaatgagaaacacatagagaagcttcatagagatggacttctacactggtttgattttgaatcatttgacatgcgaatcttgtttacttagcaaaatgacaaaggcacctttcacgggtcaaagtgaaagggcaagtgaactattaggactagtacatactgatgtatgtggaccaatgagctcaactgctagaggtggttttgggtactttattacctttaccgatgactttagtagatatggttatgtctacttaatgaggcataagtctgagtcctttgaaaagttcaaggaatttcagaatgaggtacaaaatcatttgggcaagacaatcaagtatatatgatctgatcgtggtggagagtacttgagccttgaatttggtaatcatgtaaaggagtgtggaattgttccacaactcactccgccaggaacgcctcagtggaatggggtgtctgaacggaggaatcgtacattgttggacatggtgcgatcaatgatgagccaaactgatctgccgctaagcttttggggttacgctctagagacagctgcgttcacactaaacagggttccatcaaaatcagtggataagacaccatatgagatatggacagacaagcgtcccagtttgtctttcctaaagatttggggctgtgaggtctatgtaaaacgtttgcaatcgaacaaactcacacctaaatcagataaatgcttctttgtggggtatcccaaggaaacggaaggatattatttttataattgggaagagggcaaagtgtttgtcgcctgacacggtgttttcttggaaaaagagtttatttcaagaaaggttagtgggagcatggtttgacttgaagaaattcaggaaacaccggaaaacgcttcaacgtccacacaaccacaacaagctgagcaagatgttgttcaacaggttgaacaagttgttgttgaaccagttgtggaagcaccggcttcacgaaggtccgaaaggatacgacgtacacctacgaggtatgcggtgttaactacaggacaacgtgatatactgttgttagacaacgatgaacctactacctatgaggaagcaatggtgggaccagactctgagaaatggcttggagccatgaaatccgaaatagaatccatgcatgtcaatcaagtttggaacttagttgatcaacctgatggtgtaaaagccattgagtgcaaatgggtctttaagaagaagacagatgtagatggaaatgttcacatctacaaggcacgattggtggcgaaatgtttcagacaaattcaaggtgttgattatgatgaaactttctcgccagtcgccatgctaaaatctattcggattgttttagcgattgctgcctatttcgatttgagatatggcaaatggatgtcaaaacagctttcctcaatggaaatctcgatgaggatgtgtacatgacacaacccaagagatttgttgatccacaatcagctaaaaggatatgcaaattgcagaaatccatttatgggttgaagcaagcatctcggagttggaatattcgttttgacgaagtagtcaaggtgttgggctttgtcaaaaacgaagaagagccttgtgtatacaagaagattagtggagcgcactggtgtttataatcctatatgtagatgacatattatagattgggaatgatattcctatgcatgaatctgttaagacatcgttgaaaaatagtttttcaatgaacgacttaggggaagcagcatatattctgggcataaggatctatagagatagatcaaagagactaattggattaagccagagtacatacattgacaaggtgttgaagaggttcaacatgcaatattctaagaaaggtttcttaccaatgttacatggcattaatcttggtaagaatcagtgtcctcaaacgactgatgagggaaacaagatgagtgcgattccatatgcctcagcaatcggatccattatatatgctatgctatgtacacgtccagatgtttcatatgcacttagtgcaacaaactgataccaatcagatccaggtgagagtcactggatagctttaaagaatatccttaagtacttgagaagaactaaggatattttcctagtctatggaggacaggaagagctcgttgtaaatggttacacttacgcaaccttccaaaccgacaaagatgattttagatcgcagtctggatttgtgttctgcctgaatggaggcgctgtaagttggaagagttccaagcaagatacagtggctgattctacaacagaagccgaatacattgccacttctgaagcagcaaaggaggctgtttggataatgaaattcgtttctcaactaggtgtgatgactagtgtttctagccctatggacctctattgcgataatagtggtgccattgcgcaagccaaggagcctagatcgcatcaaaaatctaaatacattttacggcggtatcacctcattcgcgagatagtgggtagaggagatgtgaagatatgcaaaatacatacggatttgaatgttgcagatccattgacaaagccactccctcagcctaagcatgaggcacacactagggcaatgggtataagatacgttcatgat

SEQ ID NO: 14482 - DNA, 3980 bp, Oryza sativa
  Clone ID: TFbOSC900297j.C1.o10.np
atcatggcagctcctgcaccatccaattttaacttgtggtctattcttgagaaagagaagttgactagaacaaacttcatggattggtatcgtaacctaagaattgttctcaggtaagagcacaaaaagtttgtgcttacacagccttttccagctgactttcccaacaatgctcctgccgctcaacgtagggagcatgaaaggcgatgcaatgaataccttgatataagctgtctgatgcttgctactatgtcccctgagcttcaaaggcaatatgaggcattggatgctcatacgataatcacgggactacgtaacatgtttgaggaccaagcaagggctgagaggtttaatacctcaaagtccttgtttgcgtgcaggcttgcagaaggtaatccagtgagcccacatgtgatcaaaataattggttacaccgagagtctggataagcttggctttccccttagccaagagttggctactgatttgattctccagtcgctccctcccagttttgagccattcataatgaatttcaacatgaacaacctgaacaggaccttggcagaattgcatgggatgctaaagactgccgaggaaagcattaagaaaaactccaaccatgtgatggttatgcataagcgcaagcccaacaacaggaagagtggtcaaaagagaaagctaaactctgatgagatcacgagtacaagcaactctaagaccaaggttcaaaagacagtgcccgctaaggatgcagagtgtttcttttgcaaggagacaggtcattggaagagaaactgtaagaaatacctagagcagctcaagcagaagcagcaggatggaaagagttccacctcaggtattaatgttatagaaattaatcttgctacttcctctactgattcttgggtatttgataccgggtcagttgctcatatatgcaaatcgttgtaggggctgaaaagaagtaggagcttagcaagaggcgaagtggacattcgcgtgggcaatggagcaagagttgctgctgttgcggtcgacactatgccattatctttaccgttaggattagttttggagttaaataattgttattgcattccagctttgtgtaagaacgttatctctgcttcttgtttgcaagcagagggttatggttttagatctatggacaatggttgttcagtctattataatgacattttctatttccatgcacccatgatgaatggcttatacattgtgaatcttgatggatgttcagtctataacattaatgcaaaatggcaacgtcctaatgatttgaatcccacttttatttggcattgtcgcttgggtcatataaatgagaaacgcatggagaagcttcatagagatggacttctacactcgtttgattttgaatcatttgagacatgtgaatcttgttaacttggcaaaattacaaaggcacctttcacgggtcaaagtgaaagggcaagtgaactattgggaccagtacatactgatgtatgtggaccaatgagctcaactgccagaggtggttttgggtactttattacctttaccgatgactttagtagatatggttatgtctacttgatgaggcataagtctgagtcctttgaaaagttcaaggaatttcaaaatgagatacaaaatcatttgggcaagacaatcaagtatctacgatctgatcgtggtggagagtacttgagccttgaatttggcaatcatctaaaggagtgtggaattgttccacaactcactccgccaggaacgcctcagtggaatggggtgtctgaacggaggaatcgtacattgttggacatggtgcgattaatgatgagccaaactgatctgccgctaagcttttggggttacgctctagagacagctgcgttcacactaaatagggttccatcaaaatcagtggataagacaacatatgagatatggacagggaagcgtcccattttgtctttcctaaagatttggggctgtgaggtctatgtaaaacgtttgcaatcagacaaactcacacctaaatcagataaatgcttctttgtggggtatcctaaggaaacgaaaggatattatttttatcatcgggaagagggcaaagtgtttgtcgcccgacacagtgttttcttggaaaaaaagtttatttcaagaaaggatagtgtgagcatggtgtgacttgaagaaattcaggaaacaccagaaaacgctccaacgtccacacaaccacaagctgagcaagatgttgttcaacaggttgaacaagctgttgttgaaccagttgtggaagcaccggcttcacgaaggtccgaaaagatacggcgtacacctgcgaggtatgcgttgttaactacagtacaatgtgatatattgttgttagacaacgatgaacctactacctatgagaaagcaatggtgggaccagactctgagaaatggcttggaaccatgaaatccgaaatagaatccatgcatgtcaatcaagtttgaaaattggttgatccacctgatgatgtaaaagccattgagtgcaaatgggtctttaagaaaaagacagatgtagatggaaatgttcacatctacaaggcacgattggtgacgaaaagtttcaaacaaattcaaggtgttgattatgatgaaactttctcgccagtcgccatgttaaaatctatttggattgttttagcgattgctggctatttcgattatgagatatggcaaatggatgtcaaaacagctttcctcaatggaaatctctatgaggatgtgtacatgacacaacccaagggatttgttgatccacaatcagctaaaaagatatgcaaattgcataaatccatttatgggttgaagcaagcatctcggagttggaatattcgttttgacgaagtagtcaaggcgttaggctttgtaaaaaatgaagaagagccttgtgtatacaagaaggttagtgggagcgcattggtgtttctaatcctatatgtagatgacatattattgattgggaatgatattcctatgcttgaatccgttaagacatcgttgaaaaatagtttttcaatgaaggacttaggggaagtagtatatattctgggcataaggatctatagagataaatcaaagaggctaattggattaagccagagtacatacattgacaaggtgttgaagaggttcaacatgcaagattctaagaaaggtttcttaccgatgtcacatggcattaatcttggcaagaatcagtgtcctcagacgactgatgagtgaaacaagatgagtgtgatcccatatgcctcggcaatcggatccattatgtatgctatgctatgtacacgtccaaatgtttcatatgcacttagtgcaacaagccgataccaatcagatccaggtgagagtcactagataactgtaaaaaatatcctgaagtatttgagaagaactaaggatatgttcctagtctatggaggataggaagagctcgttgtaaatggttacactgacgcaagcttccaaaccgacaaagatgattttagatcgcagtctggatttgtgttctgcctgaatagaggcgctgtgagttggaagagttccaagcaagatacagtggctgattctacaacagaagccgaatacattgccgcttctgaagcagcaaaggaggttgtttggataaagaaattcgtttctcaactaggtgtgatgactagtgcttctagccctatggacctctattgcgataatagtggtgccattgcgcaagccaagggcctagatcgcatcaaaagtccaaacacattttacggcggtatcacctcattcgcgagatagtgggtagaggagatgtgaagatacacaaaatacatacggatttgaatgttgcagatccgttgacaaagccactccctcagcctaagcatgaggcacaaactagggcaatgggtgtaatatacattcatgat

SEQ ID NO: 14483 - DNA, 2247 bp, Oryza sativa
  Clone ID: TFbOSC23004j.C1.o7.fg
atgtcggctccgacgccgcgagtctcgcgatcgccgcgtcatcaatcccgctcgcctcctctgcgccgtggtcgtcgtcggcctggcgacgcctggcacttgggtccagtcaggcgcgtggtcaaggaggtggggggctcagccaactattcgatcctcacgaagacgaactacagtgattggtccctcttgatgagggcgatgctccaggtgcgtggcctctgggaagctgtcgacacgggtgacgtcaacttccaggaggacaggatggcgttggaggccgtcctcaaggtggtccccgctgatctgctgccggtgctctctgtcaaggagacggcgaaagacgcctgggatgccatcaagacgatgcgcgtcggcgtcgaccgcgtccgcaagtcgaaagcgcaggagctgcgcaagcagttcaatgcgatcgagttcaaggaaggggagtccgtggaggaattctccgtccggctgagtgggcttgtcaacaaccttgccgtacttgggatccagcttgaggaatcaaagaagctgacggggcgtctgaggaacgccgaggagcgccgtcccaagaagaagtccggcgatgagggcgacaaactgtatatcacggaagaacaatgggccgctcgcgccaaggaacggcagtccggcgagggatcgtcgcgcaagaaggcgggtaacaaccgccgacaccgcgatgggcgaaagaaaaccgagggcactgccgatggcgagcgcggtgcgcgttacacgcgcgatcaagggcgtgacaagtgcaagaactgtggccgcctcggtcactgggcgaaggactgctgccagcccaagaaacaagtcgcggcacacgtcgcacaaggtgaggaggaagatgatgagctggcgctgctgatggctcacgcggttgagctggcgccacctccaccatcgctcccaccttcaactgaaccgctcaacctcgttgagcccaaggtgttcacacacctgcactgcgatgtcgacgctggtgtttggcatctcgacaccggcgcgactaaccacatgactggcgtgcatgacatcttctccgagctcgacacggtggtgcgcggcaaggtctgttttggcgacggctcggtggtcgccattgagggccaaggcaaaatcatctttgagtgcaggaacagtgaacatcgggcgctcataggggtgtactacatccccaagctcaacgcgaacctcgtcagcctcaggcagctggatgaaaatggctgcgacatctgcatcttccatggcgtctgcacgatccgcgacgctgcgcgacagctcctcgctcgcgtgcggtgtacgcgtattcggctgtacctgatcaagatcaccgtcgctcggcctgtgtgcctctcagcacgcacgcaggaggccgcgtggctgtggcatgctcgcttcggccacctccacttcgacgcgctacggcgcctcactcaacaagacatggttcgcggccttccacagatcgaccaagttgagcagctgtgcgactgctgcgtcatctccaagcaacgacgttcgccgttccccgggcagtctctgttccgggaggaggaccgcttggagctcattcatggcgatctttgcggtcccatctcgcccgcgacgcccggcggcaagaaacactttctgctgcttgtcgacgatgcaagctgctatatgtggctcactcttctacagaacaagggggaggcggctgcggcaatcaagcactttcaagcccgcagcgaggctgagtccggctgccatctcaagctcctccaccccgacaacgggggtgagttcacctccgccgagttcgccagctactgcaccgagagcggtgtcaagcgccagctcaccccgccgtattccccccagcaaaacggtgtggtcgagcgtcgcaaccaaacgatcttggcgatggcacagtgtctgctaagggccaagtcagtgccggcatgctattggggggaggcagtcatgacggttgtctttttgctcaatcacgcgccgaccaagtgcctggtggacaagacaccctatgaggcttggttaggtcgcaagccggccgtcggtcacctacgcaccttcgggtgtctcgtgtactcaaggacgttcagccacacatcaccaagctccaggaacgcggcaagcccatggtcttcctcggctacgttgagggaactaaagcctacaaggtgttcgacccgaagtcgggtcgcgttcaagtga

SEQ ID NO: 14484 - DNA, 2625 bp, Oryza sativa
  Clone ID: TFbOSC101575j.C1.o1.fg
atgtcgggtcaaacggggaatggcaaggatggtgataagggagctacgtttccttatgactatccctccacatctgcatcttatgtgagcacctatagcggcaaagctccgtacttcaatggtacggactatgccgcttggaaacataagatgaagatgcatttgaaatctattaaccctttgatttggagaatagtcgaaaaaggctatgttttgcagaatcccgtggaacccaccaaggaggacgacaagaacgagcacaagaacgctcaagccgctaatgcaattcttagcgccttgagtggaagtgatttcaaccgtgtggacggcattgagagtgccaaagtgatttgggacacgcttcggagtttgcatgaagttacggatagtgttagcgagttcaaggtggagattctcaaggggcagtttgagcggtttgtgatgttggatggtgagagcccaagcgacatgtatgatcgattaagcaagatcgttaatgagatcaaggtacttggctctaaggacatgaccaatgaggttgtggtcaagaagatggttcgggcaatcactccaaggaactctaccttggtgaccatcattcgtgagcgtccggactacaagactctcacacctcatgacttgctcgggcgtatccttgcccatgacatgcttgagcaagagtccaaggaggtcatccaatacatcaaccaaacctcaaccacaagcattaagaaggaagacttggcattgaaggcgaaggaagaagaagaagagagtcgcaagagcaagagcaagagcaaggcggagatcgatgatgaagagatggctctcttcgtcaagaagttcgacaagttcatgaagcaaagcggcttcttcaaggaaagttcgtccaagtattcctccaacaagtcaagtggaagacactccgcaagggtgtgctatgtgtgcaaagagcccgagcacttcattgacgattgcccccacatcaaggattgcccccacttcaaggaagacaagaagaagcttgagaagaacgagaagcacaagcatagcaagcatgatcgctatggccaagctcaccttggggtgatcttcggctccgacttcgagtcaagctcaagtgatgaagaaggagttgccacattcgccgtcaagccttcatcaccaccgagactcttcaactactcaagtgatgaggatgctcccatttgcctcatggcaaaggagcctaaggtaccctctcccctcaagtcatttaatgttgatcttgttagtgatgaggaggaagatgttgaggatgaggttatggatgacgagttgttcaaatccatagccaaggaatccataccacacttgagtgagttgcttgggagaattgagaatcaatatgcaaaccttgagaggcaagaggaattgctcattcgtgagaaagagcggtctcatgaactcaagagtgaacttgctaaggagagagagaaaaatgaggctttggtacggctttacaagcaaaccaaagagtctcatactaatcttgaggtggcgaacgctcaacttcaagagagagtggatggcttggacaaagcttacctctctcttgaagagaagttcgaaaccttaaagaatagtgtctctctccctagcgaggcatcgtgctccaaaattgtcccaagcaacgaaccatgtgtgaggtgcaaagatattgatattgaagcttgtagtactaactctacttctttgagtgctttacaaaagcaaaatgagaagcttatgggactccttcataatggcctacttaagtgccatatgggtagtaaggcgctaaaggagtacctaggctatcaaagggacaacttcaaccatgaaggtcttgggtatgtttctccacctaaaggaaaggtggacaagagtgtgatgatcaagaatccccaaggtcttagcaactttgttaaggccaaatgtatccttcctaatgattatgcttctcattgttcttttgatacatcttatgttcttaggaaaaatgctaatggtcgtgctgttgctaaaagggatgactcatccgtagtctttaagggtgttctcgagggcaagctttatcttgtggattttttctcaactaaagccaaacatgagacatgcttagtggctaagtccaacatgaggtggctttggcatcggaggctaacccatgtcggtatgaggaatcttcacaagcttctaaagcacgatcacatccttggactaacaaatgttcaatttgagaaagatagggtgtgtagtgcatgtcaagccgggaaacaaattggagcacatcaccccgtcaagaacgtaatgattactacaagaccgttggagcttcttcacatggacctcttcgggccaattgcttatctaagcattggaggtgacaaatatggtcttgttattgttgatgacttttcacgtttcacgtgggtgttcttcttgcatgacaagagtgagacacaagccatcttcaagaagtttgaaagaagagcccaaaacgagttcgacctcaagatcaagaacattcgaagcgacaacggcaaggagttcaagaacacgtgcatcgagagtttccttgatgaagaaggcatcaagcattag

SEQ ID NO: 14485 - DNA, 3933 bp, Oryza sativa
  Clone ID: TFbOSC400991j.C1.o12.fg
atgtcgggtcaaacggggaatggcaaggatggtgataagggagctacgtttccttatgactatccctccacatctgcatcttatgtgagcacctatagcggcaaagctccgtacttcaatggtacggactatgccgcttggaaacataagatgaagatgcatttgaaatctattaaccctttgatttggagaatagtcgaaaaaggctatgttttgcagaatcccgtggaacccaccaaggaggacgacaagaacgagcacaagaacgctcaagccgctaatgcaattcttagcgccttgagtggaagtgatttcaaccgtgtggacggcattgagagtgccaaagtgatttgggacacgcttcggagtttgcatgaagttacggatagtgttagcgagttcaaggtggagattctcaaggggcagtttgagcggtttgtgatgttggatggtgagagcccaagcgacatgtatgatcgattaagcaagatcgttaatgagatcaaggtacttggctctaaggacatgaccaatgaggttgtggtcaagaagatggttcgggcaatcactccaaggaactctaccttggtgaccatcattcgtgagcgtccggactacaagactctcacacctcatgacttgctcgggcgtatccttgcccatgacatgcttgagcaagagtccaaggaggtcatccaatacatcaaccaaacctcaaccacaagcattaagaaggaagacttggcattgaaggcgaaggaagaagaagaagagagtcgcaagagcaagagcaagagcaaggcggagatcgatgatgaagagatggctctcttcgtcaagaagttcgacaagttcatgaagcaaagcggcttcttcaaggaaagttcgtccaagtattcctccaacaagtcaagtggaagacactccgcaagggtgtgctatgtgtgcaaagagcccgagcacttcattgacgattgcccccacatcaaggattgcccccacttcaaggaagacaagaagaagcttgagaagaacgagaagcacaagcatagcaagcatgatcgctatggccaagctcaccttggggtgatcttcggctccgacttcgagtcaagctcaagtgatgaagaaggagttgccacattcgccgtcaagccttcatcaccaccgagactcttcaactactcaagtgatgaggatgctcccatttgcctcatggcaaaggagcctaaggtaccctctcccctcaagtcatttaatgttgatcttgttagtgatgaggaggaagatgttgaggatgaggttatggatgacgagttgttcaaatccatagccaaggaatccataccacacttgagtgagttgcttgggagaattgagaatcaatatgcaaaccttgagaggcaagaggaattgctcattcgtgagaaagagcggtctcatgaactcaagagtgaacttgctaaggagagagagaaaaatgaggctttggtacggctttacaagcaaaccaaagagtctcatactaatcttgaggtggcgaacgctcaacttcaagagagagtggatggcttggacaaagcttacctctctcttgaagagaagttcgaaaccttaaagaatagtgtctctctccctagcgaggcatcgtgctccaaaattgtcccaagcaacgaaccatgtgtgaggtgcaaagatattgatattgaagcttgtagtactaactctacttctttgagtgctttacaaaagcaaaatgagaagcttatgggactccttcataatggcctacttaagtgccatatgggtagtaaggcgctaaaggagtacctaggctatcaaagggacaacttcaaccatgaaggtcttgggtatgtttctccacctaaaggaaaggtggacaagagtgtgatgatcaagaatccccaaggtcttagcaactttgttaaggccaaatgtatccttcctaatgattatgcttctcattgttcttttgatacatcttatgttcttaggaaaaatgctaatggtcgtgctgttgctaaaagggatgactcatccgtagtctttaagggtgttctcgagggcaagctttatcttgtggattttttctcaactaaagccaaacatgagacatgcttagtggctaagtccaacatgaggtggctttggcatcggaggctaacccatgtcggtatgaggaatcttcacaagcttctaaagcacgatcacatccttggactaacaaatgttcaatttgagaaagatagggtgtgtagtgcatgtcaagccgggaaacaaattggagcacatcaccccgtcaagaacgtaatgattactacaagaccgttggagcttcttcacatggacctcttcgggccaattgcttatctaagcattggaggtgacaaatatggtcttgttattgttgatgacttttcacgtttcacgtgggtgttcttcttgcatgacaagagtgagacacaagccatcttcaagaagtttgaaagaagagcccaaaacgagttcgacctcaagatcaagaacattcgaagcgacaacggcaaggagttcaagaacactaagtgctacattcttaataagaaggctagatcctcaaagtttgctcctaaagtggatgaggggttcttgcttgggtataggtcaaatgagtgcgcataccgtgttttcaacaaaacctccggtattgttgagatcgcgcgtgatgtgacatttgatgaaattaacggctctcaagtagagcaagttgactcacatgtgttaggtgaaggggaggaccctaacgaaacaatcaaaagggtggaagaagctcttaatgatccggattgggggatggcgatgcaagaggagttgaacaacttcacccggaatgaagtgtggactttggtggagcgacctcggcaaaatgtgattggcacaaagtggatctttcgcaacaagcaagacgaggccagggtcgtgataaggaacaaggcgaaattagtggcgcaagggttcacccaaatcgatggattagatttcggtgaaacttttgcgccggtagctagacttgagtcaattcgcatattgcttgcttttgctactaacctcaattttaagctatttcaaatcgatgtcaaaagcgtcttcctcaacgggcctatcaacgagttggtatacgtggagcaaccactgggcttcgaggatccaaaatatcccatcaacgtgtacaagctccacaaggcactctacggtcttaagcaagcccctagagcttggtatgagtgtcttcacaattttcttgtgaaaaacggctttgagatcgggaaagccgattcaactctttttactaaaagatatgataatgatatttttgtgtgccaaatatatgtcgatgacattatatttggttctactaacaagtcttttaatgaagagtttagtaggatgatgaccaagcgttttgagatgtccatgatgggtgaattgaagttcttcctcggccttcaaatcaagcaactcaaggaaggaactttcatttgccaaacaaagtatttaaaggacatgctcaagaagtttggaatggagaatgcgaagccaatccacactcccatgccatcaaatggccacctcgacctcaacgagcaaggtaaagacgtcgaccaaaaggtataccgttccatcattggctcactcctttacctttgtgcatctaggcccgatattatgcttagtgtgtgcatgtgtgcaagatttcaagccgctctgaaggagtgtcaccttgtggccatgaagagaattcttagatatgtgcacacacctaatcttggtctttggtatcctaagggagcgagttttgatctcattggttatgccgatgcggattatgccgggtgcaaagtggataggaaaagcacattgggtacttgctaa

SEQ ID NO: 14486 - DNA, 3729 bp, Oryza sativa
  Clone ID: TFbOSC900312j.C1.o14.fg
atgtcgggtcaaacggggaatggcaaggatggtgataagggagctacgtttccttatgactatccctccacatctgcatcttatgtgagcacctatagcggcaaagctccgtacttcaatggtacggactatgccgcttggaaacataagatgaagatgcatttgaaatctattaaccctttgatttggagaatagtcgaaaaaggctatgttttgcagaatcccgtggaacccaccaaggaggacgacaagaacgagcacaagaacgctcaagccgctaatgcaattcttagcgccttgagtggaagtgatttcaaccgtgtggacggcattgagagtgccaaagtgatttgggacacgcttcggagtttgcatgaagttacggatagtgttagcgagttcaaggtggagattctcaaggggcagtttgagcggtttgtgatgttggatggtgagagcccaagcgacatgtatgatcgattaagcaagatcgttaatgagatcaaggtacttggctctaaggacatgaccaatgaggttgtggtcaagaagatggttcgggcaatcactccaaggaactctaccttggtgaccatcattcgtgagcgtccggactacaagactctcacacctcatgacttgctcgggcgtatccttgcccatgacatgcttgagcaagagtccaaggaggtcatccaatacatcaaccaaacctcaaccacaagcattaagaaggaagacttggcattgaaggcgaaggaagaagaagaagagagtcgcaagagcaagagcaagagcaaggcggagatcgatgatgaagagatggctctcttcgtcaagaagttcgacaagttcatgaagcaaagcggcttcttcaaggaaagttcgtccaagtattcctccaacaagtcaagtggaagacactccgcaagggtgtgctatgtgtgcaaagagcccgagcacttcattgacgattgcccccacatcaaggattgcccccacttcaaggaagacaagaagaagcttgagaagaacgagaagcacaagcatagcaagcatgatcgctatggccaagctcaccttggggtgatcttcggctccgacttcgagtcaagctcaagtgatgaagaaggagttgccacattcgccgtcaagccttcatcaccaccgagactcttcaactactcaagtgatgaggatgctcccatttgcctcatggcaaaggagcctaaggtaccctctcccctcaagtcatttaatgttgatcttgttagtgatgaggaggaagatgttgaggatgaggttatggatgacgagttgttcaaatccatagccaaggaatccataccacacttgagtgagttgcttgggagaattgagaatcaatatgcaaaccttgagaggcaagaggaattgctcattcgtgagaaagagcggtctcatgaactcaagagtgaacttgctaaggagagagagaaaaatgaggctttggtacggctttacaagcaaaccaaagagtctcatactaatcttgaggtggcgaacgctcaacttcaagagagagtggatggcttggacaaagcttacctctctcttgaagagaagttcgaaaccttaaagaatagtgtctctctccctagcgaggcatcgtgctccaaaattgtcccaagcaacgaaccatgtgtgaggtgcaaagatattgatattgaagcttgtagtactaactctacttctttgagtgctttacaaaagcaaaatgagaagcttatgggactccttcataatggcctacttaagtgccatatgggtagtaaggcgctaaaggagtacctaggctatcaaagggacaacttcaaccatgaaggtcttgggtatgtttctccacctaaaggaaaggtggacaagagtgtgatgatcaagaatccccaaggtcttagcaactttgttaaggccaaatgtatccttcctaatgattatgcttctcattgttcttttgatacatcttatgttcttaggaaaaatgctaatggtcgtgctgttgctaaaagggatgactcatccgtagtctttaagggtgttctcgagggcaagctttatcttgtggattttttctcaactaaagccaaacatgagacatgcttagtggctaagtccaacatgaggtggctttggcatcggaggctaacccatgtcggtatgaggaatcttcacaagcttctaaagcacgatcacatccttggactaacaaatgttcaatttgagaaagataggagtgagacacaagccatcttcaagaagtttgaaagaagagcccaaaacgagttcgacctcaagatcaagaacattcgaagcgacaacggcaaggagttcaagaacactaagtgctacattcttaataagaaggctagatcctcaaagtttgctcctaaagtggatgaggggttcttgcttgggtataggtcaaatgagtgcgcataccgtgttttcaacaaaacctccggtattgttgagatcgcgcgtgatgtgacatttgatgaaattaacggctctcaagtagagcaagttgactcacatgtgttaggtgaaggggaggaccctaacgaaacaatcaaaagggtggaagaagctcttaatgatccggattgggggatggcgatgcaagaggagttgaacaacttcacccggaatgaagtgtggactttggtggagcgacctcggcaaaatgtgattggcacaaagtggatctttcgcaacaagcaagacgaggccagggtcgtgataaggaacaaggcgaaattagtggcgcaagggttcacccaaatcgatggattagatttcggtgaaacttttgcgccggtagctagacttgagtcaattcgcatattgcttgcttttgctactaacctcaattttaagctatttcaaatcgatgtcaaaagcgtcttcctcaacgggcctatcaacgagttggtatacgtggagcaaccactgggcttcgaggatccaaaatatcccatcaacgtgtacaagctccacaaggcactctacggtcttaagcaagcccctagagcttggtatgagtgtcttcacaattttcttgtgaaaaacggctttgagatcgggaaagccgattcaactctttttactaaaagatatgataatgatatttttgtgtgccaaatatatgtcgatgacattatatttggttctactaacaagtcttttaatgaagagtttagtaggatgatgaccaagcgttttgagatgtccatgatgggtgaattgaagttcttcctcggccttcaaatcaagcaactcaaggaaggaactttcatttgccaaacaaagtatttaaaggacatgctcaagaagtttggaatggagaatgcgaagccaatccacactcccatgccatcaaatggccacctcgacctcaacgagcaaggtaaagacgtcgaccaaaaggtataccgttccatcattggctcactcctttacctttgtgcatctaggcccgatattatgcttagtgtgtgcatgtgtgcaagatttcaagccgctctgaaggagtgtcaccttgtggccatgaagagaattcttagatatgtgcacacacctaatcttggtctttggtatcctaagggagcgagttttgatctcattggttatgccgatgcggattatgccgggtgcaaagtggataggaaaagcacattgggtacttgctaa

SEQ ID NO: 14487 - DNA, 283 bp, Oryza sativa
  Clone ID: TFbOSC18902j.C1.o2.np
tctacaggccctactccacgtccaagtcggggtagaaaccaaaggaaacccgaaacatgccttcccgagcaagaaaacttcgagacccaacgaaacacagtcggactcggacctgccggtcagatcagccacacaccgccggtctgaccggccctcaaccggtggtctgaccgcccaacacacggcagtcagaccggcccactcggaggaaaccggtagacttccaaatttagtctcccctctaaatccattaagaattttgacagagtctcccctgtaaata

SEQ ID NO: 14488 - DNA, 1317 bp, Oryza sativa
  Clone ID: TFbOSC18902j.C1.o8.gm
atggcgcatcgagagctggtgcacagaacaacaacaccaacggaggcagttatgcctcacaatccagcggagggactttcacaggcgatgcaatgtttctatgtttcacggggcaaacgaagtgaaccacctgtctctcctgaggaagaggttaagttcgaggcttcggattgcctgttccgtggagcattgatcagtgtactcgctgacaatatagtggacgtgtatatgcacatgccttcagggaaggacatgtgggatgcacttgaggccaagttcggagtttctgacgccggcagtgagctgtatgtcatggagcaattctatgactacaagatggtcgatgaccgttctgtagtagaacaagctcatgagattcagatgctggctaaggaacttgagaacaacaactgtgagttgccggacaagtttgtggtgggtggtattattgccaaattgccaccttggtcggactttgccacttttctaaagcacaagagacaagagttcagtgtttctgatctcattggctttttgggtgttgaagagaaggctagggcaaaggacaaccggggcaaaaaggttgagggaggttctagtgccattatggtacagaagaaccctcatgcatcccacaacaacaaaaaagtcatgcctgatgtcaaacccaaggctacaaccaattttaagaagaaaggcaagggaaaggcaaagggagactgcttcgtgtgtggcaagtctaggcattgggccaagtactgtcctgagcgcaaagacataaagtctgccaacatggtcattagcgagggcggaggaacatcggggtacggtcgggagaggttcctccttgttcatggtgttggtacggtcgatctgaagtttacttcgggaaagaccgtgcagctgaagaacgtgcagcatgtcccttcaataaagaagaatctagttagcggctctctactcatgggttatagattcttaatagtaaattctagagtacccgacatgcgtgttggtacaattattgagtccagagatgctacattctttgagaatgaatttcccatgaaaaatacacctagcacttctagtcaaaaaactgtcataccccatgagcactttgcaccgatagaacacaatgatcaaacgcttgagggaaatcctgaggaggataacattgtagatactcgtaagagtaagagacaaagggttgcaaaatcctttggagatgactacattgtatacctcgtggatgacactccaagaaccatagaagaggcatattcatctcctgacgctgactactggaaggaagca

SEQ ID NO: 14489 - DNA, 1437 bp, Oryza sativa
  Clone ID: TFbOSC900359j.C1.o9.gm
atggcgcatcgagagctggtgcacagaacaacaacaccaacggaggcagttatgcctcacaatccagcggagggactttcacaggcgatgcaatgtttctatgtttcacggggcaaacgaagtgaaccacctgtctctcctgaggaagaggttaagttcgaggcttcggattgcctgttccgtggagcattgatcagtgtactcgctgacaatatagtggacgtgtatatgcacatgccttcagggaaggacatgtgggatgcacttgaggccaagttcggagtttctgacgccggcagtgagctgtatgtcatggagcaattctatgactacaagatggtcgatgaccgttctgtagtagaacaagctcatgagattcagatgctggctaaggaacttgagaacaacaactgtgagttgccggacaagtttgtggtgggtggtattattgccaaattgccaccttggtcggactttgccacttttctaaagcacaagagacaagagttcagtgtttctgatctcattggctttttgggtgttgaagagaaggctagggcaaaggacaaccggggcaaaaaggttgagggaggttctagtgccattatggtacagaagaaccctcatgcatcccacaacaacaaaaaagtcatgcctgatgtcaaacccaaggctacaaccaattttaagaagaaaggcaagggaaaggcaaagggagactgcttcgtgtgtggcaagtctaggcattgggccaagtactgtcctgagcgcaaagacataaagtctgccaacatggtcattagcgagggcggaggaacatcggggtacggtcgggagaggttcctccttgttcatggtgttggtacggtcgatctgaagtttacttcgggaaagaccgtgcagctgaagaacgtgcagcatgtcccttcaataaagaagaatctagttagcggctctctactcatgggttatagattcttaatagtaaattctagagtacccgacatgcgtgttggtacaattattgagtccagagatgctacattctttgagaatgaatttcccatgaaaaatacacctagcacttctagtcaaaaaactgtcataccccatgagcactttgcaccgatagaacacaatgatcaaacgcttgagggaaatcctgaggaggataacattgtagatactcgtaagagtaagagacaaagggttgcaaaatcctttggagatgactacattgtatacctcgtggatgacactccaagaaccatagaagaggcatattcatctcctgacgctgactactggaaggaagcagtacgcacctctcatggtcttctcgttcatcagatggacgttaagacagctgtcctaaacggagagctggaggaggagatctatatggatcaaccagacgggtatgtactagaaggttag

SEQ ID NO: 14490 - DNA, 4386 bp, Oryza sativa
  Clone ID: TFbOSC418782j.C1.o3.fg
atggacatctctagggcaaatgaaggctacacgagctgcggcccggtagtcgagatgtcatggcacagggccggtgtcctgctgctaggggctcagtcctgcctacctgtcccggaggttccggccgtaggtggggttgggtcagtactcttgtctatggctaggatgggttggaaactatgtcacgtcttccgtccatatacagttgtgatggccggcagcatcaaccgtcgtggcctggaccttactggctttgttttggagctgcggggcatgtgcgttgtcctggggtatccgcatggagtggactaccagggcaagcagctcctggagcaggagggtgatgatgtagagccccacgctgcctgggaggtcactgtagtggtcctcactggctctcccgagaggacttcgttggcagtcaccgcgggtggagattctttctccgccgcttgccagaacgctgcactcctcgccatcggcactcttcaccagcgctacccggacgagttgcagcactcgccctaccgctaccaccctcgtcgcggaggagcccgcgactacgccaccttcagggatgctagctcggaggatgacgctaccatcatgcacctggcgcgcatggtgcaggcgtacaacgcgacccgtatcaacttccatcatatggtgcgccgtgggttggtcgagaacaacatgaagatcctggagctgcgtcaggagaatctgcagctaaagaaggacttggacgcagtagaggcgcagctgtgtcagctcaagatcgcccagggagagatggtgacaaccaggagaagtgctgctttcctccatcacatccaaaatccgccacagcataatgctccacctctaccaccacccccgcaacattctaaactcgcagagttcctccgcatccgcccgcctatcttctctagctccaataaccccgtggatgctttggattggttgcatgctgtggggaaaaagttggataccgtgcagtgcaatgatgaggagaaagtcatcttcgccgcccatcaactgcaggggcccgcatctctatggtgggaccacttccaggctacgcagccagaaggacagcctattacttgggcccgcttcaccgccgctttccggaggacccatgtgccggccggagtcatggcccttaagaaaagggaattccgagagttgaagcaaggcaaccgctctgtgatggagtatttgcatgagtttaacaacctggcccgggtccgctacaccattccctatccagggggatcctcctcgcagcagcagcagcagcagcaaccacgctccgcgccccgacctcaatttgtggtgcgcgtcccacagccacagcaacagcagagtcagcaagggacccgtgcgccccgtcctcctgcgcctgttgtgcagcctggtcaaggccgcagagacgctcaaggtcagcagcgtctgtgcttcaactgcttcgagtccgggcactttgcggataaatgcccaaagccgaggcgccagcaaggccaagcgcctccccgccccaacaacggtggtaaggatgtcattcggggtcgtgtgaaccacgtgactgccgaggatgtgctgacaactccagacgtcatcgttggagtagtggattgcgcaaggcgcactgtcactctgtatcgggggctggaacaaccggttgttttctttgcacccccaacctctgtcggcagttcagaacttcatcagataggactgtcggaaatccccatcgtcagagagttcggagacgtgtttccggaagaactacccggtatgtcgcccaagcgagagattgagttccggatagatctcgctccaggaaccactcctctgtacaagcgaccctaccgtatggcagcaaatgaactagccgaagtagagagacagttggaagagttgaaagaaaagggatatatatggccgagcacttccccctggggtgctcctgtgatttttgtggaaaagaaagacaagacaaagaggatgtgcgttgactacagagctctcaatgaagttactatcaaaaacaggtaccctcttccccggattgatgatctgttcgatcagcttaaaggtgccactgtcttttctaaaatcgatcttcgttctggatatcaccaattgcgtattcgtgaagaagatatcccgaagaccgcattcaccacgcgatacggactgtatgaattcacggtgatgtcgttcggtctaaccaatgatcctgccttcttcatgaacttaatgaacaaagtgttcatggaatacttggataagtttgttgtggttttcattgacgacattctggtgtactcacaatcagaggaagaccatcagcagcatctccgtctggtgttgggaaagttgcgggaacaccaattgtatgccaagctcagcaagtgtgagttctggttgtccgaagtcaagttcttagggcacgtgatatctgctaaaggagttgcggtggatcccgacacggtgaccgccgtcactgattggaagcaacccaagacagtcactcaagtccgcagctttttgggtttggccggcccgcaatgcgagaaggcgttccaaactctcaaagaaaagctggtttcctcgccagtgttgatcttaccggatactcgcaaggacttcctggtgtactgtgacgcttcgcgccaaggattggggtgcgtattaatgcaggaaggtcatgtggtagcctatgcctcacgccagctacggccccatgaaggcaactaccctacccatgatttggagttggccgctgtggttcatgctctaaagatctggcggcactatctcattgggaatcgctgtgaaatatatactgatcataagagtttgaaatacatcttcactcagtcggatctgaatcttcggcagaggagatggttagaactcataaacgattatgatgtgggaattcactatcatcctggtaaggccaacgtggtcgccgacgctctaagtcgaaaaagccgttgcaacactcttggcgtccgtgacattccaccggaacttaatcaacagatggaagccctgaacctaagcatagttggtcatggattcttggctacgctggaagccaagcctaccttgctcgatcaaatccgcgaggctcagaagaatgatctagatatgcatgggatcctcaagaatatgaaacagggtaaagccgctggtttcacagaggatgaacacggaaccctatggaacggaaatcgggtatgcgttccagacgacagggaacttaaaaagttgatacttcaggaagctcatgaaagtccctattccatccatcctggcagcacgaagacgtacttggacttgaaagaaaaatattggtgggttagtatgaagcgggaaattgcagagttcgtggccctttgtgatgtgtgccagcgtgtcaaggcagagcaccaacgaccggccggacttctccaacctctccaagtaccagaatggaaatgggatgaaattgggatggatttcatcaccggacttccaaaaacccagggtggttatgattctatatgggtagtcgtggatcgactaaccaaggtagctcggtttattcctgtgaagaccacctatggagggaacaaactagctgaactctacttcgctaggatcgtgagtctccatggcgttcctaagaaaattgtatctgataggggaagccaattcacctctcacttctggaagaagctccaagaagagttgggtacccgattaaatttcagcaccgcgtatcacccgcagacagatggacagaccgagcgtctaaatcagatcctggaagatatgctctgtgcctgtgttctagatttcgggaagacctgggataagagtctcccctatgccgagttctcctacaataacagctaccaagccagcatacaaatggcaccctatgaagcgttgtatggccgcaaatgccggacaccgctattgtgggaccaagttggggaaagccaagtgttcgggactgatatcctgagagaagctgaagctaaagtcaaaaccattcgggataatctaaaggtggcacagtcccggcagaagagctatgcagataaccgacgccgtaacctggaatttgcagtggatgactttgtgtaccttagggtcacgccattgcggggtgtacacaggttccagacgaaagggaagctcgcacctcggttcgtgggtcctttctgtatcattgctcgacgcggagaagtcgcttaccagttggagctgcccgcatccttgggcaacgtgcatgatgtttccatgtgtcgcaactcaagaaatgtcttcgagtgccatccgagcaggccgattcagagcaaattgaagttcgcgaagacttga

SEQ ID NO: 14491 - DNA, 2096 bp, Oryza sativa
  Clone ID: TFbOSC10766j.C1.o1.fg
atggcaccagctcagtcaggtccgccagctgtgtcagctcagtcagaacaacccaagaagggggctgtaggaaagccaggaccctgcttcaactgtggcaagcacggccactttgctggcaagtgtccgaagctgaatcgcactggacccaggttcatccaggcccgcgccaatcatgtgtctgcagaggaagcacaggcagcaccagaggtcgtgttgggcacgtttccagtgaactcatatccagcaacagttctctttgattcaggtgcctcgcattctttcatttccaaaagatttgctgggacacatggattatcggtagtggaacttaaaataccgatgcaggttcatacccctggaaatgatatgaggacagcacactactgcccctcggtgactatagagatcaaaagatcaccgtttctatccaacctcatccttctcgaatctaaagacctggatgtcattcttggaatggattggttgaccagaaacaagggagtgattgactgcgcaagccgcaccatcaccctaaccaacgacaaaggggagaagatcaccttccgttccccagcgtcgcagaagtccgtagcgagtctgaatcaggctgctattgagggtcagacagaaacagtggagaaaagttccaggaagttggaggatattcctatagtacaagagtatcctgaggtgttcccagaagacctcactacaatgccaccgaagagagaaatcgagttccggatcgatttggcacccgggactgctccaatttacaagaggccgtacagaatggcagctaatgagctagcagaggtcaagaagcaggttgacgaacagctgcagaaagggtacatccgaccgagtacttcaccttggggtgctccggttatctttgtggagaagaaagacaagaccaagaggatgtgcgtggattatcgcgcccttaatgaggtcacaatcaagaacaaatatccgttgccaagaattgatgacctgtttgatcagctaaaaggagctaaggtgttttccaagatagacctacgatcaggctatcatcagttgagaattcgggaagaggatattcccaagacagccttcaccactcggtatgggttgtttgagtgcacggttatgtcctttggactcaccaatgcaccggctttcttcatgaacttgatgaacaaagtgtttatggagtttcttgacaagtttgtcgtggtattcattgacgacatacttatttattcaaaatcagaagaggaacatgagcaacatcttcgtctggtacttgagaaattgaaggagcaccagttatatgccaagtttagcaagtgtgacttctggttatcggaggtcaaatttctgggtcacgtcatttctgctcaaggcgtggtagtggacccatcaaatgtggaatcagttacaaagtggaccccaccaaagacagtttctcagatccggagttttcttggacttgcgggctattaccgtcggttcatcgaaaatttctctaagattgccaggcccatgacacagttgctaaagaaagatgaaaaattcaaatggtcagctgagtgcaaccaaagttttgaagaactcaagaagaagttagtctctgcaccagttctaattctgccagatcagacaaaagacttccaggtctactgtgatgcatctcgccaaggattgggatgtgtgttgatgcaagaaggcagagtggttgcatatgcttcgcgacagttgcgtccacatgaggccaattatcccactcatgaccttgagttggcagcagtggttcatgctctgaaaatctggcggcactatcttattggcaaccgctgtgaagtttacactgatcataagagcctgaagtacatcttcacccagcccgacttaaatctccggcaacgaagatggctggagctgattaaagattatgacatggggatacactatcatccaggcaaagcaaatgtggtagcagatgctctgagcagaaagagctattgcaatgcagtatgtaccgaaggcatgtgtgacaaattgcagcaagatcttgagcacctaaatttgggcatcgtagaacacgg

SEQ ID NO: 14492 - DNA, 4371 bp, Oryza sativa
  Clone ID: TFbOSC12547j.C1.o1.fg
atgatgaagacaaggaatgatccccgtgactccaacgacgccagtggcagcgaagagcagaccgatggagctcatgtcagtggtgcatctggcagcagatcatctccaccgcccgaaaacccaacagtcactcaaatgatgacaatgatgatgcaacagatgcagcaacattaccatcagatgttgcagcaggcgcaacagaaccagcagtttggtcctccaccatcacacgtgtccaaactgttagactttcttcgtatccagccacccactttctcaagcaccaccaacccaatggaggccaatgactggctccgtgctattgagaagaagctgaacctattgcaatgcaacgaccgagagaaagttgcttttgctacacaccagttgcaaggtcccgcttctgcctggtgggataactacgtggcgacccgtctagatgcaacggaggttacttgggcagagttttgtcaaagcttcaggaaggcacagattcctgaagggattatggcacaacagaagagagagttccgtgcattgcaacaaggaaccagaacggttacagagtacctgcacgagttcaaccgcctcgcgcgctacgctcctgaggacgtgcgcaccgatgctgagaagcaggagaagtttttgtttgggctcgacgatgaattgaccaaccagctaatctccggagtctatgaggactttgagaagcttgtggacaaggctatccgccaggaagagcaacgcaacaaaatggaccgaaaaagaaaggcagctcagatcagctttcctcaggggaacaatcagaagcctcgcttcatgacgggacagctaggtgggccttccaccctgatcgtctgtcagcaccgtccctatcacccgagtaacttcaacaacgactacaacggtggcagtcacaacaacagtaagcagcacaaccacaactcgactccacccccactaatggcaccagctcagtcagatccgccagctgtgtcagttcagtcagaacaacccaagaagggggctgtaggaaagccaggaccctgcttcaactgtggcaagcacggccactttgctggtaagtgtccgaagctgaatcgcactagacccaggttcatccaggcccgcgccaatcatgtgtctgcagaggaagcacaggcagcaccagaggtcgtgttgggcacgtttccagtgaactcatatccagcaacagttctctttgattcaggtgcctcgcattctttcatttccaaaagatttgctgggatgcatggattatcggtagtggaacttaaaataccgatgcaggttcatacccctggaaatgatatgaggacagcacactactgcccctcggtgactatagagatcaaaagatccccgtttctatccaacctcatccttctcgaatctaaagacctagatgtcattctcggaatggattggttgaccagaaacaagggagtgattgactgcgcaagccgcaccatcaccctaaccaacgacaaaggggagaagatcaccttccgttctccagtgtcgcagaagtccgtagcgagtctgaatcaggctgctattgagggtcagacagaaacagtggagaaaagtcccaggaagttggaggatattcctatagtacaagagtatcctgaggtgttcccagaagacctcactacaatgccaccgaagagagaaatcgagttccggatcgatttggcacccgggactgctccaatttacaagaggccgtacagaatggcagctaatgagctagcagaggtcaagaagcaggttgacgaacagctgcagaaagggtacatccgaccgagtacttcaccttggggtgctccggttatctttgtggagaagaaagacaagactaagaggatgtgcgttgattatcgggcccttaatgaggtcacaatcaagaacaaatatccgttgccaagaattgatgacctgtttgatcagctaaaaggagctaaggtgttctccaagatagacctgcgatcaggctatcaccagttgagaattcgggaagaggatattcccaagacagccttcaccactcggtatgggttgtttgagtgcacggttatgtcctttggactcaccaatgcaccggctttcttcatgaacttgatgaacaaagtgtttatggagtttcttgacaagtttgtcgtggtgttcattgacgacatacttatctattccaagtctgaaaaacaacatgagcaacatcttcgtctggtactcgagaaattgaaggagcaccagttatatgccaagtttagcaagtgtgacttctggttatcggaggtcaaatttctgggtcacgtcatttctgctcaaggcgtggcagtggatccatcaaatgtggaatcagttaccaagtggaccccaccaaagacagtttctcaaatccggagttttcttggacttgcgggctattaccgtcggttcatcgaaaatttctccaagattgccaggcccatgacacagttgctaaagaaagatgaaaaattcaagtggtcggctgagtgcaaccaaagttttgaagaactcaagaagaagttagtctctgcaccagttctaattctgccagatcagacaaaagacttccaggtatactgtgatgcatctcgccaaggattgggatgtgtgttgatgcaagaaggcagagtggtcgcatatgcttcgcgacagttgcgtccacatgagaccaattatcccactcatgaccttgagttggcagcagtggttcatgctctgaaaatctggcggcactatcttattggcaaccgctgtgaagtttacactgatcataagagcctgaagtacatcttcacccagcccgacttaaatctccggcaacgaagatggctggagttgattaaagattatgacatggggatacactatcatccaggcaaagcaaatgtggtagcagatgctctgagcagaaagagctattgcaatgcagtatgtaccgaaggcatgtgtgacaaattgcagcaagatcttgagcacctaaatttgggcatcgtggaacacgggttcgtagctgccctagaggcacggcctacactcgtggatcaagtcagagcagctcaagtaaatgatcctgaaatagctgagctgaaaaagaatatgagggttggaaaagctcgagatttccatgaggatgagcatggcacaatctggttgggagagagattgtgtgtgcctgacgacaaagaactgaaggatctcatactaacagaagctcatcaaactcagtattcaattcatcccggcagtactaaaatgtaccaggacctcaaagagaaattctggtgggtcagcatgagaagagagatagccgaattcgtcgcactctgcgatgtttgtcagcgagtcaaagcagaacatcagaggcccgcaggactgctacaaccccttcagatcccggaatggaaatgggaagaaatcggaatggatttcataacaggtttgcccaggacatcgtcggggcacgattcaatctgggtggtcgtggatcgactcaccaaagttgctcatttcattccagtacacactacctatacggggaaaaggttggcagagctgtacttagcaaggatcatgtgtctgcatggggtacctaagaagatagtatctgatcgggggagtcagttcacttcaaaattttggcagaaactgcaagaagaattggggactcgtttgaatttcagcacggcttatcatccgcaaactgatggtcagaccgaaagggtcaatcagatcttggaagatatgctgcgagcgtgtgcgctcgattttggtggagcatgggataaaagtctgccttatgcggaattctcttacaacaacagttatcaagccagtttgcaaatggcaccgtttgaagcgttgtacggacggaaatgccgcactccgctcttctgggatcaaactggagaacgccaattgtttgggacggaagtattaactgaagcagaggagaaagtcagaaccatcagagaaaggctaagaattgcccagtctcggcagaagagttatgctgataaccgccgaagagagcttactttcgaagcaggggattatgtgtaccttcgtgtcactccgctccgaggagtacaccgttttcagacgaaaggcaagctggcaccacgcttcgtgggaccatacaaaattttggaacgaaggggagaagttgcttatcagctagaacttccatccaacatgatcggcatccatgacgtgttccacgtttcccaactaaagaagtgcttaagggtacctgaggaacaggctgattcggaacacatcgatatccaggaggacctgacctatgtggagaagccg

SEQ ID NO: 14493 - DNA, 170 bp, Oryza sativa
  Clone ID: TFbOSC12547j.C1.o1.gm
gttgcttcctcttccgaatgatgactccactgaactcggcaaaacctggtgaccttgtttctggttctcctttcgctggtgtcaagtatgcgaaccggcttctccacataggtcaggtcctcctggatatcgatgtgttccgaatcagcctgttcctcaggtacccttaa

SEQ ID NO: 14494 - DNA, 4353 bp, Oryza sativa
  Clone ID: TFbOSC1521j.C1.o1.fg
atggtgaagacaagggacgatccccgtgactccaacgacgccagtggcagcgaagagcagaccgatggagctcatgtcagtggtgcatctggcagcagatcatctccaccgcccgaaaacccaacagtcactcaaatgatgacaatgatgatgcaacagatgcagcaacattaccatcagatgttgcagcaggcgcaacagaaccagcagtttggtcctccaccatcacacgtgtccaaactgttagactttcttcgtatccagccacccactttctcaagcaccaccaacccaatggaggccaacgactggcttcgtgctattgagaagaagctgatccttctgcaatgtaacgaccgagagaaggttgcttttgctacacatcagttgcaaggtcctgcttctgcttggtgggatcactacgtggtgacccgtccagatgcaacggaggttacttgggcagagttttgtcaaagcttcaggaaggcacagattcccgaagggattatggcacaacagaagagagagttccgtgcattgcaacaaggaaccagaacggttacagagtacctgcacgagttcaaccgcctcgcgcgctacgctcccgaggacgtgcgcaccgatgctgagaagcaggagaagtttttgtttgggctcgatgatgaattgaccaaccaactaatctccggagtctatgaggactttgagaagcttgtggacaaggctatccgccaggaagagcaacgcaacaaaatagaccgaaaaagaaagacagctcagatcagctttcctcaggggaacaatcagaagcctcgtttcatgacgggacagctaggtgggccttccaccctgatcgtctgtcagcaccgtccctatcgcccgagtaacttcaacaacgattacaatggtggcagtcacaacaacagtaagcagcacaaccacaactcgactccacccccactaatggcaccagctcagtcagatccgccagctgtgtcagttcagttagaacaacccaagaagggggctgtaggaaagccaggaccctgcttcaactgtggcaagcacggccactttgctggcaagtgtccgaagctgaatcgcactggacccaggttcatccaggcccgcgccaatcatgtgtctgcagaggaagcacaggcagcaccagaggtcgtgttgggcacgtttccagtgaactcatatccagcaacagttctctttgattcaggtgcctcgcattctttcatttccaaaagatttgctgggacacatggattatcggtagtggaacttaaaataccgatgcaggttcatacccctggaaatgatatgaggacagcacactactgcccctcggtgactatagagatcaaaagatcaccgtttctatccaacctcatccttctcgaatctaaagacctggatgtcattcttggaatggattggttgaccagaaacaagggagtgattgactgcgcaagccgcaccatcaccctaaccaacgacaaaggggagaagatcaccttccgttccccagcgtcgcagaagtccgtagcgagtctgaatcaggctgctattgagggtcagacagaaacagtggagaaaagtcccaggaagttggaggatattcctatagtacaagagtatcctgaggtgttcccagaagacctcactacaatgccaccgaagagagaaatcgagttccggatcgatttggcacccgggactgctccaatttacaagaggccgtacagaatggcagctaatgagctagcagaggtcaagaagcaggttgacgaacagctgcagaaagggtacatccgaccgagtacttcaccttggggtgctccggttatctttgtggagaagaaagacaagaccaagaggatgtgcgtggattatcacgcccttaatgaggtcacaatcaagaacaaatatccgttgccaagaattgatgacctgtttgatcagctaaaaggagctaaggtgttttccaagatagacctacgatcaggctatcatcagttgagaattcgggaagaggatattcccaagacagccttcaccactcggtatgggttgtttgagtgcacggttatgtcctttggactcaccaatgcaccggctttcttcatgaacttgatgaacaaagtgtttatggagtttcttgacaagtttgtcgtggtattcattgacgacatacttatttattcaaaatcagaagaggaacatgagcagcatctccgcctggtactcgagattttgaaggagcaccagctatatgccaagtttagcaagtgtgacttctggttatcggaggtcaaatttctgggtcacatcatttctgctcaaggcgtggcagtggatccatcaaatgtggagtcagttacaaagtggaccccaccaaagacagtttctcagatccggagttttcttggacttgcgggctattaccgtcggttcatcgaaaatttctctaagattgccaggcccatgacacagttgctaaagaaagatgaaaaattcaaatggtcagctgagtgcaaccaaagttttgaagaactcaagaagaagttagtctccgcaccagttctaattctgccagatcagacgaaagacttccaggtctactgtgatgcatctcgccaaggattgggatgtgtgttgatgcaagaaggcagagtggttgcatatgcttcgcgacagttgcgtccacatgaggccaattatcccactcatgaccttgagttggcagcagtggttcatgctctgaaaatctggcggcactatcttattggcaaccgctgtgaagtttacactgatcataagagcctgaagtacatcttcacccagcccgacttaaatctccggcaacgaagatggctggagttgattaaagattatgacatggggatacactatcatccaggcaaagcaaatgtggtagcagatgctctgagcagaaagagctattgcaatgcagtatgtaccgaaggcatgtgtgacaaattgcagcaagatcttgagcacctaaatttgggcatcgtagaacacggatacgtagctgccctagaggcccggcctacgctcgtggatcaagtcagagcagctcaggtaaatgatcctgaaatagctgagctaaaaaaaaatatgagggtcggaaaagcccgagatttccatgaggatgagcatggcacaatctggttgggagaaagattgtgtgtgcctgacgacaaagaactgaaggatctcatactcacagaagctcatcaaactcagtattcaattcatcccggcagtactaaaatgtaccaggacctcaaagagaaattctggtgggtcagcatgagaagagagatagccgaattcgtcgcactctgcgatgtttgtcagcgagtcaaagcagaacatcagaggcccgcaggactgctacaaccccttcagatcccggaatggaaatgggaagaaatcggaatggatttcataacaggtttgcccagaacatcgtcggggcacgattcaatctgggtggtcgtggatcgactcaccaaagttgctcattttattccagtacacactacctatactgggaaaaggttggcagagctttatctttcaagaatcatgtgtttgcatggggtacctaagaagattgtatctgatcgaggaagtcaattcacttcaaagttttggcagaaactgcaagaagaattggggactcgtttgaatttcagcacggcttatcatccacaaacagatggtgagcgccaactgtttgggacagaagtgttaaccgaagcagaggagaaagtcaggaccgtcaggaaaagactgcgaatcgcccagtctcggcaaaagagttatgctgataaccgccgaagagagcttactttcgaagcaggggattatgtgtatcttcgtgtcactccgctccggggagtacatcgttttcagacgaaaggcaagttggcaccacgcttcgtgggaccatacaaaatcttggaacgaaggggagaagttgcttatcagctagaacttccatccaacatgatcggcatccatgacgtgttccacgtgtcccaattaaagaagtgtttaagggtacctgaagaacaggctgattcggaacacattaatatccaggaggacctaacttatgtggagaagccggttcgcatacttgataccagcgaaaggagaaccagaaacaaggttacccggttttgccgagttcagtggagtcatcattcggaagaggaagcaacctgggaaagggaagatgagttgaaagccgcccatccgcatctcttcaccagctcctccgaatctcggggccgagattccgtttaa

SEQ ID NO: 14495 - DNA, 4407 bp, Oryza sativa
  Clone ID: TFbOSC16872j.C1.o1.fg
atgatgatgcaacagatgcagcaacattaccatcagatgttgcagcaggcgcaacagaaccagcagtttggtcctccaccatcacacgtgtccaaactgttagactttcttcgtatccagccacccactttctcaagcaccaccaacccaatggaggccaatgactggctccgtgctattgagaagaagctgaacctattgcaatgcaacgaccgagagaaagttgcttttgctacacaccagttgcaaggtcccgcttctgcctggtgggataactacgtggcgacccgtctagatgcaacggaggttacttgggcagagttttgtcaaagcttcaggaaggcacagattcctgaagggattatggcacaacagaagagagagttccgtgcattgcaacaaggaaccagaacggttacagagtacctgcacgagttcaaccgcctcgcgcgctacgctcctgaggacgtgcgcaccgatgctgagaagcaggagaagtttttgtttgggctcgacgatgaattgaccaaccagctaatctccggagtctatgaggactttgagaagcttgtggacaaggctatccgccaggaagagcaacgcaacaaaatggaccgaaaaagaaaggcagctcagatcagctttcctcaggggaacaatcagaagcctcgcttcatgacgggacagctaggtgggccttccaccctgatcgtctgtcagcaccgtccctatcacccgagtaacttcaacaacgactacaacggtggcagtcacaacaacagtaagcagcacaaccacaactcgactccacccccactaatggcaccagctcagtcagatccgccagctgtgtcagttcagtcagaacaacccaagaagggggctgtaggaaagccaggaccctgcttcaactgtggcaagcacggccactttgctggtaagtgtccgaagctgaatcgcactagacccaggttcatccaggcccgcgccaatcatgtgtctgcagaggaagcacaggcagcaccagaggtcgtgttgggcacgtttccagtgaactcatatccagcaacagttctctttgattcaggtgcctcgcattctttcatttccaaaagatttgctgggatgcatggattatcggtagtggaacttaaaataccgatgcaggttcatacccctggaaatgatatgaggacagcacactactgcccctcggtgactatagagatcaaaagatccccgtttctatccaacctcatccttctcgaatctaaagacctagatgtcattctcggaatggattggttgaccagaaacaagggagtgattgactgcgcaagccgcaccatcaccctaaccaacgacaaaggggagaagatcaccttccgttctccagtgtcgcagaagtccgtagcgagtctgaatcaggctgctattgagggtcagacagaaacagtggagaaaagtcccaggaagttggaggatattcctatagtacaagagtatcctgaggtgttcccagaagacctcactacaatgccaccgaagagagaaatcgagttccggatcgatttggcacccgggactgctccaatttacaagaggccgtacagaatggcagctaatgagctagcagaggtcaagaagcaggttgacgaacagctgcagaaagggtacatccgaccgagtacttcaccttggggtgctccggttatctttgtggagaagaaagacaagactaagaggatgtgcgttgattatcgggcccttaatgaggtcacaatcaagaacaaatatccgttgccaagaattgatgacctgtttgatcagctaaaaggagctaaggtgttctccaagatagacctgcgatcaggctatcaccagttgagaattcgggaagaggatattcccaagacagccttcaccactcggtatgggttgtttgagtgcacggttatgtcctttggactcaccaatgcaccggctttcttcatgaacttgatgaacaaagtgtttatggagtttcttgacaagtttgtcgtggtgttcattgacgacatacttatctattccaagtctgaaaaacaacatgagcaacatcttcgtctggtactcgagaaattgaaggagcaccagttatatgccaagtttagcaagtgtgacttctggttatcggaggtcaaatttctgggtcacgtcatttctgctcaaggcgtggcagtggatccatcaaatgtggaatcagttaccaagtggaccccaccaaagacagtttctcaaatccggagttttcttggacttgcgggctattaccgtcggttcatcgaaaatttctccaagattgccaggcccatgacacagttgctaaagaaagatgaaaaattcaagtggtcggctgagtgcaaccaaagttttgaagaactcaagaagaagttagtctctgcaccagttctaattctgccagatcagacaaaagacttccaggtatactgtgatgcatctcgccaaggattgggatgtgtgttgatgcaagaaggcagagtggtcgcatatgcttcgcgacagttgcgtccacatgagaccaattatcccactcatgaccttgagttggcagcagtggttcatgctctgaaaatctggcggcactatcttattggcaaccgctgtgaagtttacactgatcataagagcctgaagtacatcttcacccagcccgacttaaatctccggcaacgaagatggctggagttgattaaagattatgacatggggatacactatcatccaggcaaagcaaatgtggtagcagatgctctgagcagaaagagctattgcaatgcagtatgtaccgaaggcatgtgtgacaaattgcagcaagatcttgagcacctaaatttgggcatcgtggaacacgggttcgtagctgccctagaggcacggcctacactcgtggatcaagtcagagcagctcaagtaaatgatcctgaaatagctgagctgaaaaagaatatgagggttggaaaagctcgagatttccatgaggatgagcatggcacaatctggttgggagagagattgtgtgtgcctgacgacaaagaactgaaggatctcatactaacagaagctcatcaaactcagtattcaattcatcccggcagtactaaaatgtaccaggacctcaaagagaaattctggtgggtcagcatgagaagagagatagccgaattcgtcgcactctgcgatgtttgtcagcgagtcaaagcagaacatcagaggcccgcaggactgctacaaccccttcagatcccggaatggaaatgggaagaaatcggaatggatttcataacaggtttgcccaggacatcgtcggggcacgattcaatctgggtggtcgtggatcgactcaccaaagttgctcatttcattccagtacacactacctatacggggaaaaggttggcagagctgtacttagcaaggatcatgtgtctgcatggggtacctaagaagatagtatctgatcgggggagtcagttcacttcaaaattttggcagaaactgcaagaagaattggggactcgtttgaatttcagcacggcttatcatccgcaaactgatggtcagaccgaaagggtcaatcagatcttggaagatatgctgcgagcgtgtgcgctcgattttggtggagcatgggataaaagtctgccttatgcggaattctcttacaacaacagttatcaagccagtttgcaaatggcaccgtttgaagcgttgtacggacggaaatgccgcactccgctcttctgggatcaaactggagaacgccaattgtttgggacggaagtattaactgaagcagaggagaaagtcagaaccatcagagaaaggctaagaattgcccagtctcggcagaagagttatgctgataaccgccgaagagagcttactttcgaagcaggggattatgtgtaccttcgtgtcactccgctccgaggagtacaccgttttcagacgaaaggcaagctggcaccacgcttcgtgggaccatacaaaattttggaacgaaggggagaagttgcttatcagctagaacttccatccaacatgatcggcatccatgacgtgttccacgtttcccaactaaagaagtgcttaagggtacctgaggaacaggctgattcggaacacatcgatatccaggaggacctgacctatgtggagaagccggttcgcatacttgacaccagcgaaaggagaaccagaaacaaggtcaccaggttttgccgagttcagtggagtcatcattcggaagaggaagcaacctgggaaagggaagatgagttgaaagccgcccatccgcacctcttcaccagctcctccgaatctcggggccgagattccgtttaa

SEQ ID NO: 14496 - DNA, 170 bp, Oryza sativa; identical to SEQ ID NO: 14493
  Clone ID: TFbOSC16872j.C1.o1.gm

SEQ ID NO: 14497 - DNA, 1098 bp, Oryza sativa
  Clone ID: TFbOSC25996j.C1.o4.gm
atggtgaagacaaggaatgatccccgtgactccaacgacgccagtggcagcgaagagcagaccgatggagctcatgtcagtggtgcatctggcagcagatcatctccaccgcccgaaaacccaacagtcactcaaatgatgacaatgatgatgcaacagatgcagcaacattaccatcagatgttgcagcaggcgcaacagaaccagcagtttggtcctccaccatcacacgtgtccaaactgttagactttctctgtatccagccacccactttctcaaacaccaccaacccaatggaggccaacgactggctccgtgctattgagaagaagctgaacctactgcaatgcaacgaccaagagaaagttgcttttgctacacaccagttgcaaggtcccgcttctgcctggtgggataactacgtggcgacccgtctagatgcaacggaggttacttgggcagagttttgtcaaagtttcaggaaggcacagattcctgaagggattatggcacaacagaagagagagttccgtgcgctccaacaaggaaccatgtcagttacagagtacttgcatgagttcaaccgccttgcacgctatgctcctgaggacgtgcgcaccgatgctgagaagcaggagaagtttttatttgggctcgacgatgaattgaccaaccagctaatctccggagtttatgaggactttgagaagcttgtggacaaggctattcgtcaggaagagcaacgcaacaaaatggaccgaaaaagaaaggcagctcagatcagctttcctcaggggaacaatcagaagcctcgcttcatgacgggacagctaggtgggccttccaccctgatcgtctgtcagcaccgtccctatcacccgagtaacttcgacaacgactacaacggtggcaggcacaacaacaaacaacccaagaagggggctgtaggaaagccaggaccctgcttcaactgtggcaagcacggccactttgctggcaagtgtccgaagctgaatcgcactggacccaggttcatccaggcccgcgccaatcatgtgtctgcagaggaagcacaggcagcaccagaggtcgtgtag

SEQ ID NO: 14498 - DNA, 4347 bp, Oryza sativa
  Clone ID: TFbOSC27228j.C1.o1.fg
atggtgaagacaaggaatgatccccgtgactccaacgacgccagtggcagcgaagagcagacagatgaagctcataccagtggtgcacctggcagcagttcatctccgccgcccgagaacccaacagtcactcagatgatgacaatgatgatgcaacagatgcagcaacattaccatcagatgttgcagcaggcgcatcagaaccagcagtttggtcctccaccatcacacgtgtccaaactgttagactttcttcgtattcagccacccactttctcaagcaccaccaacccaatggaggccaacgactggctccgtgctattgagaagaagctgaacctactacaatgcaacgaccaagagaaagttgcttttgctacacaccagttgcaaggtcccgcttctgcctggtgggataactacgtggtgacccgtccagatgcaacgaaggttacttgggcagagttttgtcaaaactttaggaaggtacagattcctgaagggattatggcacaacagaagagagagttccgtgcattgcaacaaggaaccagaacggttacagagtatctgcacgagttcaaccgcctcgcgcgctacgctcctgaggacgtgcgcaccgatgctgagaagcaggagaagtttttttttgggctcgatgatgaattgaccaaccagctaatctccggagtctatgaggactttgagaagcttgtggacaaggctatccgccaggaagagcaacgcaacaaaatggaccgaaaaagaaaggcagctcagatcagctttcctcaggggaacaatcagaagcctcgcttcatgacgggacagctaggtgggcctcccaccctgatcgtctgtcagcaccgtccctatcacccgagtaacttcaacaacgattacaacggtggcagtcacaacaacagtaagcagcacaaccacaactcgactccacccccactaatggcaccagctcagtcagatccgccagctgtgtcagctcagtcagaacaacccaagaagggggctgtaggaaagccaggaccatgcttcaactgtggcaagcacggccactttgctggcaagtgtccgaagctgaatcgcactagacccaggttcatccaggcccgcgccaatcatgtgtctgcagaggaagcacaggcagcaccagaggtcgtgttgggcacgtttccagtgaactcatatccagcaacagttctctttgattcaggtgcctcgcattctttcatttccaaaagatttgctgggacacatggattatcggtagtggaacttaaaataccgatgcaggttcatacccctggaaatgacatgagggcagcacattattgcccctcggtgactatagagatcaaaagatcaccgtttctatccaacctcatccttctcgaatctaaagacctagatgtcgttctcggaatggattggttgaccagaaacaagggagtgattgactgcgcaagccgcaccatcaccctaaccaacgacaaaggggagaagatcaccttccattccccagcatcgcagaagtccgtagcgagtctgaatcaggctgctattgagggtcagacagaaacagtggagaaaagtcccaggaagttggaggatattcctatagtacaagagtatcctgaggtgttcccagaagacctcactacaatgccaccgaagagagaaatcgagttccggatcgatttggcacccgggactgctccaatctacaagaggccgtacagaatggcagctaacgagctagcagaagtcaaaaagcaagttgacgaacagctgcagaaagggtacatccgaccgagtacttcaccttggggtgctccggtgatctttgtggagaagaaagacaagactaagaggatgtgcgtggattatcgcgcccttaatgaggtcacaatcaagaacaaatatccgttgcccagaattgatgacctgtttgatcagctaaaaggagctaaggtgttttccaagatagacctgcgatcaggctatcatcagttgagaattcgggaagaggatattcccaagacagccttcaccactcggtatgggttgtttgagtgcacggttatgtcctttggactcaccaatgcaccggctttcttcatgaacttgatgaacaaagtgtttatggagtttcttgacaagtttgtcgtggtattcattgacgacatacttatttattcaaaatcagaagaggaacatgagcagcatctccgtctggtactcgagaaattgaaggagcaccagctatatgccaagtttagcaagtgtgacttctggttatcggaggtcaaatttctgggtcacgtcatttctgctcaaggcatggcagtggatccatcaaatgtggaatcagttacaaagtggaccccaccaaagacagtttctcaaatccggagttttcttggacttgcgggttattaccgtcggttcatcgaaaatttctctaagattgccaggcccatgacacagttgctaaagaaagatgaaaaattcaaatggtcagctgagtgcaaccaaagttttgaagaactcaagaagaggttagtctctgcaccagttctagttctgccagatcagacaaaagatttccaagtctactgtgatgcatcccgccaaggattgggatgtgtgttgatgcaagaaggcagagtggtcgcatatgcttcgcgacagttgcgcccacacgagaccaattatcccactcatgaccttgagttggcagcagtggttcatgctctgaaaatctggcggcactatcttattttcaaccgctgtgaagtttacactgatcataagagcctgaagtacatcttcacccagcccgacttgaatctccggcaacgaagatggctagagttgattaaagattatgacatggggatacactatcatccaggcaaagcaaatgtggtagcagacgctctaagcagaaagagctattgcaatgcagtatgtattgaagacatgtgtgacaaattgcagcaagatcttgagcacctaaatttgggcatcgtggaacacgggttcgtagctgccctagaggcacggcctacgctcgtggatcaagtcagagcagctcaggtaaatgatcctgaaatagctgagctaaaaaagaatatgagggttggaaaagcccgagatttccatgaggatgaacatggcacaatctggttgggagaaagattgtgtgtgcctgacgacaaagaactgaaggatctcatactcacagaagctcatcaaactcattattcaattcatcccggtagtactaaaatgtaccaggacctcaaagagaaattctggtgggtcagcatgagaaaggaaatagccgaattcgtcgcactctgcgatgtttgccagttggcagagctttacctttcaagaatcatgtgtttgcatggggtacctaagaagattgtatctgatcgaggaagtcaattcacttcaaagttctggcagaaactgcaagaagaattggggactcgtttgaatttcagcacggcttatcatccgcaaacagatggtcagaccgagcgagtaaatcaaatcttggaagatatgttgagagcttgtgcacttgactttggtggagcctgggataaaagtctaccgtatgcggaattctcttacaacaacagctatcagtccagtttgcaaatggcaccgtttgaagcattgtacggacgaaagtgccgcaccccacttttctgggatcaaacaggtgagcgccaactgtttgggacagaagtgttaaccgaagcagaggagaaagtcaggaccgtcagggaaagactgcgaatcgcccagtctcggcagaagagttatgctgataaccgccgaagagagcttactttcgaagcaggggattatgtgtaccttcgtgtcactccgcttcggggagtacaccgcttccaaaccaaaggcaagttggcaccacgctttgtgggaccatacaggatcttggaacgcagaggtgaagtcgcataccagctagagcttccatctaatatggttggtatccacgatgtgtttcatgtgtctcaactgaagaagtgtttgagggtacctgaggaacaagctagctcagagcacattgacatccaagaagatttgacctacgtggagaagccagttcgtatccttgagaccagtgagagaaggaccagaaacaaggtgatcaggttttgcaaagtccagtggagccaccactccgaggaagaggccacctgggaaagagaagatgaattgaaggccgctcatccgcacctcttcgccagctcttccgaatctcggggtcgagattccgtttaa

SEQ ID NO: 14499 - DNA, 652 bp, Oryza sativa
  Clone ID: TFbOSC27228j.C1.o3.np
atggcatttaaggaccggttcgcgggatgccctggaagaacttatcgtacttaccacaagcccgacgtacccaggcgagggtgggcgtgatggagttgggtcggccggggtgtccggttgatcggcttccggattcaccgcacgggaacgtgtcgtggggctgtgtcttgtgggtacagttgtacacctctgatcagagtaaaactattcgaatagccgtgcccgcggttatgggcggtcaaccagattcaccgtgattagtttcaccctagttagcttttggaactggttagttcaggtggtggtttgggcctgttgcaacgtggtgtaacgttggacagtgattggttaatatggattaaatactacaactgttttactgctttcaactactgctttgaaatgccggctttatgcaaaagaacctttagcctcccttggatatatcttgcatcatacctcctcttccggtatgacttgctgagtaccgtgggtagtactcagtcttgctcttttccccctcaccagaattgaagtccttctcagttgaagatgtctcgaagaggttggtttcgtcgctgccgtcaagcttagaaattctggttcgtgaatttctgggcgtgacaagttggtatcagagccgaccttgacc

SEQ ID NO: 14500 - DNA, 2754 bp, Oryza sativa
  Clone ID: TFbOSC31102j.C1.o13.gm
atggtgaagacaagggacgatccccgtgactccaacgacgccagtggcagcgaagagcagaccgatggagctcatgtcagtggtgcatctggcagcagatcatctccaccgcccgaaaacccaacagtcactcaaatgatgacaatgatgatgcaacagatgcagcaacattaccatcagatgttgcagcaggcgcaacagaaccagcagtttggtcctccaccatcacacgtgtccaaactgttagactttcttcgtatccagccacccactttctcaagcaccaccaacccaatggaggccaacgactggcttcgtgctattgagaagaagctgatccttctgcaatgtaacgaccgagagaaggttgcttttgctacacatcagttgcaaggtcctgcttctgcttggtgggatcactacgtggtgacccgtccagatgcaacggaggttacttgggcagagttttgtcaaagcttcaggaaggcacagattcccgaagggattatggcacaacagaagagagagttccgtgcattgcaacaaggaaccagaacggttacagagtacctgcacgagttcaaccgcctcgcgcgctacgctcccgaggacgtgcgcaccgatgctgagaagcaggagaagtttttgtttgggctcgatgatgaattgaccaaccaactaatctccggagtctatgaggactttgagaagcttgtggacaaggctatccgccaggaagagcaacgcaacaaaatagaccgaaaaagaaagacagctcagatcagctttcctcaggggaacaatcagaagcctcgtttcatgacgggacagctaggtgggccttccaccctgatcgtctgtcagcaccgtccctatcgcccgagtaacttcaacaacgattacaatggtggcagtcacaacaacagtaagcagcacaaccacaactcgactccacccccactaatggcaccagctcagtcagatccgccagctgtgtcagttcagttagaacaacccaagaagggggctgtaggaaagccaggaccctgcttcaactgtggcaagcacggccactttgctggcaagtgtccgaagctgaatcgcactggacccaggttcatccaggcccgcgccaatcatgtgtctgcagaggaagcacaggcagcaccagaggtcgtgttgggcacgtttccagtgaactcatatccagcaacagttctctttgattcaggtgcctcgcattctttcatttccaaaagatttgctgggacacatggattatcggtagtggaacttaaaataccgatgcaggttcatacccctggaaatgatatgaggacagcacactactgcccctcggtgactatagagatcaaaagatcaccgtttctatccaacctcatccttctcgaatctaaagacctggatgtcattcttggaatggattggttgaccagaaacaagggagtgattgactgcgcaagccgcaccatcaccctaaccaacgacaaaggggagaagatcaccttccgttccccagcgtcgcagaagtccgtagcgagtctgaatcaggctgctattgagggtcagacagaaacagtggagaaaagtcccaggaagttggaggatattcctatagtacaagagtatcctgaggtgttcccagaagacctcactacaatgccaccgaagagagaaatcgagttccggatcgatttggcacccgggactgctccaatttacaagaggccgtacagaatggcagctaatgagctagcagaggtcaagaagcaggttgacgaacagctgcagaaagggtacatccgaccgagtacttcaccttggggtgctccggttatctttgtggagaagaaagacaagaccaagaggatgtgcgtggattatcacgcccttaatgaggtcacaatcaagaacaaatatccgttgccaagaattgatgacctgtttgatcagctaaaaggagctaaggagcaccagctatatgccaagtttagcaagtgtgacttctggttatcggaggtcaaatttctgggtcacatcatttctgctcaaggcgtggcagtggatccatcaaatgtggagtcagttacaaagtggaccccaccaaagacagtttctcagatccggagttttcttggacttgcgggctattaccgtcggttcatcgaaaatttctctaagattgccaggcccatgacacagttgctaaagaaagatgaaaaattcaaatggtcagctgagtgcaaccaaagttttgaagaactcaagaagaagttagtctccgcaccagttctaattctgccagatcagacgaaagacttccagttgcgtccacatgaggccaattatcccactcatgaccttgagttggcagcagtggttcatgctctgaaaatctggcggcactatcttattggcaaccgctgtgaagtttacactgatcataagagcctgaagtacatcttcacccagcccgacttaaatctccggcaacgaagatggctggagttgattaaagattatgacatggggatacactatcatccaggcaaagcaaatgtggtagcagatgctctgagcagaaagagctattgcaatgcagtatgtaccgaaggcatgtgtgacaaattgcagcaagatcttgagcacctaaatttgggcatcgtagaacacggatacgtagctgccctagaggcccggcctacgctcgtggatcaagtcagagcagctcag

SEQ ID NO: 14501 - DNA, 3045 bp, Oryza sativa
  Clone ID: TFbOSC32579j.C1.o3.fg
atggtgaagacaaggaatggttctcaatccaacaaggtcagtggcagtgaagagcagatcaatggaccacgtgccagcggtgcatctgatagcagttcatctccaccactcgagaaccctacgattgctcaggtgttggacaatcagactcagatgataacaatgatgatgcaacagatgcaacaacagtaccatcaggtgttgcagcagtccaaactgttagaatttctccgtgtcaagccgcccactttctcaagtaccaccaacccaatcgaggccaatgactggcttcgtgctattgagaagaagctgaaccttttgcaatgcaacgaccaagagaaggttgcttttgctacacaccagctgcaactgcaaggtcccgcttctgtttggtgggacaactacatggtgacccgtccagctgggacagaggttacttggatagagttttgtcagagttttaataaggcacaggttcccgagggaattgtggcacaaaagaagagagagttccgttctttgcagcaaggaaccagaacagttatagagtatctacacgagttcaaccgtctcacgcgctatgcccctgaggacgtgcgcactgatgccgagaggcaggagaagtttttgtcgggtcttgatgatgaattgaccaaccagttgatctcccaacattatgaggactttcagaagttggtggacaaagccatccgtcaggaagagcagtgcaacaaaatgaaccgtaaaaggaaggcagttcagttcaggacttcccaggggattagtcagaagcctcgcctcacgatgggacatcagggtggaccttccaccatgattatccagcagcaccgtccctaccacccgggtagcttcgacaagaactaccatagtggcagtcacaacaacagtgagcagcacagcctcaatccgactccaagttcactaatgaatgtagctcagtcagctctaccagctcagccagaacagcccaagaagtttggagaaaagcctgacctctgcttcaattgtaacgagcccggacacatggttggtaagtgcccgaagccaagacgtgccggactcaagttcgttcaggcccatgtcaatcatgcatctgcagaggaggcacagtcagcaccagaggttatattgggcacatttcccgtcaactcgacaccggcagtaatattgtttgattctggtgcaactcattccttcatttccaagcgttttgctggtgcgcatgggttatctttagtgaagcttaagatacctatgcgagttcatactcctggaggtggcatgaccacaactcactattgcccatcagtaacagttgaaattcaagggttgatttttccagccaacctcattcttctcgaatccaaggatctagatgttattcttggaatggattggttgacaaggcacagagtgattgattgcactagccacaccatcaagttgaccaatgcgaaaggagaagtggtaaccttccagtctccagtattgcagaagccagggatcagtttaaaccaggctgctggtgaggaacaagaggtagcagtggagaaaaccactaagaagttggaagatattcccatagtcagagagtatccagaggtttttccggataatctgacaacaatgccaccaaaaagggatatcgagttccggatcgacttggcacctggaactgcaccgatccacaagaggccttacagaatgggagccaacgagttggcggaagtcaagaagcaagttgatgaacagttacagaagggatacattcgcccgagcacgttgccttggggtgctccgtacgcactcaatgaggtcactattaagaacaagtaccctttgtcaaggattgatgatctgtttgatcagttgaaaggagctacagtgttccctaagatggacctgcgatcaggctatcaccagttgaggatccgtgaagaggatattccaaagactgcattcatcacttgttatgggttgttcgaatgtacagttatgtctttcggactcaccaacgaacctgccttcttcatgaatttgatgaacaaggtgtttatggaatttctagacaagtttgtcgtggttttcatcgatgacatactgatttactccaagtccgaggaagaacatgagcagcatcttcggttggtacttgaaaagttaaaagagcaccagctatatgccaagttcagcaagtgtgacttctggcttaaggaagttcagtttctcggtcacatcgtgaatgctcaaggagtagctgtggatccagcaaatgtggagtcagttaccaagtggaccccaccgaggacagtcactcaggttcggagtttctttggacttgcgggctattaccgccagttcattgagaagttctctaaaattgcaaagccaatgacacagctattgaagaagaaagaaaagtttatctggtctgctgaatgcaataggagttttgaagaactcaaacgacggttggtgtctgcaccagttttaattctgcctgatcagacgaaagatttccagttgcgtcctcatgaaggcaactacccgacccacgatctggaattggccgcagttgttcatgctttaaagatctggcggcactatttcatcggtaaccgttgtgagcgaagatggttggagctaatcaaggattatgatatgggaatacactatcatgccggcaaggctaatgtggtagcagacgccttaagcaggaagagttactgcaatgttgcatgggtagagaaactgtgttgtgaggttaaacgtgatttggaacatctgaaccttagtatagttgagcacggattcgtggctgccctagaggcacagcccacattggtggagcaggttcgcatagctcatgcaagtgatcctgaaatagcagagctcaaaaagaacatgagagttggaaaagcccgaggttttgatgaggacgaacaaggaacaatctggatgggagaaagattgtgtgtacctggatgggagaaagattgtgtgtacctgaaaacaaggagttaa

SEQ ID NO: 14502 - DNA, 4497 bp, Oryza sativa
  Clone ID: TFbOSC400202j.C1.o2.fg
atggtgaagacaaggaatgatccccgtgactccagcgacgccaggggcagcgaagagcagaccgatggagctcatgtcggtggtgcatctgacagcagttcatccccaccgctcgggaacccaacggtcactcaaatgatgacaatgacgatgcaacagatgcagcaacatcaccatcaggtgttgcaacaggtgcagcagaaccagtggtttgctcctccaccatcacacctgtccaaactgttagactttctccgcatccagccacctactttctcaagcaccaccaacccaatggaggccaacgactggctccgtgttgttgagaagaagctgaaccttctgcaatgcaacgaccgagagaaggttgcttttgctacacatcagttgcaaggtcctgcttctgcctggtgggataactacgtggtgacccgtctagatgcaacggaggttacttgggcagagttttgtcaaagcttcaggaaggcacagattcctgaagggattatggcacaacagaagagagagttccgtgcgctccagcaaggaaccatgtcagttacagagtacctgcacgagttcaactgccttgcgcgctacgctcctgaggacgtgcgcaccgatgccgagaagcaggagaagtttttgtttggtcttgatgatgagttgaccaaccagctaatctccggagtctatgatgattttgagaagcttgtggacaaggctatccgtcaggaagagcaacgcaacaaaatggaccgtaaaagaaaggcagctcagatcagctttcctcaggggaacaatcagaagcctcgcttcatgacgggacagctaggtgggccttccaccctgatcgtctgtcagcaccgtccctatcacccgagtaacttcgacaatgactacaacggtggctgtcacaacaacagtaagcagcacaaccacaactcgactccacccccactaatggcaccagctcagtcagattcaccagctgtgtcagctcagtcagaacagcccaagaagggggctgtaggaaagctaggaccctgcttcaactgtggcaagcacggccactttgctggcaagtgtccgaagctgaatcgcgctggacccaggttcattcaggcccgcgtcaatcatgcgtctgcagaggaggcactggcggcaccagaggtcgtgctgggcacgtttccagtgaactcatatccagcaacagttctctttgattcaggtgcctcgcactctttcatttccaagagatttgctggggcacatggattatcggtagtggaacttaaaataccgatgcaggttcatacccctggaaatgacatgaggacatcacactattgcccctcggtgactatagaaatcacaagatcaccgtttctatccaacctcatccttctcgaatccaaagacctggatgtcattctcggaatagattggttgaccagacacaagggggtgattgactgcgcaagccgcaccatcaccctaaccaacgacaaagcggagaagatcaccttccgttctccagtgtcgcagaagtccgtagcgagtttgaatcaggctgctattgagggtcagacagaaacagtggagaaaagtcccaggaagttggaggatattcctatagtacaagagtatcctgaggtatttcctgaagacctcactacaatgccaccgaagagagaaatcgagttccgaattgatctggcacccggaactgctccaatctacaagaggccgtacagaatggcagctaacgagctagcagaagtcaaaaagcaagttgatgaacagctgcagaaagggtacattcgaccgagtacttcaccttggggtgctccggttatctttgtggagaagaaagacaagactaagaggatgtgcgttgattatcgggcccttaatgaggtcacaatcaagaataaatatccgttgccaagaattgatgacctgtttgatcagctaaaaggagctaaggtgttttccaagatagacctgcgatcaggctatcatcagttgagaattcgggaagaggatattcccaagacagccttcatcactcggtatgggttgtttgagtgcacggttatgtcatttggactcaccaatgcaccggctttcttcatgaacttgatgaacaaagtgtttatggagtttcttgacaagtttgtcgtggtattcattgacgacatacttatttattcaaaatcagaagaggaacatgagcaacatcttcgtctggtactcgagaaattgaaggagcaccagttatatgccaagtttagcaagtgtgacttctggttatcggaggtcaaatttctgggtcacgtcatttctgatcaaggcgtggcagtggatccatcaaatgtggaatcagttacaaagtggaccccaccaaagacagtttctcagatccggagttttcttggacttgcgggctattaccgtcggttcatcgaaaatttctccaagattgccaggcccatgacacagttgctaaagaaagatgaaaaattcaagtggtcagctgagtgcaaccaaagttttgaagaactcaagaagaagttagtctcagcaccagttctaattctgccagatcagacgaaagacttccaggtctactgtgatgcatctcgccaagggttgggatgtgtgttgatgcaagaaggcagagtggtcgcatatgcttcgcgacagttgcgtccacatgagagcaattatcctactcatgatcttgagttggcagcagtggttcatgctctgaaaatctggcggcactatcttattggcaaccgctgtgaagtctacactgaccacaagagtttaaaatatatcttcacccagcccgacttaaatctccggcaacgaagatggctggagttgattaaagattatgacatggggatacactatcatccaggcaaagcaaatgtggtagcagatgctctgagcagaaagagctattgcaatgcagtatgtaccgaaggcatgtgtgacaaattgcagcaagatcttgagcacctaaatttgggcatcgtagaacacgggtacgtagctgccctagaggcacggcctacgctcgtggatcaagtcagagcagctcaagtaaatgatcctgaaatagctgagctgaaaaagaatatgagggttggaaaagctcgagatttccatgaggatgagcatggcacaatctggttgggagaaagattgtgtgtgcctgacgacaaagaactgaaggatctcatactcacagaagctcatcaaactcagtattcaattcatcccggcagtactaaaatgtaccaggacctcaaagagaaattctggtggcgagtcaaagcagaacatcagaggcccgcaggactactacaaccccttcagatcccggaatggaaatgggaagaaatcggaatggatttcataacaggtttgcccaggacatcgtcggggcacgattcaatctgggtggtcgtggatcgactcaccaaagttgctcattttattccagtacacactacctatactgggaaaaggttggcagagctttatctttcaagaatcatgtgtttgcatggggtacctaagaagattgtatctgatcgaggaagtcaattcacttcaaagttctggcagaaactgcaagaagaattggggactcgtttgaatttcagcacggcttatcatccgcaaacagatggtcagactgagcgagtaaatcaaatcttggaagatatgttgagagcttgtgcacttgactttggtggagcctgggataaaagtctaccgtatgcggaattctcttacaacaacagctatcagtccagtttgcaaatggcaccgtttgaagcattgtacggacgaaagtgccgcacaccacttttctgggatcaaacaggtgggcgccaactgtttgggacagaagtgttaaccgaagcagaggagaaagtcaggaccgtcagggaaagactgcgaatcgcccagtctcggcagaagagttatgctgataaccgccgaagagagcttactttcgaagcaggggattatgtgtaccttcgtgtcactccgctccggggagtacaccggttccagacgaaaagcaaattggcaccacgctttgtgggaccatacaggattttggaacgcagaggtgaagtcgcttaccagctagagcttccatctaatatggttggtatccacgatgtgtttcatgtgtctcaactgaagaagtgtttgagggtacctgaggaacaagctagctcagagcacattgacatccaagaagatttgacctacgtggagaagccaattcgtatcctggaaaccagcgagagaaggaccagaaacaaagtaatcagattttgcaaagttcagtggagccaccactcagaggaagaggccacctgggaaagagaagatgaattaaaggccgcccatccgcacctcttcgccagctcttccgaatctcggggccgagattccgtttaa

SEQ ID NO: 14503 - DNA, 4551 bp, Oryza sativa
  Clone ID: TFbOSC401215j.C1.o19.fg
atggtgaagacaaggaatgatccccgtgactccagcgacgccaggggcagcgaagagcagaccgatggagctcatgtcagtggtgcatctggcagcagatcatctccaccgcccgaaaacccaacagtcactcaaatgatgacaatgatgatgcaacagatgcagcaacattaccatcagatgttgcagcaggcgcaacagaaccagcagtttggtcctccaccatcacacgtgtccaaactgttagactttcttcgtatccagccacccactttctcaagcaccaccaacccaatggaggccaacgactggctccgtgctattgagaagaagctgaacctactgcaatgcaacgaccaagagaaagttgcttttgctacacaccagttgcaaggtcccgcttctgcctggtgggataactacgtggcgacccgtctagatgcaacggaggttacttgggcagagttttgtcaaagcttcaggaaggcacagattcctgaagggattatggcacaacagaagagagagttccgtgcgctccagcaaggaaccatgtcagttacagagtacttgcatgagttcaaccgccttgcgcgctacgcccctgaggacgtgcgcaccgatgctgagaagcaggagaagtttttgtttgggctcgacgatgaattgaccaaccagctaatctccggagtttatgaggactttgagaagcttgtggacaaggctattcgtcaggaagagcaacgcaacaaaatggaccgaaaaagaaaggcagctcagatcagctttcctcaggggaacaatcagaagcctcgcttcatgacgggacagctaggtgggccttccaccctgatcgtctgtcagcaccgtccctatcacccgagtaacttcgacaacgattacaacggtggcagtcacaacaacagtaagcagcgcaaccacaactcgactccacccccactaatggcaccagctcagtcagatccgccaactgtgtcagttcagtcagaacaacccaagaagggggctgtaggaaagccaggaccctgcttcaactgtggcaagcacggccactttgctggcaagtgtccgaagctgaatcgcactggacccaggttcatccaggcccgcgccaatcatgtgtctgcagaggaagcacaggcagcaccagaggtcgtgttgggcacgtttccagtgaactcatatccagcaacagttctctttgattcaggtgcctcgcattctttcatttccaaaagatttgctgggacacatggattatcggtagtggaacttaaaataccgatgcaggttcatacccctggaaatgatatgaggacagcacactactgcccctcggtgactatagagatcaaaagatcaccgtttctatccaacctcatccttctcgaatctaaagacctggatgtcattcttggaatggattggttgaccagaaacaagggagtgattgactgcgcaagccgcaccatcaccctaaccaacgacaaaggggggaagatcaccttccgttccccagcgtcgcagaagtccgtagcgagtctgaatcaggctgctattgagggtcagacagaaacagtggagaaaagtcccaggaagttggaggatattcctatagtacaagagtatcctgaggtgttcccagaagacctcactacaatgccaccgaagagagaaatcgagttccggatcgatttggcacccgggactgctccaatttacaagaggccgtacagaatggcagctaatgagctagcagaggtcaagaagcaggttgacgaacagctgcagaaagggtacatccgaccgagtacttcaccttggggtgctccggttatctttgtggagaagaaagacaagaccaagaggatgtgcgtggattatcgcgcccttaatgaggtcacaatcaagaacaaatatccgttgccaagaattgatgacctgtttgatcagctaaaaggagctaaggtgttttccaagatagacctacgatcaggctatcatcagttgagaattcgggaagaggatattcccaagacagccttcaccactcggtatgggttgtttgagtgcacggttatgtcctttggactcaccaatgcaccggctttcttcatgaacttgatgaacaaagtgtttatggagtttcttgacaagtttgtcgtggtattcattgacgacatacttatttattcaaaatcagaagaggaacatgagcagcatctccgcctggtactcgagatattgaaggagcaccaactatatgccaagtttagcaagtgtgacttctggttatcggaggtcaaatttctgggtcacatcatttctgctcaaggcgtggcagtggatccatcaaatgtggagtcagttacaaagtggaccccaccaaagacagtttctcagatccggagttttcttggacttgcgggctattaccgtcggttcatcgaaaatttctctaagattgccaggcccatgacacagttgctaaagaaagatgaaaaattcaaatggtcagctgagtgcaaccaaagttttgaagaactcaagaagaagttagtctccgcaccagttctaattctgccagatcagacgaaagacttccaggtctactgtgatgcatctcgccaaggattgggatgtgtgttgatgcaagaaggcagagtggtcgcatatgcttcgcgacagttgcgcccacacgagaccaattatcccactcatgaccttgagttggcagcagtggttcatgctctgaaaatctggcggcactatcttattggcaaccgctgtgaagtttacactgatcataagagcctgaagtacatcttcacccagcccgacttaaatctccggcaacgaagatggctggagttgattaaagattatgacatggggatacactatcatccaggcaaagcaaatgtggtagcagatgctctgagcagaaagagctattgcaatgcagtatataccgaagtcatgtgtgacaaattgcagcaagatcttgagcacctaaatttgggcatcgtagaacacgggtacgtagctgccctagaggcccggcctacgctcgtggatcaagtcagagcagctcaagtaaatgatcctgaaatagctgagctgaaaaagaatatgagggttggaaaagctcgagatttccatgaggatgagaatggcacaatctggttgggagaaagattgtgtgtgcctgacgacaaagaactgaaggatctcatactcacagaagctcatcaaactcagtattcaattcatcccggcagtactaaaatgtaccaggacctcaaagagaaattctggtgggccagcatgagaagagaaatagccgaattcgtcgcactctgcgatgtttgtcagcgagtcaaagcagagcatcagaggcccgcaggactgctacaaccccttcagatcccggaatggaaatgggaagaaatcggaatggatttcataacaggtttgcccagaacgtcgtcggggcacgattcaatctgggtggtcgtggatcgactcaccaaagttgctcattttattccagtacacactacctatacgggcaaaaggttggcggagctctacctctcgagaatcatgtgtctgcatggggtacctaagaagatagtatctgatcgagggagtcagttcacttcaaagttctggcagaaactgcaagaagaattggggactcgtttgaatttcagcacggcttatcatccgcaaacagatggtcagaccgagcgagtaaatcaaatcttggaagatatgttgagagcctgtgcgcttgactttggcggagcctgggataaaagtctgccttatgcggaattctcttacaacaatagttatcagtccagtttgcaaatggcaccgtttgaagcattgtacggacgaaagtgccgcacaccacttttctgggatcaaacaggtgagcgccaactgtttgggacagaagtgttaaccgaagcagaggagaaagttaggactgtcagagaaaggctaagaattgcgcaatctcgacagaagagttatgctgacaaccgccgaagagagcttactttcgaagcaggggattatgtgtaccttcgtgtcactccgcttcggggagtacaccgcttccaaaccaaaggcaagttggcaccacgctttgtgggaccatacaggatcttggaacgcagaggtgaagtcgcttaccagcttgagctcccatctaatatggttggtatccacgatgtgtttcatgtgtctcaactgaagaagtgtttgagggtacctgaggaacaagctagctcagagcacattgacatccaggaagatctgacttatgtggagaagccgatttgtatcctcgagaccagtgagagaaggaccagaaacaaggtgatcaagttttgcaaagttcagtggagccaccactcggaagaagaagccacctgggaaagagaagatgaattgaaggccgcccatccgcacctcttcgccagctcttccgaatctcggggtcgagattctgtttaa

SEQ ID NO: 14504 - DNA, 4506 bp, Oryza sativa
  Clone ID: TFbOSC401219j.C1.o10.fg
atggtgaagacaaggaatgatccccgtgactccaacgacgccagtggcagcgaagagcagaccgatggagctcatgtcagtggtgcatctggcagcagatcatctccaccgcccgaaaacccaacagtcactcaaatgatgacaatgatgatgcaacagatgcagcaacattaccatcagatgttgcagcaggcgcaacagaaccagcagtttggtcctccaccatcacacgtgtccaaactgttagactttcttcgtatccagccacccactttctcaagcaccaccaacccaatggaggccaatgactggctccgtgctattgagaagaagctgaacctactgcaatgcaacgaccaagagaaagttgcttttgctacacaccagttgcaagatgcaacggaggttacttgggcagagttttgtcaaagcttcaggaaggcacagattcctgaagggattatggcacaacagaagagagagttccgtgcgctccagcaaggaaccatgtcagttacagagtacttgcatgagttcaaccgccttgcgcgctacgctcctgaagacgtgcgcaccgatgctgagaagcaggagaagtttttgtttgggctcgatgatgaattgaccaaccagctaatctccggagtttatgaggactttgagaagcttgtggacaaggctattcgtcaggaagagcaacgcaacaaaatggaccgaaaaagaaaggcagctcagatcagctttcctcaggggaacaatcagaagcctcgcttcatgacgggacaactaggtgggccttccaccctgatcgtctgtcagcaccgtccctatcacccgagtaacttcgacaacgactacaacggtggcagtcacaacaacagtaagcagcacaaccacaactcgactccacccccactaatggcaccagctcagtcagatccgccagctgtgtcagttcagtcagaacaacccaagaagggggctgtaggaaagccaggaccctgcttcaactgtggcaagcacggccattttgctggcaagtgtccgaagctgaatcgcactggacccaggttcatccaggcccgcgccaatcatgtgtctgcagaggaagcacaggcagcaccagaggtcgtgttgggcacgtttccagtgaactcatatccagcaacagttctctttgattcaggtgcctcgcattctttcatttccaaaagatttgctgggacacatggattatcgatagtagaacttaaaataccgatgcaggttcatacccctggaaatgatatgaggacagcacactactgcccctcggtgactatagagatcaaaagatcaccgtttctatccaacctcatccttctcgaatctaaagacctggatgtcattcttggaatggattggttgaccagaaacaagggagtgattgactgcgcaagccgcaccatcaccctaaccaacgacaaaggggagaagatcaccttccgttccccagcatcgcagaagcccgtagcgagtctgaatcaggctgctattgagggtcagacagaaacagtggagaaaagtcccaggaagttggaggatattcctatagtacaagagtatcctgaggtgttcccagaagacctcactacaatgccaccgaagagagaaatcgagttccggatcgatttggcacccgggactactccaatttacaagaggccgtacagaatggcagctaatgagctagcagaggtcaagaagcaggttgacgaacagctgcagaaagggtacatccgaccgagtacttcaccttggggtgctccggttatctttgtggagaagaaagacaagaccaagaggatgtgcgtggattatcgcgcccttaatgaggtcacaatcaagaacaaatatccgttgccaagaattgatgacctgtttgatcagctaaaaggagctaaggtgttttccaagatagacctacgatcaggctatcatcagttgagaattcgggaagaggatattcccaagacagccttcaccactcggtatgggttgtttgagtgcacggttatgtcctttggactcaccaatgcaccggctttcttcatgaacttgatgaacaaagtgtttatggagtttcttgacaagtttgtcgtggtattcattgacgacatacttatttattcaaaatcagaagaggaacataagcagcatctccgtctggtactcgagaaattgaaggagcaccagctatatgccaagtttagcaagtgtgacttctggttatcggaggtcaaatttctgggtcacgtcatttctgctcaaggcgtggcagtggatccatcaaatgtggaatcagttacaaagtggaccccaccaaagatagtttctcagatccggagttttcttggacttgcgggctattaccgtcggttcatcgaaaatttctccaagattgccaggcccatgacacagttgctaaagaaagatgaaaaattcaagtggtcagctgagtgcaaccaaagttttgaagaactcaagaagaggttagtctctgcaccagttataattctgccagatcagacaaaagacttccaagtctactgtgatgcatctcgccaaggattgggatgtgtgttgatgcaagaaggcagagtggtcgcatatgcttcgcgacagttgcgtccacatgagaccaattatcccactcatgaccttgagttggcagcagtggttcatgctctgaaaatctggcggcactatcttattggcaaccgctgtgaagtttacactgatcataagagcctgaagtacatcttcacccagcccgacttaaatctccggcaacgaagatggctggagttgattaaagattatgacatggggatacactatcatccaggcaaagcaaatgtggtagcagatgctctgagcagaaagagctattgcaatgcagtatgtaccgaaggcatgtgtgacaaattgcagcaagatcttgagcacctaaatttgggcatcgtagaacacgggtacgtagctgccctagaggcacggcctacgctcgtggatcaagtcagagcagctcaagtaaatgatcctgaaatagctgagctgaaaaagaatatgagggtcggaaaagcccgagatttccatgaggatgagcatggcacaatctggttgggagaaagattgtgtgtgcctgacgacaaagaactgaaggatctcatactcacagaagctcatcaaactcagtattcaattcatcccggcagtactaaaatgtaccaggacctcaaagagaaattctggtgggccagcatgagaagagagatagccgaattcgtcgcactctgcgatgtttgtcagcgagtcaaagcagaacatcagaggcccgcaggactgctacaaccccttcagatcccggaatggaaatgggaagaaatcggaatggatttcataacaggtttgcccaggacatcatcgggtcacgattcaatctgggtggtcgtggatcgactcaccaaagttgctcattttattccagtacacactacctatactgggaaaaggttggcagagctttacctttcaagaatcatgtgtttgcatggggtacctaagaagattgtatctgatcgagggagtcagttcacttcaaaattttggcagaaactgcaagaagaattggggactcgtttgaatttcagcacggcctatcacccgcaaactgatggtcagaccgaaagggtcaatcagatcttggaagatatgctgcgagcgtgtgcgctcgattttggtggagcatgggataaaagtctaccttatgcggaattctcttacaacaacagttatcaagccagtttgcaaatggcaccgtttgaagcgttgtacggacggaaatgccgcactccgctcttctgggatcaaactggagaacgccaattgtttgggacggaagtattaactgaagcagaggagaaagtcagaaccgtcagagaaaggctaagaattgcccagtctcggcagaagagttatgctgataaccgccgaagagagcttactttcgaagcaggggattatgtgtaccttcgtgtcactccgctcaggggagtacaccggttccaaacgaaaggcaaattggcaccacgctttgtgggaccatacaggattttggaacgccgaggtgaagtcgcttaccagcttgagctcccatctaatatggttggaatccacgatgtgtttcatgtatctcaattgaagaagtgtttgagggtacctgaggaacaagctagctcagagcacattgacatccaggaagatctgacttatgtggagaagccgattcgtatccttgagaccagtgagagaaagaccagaagcaaggtgatcaggttttgcaaagttcagtggagccaccactcagaagaagaggccacctgggaaagagaagatgaattgaaggccgcccatccgcacctcttcgccagctcttccgaatctcggggtcgagattccgtttaa

SEQ ID NO: 14505 - DNA, 4881 bp, Oryza sativa
  Clone ID: TFbOSC401577j.C1.o3.gm
atggtgaagacaaggaatgatccccgtgactccaacgacgccagtggcagcgaagagcagaccgatggagctcatgtcagtggtgcatctggcagcagatcatctccaccgcccgaaaacccaacagtcactcaaatgatgacaatgatgatgcaacagatgcagcaacattaccatcagatgttgcagcaggcgcaacagaaccagcagtttggtcctccaccatcacacgtgtccaaactgttagactttcttcgtatccagccacccactttctcaagcaccaccaacccaatggaggccaatgactggctccgtgctattgagaagaagctgaacctactgcaatgcaacgaccaagagaaagttgcttttgctacacaccagttgcaaggtcccgcttctgcctggtgggataactacgtggcgacccgtctagatgcaacggaggttacttgggcagagttttgtcaaagcttcaggaaggcacagattcctgaagggattatggcacaacagaagagagagttccgtgcgctccagcaaggaaccatgtcagttacagagtacttgcatgagttcaaccgccttgcgcgctacgctcccgaggacgtgcgcaccgatgctgagaagcaggagaagtttttgtttgggctcgatgatgaattgaccaaccaactaatctccggagtctatgaggactttgagaagcttgtggacaaggctatccgccaggatgagcaacgcaacaaaatggaccgaaaaagaaaggcagctcagatcagctttcctcaggggaacaatcagaagcctcgcttcatgacgggacagctaggtgggccttccaccctgatcgtctgtcagcaccgtccctatcacccgagtaacttcgacaacgactacaacggtggcagtcacaacaacaaacaacccaagaagggggctgtaggaaagccaggaccctgcttcaactgtggcaagcacggccactttgctggcaagtgtccgaagctgaatcgcactggacccaggttcatccaggcccgcgccaatcatgtgtctgcagaggaagcacaggcagcaccagaggtcgtgttgggcacgtttccagtgaactcatatccagcaacagttctctttgattcaggtgcctcgcattctttcatttccaaaagatttgctgggacacatggattatcggtagtggaacttaaaataccgatgcaggttcatacccttggaaatgatatgaggacagcacactactgcccctcggtgactatagagatcaaaagatcaccgtttctatccaacctcatccttctcgaatctaaagacctggatgtcattcttggaatggattggttgaccagaaacaagggagtgattgactgcgcaagccgcaccatcaccctaaccaacgacaaaggggagaagatcaccttccgttccccagcgtcgcagaagtccgtagcgagtctgaatcaggctgctattgagggtcagacagaaacagtggagaaaagtcccaggaagttggaggatattcctatagtacaagagtatcctgaggtgttcccagaagacctcactacaatgccaccgaagagagaaatcgagttccggatcgatttggcacccgggactgctccaatttacaagaggccgtacagaatggcagctaatgagttagcagaggtcaagaagcaggttgacgaacagctgcagaaagggtacatccgaccgagtacttcaccttggggtgctccggttatctttgtggagaagaaagacaagaccaagaggatgtgcgtggattatcgcgcccttaatgaggtcacaatcaagaacaaatatccgttgccaagaattgatgacctgtttgatcagctaaaaggagctaaggtgttttccaagatagacctacgatcaggctatcatcagttgagaattcgggaagaggatattcccaagacagccttcaccactcggtatgggttgtttgagtgcacggttatgtcctttggactcatcaatgcaccggctttcttcatgaacttgatgaacaaagtgtttatggagtttcttgacaagtttgtcgtggtattcattgacgacatacttgtgtattcaaaatcagaagaggaacatgagcaacatcttcgtctggtacttgagaaattgaaggagcaccagttatatgccaagtttagcaagtgtgacttctggttatcggaggtcaaatttctgggtcacgtcatttctgctcaaggcgtggcagtggacccatcaaatgtggaatcagttacaaagtggaccccaccaaagacagtttctcagatccggagttttcttggacttgcgggttattaccgtcggttcatcgaaaatttctccaagattgccaggcccatgacacagttgctaaagaaagatgaaaaattcaagtggtcagctgagtgcaaccaaagttttgaagaactcaagaagaagttagtctccgcaccagttctaattctgccagatcagacgaaagacttccaggtctactgtgatgcatctcgccaaggattgggattggttcatgctctgaaaatctggcggcactatcttattggcaaccgctgtgaagtatacactgatcacaagagtctgaagtacatcttcactcagcctgacttgaatctccgacagcgaagatggctggagttaattaaagattatgacatggggatacattatcatcccggcaaagcaaatgtggtagcagatgctttgagcagaaaaagctattgcaatgccttatgcactgaagacatgtgtggcaaattgcaacaagatcttgagcacctaaatttgggcatcgtggaacacgggtacgtagctgccctagaggcacggcctacgctcgtggatcaagtcagagcagctcaagtaaatgatcctgaaatagctgagctgaaaaagaatatgagggttggaaaagctcgagatttccatgaggatgagaatggcacaatctggttgggagaaagattgtgtgtgcctgacgacaaagaactgaaggatctcatactcacagaagctcatcaaactcagtattcaattcatcccggcagtactaaaatgtaccaggacctcaaagagaaattctggtgggtcagcatgaggagagaaatagctgaattcgtcgcactctgcgatgtttgccaacgggtgaaggcagagcaccaaagaccagcaggtttactccaacctcttcaaatcccggaatggaaatgggaggagattggaatggactttataacaggactgccccggacatcatcggagcacattgacatccaggaagatctgacttatgtggagaagccgatttgtatcctcgagaccagtgagagaaggaccagaaacaagccaacgctcgatgccatctcaccgggacaagagctcgccgccggcgacaagctcgtgtccagcaatggcaggttcgccctcggcttcttccaaaccgacagtaacaagtcctcctccaatagcactccgaacatttacctaggcatctggttcaacaccgtccccaaattcacccctgtatgggttgccaacggcgaaaaccctgtcgcggatctcgcgtcgtgcaagctcctagtttccagcgatggcaacctcgccatcgttgcaacgacccatgccaagaactcctccatggtctggtccagcaaagccaacatcccaaccaacaccacccatgctgttctcctggacgatggaaaccttgtcctgcgtagcactagcacaaccaatgcatcatccaccattctctggcaaagctttgatcacccgacagacactgttctgcagggtggaaagatcggctggaacaacgccaccggtgtgaaccgccgtcttgtctccaggaagaacaccgttgatcaagctcctggcatgtattccttcgagttgctcggacacaacggccctacctccatggtctccacgttcaactcctcgaatccgtattggtccagcggagactggaacggccggtacttcagcaacataccggagacggtaggacagacatggctatcactgaattttacaagcaatgagcaagagaagtatatcgagtatgcaattgcagatcccacggtgctatcacgtaccatactggatgtctccggccagctgaaggcgcttgtgtggttcgaggggtcgcgggattggcaaaccatcttcacggcacccaaatcgcagtgcgatgtctacgctttctgtggacctttcacggtctgcaacgacatcacattcccctcctgcacctgcatgaagggcttctcagtacaatcacctgaagattgggagctagatgaccgaacaggtggatgtgtgagaaatactccgctgctctgcaacagcaataaaactgcagcaggcacggcagataagttctatcctatgacttctgttcagcttcctgataaagcccagagcataggagcagctactagtgcagatgaatgtgcagctgcctgcctcagtagctgctcatgtactgcgtattcctacggtgaaggtggctgctctgtttggcatgacaagctgctcaatgtacgacaacaaggtaatggtgttctctaccttcgcctttctgcaaaagaagtactggaaagtaggagaaacaatagatggggggtgatccttggtgcttcaattggtgccagcactgctgctttgggggagaaatcacgtgaatttccgaccttctctacctacgattcatgctccaagatcttctccagctccggcaactctagcaagctcgagctgccgaagacggaggaggatggtggcaccgaagctagggagtgtaaataa

SEQ ID NO: 14506 - DNA, 3795 bp, Oryza sativa
  Clone ID: TFbOSC407633j.C1.o19.fg
atgatcgtccttcagcaccgtccctataatccgggcaacttcaacaacgactacaacagtggcagtcacaacagcagtgaggagcaccatcacaactcaactccacccccactaatggcaccagctcagtcagatctaccagctgtgtcaactcagtcagaacagccccaggggtctgcaggaaagccagggccatgcttcaactgtggcaagcacggccactttgctggcaagtgtccgaagctgaagcgcgctggacctagatttgctgggacacacggattaacggtagtggaacttaaaataccgatgcaggttcatacccctagaagtgacatgaagatagcacactactgcccctcagtgactatagagatcaaaaggtcaccatttctatccaacctcatccttctcgaatccaaagacctagatgtcattctcggaatggattggttgaccagacacaagggagtgatcgactgcgcaagtcgtaccatcaccctaaccaacaacaaaggagagaagatcaccttccggtctccaatgccgcataagtccgtagcgactctgaatcaggctgctattgaggaacagacagaaatagcaaagaaaagtcccaagaagttggaggatattcctatagtacaagagtatcctgaggtgttcccagaagacctcactacaatgccaccgaagagagagatcgagttccggattgatttggcaccgagaactgcaccgatctacaagaggccctataggatggcagctaatgagctagcagagttgagaattcgggaagaggatattcccaagacagccttcaccactcggtatgggttgtttgagtgcacggttatatcatttggactcaccaatgcatcggctttcttcatgaacttgatgaccaaagtgtttatggagtttcttgacaagtttgtcgtggtattcattgacgacatacttatctattcaaagtctgaagaagaacatgagcaacatctccgtctggtactcgagaagttgaaggagcaccagttatatgccaagtttatggatccatcaaatgtggagtcagttacaaagtggaccccacctaagacagtttctcacatccggagttttcttagacttgcgggttattatcgtcggttcattgaaaatttctccaagattgtgaggcccatgacacagttgcttaagaaagatgaaaaattcaagtggtcaactgagtgcaaccaaagttttgaagaactcaagaaaagctgccctagaggcatgacctacgctcgtggatcaagtccaagcagctcagtgcacactacctatacggggaaaaggttggcagagctctacctttcaagaatcatgtgtttgcatggggtgcctaagaagatagtatctgatcgaggaagtcaattcacttcaaagttctggcagaaactgcaagaagaattgggaactcgtttgaatttcatcatagcctaccatccacaaactgatggccagactgagcgagtgaatcaaatattggaagatatgttgcgagcttgtgcgcttgactttggcggagcttgggataaaagtctaccgtatgctaaattctcttacaacaacaattaccaggacagtttgcaaatggcaccgtttgaaacattgtatggccggaagtgccgtacaccgctcttctgggatcaaactggagaacgccaactgttcgggacagaagtgctaaccgaggcagaggaaaaagattacccaaccaagaccgagatcgtcaggtgtaatagctctggagacctctaccccttcccggcggacgatttttcctcggcagcctccgctcgtgctttcattgctacggagtccaccacggacctttggcatcaccgtctagggcacattggtcacgaagctctcacccgcttgtcacaggcttctgtcataccaccacccaggggtgctgcccctgttgtcatgcttgccaacttgacccagttctccaccaccattcgcaacatacaatgtgacaatggccgcgagtttgataacctcaccgcccgcacctttttcctcactaacggtgttcacatgcgaatgtcgtgcccccacacctaccccagaacggattttacagcaccttcgctgactccgatcagtcgtccccactccggccgctctggcccagcggcgcgcgtggctcctgccggccctactgctgaggtggctcgctccactgagccgcccacgcctcctgttggctcggctcctgtcagctcggcccctgctggcccggcctcgacggctccctctgctgagctgcctgcccacgagtcggcttcccctgggccgccatctaccgggtcggctgcccggcgccctcctgcgtcgccatcctccaccagcagcatgctctggcgaccgccgggaccacctcccggctttcctgcgctgccatctaggccgccaccactgctggcgcctcctagcggtgccccgacacgtgcgcgcagttcacgcgttcccgatgctgttataccaaaccaactcggtgtttcgcccggtgtcaacacacatggcatgacgactcgcggcaaggacgacatccacctccctgttacacgctacaacctcaacgcaactaccctctctccagtgcctcgcacttatcgtgccgccttggaagaggagtttgctgcattaatgccttcctgcatggtactttacaagagaccgtctactgcactcagccatctagatttgaagaccacaccaggcctcatatggtgtgtcgcctcaacaagtcgctggtacagtcggtttgctagctacttacttaccctgggtttcattgaggctaagtttgatacttctttgtttatctatcatcatggctctcacttggtctacttgcttctatatgtggatgacattgttttgactgcatcctcagctggtcttctccgttgggctattcaggctctccagtctgagttttctatgaaggaccttggttctctacaccattttttgggtatcacagtcaccggtgacagctccggtcttctcctgagtcagcaccagtatagcattgaggttctcgagcgtgctggcatgtcagattgcaagccgtgctctacaccagttgacaccaatgcaaagttgtcctcctctgatggctcacctgttgtagatcccactgactgtcacagtttagctggtgctctacattatttgaccttcactcggcctgatatttcctatgctgttcagcaggtttgtctccacatgcatgacccagggattcccatcgtgccgctctcaagcggatactccgattgggcgggttgtcctgacactcgcaagtccacctggtcattcaagcggcagaacacggtgtctcgatccagcgacgaagcagagtacagggttgtggccaatacagttgctgaaacttgttggctatgccaattattacatgagcttacaccgccctcccgggctaccttggtttattgcgacaatgtcagcgccatctatctctctactaatcctgttcagcatcaacggaccaaacatgtggagattgatttacattttgttcatgatcgcgttgctgctggttctgttcgagtgcttcatgttccaacgacatcacagtacgcggacatcttcaccaagggtttgcctacatccatttttgtggagtttcgttccagtctcaacgttcgttgcaccaacgttgcgactgcgggaggtgttagttgtatatatgtatttcatgtttatctctaa

SEQ ID NO: 14507 - DNA, 3831 bp, Oryza sativa
  Clone ID: TFbOSC415897j.C1.o1.fg
atggtgaagacaaggaatgatccccgtgactccaacgatgccagtggcagcgaagagcagacagatggagctcataccagtggtgcatctggcagcagatcatctccaccgcccgagaacccaacggtcgctcagatgatgacaatgatgatgcaacagatgcagcaacattaccatcagatgttgcagcaggcgcagcagaaccagcagtctgattttctccgtatccagccacccactttctcaagcaccaccaacccaatggaggccaacgactggcttcgtgcgattgagaaaaagctgaaccttctgcaatgcaatgaccaagagaaggttgcttttgctacacatcagttgcaaggtcccgcttctgcctggtgggataactacgtggtgacccgtccagatgcaacggaggttacttgggcaaagttttgtcaaagcttcaggaaggcacagattcctgaggggattatggcacaaaagaaaagagagttccgcgcactacatcaaggaaccaggacagttacagagtacttgcatgagttcaaccgccctgcgcgctacgctcctgaggatgtgcgcaccgatgctgagaagcaagagaagtttttgtttggtcctgatgatgaattgaccaaccagctaatctccggagtctatgaggactttgagaagcttgtggacaaggctatccgtgggccttccaccctgatcgtctgtcagcaccgtccctatcacccgagtaacttcaacaacgactacaacggtggcagtcacaacaacagtaagcagcacaaccacaactcgactccacccccactaatggcaccagctcagtcagatccgccagctgggtcagctcagtcagaacagcccaaaaagggggctgtaggaaagccaggaccctgcttcaactgtggcaagcacggccactttgctggcaagtgtccgaagctgaatcgcgctggacccaggttcatccaggcccgcgccaatcatgtgtctgtagaggaagcacaggcagcaccagaggtcgtgttgggcacgtttccagtgaactcatatccagcaacagttctctttgattcagagatcaaaagatcaccgtttctatccaacctcatccttctcgaatctaaagacctagatgtcattctcggaatggaatggttgaccagacacaagggagtgattgactgcgcaagccgcaccatcaccctaaccaacgacaaaggggagaagataaccttccgttccccagcgtcgcagaagtccgtggctagtctgaatcaggctgctattgagggtcagacagaaacagtggagaaaagtcccaggaagttggaggatattcctatagtacaagagtatcctgaggtatttcctgaagacctcactacaatgccaccgaatagagaaatcgagttccgaattgatttggcacccggaactgctcctatctacaagaggccgtacagaatggcagctaatgagctagcagaggtcaagaagcaagttgatgaacagctgcagaaagggtacatccgaccgagtacttcgccttggggtgctccggttatctttgtggagaagaaagacaagactaagaggatgagcgttgattattgcgcccttaatgaggtcacaatcaagaacaaatatccgttgcctagaattgatgacctgtttgatctgctaaaaggagctaaggtgttttccaagatagacctgcgatcaggctatcaccagctgagaattcgggaagaggatattcccaagacagccttcactactcggtgtgggttgtttgagtgcacggttatgtcatttggactcaccaatgcaccggctttcttcatgaacttaatgaacaaagtgtttatggagtttcttgacaagtttgtcatggtattcattgacgacatacttatttattcaaaatcagaagaggaacatgagcagcatctccgtcttgtactcgagaaattgaaggagcaccagttatatgccaagttcagtaagtgcgacttctggttgtcggaagacaagtttcttggtcacgtcattactgctcaaggtgtggcagtggatccatcgaatgtggagtcagttaccaagtggaccccacctaagacagtttctcagatccggagttttcttggacttgcgggttattaccgtcggttcatcgaaaatttctccaagattgccaggcccatgacacagttgctaaagaaagatgaaaaattcaaacaaaagacttccaagtctactgtgatgcatctcgccaagggttgggatcggcactatcttattggcaaccgctgtgaagtatacactgatcacaagagtctgaagtacatcttcactcagcctgacttgaatctccgacagcgaagctggctggagttaattaaagattatgacatggggatacattatcatccaggcaaagcaaatgtggtagcagatgctttgagcagaaaaagctattgcaatgccttatgcactgaaggcatgtgtggcaaattgcagcaagatcttgagcacctaaatttgggcatcgtgcaacacgggtacgtagctgccctagaggcacggcctacgctcgtggaccaagtcagagcagctcaggtaaatgatcctgaaatagctgagctgaaaaagaatatgagggttggaaaagctcgagatttccatgaggatgagcatggcacaatctggttgggagaaagattgtgtgtgcctgacgacaaagaactgaaggatctcatactcacagaagctcatcaaactcagtattcaattcatcccggcagtactaaaatgtaccaggacctcaaagagaaattctggtgggccagcatgagaagagagatagccggtttcgtcgcactctgcgatgtttgtcagcgagtcaaagcagaacatcagaggcccataggactgctacaaccccttcagatcccggaatggaaatgggaagaaatcggaatggatttcatcactggtttgcccaggacattgtcagggcatgattcaatttgggtagtcgtggatcgcctcacgaaagttgctcatttcattccaatgcacactacctatactgggaaaagattggcaaagctctacctttcaagaatcatgtgtttgcatggggtacctaagaagattgtatctgatcgaggaacgttgtatggacggaaatgccgcactccgctcttctgggatcaaactggagaacgccaattgtttgggacggaagtattaactaaagcagaggagaaagtcagaaccgtcagagaaaggctaagaattgcgcaatctcgacagaagagttatgctgacaaccgccaaagagagcttactttcgaagtaggggattatgtgtaccttcgtgtcactccgctcaggggagtacaccgcttccagactaaaggaaagttggcaccacgctttgtgggaccatacaggatcttggaacgcagaggtgaagttgcttaccagcttgagctcccatctaatatggttggtatccatgatgtgtttcatgtatcccagttaaagaagtgcttgagggtacccgaagaacaagccgattcggagcacattgacatccaagaagatctgacctacgtggagaagccagttcgtatccttgagaccagtgaaaggaggaccagaaacaaggtgatcaggttttgcaaagtccaatggagccaccactcacaggaagaggccacctgggaaagagaagatgaattgaaggccgcccatccgcacctcttcgccagttcttccgaatctcggggtcgagattccgtttaa

SEQ ID NO: 14508 - DNA, 4710 bp, Oryza sativa
  Clone ID: TFbOSC416775j.C1.o2.np
gcccccatgtcgccaccaccgccgaaaccgccgcaccccgccccctcgggccacgtcggccccgccgcgcgcgcgccccgcctttcccgcgtccacctccctctctcgcttcctccctcctgtgtgcgccgtcgtcctccgcgcgcgcaccgtcgtcttcggccgccgccgccgctttcggcatggtgaagacaaggaatgatctccgtgaccccaacgacgccagtggcagcgaagagcagaccgatgaagctcataccagtggtgcacctggcagcagatcatctccaccgcccgagaacccaacaatcactcagatgatgacaatgatgattcaacagatgcagcaacattaccatcagatgttgcagcaggcgcaacagaaccagcagtttggttctccaccctcacatctgtccaaactgttagactttctccgtatccagccacctactttctcaagcaccaccaacccaatggaggccaacgactggctccgtgcgattgagaagaaactgaaccttctgcaatgcaacgaccaagagaaggttccttttgctacacatcagttgcaaggtcccgcttctgcctggtgggacaactatgtggtaacccgtccagatgcaatggaggttacatggtcagagttttgtcaaggcttcaggaaggcacagattcctgaagggattatggcacaacagaagagagagtttcgggcgctgcaacaaggaaccagaacagttacagagtacctgcacgagttcaaccgcctcacgtgctacgctcctgaggacgtgcgcatcgatgctgagaagcaggagaagtttttgtttgggctcgatgatgaattgaccaaccagctaatctccggagtctatgaggactttgagaagcttgtggacaaggctatccgtcaggaagagcaacgcaacaaaatggaccgaaaaagaaaggcagctcagatcagctttcctcaggggaacaatcagaagcctcgcttcatgacgggacagctaggtgggccttccaccctgatcgtctgtcagcaccgtccctatcacccgagtaactttgacaacgactacaacggtggcagtcacaacaacagtaagcagcacaaccacaactcgactccatccccactaattccgccagctgggtcagcttagtcagaacagcccaagaagggggctgtaggaaagccaggaccctgcttcaactgtggcaagcacggccactttgctggcaagtgtccgaagctgaatcgcgctggacccaggttcatccaggcccgcgccaatcatgtgtctgcagaggaagcacaggcagcaccagaggtcgtgttgggcacgtttccagtgaactcatatccagcaacagttttctttgattcaggtgcctcgcgttctttcatttctaagagatttgctggggcacatagattatcggtagtggaacttaaaataccgatgcaggttcatacccctggaaatgacatgaggacaacacactattgccccttagtgactatagagatcaagagatcacagtttctatccaacctcatccttctcgaatccaaagacctagatgtcatcctcggaatggattggttgaccaggcacaagggagtaatcgactgcgcaagtcgcaccatcaccctaaccaacgacaaaggggagaagatcactttccggtctccagtgccacagaagtccgtagcaagtttgaatcaggctactattgaggaacagactgaagtagcggagaaaagtcctaggaagttggaggacattcgtatagtacaggagtatcctgaggtgtttcctgaagacctcactacaatgccaccaaagagagaaatcgagttccagattgacctggttaaggtaaccactccgatttacaagaggccatacagaattgcagctaatgagctagcagaggtcaagaagcaagttgatgaacagctgtagaaagggtacatccgaccgagtacttcaccttggggtgctccggttatctttgtggagaagaaagacaagaccaagaggatgtgcgttgattatcgcgcccttaatgaggtcacaatcagaacaaatatccattgccaagaattgatgacctgtttgatcagctaaaaggagctaaggtgttttccaagatagacctgcgatcaggctatcaccagttaagaattcgggaagaggatattcccaagacagcctttaccactcgatatgggttgtttgagtgcacggttatgtcatttggactcaccaatgcaccggctttcttcatgaacttgatgaacaaagtgtttatggagtttcttgacaagtttgtcgtggtattcattgacgacatacttatttattcaaaatcagaagaggaacatgagcagcatctccgtctggtactcgagaaattgaaggagcaccagttatatgccaagttcagtaagtgtgacttctggttgtcggaagtcaagtttcttggtcacgtcattactgctcaaggtgtgacagtggatcaatcgaatgtggagtcagttaccaagtggaccccacctaagatagtttctcagatccggagttttcttggacttgcgggttattaccgtcggttcatcgaaaatttctccaagattgccaggcccatgacacagttgcttaagaaagatgaaaaattcaagtggtcagctgagtgcaaccaaagttttgaagaactcaagaagaggttagtctctgcaccagttctaattctgccagatcagacaaaagacttccaagtctactgtgatgcatctcgccaagggttgggatgtgtgctgatgcaggaaggcagagtggtcgcatatgcttcgcgacagttgcgtccacatgagagcaattatcctactcatgatcttgagttggcagcagtggttcatgctctggaaatctggtgacactatctttttggcaaccgctgtgaagtctacactgaccacaagagcttgaagtacatcttcacccagcccgacttaaatctccgacaacgaagatggctggagttgattaaagattatgacatggggatacattatcatccaggcaaagcaaatgtggtagcggatgctttgagcaggaagagctattgcaatgcggtatgtaccgaaggcatatgtgacaaattgcagcaagatcttgagcacctaaatttgggcatcgtggaacacgggtacgtagctgccctagaggcacggcctacgctcgtggatcaagtcagagtagctccggtaaatgatcctgaaatagctgagttgaaaaagaatatgagggttgaaaagcccgagattttcatgaggatgagcatggcacaatctggttgggagaaagattgtgtgtgcctgacgacaaagaactgaaggatctcatactcatagaagctcatcaaactcagtattcaattcatcccagcagtactaaaatgtaccaggacctcaaagagaaattctggtgggccagcatgagaagagagatagccggattcgtcgcactctgcgatgtttgtcagcgagtcaaagcagaacatcagaggcccgcaggactgctacaaccccttcagatcccggaatggaaatgggaagaaatcggaatggatttcatcactggtttgcccaggacatcgtcagggcatgattcaatttgggtagtcgtggatcgcctcacgaaagttgctcatttcattccagtgcacactacctatactgggaaaagattggcagagctctacctttcaagaatcatgtgtttgcatggggtacctaagaagattgtatctgatcgaggaagtcaattcacttcaaagttctggcagaaactgcaagaagaattggggactcgtttgaatttcagcacggcttatcatccgcaaacagatggtcagaccgagcggataaatcaaatcttggaagatatgttgagagcttgtgcacttgactttggcggagcttgggataaaagtctaccatatgctaaattctcttacaataacagctatcaggccagtttgcaaatggcaccgtttgaagcattgtacggacggaagtgccgcactccgctcttctgggatcaaactggagaacgccaactgttcgggacagaggtgctaaccgaggcagaggaaaaagtcagaactgtcagagaaaggctgagaattgcacaatctcgacagaaaagctacgcagacaaccgccgaagagaactcgctttcgaagcaggagattatgtgtaccttcgtgtcactccgcttcggggagtacaccgcttccaaaccaaaggcaagttggcaccacgttttgtgggaccatacaggatcttggaacgcaaaggtgaagtcgcttaccagcttgagctcccatctaatatggttggtatccacgatgtgtttcatgtatctcaattgaagaagtgtttgagggtacctgaggaacaagctagctcagagcacattgacatccaagaagatctgacctacgtggagaagccagttcgtatccttgagaccagtgaaaggaggaccagaaacaaggtgatcaggttttgcaaagtccaatggagccaacactcacaggaagagaccacctgggaaagagaagatgaattgaaggccgcccatccgcacctcttcgccagttcttccgaatctcggggtcgagattccgtt

SEQ ID NO: 14509 - DNA, 4551 bp, Oryza sativa
  Clone ID: TFbOSC900179j.C1.o8.fg
atgatgaagacaaggaatgatccccgtgactccaacgacgccagtggcagcgaagagcagaccgatggagctcatgtcagtggtgcatctggcagcagatcatctccaccgcccgaaaacccaacagtcactcaaatgatgacaatgatgatgcaacagatgcagcaacattaccatcagatgttgcagcaggcgcaacagaaccagcagtttggtcctccaccatcacacgtgtccaaactgttagactttcttcgtatccagccacccactttctcaagcaccaccaacccaatggaggccaatgactggctccgtgctattgagaagaagctgaacctattgcaatgcaacgaccgagagaaagttgcttttgctacacaccagttgcaaggtcccgcttctgcctggtgggataactacgtggcgacccgtctagatgcaacggaggttacttgggcagagttttgtcaaagcttcaggaaggcacagattcctgaagggattatggcacaacagaagagagagttccgtgcattgcaacaaggaaccagaacggttacagagtacctgcacgagttcaaccgcctcgcgcgctacgctcctgaggacgtgcgcaccgatgctgagaagcaggagaagtttttgtttgggctcgacgatgaattgaccaaccagctaatctccggagtctatgaggactttgagaagcttgtggacaaggctatccgccaggaagagcaacgcaacaaaatggaccgaaaaagaaaggcagctcagatcagctttcctcaggggaacaatcagaagcctcgcttcatgacgggacagctaggtgggccttccaccctgatcgtctgtcagcaccgtccctatcacccgagtaacttcaacaacgactacaacggtggcagtcacaacaacagtaagcagcacaaccacaactcgactccacccccactaatggcaccagctcagtcagatccgccagctgtgtcagttcagtcagaacaacccaagaagggggctgtaggaaagccaggaccctgcttcaactgtggcaagcacggccactttgctggtaagtgtccgaagctgaatcgcactagacccaggttcatccaggcccgcgccaatcatgtgtctgcagaggaagcacaggcagcaccagaggtcgtgttgggcacgtttccagtgaactcatatccagcaacagttctctttgattcaggtgcctcgcattctttcatttccaaaagatttgctgggatgcatggattatcggtagtggaacttaaaataccgatgcaggttcatacccctggaaatgatatgaggacagcacactactgcccctcggtgactatagagatcaaaagatccccgtttctatccaacctcatccttctcgaatctaaagacctagatgtcattctcggaatggattggttgaccagaaacaagggagtgattgactgcgcaagccgcaccatcaccctaaccaacgacaaaggggagaagatcaccttccgttctccagtgtcgcagaagtccgtagcgagtctgaatcaggctgctattgagggtcagacagaaacagtggagaaaagtcccaggaagttggaggatattcctatagtacaagagtatcctgaggtgttcccagaagacctcactacaatgccaccgaagagagaaatcgagttccggatcgatttggcacccgggactgctccaatttacaagaggccgtacagaatggcagctaatgagctagcagaggtcaagaagcaggttgacgaacagctgcagaaagggtacatccgaccgagtacttcaccttggggtgctccggttatctttgtggagaagaaagacaagactaagaggatgtgcgttgattatcgggcccttaatgaggtcacaatcaagaacaaatatccgttgccaagaattgatgacctgtttgatcagctaaaaggagctaaggtgttctccaagatagacctgcgatcaggctatcaccagttgagaattcgggaagaggatattcccaagacagccttcaccactcggtatgggttgtttgagtgcacggttatgtcctttggactcaccaatgcaccggctttcttcatgaacttgatgaacaaagtgtttatggagtttcttgacaagtttgtcgtggtgttcattgacgacatacttatctattccaagtctgaaaaacaacatgagcaacatcttcgtctggtactcgagaaattgaaggagcaccagttatatgccaagtttagcaagtgtgacttctggttatcggaggtcaaatttctgggtcacgtcatttctgctcaaggcgtggcagtggatccatcaaatgtggaatcagttaccaagtggaccccaccaaagacagtttctcaaatccggagttttcttggacttgcgggctattaccgtcggttcatcgaaaatttctccaagattgccaggcccatgacacagttgctaaagaaagatgaaaaattcaagtggtcggctgagtgcaaccaaagttttgaagaactcaagaagaagttagtctctgcaccagttctaattctgccagatcagacaaaagacttccaggtatactgtgatgcatctcgccaaggattgggatgtgtgttgatgcaagaaggcagagtggtcgcatatgcttcgcgacagttgcgtccacatgagaccaattatcccactcatgaccttgagttggcagcagtggttcatgctctgaaaatctggcggcactatcttattggcaaccgctgtgaagtttacactgatcataagagcctgaagtacatcttcacccagcccgacttaaatctccggcaacgaagatggctggagttgattaaagattatgacatggggatacactatcatccaggcaaagcaaatgtggtagcagatgctctgagcagaaagagctattgcaatgcagtatgtaccgaaggcatgtgtgacaaattgcagcaagatcttgagcacctaaatttgggcatcgtggaacacgggttcgtagctgccctagaggcacggcctacactcgtggatcaagtcagagcagctcaagtaaatgatcctgaaatagctgagctgaaaaagaatatgagggttggaaaagctcgagatttccatgaggatgagcatggcacaatctggttgggagagagattgtgtgtgcctgacgacaaagaactgaaggatctcatactaacagaagctcatcaaactcagtattcaattcatcccggcagtactaaaatgtaccaggacctcaaagagaaattctggtgggtcagcatgagaagagagatagccgaattcgtcgcactctgcgatgtttgtcagcgagtcaaagcagaacatcagaggcccgcaggactgctacaaccccttcagatcccggaatggaaatgggaagaaatcggaatggatttcataacaggtttgcccaggacatcgtcggggcacgattcaatctgggtggtcgtggatcgactcaccaaagttgctcatttcattccagtacacactacctatacggggaaaaggttggcagagctgtacttagcaaggatcatgtgtctgcatggggtacctaagaagatagtatctgatcgggggagtcagttcacttcaaaattttggcagaaactgcaagaagaattggggactcgtttgaatttcagcacggcttatcatccgcaaactgatggtcagaccgaaagggtcaatcagatcttggaagatatgctgcgagcgtgtgcgctcgattttggtggagcatgggataaaagtctgccttatgcggaattctcttacaacaacagttatcaagccagtttgcaaatggcaccgtttgaagcgttgtacggacggaaatgccgcactccgctcttctgggatcaaactggagaacgccaattgtttgggacggaagtattaactgaagcagaggagaaagtcagaaccatcagagaaaggctaagaattgcccagtctcggcagaagagttatgctgataaccgccgaagagagcttactttcgaagcaggggattatgtgtaccttcgtgtcactccgctccgaggagtacaccgttttcagacgaaaggcaagctggcaccacgcttcgtgggaccatacaaaattttggaacgaaggggagaagttgcttatcagctagaacttccatccaacatgatcggcatccatgacgtgttccacgtttcccaactaaagaagtgcttaagggtacctgaggaacaggctgattcggaacacatcgatatccaggaggacctgacctatgtggagaagccggttcgcatacttgacaccagcgaaaggagaaccagaaacaaggtcaccaggttttgccgagttcagtggagtcatcattcggaagaggaagcaacctgggaaagggaagatgagttgaaagccgcccatccgcacctcttcaccagctcctccgaatctcggggccgagattccgtttaa

SEQ ID NO: 14510 - DNA, 3652 bp, Oryza sativa
  Clone ID: TFbOSC900192j.C1.o1.np
gtcgttagccgcccgtgtcctcgggtgcggctgacacgtggggcccacggcgccggccggtgtgagcccgagtgcgcccggtccaccgtggaccgtgaggctgccgcgtgggtcccactacaacgactacaactgtggcagtcacaacagcagtgagcagcacaaccaaagctcaactccaccctcactaatggcaccagctccgtcagatccgccagctatgccagctcaatcagaacagcccaagaaggagtccggaggaaagccaggaccctgcttcaattgtggcaagcacgggcactttgctggcaagtgtccaaagccgtagcgtgctggacctaagttcgttcaggcccgcatcaatcatgcatctgcagaggaggcacgggcagcaccagaggtcgtgctgggcacgtttcctgtcaactcacatccgacagtggttctttttgattcaggtgcaacacattctttcatttccaagaagtttgctgggacacatggattatcggtagtgtaacttaaaataccgatgcgggttcatacccatggaaatgacatgaagacaacacacaactgcccctcagtgactagtgagatcaagagatcacagcttctagctgcgcaagggagtgattgactgcgcaagtcgcaccatcactctaaccaatgacaaaggggagaagatcacctttcggcctctagtgccacagaagtctgtagcaagtcaggatcaggctgctactgaggaacagacagaaatagtgaagaaaagtcccaagaagttggaggatattcttgtagtacaagagtatcctgaggtgtttcctgaagacctcactacaatgccaccgaagagagaaatcgagttccgaatcgatttggcacctggaactgctccaatttacatgaggccgtacagaatggcagctaatgagctagcaaaggttaagaagcaggttgatgaacagctgcagaaagggtacatccgcctgagtacttcgccttggggtgctccggttatctttgtggagaagaaagacaagaccaagatcatgtgcgttgattatcgcgcctttaatgaggtcacaatcaagaatcgacaacaaatatccgttgccaagaattgatgacctgtttgatcagttaaagggagccaaagtgttttgcaagatagacctacgatcaggctatccctagttgagaatttgggaagaggatattcccaagacagccttcaccactcggtatatgttgtttgagtgcacggttatgtcatttggactgaccaatgcacccgccttcttcatgaacttgatgaacaaagtattcatggagtttctggacaagtttgccgtggtgttcattgatgacatacttatctgttcaaagtcagaagaagaacatgagcagcatctccatctggtactcgagaaattgaaggtgcaccagttatatgccaagttcagtaagtgtgacttctagttgtcggaagttaaatttcttgatcacgtcattactgctcaaggtgtggcagtggattcatcaaatgtggagtcagttaccaagtggaccccaccaaagacagtttctcaaatccggagttttcttggacttgcgggttattaccgttggttcattgaaaatttctccaagattgccaggcccatgactctattgcttaagaaagatgaaaaatttaagtggtcagctgagtgcaaccaaagctttgaagaacacaaaaagaaattggtatctgcaccaattctaattctgcctgaccagacgaaagacttctaggtctactgtgatgcatctcgccaagggttgggatgtgttttgatgcaagagggcagagtggtcgcttattcctcgcggcagttgcgtccacatgagagcaattatcctactcacgaccttgagttggcagcagtggttcacgctctgaaaatctagcggcactatgttattggcaactgctgtgaagtctacactgatcacaagagtttgaaatacattttcactcagcctgacttgaaccttcgacagcgaagatggttggagttagttaaagataatgacatggggatacactaccatctaggtaaagccaacgtcgtggcagatgctttgagcagaaagagctattgcaatgccctatgtacagacaaattgcagcaagacctagaggcatggcctacgctcgtggatcaagtcagagcagctcaagtaaatgatgctgaaatagctgagctcaagaagaatatgagggttggaaaagcctaagattttcacgaagatgagcacggcacaatctggatgggagaaatgttgtgcgtacccgaggacaaagaactaaaggatctgatactcacagaagcccattagactcaatattcaattcatcccggcagtaccaaaatgtaccaggacctcaaagagaaattcaggtgggccagcatgaaaagagaaatagctgaagtcgtcgcactctgtgacgtttgtcagcgggtaaaggtagaacatcaaaggctcgcaggattgttacaacctcttcagatcccgaaatggaaataggaagacattggaatggatttcatcaccggtatgcccaggacgtcatcagggcacgattcaatctaggtagtcgtggatcgactcaccaaagttgctcatttcattccagcgcacactacctatactgggaaaagattggaagagctctacctttcaagaatcatatgtacgcacggggtacccaagaacattgtatctgatcgagggagtcaattcacctcaaaattctggcagaagttgcaagaagaattggggactcgcttaaatttcaacacagcctatcacccgcaaatggatgatcagactgagagggtcaatcagatcttggaagatatgttatgagcatgtgcacttgactttggcggagcttgggataaaagtctgccttatgcggaattctcttacaacaacagctattaggccattttgtaaatggctccattcgaagcgttgtatggttgtaaatgccgcataccactctcctgggatcaaattggagaacgccaactgttcgggacagaagtgctaagcgaggcagagaagaaagtcaggattgtcagggaaagattgcgaatcgcccagactcagcagaagagttatgctgagaaccgccgaagggagctcacttttgaagtaggggattatgtgtacctttgtgtcactcccctcaagcgagtacaccgcttccaaaccaaaggaaagttggcaccatgctttgtgggaccagacaggattttggaacacagatgtgaagtcgcataccagcttgagcttccatctaatatggttggtatccacgatgtgtttcatgtgtctcaattgaagaagtgtttgagggtacccgaggaacaagctagctcagagcacatcgacattcaggaagatcaaacgtatgtcgagaagccagtccgcatcctcgaaaccaatgagagaaggacctgaaacaatgtgatcaggttttgcaaagttcagtggagccaccactcagaggaagaggccacttgggaaaaagaagacgaattgaaggccgcacctcttcgccagctcttctgaatctcggggtcgagattccgtt

SEQ ID NO: 14511 - DNA, 2525 bp, Oryza sativa
  Clone ID: TFbOSC17325j.C1.o1.np
taggatcgtgagtctccatggcgttcccaagaaaattgtatctgataggggaagccaattcacctctcatttttggaagaaactccaagaagagttgggaacccgattaaatttcagcaccgcgtatcacccgcagacagatggacagaccgagcatctaaatcagatcctagaagatatgctccgcgcatgtgtactagatttcgggaagacctgggataagagtctcccctatgccgaattctcctacaataacagttatcaagccagcatacaaatggcaccttatgaagcgttgtacgggcgcaaatgccggacaccgctcttgtgggaccaagttggagaaagccaagtgttcgggactgatatcctgagagaagctgaagctaaagtcagaatcattcgggataatctaaaggtggcacagtctcggcagaaaagttatgcagataaccgtcgccgtgacctggaattcgcagtgggtgattttgtataccttcgggtcacgccattgcgaggtgtgcacaggtttcagacaaaagggaagctcgcacctcggtatgtggagtggagccaggaactatctacctctgtaatgacactttatacgcttattaattagagtaataattgtactctattatcaatttgttattgtgtgcctcggctgattcctggacgagggttcacacacatgtaagcgtttggaattttggatagaaattccgggcgtgacaagttggtatcagagcccccttgaccctaggttatgccaaatggttacccatagaagccttctaaaaatattggaaaagtagaactgttctcctcccatgccgcgctacaagcctgagtacttgtttggtgttgagggttttgtccaggagttgcgtacgatgtcctttgtcattggatttgggactgcccctttttatgcccagattcctcatgatcgtcatgaagagaagtgccgagtcaaagtcaccttgaacagtaatagtgaagatattccctcagtgatgttcgaagctggaggaagaaactacatccatgcgtgtcaggaggtggcaaggatcgccataggagagcttcgcgatcgctacagtgatcagttggccgatacggagtatcgctaccatcctcgtcaaccacagggaagtgaccgtggcaattaccttgagactgaaggaattgagaatgatgctaccacaaggcatttggttgagatgctgtgggctatggatgaaagtcgtgcggagactgtattagcggctcaagatcgtgaagaccggaatcgtggtaagatttgcaagctagaagacaaggtggatcgtttggagaaggaattagccgcattgaagggagaagcaccgccgcagaaggccaggattcgtctcactgcaatgaagagagctctatttgtccctcgctatcaattggcgccaaaggttcgtgtggtggagaatgaagttgccccaaccctagcagatcctccggtcatcatcatggtgaacactcgcagcaatgggaatggccccaacaacaaccccaataacaacaataaagtggagagaatcccacacttgcccaagttcttgctcaacagacacaactcatgaacatgatgatgcagcaactccagaatcagcagaaccaaggaaataaccatgcacctcctcagaataagttagcagaatttcttcgtgtgaggccgcctgttttctctagtaccactaatcctgttgaagctggtgattggctgcatgccatagagaagaagttggatttgcttcagtgcactgatcaggagaaggtctcatttgcatcacatcagttgcatggccctgcctctgaatggtgggatcacttccgcctgaataggactactgctgaacctattacttggcttgaattcaccgctgctttccggaagacgcatataccatcgggagtggtgtctctcaagaagaaggagttcaggtcgctcacccagggatctcgctctgttacggagtatctgcacgagttcaatcgtcttgctcgttatgctccggaagatgtgcgcaatgatgaagagcgccaggagaagttcttggaaggacttaatgatgagctttcttacccactcatgactggagattattctgatttccagaaattaatggataaggctattcgtcaggaagacaatgctggcaacaacatccgcaatcaagctccacgtcctgttgcagctccaacacagcaacaacctgccaagagggagccaggcagcaagcccgtggtgtgtttcaactgtggagacccaggacattatgctgcaagtgtccgaagccccgacggtgaaggttgtccctgcccagagcaactctaccgcaccagcatcaaaggcccgtgtcaatcatgttgctgctgcagaagcccaagatgctccagatgtgattttgggtacgttttctgttaactcagttcctgcaacagtgcttttcgattctggtgctacacattcattcgggctgcaggaa

SEQ ID NO: 14512 - DNA, 3135 bp, Oryza sativa
  Clone ID: TFbOSC22791j.C1.o1.np
atggctagccgccccaccgcgctgctcgtgcaccagcccgcttcggttttgaggaaggtagagttgagccagaagcagatcatgagtcagctaatgagcagtctcaccacagcaaccgttcgcaccgtactgcttcccgcaatgcagaagttgagcaatcccaccgcagcaaccgctcgcatcgcatagtttcccgtaatgcagaagtggaatagtctcaccgctctcaccgctctgtcggtcacaattctggtgaagaacgcattccttcaccaccccatgttgagaataacatgcagcacttgatggcagttcagactcaaatcttgcaaggtttagccacagctatagccggtattcagcacaacgcgcatggaaatggccaccctcacatgggcaacaatagatccaagctgacagactttctgaggtctcgtccgccagagttctctcagaccgtcaagcccgttgaggctggcgattggctaaaggatgttgagagaaaactcaacttagtgcagtgtattcctattgagaagacggtctacgcctctcaccagctaagaggacctgctgcagattggtgggagaattactgcaatgcacaccccgaacccactaacattccatggaatgagttcgctgcagcttttcgtgtagctcatgtgcctaaaagcactattgacatgaagaaggaagaatttatcaggctcaagcaaggcaatagcagtgtcaatgagtatctgagtcagttcaacaagttggctcgatacgctcctgaagaagtggacacagacaagaagaagatcaggaagttcttgaaaggagtcacagttggaatgagactccagttgcttgctcatgacttccccacctttcagcacatgatcaacaaggcacttccacttgaggatgccagaaaagaggctactgaagaatataagaaacgcaagtctacccatcaagggaattcttcccgaggtgcaccccaccctcgctttggtcagcctaagcagtatcaccagtcggtcactcaggctaaccgccagccaggctatgcccctcgccctcagatgaaccgtccagcacctccgccgcagcagcgtgccccaagtggcaatattgcgccaaacagtgttacctctttcaagtcaccaccaggactgtcaaccgtacagtgtttccggtgggacaagatgggtcactctgctagacagtgccctcagaatcctaccaacaccaactcagggcatgctaatggcagcaccgccagaactcctactctagcagcagctcagtctcgtcctagctcttaggcaagtggacaaggttcccatgcttccaacaacttcggtcgaggtcgggtgaaccacattcaagctgagaccgctcaggatgctccagacgttgtgatgggtatgttctctgtcaactccatacccgcaataattctgtttgattcaggagcttcctattctttcatatcgcaagcctttgtgaaaagaaatggttggaaaacctaaaatttacgagtaccaatgatagtacattccactggaagggatataagggcaactaaaatatgcccggaagttaaccttagaattgaggaagttgacttcctagccaaactgatagtcctggactcgcaaagcttggacatcatcctagggatggattggttggctaagcacaaaggacagatagattgtgccgaaaggtccatcaccttgcaaggacctggtggaaagcaagttcactttacccccaacactcttaccgcaagtcggtcaatcctaaccaatttgcaagccactcccttggaatcggtgcccatagtctgtgaatatcccgacgtgtttccagaagagttatcgagtatgcccccagatcgagagatcgagttctccatagaactggcaccaggtaccgcaccgattgcgaaaagaccctaccgaatggcagctaacgagttagcagaagtcaaaaggcagatcgaagaactggagagtaaaggttatgtgcgacctagctcatccccttggggagccccagtgctcctggttaagaaaaaggatggctttgagagaatggtaattgactatagagccctgaatgaagtaactataaagaacaagtacccgttgccacggattgacgatctgtttgatcaattggaaggagtgaaggttttctctaagattgacctaagatcaggataccactagttgaaaatcagatctgaagatatccgtaagaccgctttctcaacgcgctatggtctgtatgagttcacagtgatgtctttcggacttaccaatgctccagcattctttatgaacttgatgaacaaaatcttcatggaatacctggacaagtttgttgtggtattcatcgatgacatcttgatatgctccaagaatgaggaagaacatgctgaacagctgaggctgataatagagaagctaaggggtcatcaattgttcgctaagttctcaaaatgcgaattctggttggaccgagtagcattccttggacacgtgatctcctctaacggtatcgaagtggatccaagcaaggttgaagctgtacttgcttggaatccgcccaagaacgtgtcagagatccgcagtttccttggcctagctggatattatcgaagattcatcgaagggttctcaaagctagctagacctatgaccgagctgttaaagaaggaaaagatgtttgaatggtcagcagcctgtgaggacagctttcaagaaataaagaaaaggttgaccactgccctagttcttaccttgccagatatacgaaaggatttcgaaatcttctgtgatgcatcaagacaaggcttaggatgtgtcctaatgcaagagcgaaaggttgtggcctatgcatccaggcagcttaggcctcatgaagtcaactatcccacccgtgatctcgagttggcagccgtggttcatgcttttaagatctggcggcactatttaatcgggaacaaatgtgaagcatacaccgatcataaaagacttaagtatatcttcactcagaccgagttaaatatgaggcagagaagatggttggaactaatcaaggattacgatcttggaattcattaccatcccggta

SEQ ID NO: 14513 - DNA, 4612 bp, Oryza sativa
  Clone ID: TFbOSC5140j.C1.o1.np
ccattggggacgtccaagtcaaggtggaggcccaaaccaagtcgacgtctggatgatccttatgctaaggttaagtttaaaataccatcttttttgggatatgatgatgctaaaaaataccttgattgggagatgacagtagaacaaaagtttaatgtccaccttgtacccgagcaacatagagttagacgagccagtagtgagttcaaggattttgctattatgtggtgggctgggttatctgatgagggggtactacctactacttgggaagaacttaaggtagctatgcgcgataggtttgttcctccatcttatcatagagatttacgtaagaaactgatgcgtttggaacaaggggataaatctgtacaggattactatggtgagctacagaagggtgtgagacgctgtggtatagtggagggggtcgaggatgctatttgtcgtttctacactagtttgagggaggaaattcagaacattgttgattataaggaatttaactctgtcaaccagttgtttcgatttgctatgcttgcagagaaggaattacaggggcgcgaccatcagggcaagagcaaggcaagcacatcgacgccatctgcgggactgcccaaggccgtctcttttcgggcgtcccagccagcgggcaagcgaccagcagcatccggagcttctgcggcaccaaaaccatctccaccaccacgaccagcagagtcaagtaaaggttcctcgcaggtacccgccaagagtgcctcatctgtcacctcgacgggacgcattcagtgccaccgttgccaaggatttgggcatgtgcaaaaagattgccctagtcaacgggcctatgttgctacagaagatggctacatcaccacctccgacatggaagaggaagaggaggaagaagaagttgaggacgaggatggcgaagtttttggtcgtgatgacacaacggactacagaaccatcattgtgcagcgggtgctcagcacgcaggtacagcagcatgacaggttgcaacgccataatttgttttagatttttttcgtcatcaacaactgtcgtgcacgtgtgatcattgatggatgtagctgcaacaacttggtgagttctgatttggtcaataagcttggcttgactacatgtacacatccacatccttaccatattcagtggttaaacgattccggaagagcaaaggtaacacaggtttgtagggtttcgttttccattggctcatatgcagattctgttgattgcgatgtggttcctatgcaagcttgttcacttttgctggggcgtccttgggaacatgataatgatgctacacatcatggtaggagtaataaatacacttttatgcataatgggaagaaaattactttgctacctttgacccctgctgaaattgtagaagctgataaagaacgagctgctagtttgaaagttgatgaatctgaaaatcagcaagtggctaaatctgtttttccacctaaaaaggataagctttcacctagttctaaggttgagggaattaagttgaagggtggtgttatgcttgcaacgaaatgtgacattggtgatatttcaaatgatgatatgtgctatttcttgatatgcaaacaagccttggtttctttagatgatattgctagttcgatacctcctgttgttactaaccttttgcaggagtatgaggatgtctttccagctgagatacccccaggattgccacccatgagagggatagagcatcaaattgatttgattccaggagcatcattgccaaaccgtgctgcttatcgaaccaacccagatgagactaaggaaattcagtggcaagttcaagacctttaggaccgcgggtatgtacgtcaaagccttagtccctgtccagttcctgtaattttggttcctaagaaagatggttcttggcgaatgtgtgttgattgtagagccattaataatattactatccgatattgtcatcctattcctaggttagacgacatgcttgatgagttgtgtggctatattattttcacaaagattgacttgcgtagtggctatcaccaaattagaatgaaacttggagatgaatggaaaacagcttttaaaactaaatttggtttgtatgagtggttagtaatgccttttggtttgactaatgcacctagtactttcatgagcttaatgaatgaggttttaaggccttttattggacgatttgtggtagtgtactttgatgacatattgatttacagcaagtctttggatgaacacatggatcatttacgtgctgtttttaatgctctacgcgatgcacgtttgtttgctaaccttgaaaagtgcatcttttgcatggaacgagtctcttttcttggatatgttgttactccacagggaattgaggtggatgagtcgaaaattgaagccatcaggagttggtcggttccccaaaccatcacacaggtgaggagctttcttggtcttgcaggattctaccaccgtttcgtcaaagattttagtacttttgctgcaccattgaacgagttgacgaagaaaggcgtggtcttccattggggaaagacacaggagaagtcctttgacattttgaaggagaagcttacgcatgcacctttgctacaacttccaaactttggtaagacttttgagttagaatgtgatgctactggagttggcattggaggtgtgttgatgcaagatggtaagcctgttgcatactttagcgagaagttgcatggtcctattttgaattattccacatatgataaggaattgtatgctcttgtacgttccttagaaacgtggcgtcattatttttggcctaaagaatttgttattcactccgatcacgaatcgcttcaatatcttcgctctcaaaataatttgaatcgtagacatgcaaaatgggttgaatttattgaatcttttccttatgttatcaaacacaagaaagggaaagataatgtgattgcagatgctttgtctaggcgctatactttcttatcccaacttgaatgtcggatttttggacttgaatcaattaaagaacaatatgcacttgatcctgattttaatgaagtgatgataaattgtaaagagggacgtacttggaacaaatttgtgatcaatggtgggtttgtttatagagctaaccgtctatgcattccagttggttccgttcgtcttttgttgatacaggaagcgcatggaggagagttgatgggacattttggagctaagaagacggaagatgttttggccacatatttcttttggccaaggatgagaaaggatgttgacaggttcatggcacgttgcaccacttgtcagaaagctaagtctcatttgaatccacatggtttgtatatgcctcttcctgtaccttctattccttgggcagatatttctatggactttgttttgggattgtctagaactaagagggggagggatagtatttttgtagtggtggatcatttttctaagatggcacatttcataccatgtcataaaagtgatgatgctgttcatattgctgatctatttttccatgagattgttcgcttgcatggtatgccttctattgtttcagatcgtgatgcaaaattcttaagtcatttctggcgcacgctatggaacaagttgggtacaaagctattgttttctacaacatgtcacccacaaacagatggacaaacggaggtagtcaaccgcactttaggtaccatgttgagggctattttgaagaaaaatttgaagatgtgggaagaatgtttgcctcatatggagtttgcatacaatcgggcaacacattctactaccaaggtaagttcttttcaggtagtgtatggtttcaaccctcgtgctccaattgatatgttgcctttacctactagtgagagggttcataatgatgctaaggcacgcgctgaatttattttgaaaatgcatgagtcaaccaagttcaacattgaaaagatgactgaaaagtatagaattgctggtagtaaaagtaggcaagaggttaagcttgaaccgggtgatttagtttggttgcacttgagaaatgatagatttccggaattgagaaagtctaagttgatgcctcgtgctgatggcccttttaaaattgttgagaagattaatgataatgcatataaacttgagttgcctcccgagtttggggttagtcccacgtttaacatttcagatttgaagccatacttgggagaagagtatgagcttgagtcgaggacgacatcaattcaagagggggaggatgatgcggacatcactacctcggatacacacaacaatcctccaatggtcattcaaggaccgataacaagagctcgtgcgcgacaattaaatttagaggtgagttcgttcctatgttcttctttgtatgaattcgagaatagattgcaacctaatgattatattgtgcttaggaacaatggaggggacaaagagacacttggagaaggacttagagtcatggaggaccatcggggacgtccaagtcaaggtggaggcccaaaccaagtcgacgtcgggtgcaattcggagtccaggaccagtc

SEQ ID NO: 14514 - DNA, 1073 bp, Oryza sativa
  Clone ID: TFbOSC10016j.C1.o1.np
agagaaaaagatatggagaaggtactgtgaaaaacgaaggagaaagagaaagaccagctagggcagcaggaaaatggccccctgatagagaagaattttcatataactatataccaggtcaatataggcatatgggtacaaagagaagagactttgagaagcctgttaaatttcaaaaccagaggagtgatggtgctatattaaatttagccgcacatgaccctattgattggcctaatattattagtatttggaaaggtttaatagttcaaaaatatatacaaaaccagcacaatataggaagtaaagttgaagatatgataacctacttagaaacatttttaggtgaatctgctaagattctatgggaacaatgggttgaaaagaatcctaataattatgaagaattgaaaagagctggtagcaatccgcataattttgcaaatgttatatctaacattattatagctgaagatccggaattaggttatacaactttgcaaaatgaaaggttaaaagaaatagaaaaattaacgttaacaagttggaaaggcataaaagaattctcccaacattatttatataatgctacaactgctaaacaaggatataacaggggaatagttgaacgttactttaataaattacctgacccactaggaagtatgatatttgaagaatataaaaaggaaactgaaggagctgaaatcaatatctctcaagctataacttttgtgtttaagcaactaagaaaaatatgcacgggtatccaagcccaaagatctatgaaacactcggattacaatttctgcaataaaatagttcaaatacccttgtcatatggagaagacaagcctagaagtaaaaggatttataaacatcaaaatagaaaccataataatattagaacaaagaaaagatatttcttaagaagatcagataatagagcacccttcttacataaaagaaatgtaagaagatataatccaaagaaaacctatgacaaaacatgcagatgttttatatgcaactcgccagatcatttaagtagaacatgcccaaataaagatcaa

SEQ ID NO: 14515 - DNA, 3090 bp, Oryza sativa
  Clone ID: TFbOSC100588j.C1.o35.fg
atggccagcaagactcttcgcgagttcgctgctccctctgctgacaatgtggccattgggccgcaggtcaacataggagacgtggatttcgacttgaaatccaacctcatcacgatggcgcaggctagcccgttctgtggcaagcctaatgaggatgccaacgctcatctgcaacaattcctagagatatgtagcacatacaccatcgagggagtcagacccgacaccgataaatactctacagcattcctctcaaagttcttcccgatgggcaaaaccaatgccctccgtggaaggatttccagtttccagcagacaagggatgagtctattccggaagcatgggagcgtctgcaggagcatgtggccgcctgtcctcatcatgggatggtcgactggctgatcctgcagaacttctacaatggactcaccccaatgtcccgcgatcacctagacgcggcagctggaggtgctttcttctctaaaacggttcaaggagccgttgaattaatagagaagatggtctccaatatgggttggagcgaggaacgactccagacccgtcagcgaggcatgcttaccgtcacggagacggagttacttgctgccaagctggacctcgtcatgaaacgcttggacgaccacgagaaagggccacagggcaccgtcaaggccatggattcacacgtcacgtgtgaggtctgcggcggcacgggtcattctcggaatgactgcccggaaacccgtgaggagacgatgtatatgggcaacaacaacgggtaccgtccacaagaaggtaacaataatgataacttgtctaaccagccctccttgaaggatctcatttttgcacaagctaaaaccactgatgcactaagcaaaaatcttgctgctaacgataagatcctagagaacattaatgtcaaactagatggctttgcttctgcttttcaaaatcagtcgagctttaataaaatgatagaaacccagttagctcagttagcatctttagtccctgcaaatgaaactgggaggattccggggcaacccgactcttctattgaaaatgtcaaagcgatcacaacgagaggaggtaagtccactcgtgatccgccatatcctaaccctgcaggaactaatgggatgtcaaaagaagcgccatctaatgactcggcttacaaggagattcagcccaacaagaccgtgccgctggaatactacaacacacggttgctgccattccctcaacggagtaggaaaccgtcagtggacgagcagttcgctcgttttgttgaagtaatccagaagattcacatcaacgtgccgttgttggacgctatgcaagtgccgacatatgcccgttatctcaaggacatactcaacaataagagaccgctcccaacaacggaggtggttaagctgacggaacaatgcagcaacgtcatactccacatgctcctggagaagaagaaagatccggggtgtgccacgatcacctgcttgatcggggcacaacaattcgaccaggccttgtgcgaccttggagctagcgtcagcgtcatgccaaaagacgtctttgacaagctcaacttcacgatgttggaaccgacgccgatgcgcctccaactagttgactcgtcagtccgttacccggcagggatagcggaggatgtgccagacaagatacgggattccttcatcccggttgattttgtggtgctagacatggacacggggaagaagacgccgctcatcctggggcgtccattccttagcaccgcaggagccaacattgacgtgggaatggggagtatctgtttccatatcaacgggaaggaggaaaagtttgagtttcaaccgaggacggaacaatgctccatggtcagaatcaaatacgggccaaacccgcagaatattcaagaggtcaaagtggagccgcccaagacggacagcctagtgaaattcatgcaaaacttcctggagaaggaaacaacaatacccaggaaccgttattggaggacgccggtaaaatcacctgtatcggccaagaagttagagcagccggctcagaagaagccgccctctgcaccaaaaccaaagaaggtgtggaaggaaaagccaaagatgcccgctccatcacctccggagacggaaatagaagatggtatttcttttcgctttttccatgaagagtttacatttacatggaaaggcttaagtacatttcttggttttcacgattcctgcaaaatcgatctccagaaaggaatttctgggttcgagaaaaataggttttgggaagacatttctggtgctccaatttgcaagaaaccaagaacgaatgatatccttaatcctacacttaggctcatgcacaaatggattgctatgactttgtttcctagagcaaaagggctaggggtcgttagcgaccaaattgcttttatcttagccgctcgtccgcgtattgatgaggcttatctagtgctagcgcatattttgaaacatggagcagatggatctttgatatactttttccctggttgtacaaatgaaatcccgttgccaaatgcggggtatcatttgtacaactgccacgaactaaccattcccctacagaccatagaagaatctcgtgcaggtggaacattcagggagatgcacaacatgacaaggaacgaacgagaaatttcattatcctcgacacccgtgcagatgtatgaggcaggttggacaccaactggggatgcacccggatggacccaagctccacgccgcagcatcggagtctcaacctgggcaagcgccagtgaggaccggtggcatgcgcctcatgacatccaaaggggggacaatcaacctcccagatcaagtgatgtgtcttcatctccaagtgaatggcgctcaagttcctctcgttgggacttgggtgaaatcactaggagaatggacacccttgatgtgcagacgggggagatccagtacaacctcacggaacacatggctcaaacgcaagaatggcaacaatctgctgatgctcagttcgccaacatcaacaacatgatgcagcaacagcatgataacctttag

SEQ ID NO: 14516 - DNA, 3045 bp, Oryza sativa
  Clone ID: TFbOSC29942j.C1.o1.fg
atgacgacgatggccgacgcttcttcatcctccaacacctcaaccggtggctactccttgatgggttgcattaaagatattccgaccctacaaggagataactacgcagaatggaaaagaaaactcgaccttgcttttatcatgggagaggtggactgggtgttgactaccccatgtcctgtagaacctgttgaacttatcaaaggtgaaaatgagtcagatgctgactggcaaaagagtcagagggacaatgctcctctcgtcatgtcgtatgacattgaacaaaagaaatggtccttagccaacaagaaatgtttggctgtggtaaagaacacgattgagcccacaatattaggctcaattccagagtgtgacgctgtctcagagtaccttgaaagaataaaaagtcagttcactggcttttcaaagacttatgctacacagctgatcaagcagcttgtgacagagaggtaccatggaggtggtgttagagaccacattcttaggatgagcaacatggcttccaagttgaagccaatggatttgggcataacagatgactttctggtccatctggttatggcctcattgccaaagcagtttgacaattttattatcaactacaacataagtctagagaaatggaactttgaaaagctcatcgctaattatgtgcaagaggaggagagaatcaaagagtcaaatggtggttcaattaactatgttaaagataacaagaaaaagaaccacaagtctcccacctcaaaagctaaacagtctcagcatctacctcagcaacaacagttcgctgttgagaaagatcagtgtctccactgcaagaagataggacattataagaaagactgtcctgacttcttgaaaatgatcatggcaaggaaagatgagaacattattacatttgtaaatgaatctcattatgttggttactctagatctacatggtggattgattctggagcaactattcatgcttgtaattgtttaaaggcattccgttcgacgaggactatgcaaagaagtgaaagctccattagagttgccaatggagttgaagaaaaagttgaagctgttggagatcttcctctagagctcgcgaatggcttcacacttttacttcgaaatgtcttttatgttccttctttgcaaagaaacttaataagtgtatcaaagttagattttgatggatatgattgccgctttggaagtggcaaatgtgaactatgggggagaattgagagactcgttaagaatgaaattcttcgtccattggagttctcagacttagaacaatgcatagaatgcattaaaggaaaatttgtaaagagcatcaaaaagggtgcaaaacgaagcgcaggaattttagagatcattcatacagatatttgtggtccatttcttgtgaaaagtgtggatggctatgactcgttcgtaacattcacagatgattactcccgctatggttatatttatccaattaaagagcgatcagaagcattggataaatttaagatattcaaagttgaagttgaaaatcagcatgttataaagattaaagtgaatggggtagctgaaaggcgtaaccgtacccttatggatatggtgcacagcatgatgagctactccacactaccactgggtttatggatggaggcgttaaaaaccgccattcatattctcaacagagttccaagcaaatcggtgcccaaaacaccatatgagctatggacaggaagagtaccctcgctagctcacctccgtgtgtgggggagtcctgtagaggctaaagtatttaacccaaacattgggaagttggatcccaaaacagtcagctgccattttattggctatcctggaatatcaaagggctatcgtttctactgtccaaacagttatacaaagtttgtagaaatgagacatgccatcttcttggaagacgaaatgattagggggagctcggtagttcgagaaattgatcttgaggagaggcgggtgtctatacccgctccgtcgactcaggaacctttcttctctctacctgctgatgttgtgcctacaatgcctgtcattgcggaggaactgcaacagcctcaaacagataatgtgctagtacaggagactcaacaagagcctcaggtacaggatgtgccaaatgtggaggcccctagaaggtctgaaagagtcagaagatcggctatccgtgatgactataatgtttataatatagaagagtcgcatgtggaggatgatcccacctcatatgaagaggccatgagaagcgctcgctcatctaaatggttggaagccatgaaagatgaaatgaaatcaatgaaactaaacgatgtttgggatttagaagaaattcctaaaggagccaaaacaatagatgtaaaaacggcatttataaatggagatttggaggaaaaagtatgcatggcgcaaccgaaaggttttgtcatgaaaggaaacgaaaatatgggatgccgtctaaagagatccatttatggattaaaatttcagagtaatccaggcccagagcactggaaattggtaaagaaagtcttgcgttatttgcaaggaacaaaaggcctcatgctgtcttacagaagatcagaatcactccagatagtggggtattcagattttgactttgaaaagataatacaaaggtctactatgtatgccgagtttatagcatgctatgaggcaaatgaggcaacggggcaggtgaactggctaaagaagttcatacccggtttaaaggtggttgacagtattaagaaaccactaaagttatactgcgataacaaacccgcggtaatgtatgctcacaacaatcagtcaagtggtgctgccaaacacattgacataaagtactatgttgtgaaggacaaagtctgggatcaaacaatcagtctcgagcacattagaacagaaaggatgctcgcggatccgctcacgaaaggcctaccacccaacatgttcaaggaacatgtagctggcatgggtttaagggaagccttatga

SEQ ID NO: 14517 - DNA, 3759 bp, Oryza sativa
  Clone ID: TFbOSC400543j.C1.o10.fg
atggcaagccgacgtcgggcgtcaactagcaatgaagaaactcaaacacccgacctaaacaccctggccagagtcatgactactcaaacccaacttctgcaagccatcgcaaataatcaaggcaaccgtggaggatcaagctttggagaattcatgaggactaagccacccacgttcgccacagctgaagaacctatggatgctgaggattggttaaggatcattgagaagaagctgacccttgttcgagtacgtgaagccgataaagtgatctttgcggcgaaccaactggaaggaccagccggagactggtgggacacctacaaagaagcccgagaagaagatgctggagaaccaagctgggaggaattcactatagccttccgtgacaacttcgtgcctactgctgtgatgcgaatgaagaagaatgagttcaggagactacggcaaggaaatacctctatacaagagtacctgaaccgtttcactcagctggcgcgttacgcgactggagatcttgccgacgaggaggaaaagatcgacaagttcatcgaaggcctgaacgacgagttgcgtgggcccatgattggacaggaccacgatagtttccagagtttaatcaataaggtcgttagactggaaaacgaccggaaggttgtggagcacaatcgcaagaggaggcttgccatgaaccgcccgcctcaggccgcaccccagcgtcctaaaggaactacctcgtcagtatggaaaccagcagtggtaacaaccaattgtccttctgcacctagcaacttccacaggccggttaccactcagaaccgagctcctgcaccgaatcaggccgctactggatcagtgaggccaggaagctgtttcaactatggagagtacgggcatttcgccaacaagtgcccccatccaaacaagacacccattcgcaccggagctaatgcaacggctattcacgggactgctacccctgctgctggacgaggtctattcaggactccgcagactaacaggacctctaccggatttggacccgggcaaacccttgatgtcatattgggtatggattggttaacaaagaatagaggagtaatcaactgtagacgtagagaggttaccctaaccacaccctggggatcggatatgagagcaaccatggatcaagatcctagactaaccgaacatgccggaggcatatttaccatgctacccctgaaaggaatgcccgtagtgcagcgattccccgatgtgttcccacaagatttacctggaatgccaccagatcgtgacatagagttcattattgacctgatactcggaactgcccccatatccaagagaccatatcggatgccggtcaatgagttggaggaacttaaaaagcaaatcagagagttgcaagagaagggatttgtacgtcctagtttgtcaccttggggagctccagtgttattcgtcaagaagaaggatggtagcatgagaatgtgtgtggactaccgctcactgaatgaagtcactatcaagaacaagtatccactaccacggattgatgatctttttgatcaactcaaaggagctaaggtgttctctaagattgaccttcgatcaggctaccaccaactgaaaattaggaccggggatatacccaagaccgcgttctcaacacgctatgggttgtatgagttcacagtaatgtcgtttgggttaaccaacgccccggcatactttatgaatcttatgaacaaagtgttcatggattacttggataaatttgtggtagtattcatcgatgatatcttaatctactccaaagacgaggaggagcatgcggagcacttgcgattggtactcgagaaacttcggaagcataaattatatgcaaagtttagtaaatgtgagttctggttaaaagaagtcacttttctaggccacgtaatctcagccggtggagtagcagtggatcctgctaaagttgaagccgctacggaatggaaggcacccaaatctgtgactgagattcggagttttctaggtttggctggatactatcgaaggttcattgaaggattctctaagatagctcgaccaatgacacaactactcaagaaggaaaagaagtttgtgttgtcagaacagtgccaggaaagctttgagcagctcaaagaaaagttgacctctgcgcctattctagttctccccgacaataggaaagactttgttatatattgtgatgcatcaaggcaaggactaggaggagtactgatgcaggacggaaaggttgtggcctatgcatcgcgacaactgcgaccacacgaggaaaattaccctacccatgacctagagctagcagccgtggttcatgcgctaaagatttggagacactatttgattggaaaccattgcgatatctacactgaccacaagagtctgaagtatattttcacccagtcagatctcaacttgaggcaaagaatggaagggatggctcctgagcttaaagaggacatagcccagttaaacctacatatagtacctcgtggacagataaacaccctggacattcaacctcttttgagaacccaaatagaagaagcccagaaggacaatgaagaaatccaagaggtgaaggaacgcctagctacagggtttgcaaaggaattttcgaccgatgagaaagatgtattatggtataaaaagatgatctatgtacccgaacagggtggactgagaggattaatcctaaaggaagctcacgaatcagcatattcattgcaccccggaagtatgaaaatgtaccaggatctgaaggaaggatactggtggcccaatatgaagagagatgtggcagaatacgtagcactctgtgacgtatgccagaaggtgaaggctgagcaccagcgaccggcaggtttgctgcaaccccttaggattcccgagtggaaatgggatgagataggtatggattttattgttgggttgcccaagactgcaacagggtatgattccatttgggtgatcgtggatcgactcaccaagacggcgagattcatccccgttaagaccaattatagtggtgccaagctcgccgagttgtacatgaccaggatagtatgtcttcatggtgtgcctaagagaattatatccgatcgaggcacacagtttacttcgcatttctgggagaaaactggagaacgggcggtatttggacctgacattatcaaagaggccgaagaaaaggttcgcctgatccgtgatcatctaaaagtggcacaatcacgacaaaagagttacgctgacacccgaagaagaaacctggaatttaaggaagaagattacgtttatctgaaggtttctacgatgagaggcacgaaaaggtttaaggtcaaagggaaactcgcgccaagatatgtgggaccttttcaaatcatggctagacgaggagaagtcgcatatcagttacagctaccagaaaatatcgccgatgtgcacctagtcttccatgtgtctcaattaaagaagtgcttacgagtgccgaaggaacaagctccgttggaagaaattcataatagcaatgatctcacgtatccagaacacccagtccggatattggatgaagcagaaaagaggactaggaccaaagtgtggcatatgtataaggtacaatggagtaatcacactgaggatgaagccacttgggaaagcgaagaattcttgaagacggaatacccgcatctattcgaaaaccggtaa

SEQ ID NO: 14518 - DNA, 4038 bp, Oryza sativa
  Clone ID: TFbOSC400785j.C1.o28.np
atggacctatctaggagtttgtttagaagaatagcaagcagagacgataaatctttaagttgtattgataaacaaaaaggtaaaaataaagacatagatgagcttgaagatattgcagaagtagacaaacagctcgaaagatatcaaagagatactctgagggcaataagacctcaacaaatatattgcatgggattttttgagaataaaaatgggttatacagaatatctagagaagtagagttaagcgttttaacaaagccggttgagttaaaaattgtagccaaggaatttgaaaatggattaaagtattcagggtataaatatattcaccaaggtatgtatacaataggaatcaaaggtatgacaagaaagaaattaggagctaaagttttaataactctgttagataaaaggtgggacacaatagataaagcagcattaggatttttagaaggtgatatgaatgagaatatgttgataacatatatagccccagatctaatgatgcctataaaagaatttatagataaaatgagttttggttttcaaacaaagggatacgaagaatttaaaggaacaaatttgctagtaagcatagaatttataggaagattaactaatagaagtgcctccaaatacaaaataaatgtaaatgacgtgattgaaaatatgcactctaagggaataactttcatgagccctttaaaaataagttctgaagaaagggcaggagaagaatggaaaattagtgatttaattgaaagcaaaactttgagtcagcctgaaaattatataagttatcaaaacagtaaaggaaataccagcattagatttataaattataaacccagaaccacagatgacttagaaacagaagcatctgatagaaatataatagataatagaagacatagtgtttcagagtttatgaaaaaattagatcaagaaagtgagataaaatattacgaaaataaattaaaggaaataaatgaagaatataataaatctataaagtgtgagtggcctaaaataagagataaagaactttatttctatagagaattagctagagtaaagaaagtaaagaagaacgaagatatggcagtagaaatttttaaaaaccaagaaaccaagatagaacagataaagaggaaagagcaagataagcatggcaaagaagagcaaaatcttggtaaaattttaagtgaagaagagcaatgggcagagaatgaaagattatttcttgaaagttatgaagaagaaattaatctaataaatgagatggagaatatagaaaatgaaatagacaatgcagaacaatataatgattttatagacacattagatgaagtagggttacataatcttgataatgcaatggaagctatggaagtggacttaggaacaggaaaaagaaaaatatatggagaaggtactgtgaaaaacgaaggagaaagagaaagaccagctagggcagcaggaaaatggccccctgatagagaagaattttcatataactatataccaggacaatataggcacatgggtactaagagaagagactttgagaagcctgttaaatttcaaaaccagaggagtgatggtgctatattaaatttagccgcacatgaccctattgattggcctaatattattagtatttggaaaggtttaatagttcaaaaatatatacaaaaccagcacaatataggaagtaaagttgaagatatgataacctacttagaaacatttttaggtgaatctgctaaggttctatgggaacaatgggttgaaaagaatcctaataattatgaagaattgaaaagagctggtagcaatccgcataattttgcaaatgttatatctaacattattatagctgaagatccggaattaggttatacaactttgcagaatgaaaggttaaaagaaatagaaaaattaacgttaacaagttggaaaggcataaaagaattctcccaacattatttatataatgctacaactgctaaacaaggatataacaggggaatagttgaacgttatttcaataaattacctgacccactaggaagtatgatatttgaagaatataaaaaggaaactgaaggagctgaaatcaacatctcgcaagccataacttttgtgtttaagcaactaagaaaaatatgcacgggtatccaagcccaaagatctatgaaacactcggattacaatttctgcaataaaatagttcaaatacccttgtcatatggagaagacaagcctagaagtaaaaggatttataaacatcaaaatagaaacaacaataatattagaacaaagaaaaggtatttcttaagaagatccgataatagagcacccttcttacataaaagaaatgtaagaagatataatccaaagaaaatctatgacaaaacatgcagatgttttatatgcaactcgccagatcatttaagtagaacatgcccaaataaagatcaaaagagatattctagtaaatatgaagaacaagagagggttctaattatagatagcgtaaacgaaaacatattagtatgtgatgatgaaataaaagatgacgaatcaatatattctatcatagaaacagacgaagttgaaaccatcaacgaagaatatgaatcatccgatgaagagttagatttaattgacgaattagcaggtctaaaagttgaaatgatggatcaattaaattgtgaacatgattggattagaggaaagggtgactataatatcaaatgtgctttttgcatatattacccaagtcaagaaaatagagtgacttgtagtatatgtctaaaacaagcttgtgctgaatgtataaaagtaaataaacaaaaatggagaaaagaaatagaattagaatcagatgaaaagactttatctagtagagtacgagtgttagaaaatagactaaataaactagaagtagaattagagaacctaaaaaataattgtgatattaaggcattaccagagaataaggacatacaaaacaccgaatttaaagagcaattgataacactaaaagacagtaatactgctaaaataattcaactaagaaaggccataactaattttggaaataaatatatagtaagattgcctttcaaagaaatattaggtataagaatccctgttaaaataaaattgacacccaaagtatcttataaaatattagcactagtagacaccgggtgtacaaagaatattattcatgacaaatatttcataagatgtcctgaaatagttcacacaattgacgacaataaggcagaagtttccacagacatgtccggaataaagaaaattcataatcagttagcttataatattgaggtttacattaatgcaactaaatatataatagatgagattacaataagagatttgtcaatgattaatgatgacatgataattggcctaaggttccttcaacaatcagtacaaaccacagtaatacatgagcaaggaattacttttatcccatatcaaaataatgttccatatatctcagatgtacgaaagcgtggtggaacctcccccaaactcgacaacttagaagtacctaatcttgagtctgaagaaagaattaatgaatatgagcttacttaccccgaggatgacgatggtcagaactcggtgcggcggagctcgggacagcaagaggagctcaggacgatggcgggcagagtgggcggcagcgaagagggcgcccgcaaccaccggcgctcgggacggcgttttgtaaaaataaaccctgcgtacagcgccggacgttatggcaaactgataccgcggttgcttcgcccgatcgacgcgcgcacgccgcacgcccccggtgtcgacacggacctcgtcgtcgtcgcgtttgccgacgctcggagcgtgcgagctgagccgccagccagcgagcgacgcggagtagtacaaacggtgaaaagagaagaaaacaatgttgatgtcgctcgatcgcgggcctacacgtacggtcgatcggaaggtgcctgctgc

SEQ ID NO: 14519 - DNA, 3653 bp, Oryza sativa
  Clone ID: TFbOSC401724j.C1.o7.np
atggacatatttaggagtctctttagaagaatagcaagcagagatgataactgttctgataaacaaaaaggcaaatatgatgacatagatgagctgaaagatgttgcacaagtagataaacagctcgaaagatatcaacgagatactttaagggcaataagacctcaacaagtatactgcatgggattttttgagaataagaatgggctatatagaatatctagagaagtagaattaagtgttctaacaaaaccagtagaattaaaaatagtagctaaagaatttgaaaatagtttaaaatattcaggatataagtatattcaccaaggtatgtacataataggaatcaaaggaatgacaagaaagaaattaggagctaaagtgttaataaccttattagataaaagatgggacacaataaacaaagcatctttaggctatctagaaggagatatgaatgaaaatatgttgataacctatatagcgcctgatttaatgatgcctgtaaatgaattcatagataaaatgagttttggtttcaaacaaaaggatacgaagagtttaaaggaacaaatttattaataagtatagaatttataggaagattgactaatagaagtgccaccaaatacaaaatcaatgtaaatgatgtgatagaaaaaatgcattctaaaggaataaaattcatgagccctttaacaatagacactgaagaaagagcaggagaaaaatggccaattagtgaatttataaaaaataaaaccttgagtcagcctgaaaacttcataagttaccaagatagcaaagggaatgttagtattagatttacaaattataaaaccagagcttcggatgatttggatgcagaatcaactgacagaaatattatagataatagaagacatagtatttctgaattgatggaaaaattagaccatgaaagtgaaataaaatattatgaagataaattaagagatatagcagatgaatataataactctatgaaaagtgagtggcctaaaattagagacaaggaactttatttctatagagaactatccaggattaagaaacaaaaaaaagagaaaagcttggccatagaaacccccagaacccaggaaattaaaatagaacaaataaagtcaaaagaaccaagagaagaaatccaaaagtttgataaggtattaagtgaggaagagcaatgggaagtaaatgagaaattattactagagagttatgaagaagaaaacaacctgatagaggaaatagagaatatagaagaagaagataatgcagaacaatataatgattttatagactcattggatgaggtaggtttgcataatctagataatgcaatggaagccatgaaagtagatttgggaacaggaaaaaggaaaagatacggagagggttctgtacaaaatgaaggagaaagaaaaaagaccagccagggcagcaggaagatggcctccagaaaaagaagaatattcatatcattatatcccaggacagtataggcacatgggtactaaaagaagagattttgagaaatcaataaaatttcaaaatcaaaaaagtgatggggctatactaaatctagcagcacatgatcccatagactggccaaatatcattagtttttggaaggggttaatagttcaaaaatatatacaaaatcagcataatatagggaataatgtgggggatatgataacttatttagaaacatttttgggtgaatctgctaaagtcctatgggaacaatgggttgaaaagaatcctaataactacgaagagctaaaaagagcaggaagtaatcctcacaactttgcaaatatagtatctaatattatcatagctgaagacccagaattaggatatacaaccctgcaaaatgaaagattaaaagaaatagaaaaattaaccttaacaagctagaaaggtataaaggaattttctcaacattatctatataatgcaacaactgataagcaaggatacaataagggaatagttgagcgatattttaataaactacctgacccattaggtagtatgatttttgaggaatataaaaaggaaactgaaggagctgaaattaatatttcccaagccataacctttgtgttcaaacaattaagaaaaatatgcacaggaatacaagcccaaaggtcaatgaaacattctgattataatttttgcaataaaataatacaaatacctttatcatatggagaagataggcctagaaataaaagaaaccatagatatcaaagtagaaataacaataatataaagacaaagaaaaggtacttcttaagaagatcagataatagagcacctttcttacataaatgaaatgtaagaagatataacccaaagaaaacttatgataagacatgcagatgtttcatatgtaattctccagatcatttaagtagaacttgcccaaataaagatcaaaaaagatattctagtaaatatgaagaacaagagagagttttaattatagatagcgtaaatgaaaatatattagtatgtgatgatgaaataaaagatgacgaatcaatatattctatcatagaaacagatgaaattgaaaacaccaatgaagagtatgaatcaaccaatgaagagttagatttaattgacgaactagccggtttaaaaatagaaacgatggattagttaaattgtgaacatgattggattagaggaaaaggagattataacattaaatgtgctttttgcatctattacccaagccaagataatagagtaacctgtagtatatgcttaaaacaagcttgtgttgaatgtataaaagcaaataaacaaaaatggagaaaagagatagaattagaatcagatgaaaggatattatctagtagagtacgagtttttagaaaacagaataaataaactagaagtagaactagagaacctaaaaattaactatgatattaaggcattaccagaaaataaggatatacaaaataccgaatttaaagagcaagtgataacattaaaagacagtaatactgctaaaataattcaactaaaagatgccataactaattttggaaataaatatatagtaaaattgcctttcaaagaaattttgggaataagaataccggtaaaagtaaaactatcaccgaaggtattatataaaattctagcactagtagacactgggtgtataaaaaatattattcatgataagtacttcataaaatgttcagagatagttcatacaattgatgataataaggcagaagtctctacagacatgtccggaataaagaaaattcataatcagttagctcgtaatattgaagtatacattaatggaactaaatatataatagatgagattacaataagaaacttatccatgataagtgatgacatgataattggcctaaggtttttacaataatcagtacaaaccacagtaatacatgagcagggaattacttttatcccatatcaaaacaatgtgccatatatctcagaggtacgaaagcgtggtggagccagaatcaaacctgacaaccttgaagcactcaaccttgagtctgaagaaagaattaatgaatatgaacttaactataaccagcttaatagcaagaaaagctcaactagaa

SEQ ID NO: 14520 - DNA, 1647 bp, Oryza sativa
  Clone ID: TFbOSC413662j.C1.o1.np
ttcccacgcccaaagaatggatatttattatcaattgaaaaattaacgttaacaagttggaaaggcataaaagaattctcccaacattatttatataatgctacaactgctaaacaaggatataacaggggtatagttgaacgttatttcaataaattacctgacccactaggaagtatgatatttgaagaatataaaaaggaaactgaaggagctgaaatcaacatctctcaagccataacttttgtgtttaagcaactaagaaaaatatgcacgggtatccaagcccaaagatctatgaaacactcggattacaatttctgcaataaaatagttcaaatacccttgtcatatggagaagacaagcctagaagtaaaaggatttataaacatcaaaatagaaacaacaataatattagaacaaagaaaaggtatttcttaagaagatcagataatagagcacccttcttacataaaagaaatgtaagaagatataatccaaagaaaacctatgacaaaatatgcagatgttttatatgcaactcgccagatcatttaagtagaacatgcccaaataaagatcaaaagagatattctagtaaatatgaagaacaagagagggttctaattatagatagcgtaaacgaaaacatattagtatgtgatgatgaaataaaagatgacgaatcaatatattctatcatagaaacagacgaagttgaaactatcaacgaagaatatgaatcatccgatgaagagttagatttaattgacgaattagcaggtctaaaggttgaaatgatggatcaattaaattgtgaacatgattggattagaggaaagggtgactataatatcaaatgtgctttttgcatatattacccaagtcaagaaaatagagtgacttgtagtatatgtctaaaacaagcttgtgctgaatgtataaaagcaaataaacaaaaatggagaaaagaaatagaattagaatcagatgaaaagactatctagtagagtacgagtgttagaaaatagactaaataaactagaagtagaattagagaacctaaaaaataattgcgatattaaggcactaccagagaataaggacatacaaaacaccgaatttaaagagcaattgataacattaaaagacagtaatactgctaaaataattcaactaagagaggccataactaattttggaaataaatatatagtaagattgcctttcaaagaaatattaggtataagaatccctgttaaaataaaattgacaccaaaagtatcttataaaatattagcactagtagacaccgggtgtacaaagaatattattcatgacaaatatttcataagatgtcctgaaatagttcacacaattgacgacaataaggcagaagtttccacagacatgtccggaataaagaaaattcataatcagttagcttataatatggaggtttacattaatgcaactaaatatataatagatgagattacaataagagatttgtcaatgattaatgatgacatgataattggcctaaggttccttcaacaatcagtacaaaccacagtaatacatgagcaaggaattacttttatcccatatcaaaataatgttccatatatctcagaggtacgaaa

SEQ ID NO: 14521 - DNA, 2185 bp, Oryza sativa
  Clone ID: TFbOSC900074j.C1.o1.np
gagaggaggcgagagagagaggggagaagataaggttggccggcggagagagagaagagagttgaaaatttttgaactattgaaagggaaataggaggcaagtaagacttgtagacgactctttaagaggcacgtatatattcaaaatcaaaaaagtgatggggctatactaaatctagcagcacatgatcccatagactggccaaatatcattagtatttggaaggggttaatagttcaaaaatacatacaaaatcagcataatatagggaataaggtggaggatatgataacttatttagaaacatttttgggtgaatctgctaaagtcctatgggaacaatgggttgaaaagaatcctaataactacgaagagctaaaaagagcaggaagtaatcctcacaactttgcaaatatagtatctaatattatcatagctgaagacccagaattaggatatacaaccctgcaaaatgaaagattaaaagaaatagaaaaattaactttaacaagctggaaaggtataaaggaattttctcaacattatctatataatgcaacaactgctaagcaaggatacaataagggaatagttgagcgatattttaataaactacctgacccattaggtagtatgatttttgaggaatataaaaaggaaactgaaggagctgaaattaatatttcccaagccataaccttcgtgttcaaacaattaagaaaaatatgcacaggaatacaagcccaaaggtcaatgaaacattctgattataatttttgcaataaaataatacaaatacctttatcatatggagaagataggcctagaaataaaagaaaccatagatatcaaagtagaaatagcaataatataaagacaaagaaaaggtacttcttaagaagatcagataatagagcaccattcttacataaacgaaatgtaagaagatataacccaaagaaaacttatgataagacatgcagatgtttcatatgtaattcaccagatcatttaagtagaacttgcccaaataaagatcaaaaaagatattctagtaaatatgaagaacaagagagagttttaattatagatagcgtaaatgaaaatatattagtatgtgatgatgaaataaaagatgacgaatcaatatattctatcatagaaacagatgaaattgaaaacaccaatgaagagtatgaatcaaccgatgaagagttagatttaattgacgaactagccggtttaaaaatagaaatgatggatcagttaaattgtgaacatgattggattagaggaaaaggagattataacattaaatgtgctttttgcatctattacccaagccaagataatagagtaacctgtagtatatgcttaaaacaagcttgtgctgaatgtataaaagcaaataaacaaaaatggagaaaagagatagaattagaatcagatgaaaggatattatccagtagagtacgagttttagaaaacagaataaataaactagaagtagaaagaacctaaaaattaactatgatattaaggcattaccagaaaataaagatatacaaaataccgaatttaaagaacaagtgataacattaaaagacagtaatactgctaaaataattcaactaaaagatgccataactaattttggaaataaatatatagtaaaattgcctttcaaagaaattttgggaataagaataccggtaaaagtaaaactatcacccaaggtatcatataaaattctagcactagtagacactgggtgtacaaaaaatattattcatgataagtactttataaaatgtccagagatagttcatacaattgatgataataaggcagaagtctctacagacatgtccggaataaagaaaattcataatcagttagctcataatgttgaagtatacattaatggaactaaatatataatagatgagattacaataagaaacttatccatgataagtgatgacatgataattggcctaaggtttttacaacaatcggtacaaaccacagtaatacatgagcagggaattacttttattccatatcaaaacaatgtgccatatatctcagaggtacgaaagcgtggtggagccagaatcaaacccgacaaccttgaagcacttaaccttgagtctgaagaaagaattaatgaatatgaactta

SEQ ID NO: 14522 - DNA, 4128 bp, Oryza sativa
  Clone ID: TFbOSC900151j.C1.o8.fg
atggacctatctaggagtttgtttagaagaatagcaagcagagacgataaatctttaagttgtattgataaacaaaaaggtaaaaatgaagacatagatgagcttgaagatattgcagaagtagacaaacagctcgaaagatatcaacgagatactttaagggcaataagacctcaacaaatatattgcatgggattttttgagaataaaaatgggttatacagaatatctagagaagtagagttaagcgttttaacaaagccagttgagttaaaaattgtagccaaggaatttgaaaatggattaaagtattcagggtataaatatattcaccaaggtatgtatataataggaatcaaaggtatgacaagaaagaaattaggagctaaagttctaataactctgttagataaaaggtgggacacaatagataaagcagcattaggatttttagaaggtgacatgaatgagaatatgttgataacatatatagccccagatctaatgatgcctgtaaaagaatttatagataaaatgagttttggttttcaaacaaagggatacgaggaatttaaaggaacaaatttgctagtaagcatagaatttataggaagattaactaatagaagtgcctccaaatacaaaataaatgtaaatgacgtgattgaaaatatgcactctaagggaataactttcatgagccctttaaaaataagttctgaagaaagggcaggagaagaatggaaaattagtgatttaattgaaagcaaaactttgagtcagcctgaaaattttataagttatcaaaatagtaaaggaaataccagcattagatttataaattacaaacccagaaccacagatgacttagaaacagaagcatctgatagaaatataatagataatagaagacatagtgtttcagagtttatggaaaaattagatcaagaaagtgagataaaatattacgaaaataaattaaaggaaataaatgaagaatataataactctatgaagtgtgagtggcctaaaataagagataaagaactttatttctatagagaattagctagagtaaagaaagtaaagaagaacgaagatatggcagtagaaatttttaaaacccaagaaaccaagatagaacagataaagaggaaagagcaagataagtatgacaaagaagagcaaaatcttggtaaaattttaagtgaagaagagcagtgggcagagaatgaaagattatttcttgaaagttatgaagaagaaattaatctaataaatgagatggagaatatagaaaatgaaatagacaatacagaacaatataatgattttataaacacattagatgaagtagggttacataatcttgataatgcaatggaagctatggaagtggacttaggaacaggaaagagaaaaagatatggagaaggtactgtgaaaaacgaaggagaaagagaaagaccagctagggcagcaggaaaatggccccctgatagagaagaattttcatataactatataccaggtcaatataggcatatgggtacaaagagaagagactttgagaagcctgttaaatttcaaaaccagaggagtgatggtgctatattaaatttagccgcacatgaccctattgattggcctaatattattagtatttggaaaggtttaatagttcaaaaatatatacaaaaccagcacaatataggaagtaaagttgaagatatgataacctacttagaaacattcttaggtgaatctgctaagattctatgggaacaatgggttgaaaagaatcctaataattatgaagaattgaaaagagctggtagcaatccgcataattttgcaaatgttatatctaacattattatagctgaagatccggaattaggttatacaactttgcaaaatgaaaggttaaaagaaatagaaaaattaacgttaacaagttggaaaggcataaaagaattctcccaacattatttatataatgctacaactgctaaacaaggatataacaggggaatagttgaacgttactttaataaattacctgacccactaggaagtatgatatttgaagaatataaaaaggaaactgaaggagctgaaatcaatatctctcaagctataacttttgtgtttaagcaactaagaaaaatatgcacgggtatccaagcccaaagatctatgaaacactcggattacaatttctgcaataaaatagttcaaatacccttgtcatatggagaagacaagcctagaagtaaaaggatttataaacatcaaaatagaaaccataataatattagaacaaagaaaagatatttcttaagaagatcagataatagagcacccttcttacataaaagaaatgtaagaagatataatccaaagaaaacctatgacaaaacatgcagatgttttatatgcaactcgccagatcatttaagtagaacatgcccaaataaagatcaaaagagatattctagtaaatatgaagaacaagagagggttctaattatagatagcgtaaacgaaaacatattagtatgcgatgatgaaataaaagatgacgaatcaatatattctatcatagaaacagacgaagttgaaactatcaacgaagaatatgaatcatccgatgaagagttagatttaattgacgaattagcaggtctaaaggttgaaatgatggatcaattaaattgtgaacatgattggattagaggaaagggtgactataatatcaaatgtgctttttgcatatattaccctagtcaagaaaatagagtgacttgtagtatatgtctaaaacaagcttgtgctgaatgtataaaagcaaataaacaaaaatggagaaaagaaatagaattagaatcggatgaaaagactttatctagtagagtacgagtgttagaaaatagactaaataaactagaagtagaattagagaacctaaaaaataattgcgatattaaggcattaccagagaataaggacatacaaaacaccgaatttaaagagcaattgataacattaaaagacagtaatactgctaaaataattcaactaagagaggccataaccaattttggaaataaatatatagtaagattgcctttcaaagaaatattaggtataagaatccctgttaaagtaaaattgacacccaaagtatcttataaaatattagcactagtagacactgggtgtacaaagaatattattcatgacaaatatttcacaagatgtcctgaaatagttcacacaattgatgacaataaggcagaagtttccacagacatgtccggaataaagaaaattcataatcagttagcttataatatggaggtttacattaatgcaactaaatatataatagatgagattacaataagagatttgtcaatgattaatgatgacatgataattggcctaaggttccttcaacaatcagtacaaaccacagtaatacatgagcaaggaattacttttatcccatatcaaaataatgttccatatatctcagaggtttacattaatgcaactaaatatataatagatgagattacaataagagatttgtcaatgattaatgatgacatgataattggcttaaggttccttcaagaatcagtacaaaccacagtaatacatgagcaaggaattacttttatcccatatcaaaataatgttccatatatctcagaggtacgaaagcgtggtggagtctcccccaaactcgacaacttagaagtacctaatcttgagtctgaagaaagaattaatgaatatgagcttagtgagaatatagacaactattatatatcaaattccaatatagagtgcataggactacaagcatttgcaccaaattggtatagagatattaagtctaaaagggatatagaaaaaattattcaaagattagaagatatccaaattataggagaaattcctatgaaatattgggagaaaaatgctattgagtgtaaaattaatataatcaacccagaatatatcattaagactagcccaatagaagcaactccgaaagacatagaagaatttaagatgcataaagaagaacgaagatatggcagtagaaatttttaa

SEQ ID NO: 14523 - DNA, 3592 bp, Oryza sativa
  Clone ID: TFbOSC900372j.C1.o14.np
atggacctatctaggagtttgtttagaagaatagcaagcagagacgataaatctttaagtggtattgttaaacaaaaaggtaaaaatgaagacatagatgagcttgaagatattgcagaagtagacaaacagctcgaaagatatcaaagagatactttgagggcaataagacctcaacaaatatattgcatgggattttttgagaataaaaatgggttatacagaatatctagagaagtagagttaagcgttttaacaaagccagttgagttaaaaattgtagccaaggaatttgaaaatggattaaagtattcagggtataaatatattcaccaaggtatgtatataataggaatcaaaggtatgacaagaaagaaattaggagctaaagttctaataactctgttagataaaaggtgggacacaatagataaagcagcattaggatttttagaaggagacatgaatgagaatatgttgataacatatatagccccagatctaatgatgcctataaaagaatttatagataaaatgagttttggttttcaaacaaagggatacgaagaatttaaaggaacaaatttgctagtaagcatagaatttataggaagattaactaatagaagtgcctccaaatacaaaataaatgtaaatgacgtgattgaaaatatgcactctaagggaataactttcatgagccctctaaaaataagttctgaagaaagggcaggagaagaatggaaaattagtgatttaattgaaagcaaaactttgagtcagcctgaaaattttataagttatcaaaacagtaaaggaaatacaagcattagatttataaattacaaacccagaaccacagatgacttagaaacagaagcatctgatagaaatataatagataatagaagacatagtgtttcagagtttatggaaaaattagatcaagaaagtgagataaaatattacgaaaataaattaaaggaaataaatgaagaatataataactctatgaagtgtgagtggcctaaaataagagataaagaactttatttctatagagaattagctagagtaaagaaagtaaagaagaacgaagatatggcagtagaaatttttaaaaaccaagagcaagataagcatgacaaagaagagcaaaatcttggtaaaattttaagtgaagaagagcaatgggcagagaatgaaagattatttcttgaaagttatgaagaagaaattaatctaataaatgagatggagaatatagaaaatgaaatagacaatacagaacaatataatgatttataaacacattagatgaagtagggttacataatcttgataatgcaatggaagctatggaagtggacttaggaacaggaaagagaaaaagatatggagaaggtactgtgaaaaacgaaggagaaagagaaagaccagctagggcagcaggaaaatggccccctgatagagaagaattttcatataactatataccaggtcaatataggcatatgggtacaaagagaagagactttgagaagcctgttaaatttcaaaaccagaggagtgatggtgctatattaaatttagccgcacatgaccctattgattggcctaatattattagtatttggaaaggtttaatagttcaaaaatatattcaaaaccagcacaatataggaagtaaagttgaagatatgataacctacttagaaacattcttaggtgaatctgctaagattctatgggaacaatgggttgaaaagaatcctaataattatgaagaattgaaaagagctggtagcaatccgcataattttgcaaatgttatatctaacattattatagctgaagatccggaattaggttatacaactttgcaaaatgaaaggttaaaagaaatagaaaaattaacgttaacaagttggaaaggcataaaagaattctcccaacattatttatataatgctacaactgctaagcaaggatacaataagggaatagttgagcgatattttaataaactacctgacccattaggtagtatgatttttgaggaatataaaaaggaaactgaaggagctgaaattaatatttcccaagccataaccttcgtgttcaaacaattaagaaaaatatgcacaggaatacaagcccaaaggtctatgaaacactcggattacaatttctgcaataaaatagttcaaatacccttgtcatatggagaagacaagcctagaagtaaaaggatttataaacatcaaaatagaaaccataataatattagaacaaagaaaaggtatttcttaagaagatcagataatagagcacccttcttacataaaagaaatgtaagaagatataatccaaagaaaacctatgacaaaacatgcagatgttttatatgcaactcgccagatcatttaagtagaacatgcccaaataaagatcaaaagagatattctagtaaatatgaagaacaagagagggttctaattatagatagcgtaaatgaaaatatattagtatgtgatgatgaaataaaagatgacgagtcaatatattctatcatagaaacagacgaagttgaaaccatcaacgaagaatatgaatcatccgatgaagagttagatttaattgacgaattagcaggtttaaaggttgaaatgatggatcaattaaattgtgaacatgattggattagaggaaagggtgactataatatcaaatgtgctttttgcatatattatccaagtcaagaaaatagagtgacttgtagtatatgtctaaaacaagcttgtgctgaatgtataaaagcaaataaacaaaaatggagaaaagaaatagaattagaatcagatgaaaagactttatctagtagagtacgagtgttagaaaatagactaaataaactagaagtagaattagagaacctaaaaaataattgcgatattaaggcactaccagagaataaggacatacaaaacaccgaatttaaagagcaattgataatattaaaagacagtaatactgctaaaataattcaactaagagatgccataactaattttggaaataaatatatagtaagattgcctttcaaagaaatattaggtataagaattcctgttaaaataaaattgacacccaaagtatcttataaaatattagcactagtagacactgggtgtacaaagaatattattcatgacaaatatttcacaagatgtcctgaaatagttcacacaattgacgacaataaggcagaagtttccacagacatgtccggaataaagaaaattcataatcagttagcttataatatggaggtttacattaatgcaactaaatatataatagatgagattacaataagagatttgtcaatgattaatgatgacatgataattggcctaaggttccttcaacaatcagtacaaaccacagtaatacatgagcaaggaattacttttatcccatatcaaaatactgttccatatatctcagaggtacgaaagcgtggtggaacctccccctccccaaaacccgacaaactcgacaacttagaagtacccaatcttgaatatat

SEQ ID NO: 14524 - DNA, 5832 bp, Oryza sativa
  Clone ID: TFbOSC100320j.C1.o1.fg
atggggcgtgaggctctcacctaccacccggcggaccaccattccggtgcccgccggccaccatccaagccgcagttcggctcgtggcgcgacgtcgtgaagaaaggtaggggccctgccgccgctgaggaggcagcttggacggaggtccggcggaaggggagcacggagcattcactgcgggcaggtgacccaacctccaacaaacatgacagagcattcaagccgaggaaggagttcagcaaccatgacagggcattcaattcggagaaggagatccctcgctggcttctggggcgctgcttcaagtgcctaggattgggtcatcgcaagcttgactgcaagggagagacaaggtgtttccattgctggtacccgggtcacctagcgtgggcgtgtccggagaggaaggaggtctctgggggcaatccggggcggcagagccaggggagagcagcgacagaaaagggcgcggtgatagccatggcgggtgctaacctgggcggctaccagatctgtgcggccacgccgccgcagttcgtggaaaagtaccgcatcggcgagcccgactcgcggccagaaagggggcgggtggtgctgtcctggacctccgggatggagcgccatgagaggtacctccaggaactctccctgatggcgtcggtgctcaagggacggccgcccgtctcgccggcagagcttgcggaggcaatcgagctgcacacaggcgtgcagcagcgttacttcagggtggaggtcacgcgcccggaggatttcctgatctcgtttcggaaccagagggagaaggaggcggtcctgcggtgttcaaaggcgctgttctgtaatgaggtgcctgtttcgttcaagccgtggaacatatgctgctgggcggaggcctcggctttccagttcttcaccaagatctccctcgacggccttcccccgcacgcctgggaggaggaagccatgcacaagctggtcaacagcttggacggtcagcttgccgagctgatcccggcggcggacgcgcgctgcctcggtctcttcgcttggttcaagaatccgtccgacctttcccaccatctggacgtggaaatcccggaacgcccggccgcagggcgatggcgggaggggacgagcgcgacaccaccttccccgccgcgggagaagccggccctcacctatccggtcatcatccacgtagaagaagtcattgaccctacgccgttgcatactccgccgacctccttcgacgacaactccgatgatgaagacgtcacccggcggaacactttctcctgctgggcaggtcgctacgatggcgctggtccctggccgacggaggtgggaggcggtcatgtctacgccgctgcggtggtgggggtcgttgacatggcagcggcggaccgggttctagaccgggctgacattgttgttcaagacatggaggcgggggaggtgttggcgtcacagccgcattcgccgacgttggttttgcaagcgccgggtgtgtggttctctccgcaagcggtgcaagcagtggagcaaccaggggccgacgtgggaatcgctaccccgctggcggcgcctgtggttgcaacggcaaaggcgcttatcgttctggacgacgactgcagctgggcgctcgtggccggtggtgtgtcgcctctttcaccgccgctccaactctccctggacgagttaaccggcggtgaactgtcggcgctcggcacggagaaggatggcgaccgtgctgagctcagtgatgaggatacgatggctgaggtgtcgctcgtggagcatgggtgcgagcggccagcattgaaggcgactggcgacgcgctgagctcagcgcaggagagcaggagtgatcgtgggtttgaatcggcggcaaaggcgggagagttccgtgtctatgtgcggaagcaggcccagaagaaaccgagccatgagcaacctgggacggaggggatcggcctcatgggcttggcaggccaggatctggggcaggctgacctgagacgggctgtggctggcctgggacaggaaatgtcggtgggccaagttgtatgtggcgaggacgagccacctcaggcccaccaagaagaagtggcccacagcgatgacgagcggccggtccaggaaactgagatcgagagcagcagggaggcgctcagcggagagatgatgctcccacctcccgcctcgccgtcgacggcactcgcccgcgcgcggccaacctcggaggggtcgccggcgaacacgccgctaccccccgaggcggaccagattcttcagggattcctcgcgtcggtcgctactgagcctcccccctccctgctcgggaggaggccgccggagtcagtccccaaatccaagccttgttggcgcaatgtgatccctgagtggttcacgccgtggcgcagcccacgtctgcaacaacaagggaacggagctcgtcgccattcaacttcaaaagcgcagaaggtaacgatgaagaagatgggcatcattgaagaggaagaagaagcggatcaagacaccttccagcagaacactaccgtgattgatcagccgttatcgacccagcacatgaaggtgctagcggagctgctggatgtggatgttgcgctggaggaagcagatgttccaccgccggacctggcttcgctggtggcggcggggtctaaattagaggtagttgatttgcttgtaatccatgaactgtgtgggccggatttcgatgatttcgttgcccttcccgcgtcacataccaggggcggggttattgtggcctggaaggggtccgtattccgtggatcacaagtgcatttgggacaatggtcggtgacggcgaagttggagtggattgcaggcaaccattcatgtttcctcacttcggtctacgggccacaagatgataacgagaagattctgttcttggaggaactcgccgaaatcagaggaatctgtggggaggtttggcttgtggcaggtgatttcaacttaatagcggcagcggcggacaagaacaactcgcgggtgaacaggcggctcatgaatgctttccgcaacaagattaatgaacttgagctcaaagaactgtatctgttcgggaggaggtatacctggagtagcgagcaacaaattcccaccctggtcaaattggacagggtgcttgtctcaacggaatgggaggatgcgtttccggacgcgcacttgcaagcgctgagttcgtccagttcagatcattgtgcgctattgctttcttgcggggaaaccccgcagggtagaagaaggtttcgttttgaaactttttggacgaagcttgaggacttcgatcaggtggtggcggattcctggcagcaggcggttgagagcacagatccctacgtcatcctgtacgtcaagatggcgcgtcttgctatgtctctctgttcctggggacaaaagaggatcagtcgctttcgcctccagctccagattgcgaatgaattgatcttccgttttgatgttgcgcaagagaacagactcctttcccctcttgaacgccgtttcagggcaatcctgaagggccgctgcctggcattggcgtcgctcgaacgaatcagagtgcgccagcgggctcggatctcccagctccgggagggagacgccaactccaaatacttccatatgaaagtgaatgcgaggcgccgtaagctattcatcccagtccttgagtatgaagggcagacaacaacctcgcaggaagataaaattgctctggccaaggactattttcagggaattttgggtgtgtcggagcccaactcggctgagctccaattcaatcaaatcttccctctggcgccgaacctacaagagctggaagtgcctttctctgaagaggaagtttggaaggtgataaaagagatgccaaacgagaaggcgccgggaccggatggattcaccgggcttttctaccaacggtgttggcaagtcatcaaaggggaagtgctggcggcactgacgaaatttcactctgggaatcatcagaatctcgacaatctcaacacagcggtgattactctgctcccaaagaaggatgcgcccacgttgatcaaggattacaggcccataagcctgatacacagcttttccaagcttgcaacgaagattttggcgtcccggttggcgccgagaatgggcgatctagttgctgaaaaccagactgccttcatccgtggccgatcgatacacgaaaacttcatttttgtcagaggtttagcgctgcaattccaccgaagaaagaagcctatgatcctcctgaaacttgacatcactaaagcgttcgacacaatctcttggtgtttcttgctgaacttgctccgaaacagaggctttgggtccaggtggcgatcgtggatagctgccctgctcctaacttctgaaaccagaatcttgctcaatggccatgaaagtgacagcttcaagccggcacgaggactgcggcagggtgacccgttgtcgccgctactctttgtccttgtcatggatgctctgcaaggcttgctcgccaaagctacttcctgggggcttcttgccaagctggacactcgacgttccatcccaaacacatccatttatgccgatgacaccattgtgttcctgcaaccaatcgagagggaggcaacagtggtaaacgccattcttcagcttttcggaaaagctacagggctcaagaccaacctcagcaagagtgctttgacgccgattaggtgcgatgatgatgtgttggtcggagttcaacagctgcttgggtgtagggttgagaatttcccgatcacttacctcggtcttccactctccctgagaagaccgacgaaggcggaagtgcaaccgattttggatcggctgtccaaaaaagtggccggctggaagcccaaactgctctctcccgacggccgactgcgcctgatcaaatcggtgctgaccgcgctgccagttcatttcatgtctgtgcttgtgctgccaaaatgggcaatcaaagagtttaacaagaaatgccgagcgttcctgtggaaagggcaagaggaggttaatggcggccactgcctagtggcttgggatatcgtctgcagcccgaaggagtgcgggggattgggagttaaaaatctggaattatttggccaagcgatgcgaatgaaatggctcgctagacgattggagcaaagaggaaggccgtggactctgataaactcagtaccgacaaacgacatcaccggtctgttccaatcagtggcgtcgtttcaggtaggggacggtaaagatacggacttttggagggcgaactggttgccgaggggctgcatctctgtctcctcacctttgctcttcacacacctgggcagaacgaagctgactgtggcggaggcgctctcgcagaatcgctgggtgcgcgacattcgagggagtttctctgcgctggccttatcggaatattttcgtttgtgggatgagattcaggaggtacagctgcaagaggatgcccaagactctaccagttggaagctcactcctaacagagttttctgcacagcctctgtgtatgagatgttcttcgcggcacgggagttcgcggactggtggattaaagtcagactctgttttcagacgggctacaggggcgcttttgactccctttgtatcctcatctgctggttcgtgtggcgagaacgaaacctcaggatctttgaacaaaaggcgagaacggcagcggagctcttcagtgatattaaggatgaagttgcagtgtggagggagaccaacattttgagagaagtcggctaa

SEQ ID NO: 14525 - DNA, 969 bp, Oryza sativa
  Clone ID: TFbOSC103j.C1.o1.fg
atgaaggacaccgagtcaatcgacgagtttgccggcaaaatcagtggcctggcaaacaagttgagcgatcttggtgtaaccatggacgatgatgagcaagtcaagaaactactcgattctgtgccagataagtttctgcatgtcatcgctgcaattgagcagttctctgacttggacagcatgccatttgatgaggcaattggtcgcctcaaggcatacgaggaaaggatacgcaagcgtgatgacaagaatggcgagcatctacttttcacgtccggcgacacaagcggtggccgcagccgcgtcaagaagccggacaggtccaagacaatgtgctactactgtcaagaacttggacactttgcgtatgagtgccctgagaaaaagaagaagaaggagatagcgctccttgccgcagcgtcaagttttgcacaaggtagtagtgtgtggcagcaaaggatccgagccaagaggagagattctaacaattggtatcagagccaatttatgcccaagatcctgcgcttcaacaagatggccatcgtcgagcactccgcatcgcgatcgatgagggagggcatcgtgtcgctcccatatccagtgctcacctccaccaactactccacctgggcgatcaagatggaggctaacatggaggcgcaaggcatctgggatgccatcgagcccgcggccgatgaggccgtggacattaagaaggacaagcaggcacgtgcgtgtctcttcggggccgtccccgaagacgtgttgcagcagatcgcgaagaagaagactgccaaggaggtctgggaaagcctcaagacgaggttccttggcgttgagcgtgtgaaaaaggcgcgagtgcaaaccttgaagagcgatttcaaggcattgcacatgaaggacaccgagtcaatcgacgagtttgccggcaaaatcagtggcctggcaaacaagttgagcgatcttggt

SEQ ID NO: 14526 - DNA, 2844 bp, Oryza sativa
  Clone ID: TFbOSC29911j.C1.o3.fg
atggtgggaccacttccagctacgcagccagagggacagcctatcacctgggcccatttcaccgccgccttccggaggacccatgtgcccgccggagtcatggcccttaagaagagggaatttcgggagttgaaacaaggcaaccgctccgtgatggagtatttgcacgagttcaataatttggcccggtacgccccagaggatgttcgtgaagatgaggagaagcaggagaaattcctggcagggatggaccctgagctatctgttcccctggtggacaagagcatccgcctggaagccaagcacaaggaattggagtcgcacaagcgtcgcttggcgaatttccgcaaccaacagggggctaaccaaaggatccgctacaccaatccctatccagggggatcctcctcgcagccgcagcagcaaccccgctccgcgctccgacctcaattcgtggtgcgcgtcccacagccgcagcagcagcagaatcagcaaggggcccatgcaccccgccctcctgcaccagccgtgcagcctggacaaggccgcagggatgctcaaggtcaacagtgtctgtgcttcaactgcttcaagcccgggcactttgcggataaatgcccaaagccgaggcgacagcaaggccaagcgcctccccgccccaacaacggtggtaaggatgtcactcggggccgtgtgaaccacgtgactgccgaggatgtgctgagaactccagacatcatcgttggtacgttcctcattcattccatccctgctaccattttgttcgactctggagcttcccactcgtttatatctgtgccattcatggggagaaatcagctgggggtagaaaggcttaggaaccctctgctcatcaccacccctggaggggttatgacagcaaagtattatagccctgccgttcctatagaaatccagggaattgctttcccctcggatttgattcttctagacaccaagaacttggatgtgatcctcgggatgaattggttggctcaattccaaggagtagtggattgcgcaaggcgcactgtcactgtgtatcggggccctgatcaaccggttgttttctttgcacccccaacttccgccggcagttcagtacttcatcagctaggattgccagaaatacccatcgtcagtgagttcggagatgtgtttccggaagaactacccggtatgccgcccaagcgagagattgagttccagatagatcttgctccaggaaccgctcctctgtacaagcgaccctaccgtatggcggcaaatgaactggccgaaccgagcacttccccctggggtgctcccgtgatttttgtggagaagaaagagaagacaaagaggatgtgtgtcgactacagagctctcaatgaagttactatcaaaaagaagtaccctcttccccggatcgatgatctgttcgatcagcttaaaggtgccactgtattctccaagattgatcttcgttccggatatcaccagttgcgcatccgtgaagaggatatcccgaagaccgcattcaccacgcaatacggactgtatgaattcacggtaatgttgttcggtctaaccaatgctcctgccttcttcatgaacttaatgaacaaagtgttcatggaatacctggataagtttgttgtggtctttattgacgacatactggtgtactcacaatcagaggaagaccatcagcagcatctccgtttagtgttgggaaagctccgggaacaccaattgtatgccaagctcagcaagtgtgagttctggttgcccgaagtcaagttcttagggcacgtgatatctgctaaaggagttgttgtggatcccgaaacgttgctgaagaaggaagaaaaatttgtgtggagccctcaatgcgagaaagcattccaaactctcaaagaaaagctggtttccttgctagtgttaatcttaccggatactcgcaaggacttcctggtgtactgtgacgcttcgcgccaaggattggggtgcgtattaatgcagaaaggtcatgtggtagcctatgcctcacgccagctacggccctatgaaggcaactatcctacccatgatttggagttagccgctgtggttcatgctctaaaaatccggcggcagtatctcattggaaatcgctgcgaaatatataccgatcataagagtttgaaatacatcttcactcagtcggatctgaatcttcggcaaagaaggtggttagagctcatcaaggattatgatgtgggaatccactatcatcctggtaaggccaacgtggtcgccgacactctaagtcgaaaaagccattgcaacactcttggcatccgtggcattccaccggaacttaatcaacagatggaagccctgaacctaagcatagttggtcgtggattcttggctacgctggaagccaagcctaccttgctcgatcgaatccgcgaggctcagaagaatgatccagatatacatgggatcctcaagaatatgaaacagcgtaaagctgctggtttcacagaagatgaacacggaaccctatggaacggaaatcgtgtatgcgtaccggacgacaaggaacttaaacggttgatacttcaggaagctcacgaaagtccttattccatccaccctggcagcacgaagatgtacttagacttgaaagagaaatactggtgggttagtatgaagcgcgtgtcaaagcagagcaccaacgaccggccggacttctccaacctctccaagtaccagaatggaaatgggatgaaattgggatggatttcatcaccggacttccaaaaacccaaggcggatatgattctatatgggtag

SEQ ID NO: 14527 - DNA, 1104 bp, Oryza sativa
  Clone ID: TFbOSC403247j.C1.o39.fg
atggccttgttcgtctctgcaggtgaggatgttgccagcgtgcatgtcggcgttggccagcctgatgtccagcacgcaggtcccatctcgccgagcgctggcctcactatcgtcgactcctccactccggggactgccgccaccgccggaggaggggtggcgaccacctcttcatcacgccgaggttttgcacaaggtagtagtgtgtggcagcaaaggatccgagccaagaggagagattctaacaattggtatcagagccaatttatgcccaagatcctgcgcttcaacaagatggccatcgtcgagcactccgcatcgcgatcgatgagggagggcatcgtgtcgctcccatatccagtgctcacctccaccaactactccacctgggcgatcaagatggaggctaacatggaggcgcaaggcatctgggatgccatcgagcccgcggccgatgaggccgtggacattaagaaggacaagcaggcacgtgcgtgtctcttcggggccgtccccgaagacgtgttgcagcagatcgcgaagaagaagactgccaaggaggtctgggaaagcctcaagacgaggttccttggcgttgagcgtgtgaagaaggcgcgagtgcaaaccttgaagagcgatttcaaggcattgcacatgaaggacaccgagtcaatcgacgagtttgccggcaaaatcagtggcctggcaaacaagttgagcgatcttggtgtaaccatggacgatgatgagcaagtcaagaaactactcgattctgtgccagataagtttctgcatgtcatcgctgcaattgagcagttctctgacttggacagcatgccatttgatgaggcaattggtcgcctcaaggcatacgaggaaaggatacgcaagcgtgatgacaagaatggcgagcatctacttttcacgtccggcgacacaagcggtggccgcagccgcgtcaagaagccggacaggtccaagacaatgtgctactactgtcaagaacttggacactttgcgtatgagtgccctgagaaaaagaagaagaaggagatagcgctccttgccgcagcgtcaagtgatgaggagccaactcttctctga

SEQ ID NO: 14528 - DNA, 1212 bp, Oryza sativa
  Clone ID: TFbOSC23015j.C1.o1.fg
atgtttaacagagaaaaaggaaagaatgtcagcgggtatgcctccagtaactcaagttttcaattcaatccaccactggcctcaagagagttaaccagggcacacccttggtccattccaagcatgctgcttagttcacagctaccattagttggaagtcaagaccaaaatcagtatgtgtttgatcgagcgtttgccacccaggtcaatgagcttccaatgccagaagaggatgtccccttttgtcacgattgtagagagcaaggacactatgccctgaattgtccatgggtatatgtcaaagaagccccttcctttggtttagcagggcagacatcgctaaaccagcctcctcgcaccaagtcaagtttgcagcctagtgtgcaaagtgaagagcccaatggagacaatccattgaatcctagaaaatgctttcctcctagcctttcgcaccacgtggggtcacgtactaagcaagccaaaggcaagaagagtaagaatcagaagagaaaagcaccgatgcgaactgaagaagaagtacgtaagatgactattaccagcaccgaatggcctccagcagggataactattcctagacgtcaaagaggaaataccttccgaggtgcacgacagttgacccagcacctcctaagccatggtggcagagtatctgatagtgaagggtcagatcaagtctcctcggattatgaagatgagtccccccgacatctcggcgaggaagagatggaatcaaaagcatgcccccgttgtggagaaattggacacgttgctagcatgtgtttcacactttgccctcattgtgaggaagaccatccaccaggtgaatgtcccacccgcaaggtacatgttttctctgcgcaggcaaggagtgaaatcttcaactcggtatcagatgctacacggagtgaaaagtgcaagcaccggttaccagttgataacttgtccgaggttgactccgaagatatgaatcatgagaagttctggaacggaagcatcactgcactaccgcaacctagtctgagtcagccaaaaggtgcaccctggtccaagtcaggtgaagggaagattccatccgcaacaggaggtcaagccaagcagttccgagtggtgaagttttgctggaagtttgtcaagacgcgacggaagaagtcagacaagaagagaagaccgcccaacctatcttcttgctag

SEQ ID NO: 14529 - DNA, 697 bp, Oryza sativa
  Clone ID: TFbOSC25610j.C1.o1.np
gcacaaggccttggggtcgcccaagccccgcttggcgaatttccacattcaccgggaggctaaccaaaggatccgctacccgaatccctttccagaaggatcgtcctcgcagcagcaacagcagcagcaacctcgctccgcgccccgacttcatttcgtggtgcgcgtcccgcagccgcagcacaagcagagccagcaagggacccgtgcgccccgtcctcttacgccagccgcgcagtctggtcaaggccgcagggacgttcaaggtccgcagcgtttgtgcttcacctgcttcgagcctgggcactttgcggataaatgcccaaagcagaggcgccagcaaggccaagcgcctccccgctccaacaatggtggtaaggatgtcattcggggtcgtgtgaaccacgtgacggccgaggacgtgctgacaactccagacgtcatcgttggtacgttcctcattcattccatccctgctaccattttgttcgactctggagcttcccactcgtttatatctgtgccattcgtggggagaaatcagttgggggtagaaaggcttaggaaccctctcctcatcaccacccctggaggggttatgacagcaaagtattatagccctgctgttcctatagaaattcagggaattccttttccctcggatcttgtgagactaatcacgaaaaacattgctcaa

SEQ ID NO: 14530 - DNA, 5253 bp, Oryza sativa
  Clone ID: TFbOSC31864j.C1.o2.fg
atgtcatggcacagggccggtgtcctgctgctaggggctcagtcctgcctgcctgtcctgggggttccggccgtaggtgggattgggtcggtactcttgtctatggctaggatgggttggaaactatgtcacgtcttccgtctgtataccgtggtgatggccggcagcgtcagccgtcgtggtctggacatgactggtttcgtcttggagctgcggggcatgtgcgttgtcctggggtatccgcatggagtggactaccagggcaggccgctcccggagcaggagggtgacgatgcagagccccatgctgcttgggaggttactgcagtgatcctcactggctctcccgagcggacttcgttggcagtcaccgcgggtggagattctttccccgccgcttgccagagcgccgctctcctcgccatcggcactcttcaccagggctacccggacgagttgcagcactcgccctaccgctaccaccctcgtcgcggaggagcccgcgacttcgccaccttccgggatgctagctcggaggatgacgctaccatcatgcacctggcgcgcatggtggaggcgtacgatgcggctcgtatcgacttccatcagatggtgcgtcgtgggatggtcgagaacaacatgaagatcctggagctgcgtcaggagaatctgcagctgaagaaggacctagacgcagtggaggcgcagctgcatcagctcaagatcacccagggagaggtctgtcgccccaagtgtcgccgcgtctgccgcagccagaagatcaccgcccgcaagagcacctccaggcccgagcttgttcgtcagtccctggcgtggacttgcttcgtggagacccctcgtgccgagcctgcgcccgtggttccccaggagggggaagcctccggcgttggtagcatggaggatgcgctgttgctcaccttccgtcctggcccgtcgcagcggaaaagtgctgccaccggtgagggcaaccaatctgaaggcagcaaccacaaccaccagggcagcccacctccacttcatcttccgcttccaccaccaccaccagacaccaacgccattctcactcaaatcctcgcccagcaggccaacatgatgactgctttcctccaccacctccaaaatccgccacaacagaatgctccaccaccacccccacaacactctaaactcgccgagttcctccgcatccgtccacctaccttctctagctccaacaaccccgtggatgcgttggattggttgcatgccgtggggaaaaagctagacactgtgcagtgcagcgatgaggagaaagtcatcttcgccgcccaccagctgcaggggcccgcatctctatggtgggaccatttccaggctacgcagccagaggggcagcctattacttgggcccgcttcaccgctgctttccggagaacccatgtgcccgccggagtcgtggcccttaagaaaagggaattccgagagttgaagcaaggcaaccgctctgtgatggagtatttgcatgagttcaacaacctggcccggtacgccccgagattctccggggactatccggatttccaacgtctggtggacaagagcatccgcttggaagacaagcacaaggaactggagtcacacaagcgccgcttggcgaatttccgcaaccaacagggtgctaaccaaagggtccgctacaccaatccctatccagggggatcctcctcgcagcaggaacaacagcagcagcaaccacgctccgcgcctcgacctcaattcgtggtgcgcgtcccacagccgcagcagcagcagagtcaacaagggactcgtgcgccccgtcctcctatgccaactgtgcagcctggtcaaagccgcagggacgctcaaggtccgcagcgtctgtgcttcaactgcttcgagcgggggcactttgcggataaatgcccaaagctgaggcgtcagcaaggccaagcgcctccccgctccaacaacggtggtaaggatgtcattcggggtcgtgtgaaccacgtgacagccgaggacgtgctgacaactccagacgtcatcgttggtacgttcctcattcattccatccctgctaccattttgttcgactctggagcttcccactcgtttatatctgtgccattcgtggggagaaatcagttgggggtagaaaggcttaggaaccctctgctcatcaccacccctggaggggttatgacagcaaagtattatagtcctgccgtccctatagaaattcaggggattccttttccctcggatctgattctgctagacaccaagagcttggatgtgatccttgggatgaattggttggctcaattccaaggagtagtggattgcgcgagacgcactgtcactctgtacccagggccagaacaaccggttgttttctttgcacccccaacctctgtcagtagttcagaacttcatcagataggactgtcagaaatccccatcgtcagagagttcggagacgtgtttccggaagaactacccggtatgccgcccaagcgagagattgagttccggatagatcttgctccaggaaccactcctctatacaagcgaccctaccgtatggcagcaaatgaactggctgaagttaagaaacagttggaagagttgaaagaaaaggggtatatacgtccgagtacttccccctggggtgctcctgtgatttttgtggagaagaaagacaagacgaagaggatgtgcgttgactacagagctctcaatgaagtcaccataaaaaacaagtaccctcttccccggatcgatgatctgttcgatcagcttaaaggtgccactgtattctccaagattgatcttcgttccggatatcaccaattacgtattcgtgaagaagatattcctaagaccgcattcaccacgcgatacggactgtatgaattcacggtgatgtcattcggtttaaccaatgctcctgccttcttcatgaacttaatgaacaaagtgttcatggaatacttggataagtttgttgtggttttcattgatgacattctggtatactcacaatcagaggaagaccatcagcaccatctccgtctggtgttgggaaagttgcgggaacatcaattgtatgccaaacttagcaagtgtgagttctggttgtccgaagtcaaattcttagggcacgtgatatctgctaaaggagttgctgtggaccccaaaacagtgaccgccgtcactgattggaagcaacccaagacagtcactcaaattcgcagtttcttaggtttggcaggatactaccggaggtttatcgagaacttctccaaaatcgctcgacccatgacacagttgttgaagaaagaagagaaatttgtgtggagcccgcaatgcgagaaggcgttccaaactctcaaagaaaagctggtttcctcgccagtgttaatcttgccggatactcgcaaggacttcatggtgtattgtgacgcttcgcgccaaggattggggtgcgtgctcatgcaggacggtcatgtggtggcctatgcctcccgccagctacggcctcatgaaggcaactaccctacccatgatttggagttagccgcggtggttcatgctctaaaaatctggcggcattatctcattgggaatcgctgtgaaatatatactgatcataagagtttgaaatacatcttcactcagtcggacctgaatcttcggcaaaggagatggttagaactcatcaaggattacgatgtgggaattcactatcatcctggtaaggccaacgtggtcgctgacgctctaagtcgaaagagccattgcaacactcttaacgtccgtggctttccacccgaacttaaccaacagatggaagccctgaatctgagcgtagtgagtcgtggattcttggctgcgttggaagccaagcccaccttgctcgatcaaatccgcgaggctcagaagaacgacccggacatgcgtggactcctcaaaaatatgaaacagggtaaagctgcgggtttcacagaggatgaacatggaaccctatggaacggaaatcgggtatgcgttccggatgtcagagaacataaacagctgatacttcaggaagctcatgaaagtccttattccatccaccctggcagtacgaagatgtacttagacttgaaggagaaatactggtgggttagtatgaagcgggaaattgcagagttcgtggccctttgtgatgtgtgccagcgtgtcaaggcagagcaccaacgaccggccggacttctccaacctctccaagtaccagaatggaaatgggatgaaattgggatggatttcatcaccggacttccaaaaacccaaggtggatatgattctatatgggtagttgtggatcgattaaccaaggtagctcgatttattcctgtgaagaccacctatggagggaacaaactagccgagctctacttcgctaggatcgtgagtctccatggcgttcccaagaaaatcgtatctgataggggaagccaattcacctctcacttttggaagaagctccaagaagagctgggtaccagattaaatttcagcaccgcgtatcacccgcagacagatggacagaccgagcgtctaaatcagatcctagaagatatgcttcgcgcatgtgtcctagatttcgggaagacctgggataagagtctcccctatgccgagttctcctacaataacagctaccaagccagtatacaaatggcaccttatgaagcgttgtatgggcgcaaatgccggacaccgctattgtgggaccaagttggggaaagtcaagtgttcgggactgatatcctgagagaagctgaagcgaagacaaaagggaagctcgcacctcggttcgtgggtcctttccgtatcattgctcggcgcgaagaagtcgcttaccagttggagctgcccgcctccttgggcaacgggcacgatgtgttccatgtgtcacaactcaagaaatgtcttcgagtgccatccgagcaggccgactcagagcaaattgaagttcgcgaagacttgacctacgtggagaggccagtgaaaatcctggacaccatggagcgcaggaccaggaaccgggtaatccgtttttgcaaggtccaatggagcaaccacgccgaggaagaagctacttgggagcgtgaagacgagctgaaggcagcccatcccgatctcttcgccagttcttccgaatctcggggtcgagattccgtttaa

SEQ ID NO: 14531 - DNA, 3339 bp, Oryza sativa
  Clone ID: TFbOSC400086j.C1.o12.fg
atgtcgagccggtgcgatcgactacttcctctgcatcgacacgcgctacttcgcgagagttccttcgacttctcagcgtcttcttccgctgcacagcgcgtcgagtggatagatgtcggacatctatatgcggagattattggtttacttgacaagatcatggcagctcctgcaccatccagttttaacttgcggtctattcttgagaaagaaaagttgactggaacaaacttcatggactggtatcacaacctgagaattgttctcaggaaagagcacaaagagtttgtgcttacagagctttttccagctaacttgcccaacaatgctcctgctgctcaacgtagggagcatgaaaagcgatgtaatgattatcttgatataagctgtctcatgcttgctactatgtcccctgagcttcaaaggcaatatgaggcattggatgctcatacgataatcacgggactatgtaacatgtttgaggaccaagcaagagctgagaggtttaatacctcaaagtccttgtttgcgtgcaggcttgcagaaggtaatctagtgagcccacatgtgatcaaaatgattggttacaccgagagtctggataaccttggctttccacttagccgagagttggctactgatttgattctccagtcgctccctcccagctttgagccgttcataataaatttcaacatgaacaacctgaacaggaccttggcagaattgcatgggatgctaaagactgccgaggaaagcattaagaaaaaccccaaccatgtgatggttatgcataagcgcaagcccaacaacaagaagagtggtcaaaagagaaagctaaactctgatgagttcacgagtactagcaactctaagaccaaggttcaaaagacagggcccgctaaggatgcagagtgcttcttttgcaaggagataggtcattggaagagaaactgtaagaaatacctagagcagctcaagcagaagcagcatgatggaaagagttccacctcaggtattaatgttatagaaattattcttgctacttcctctactgattcttgggtatttgataccgggtcagttgctcacatatgcaaatcgttgcaggggctgaaaaaaagtaggagcttagcaagaggcgaagtggacattcgcgtgggcaatggagcaagagttgctgctattgcggtcggcactatgccattatctttaccgtcaggattagttttggagttaaagaattgttattgcattccagctttgtgtaagaacgttatctctgcttcttgttcgcaagcagagggttatggttttagatctgtggacaatggttgttcagtctattataatgacattttctatttccatgcacctatgatgaatggcttatacattgtgaatcttgatggatgttcagtctataacattattgcaaaaaggcaacatcctaatgatttgaatcccacttttatttggcattgtcgcttgggtcatataaatgagaaacgtatggagaagcttcatagagatggacttctacactcgtttgattttgaatcatttgagacatgcaaatcttgtttacttggcaaaatgacaaaggcacctttcacgggtcaaagtgaaagggcaagtgaaccattgggactagtacatattgatgtatgtggaccaatgagctcaactgccagaggtggttttaggtactttattacctttaccgatgactttagtagatatggttatgtctacttaatgaggcataagtctgagtcctttggaaagttcaaggaatttcagaatgaggtacaaaatcatttgggcaagacaatcaagtatctacgatctgatcgtggtggagagtacttgagcctagaatttggcaatcatctaaaggaatgtggaattgttccacaagtcactccgctaggaacgcctcagtggaatggggtgtctgaacggaggaatcgtacattgttggacatggtgcgatcaatgatgagccaaactgatctgccgctaagtttttggggttacgctctagagacagctgcgttcacactaaacagggttccatcaaaatcagtggataagacaccatatgagatatggactgggaagcgtcccattttgtctttcctaaagatttggggctgtgagttgtggaagcaccggttttacgaatgtccgaaaggatacggcgtacacctgcgagtttggaacttggttgatccacctgatggtgtaaaagccattgagtgcaaatgggtctttaagaaaaagacggatgtagatggaaatgttcacatctacaaggcacgattgatggcgaaaggtttcatacaaattcaaggtgttgattatgatgaaactttctcgccagtcgccatgctaaattctattcggattgttttagcgattgctgcctatttcgattatgagatatggcaaatggatgtcaaaacagctttcctcaatggaaatctcgatgaggatgtgtacatgacacaacccaagggatttgttgatccacaatcaactaaaaagatatgcaaattgcagaaatccatttatgggttgaagcaagcatctcggagttggaatattcgttttgacgaagtagtcaaggcgttgggctttgtcaaacacgaagaagagccttgtgtatacaagaagattagtgggagcgcattggtgtttctaatcctatatgtagatgacatattattgattgggaacgatattcctatgcttgaatccgttaagacatcgttgaaaaatagtttttcaatgaaagacttaggggaagcagcatatattctgggcataaggatttatagagatagatcaaaaaggctaattggattaagccagagtacatacattgacaaggtgttgaagaggttcaacatgcaagattctaagaaaagtttcttaccgatgtcacatggcattaatcttggcaagaatcagtgtcctcaaacgactgatgagcgaaacaagatgaatgtttcatatgcacttagtgtaacaagccgataccaatcagatccaggtgagagtcactggatagctgtaaagaatattctaaagtacttgagaagaactaaggatatgttcctagtctatggaggacaggaagagctcgttgtaaatggttacactgacgcaagcttccaaaccgacaaagatgattttagatcgcagtctggatttgtgttctgcctgaatggaggcgctgtgagttggaagagttccaagcaagatacagtggttgattctacaacagaagccgaatacattgccgcttctaaagcagcaaaggaggctgtttag

SEQ ID NO: 14532 - DNA, 2133 bp, Oryza sativa
  Clone ID: TFbOSC400850j.C1.o22.fg
atggcgagttcctcctcctccatagccgccacaaatcctctggttggcatccaggtctctgaaaaactcaccaagcaaaattatgctctctggtcagcgcaagtgctcacagccctgaggggcgcgcggctggaaggattcatctccggcaagactactccaccacctgccgagatagagaagaaagaaggagacaagaaagaaggagagaagacaatcaagattgctaatccggcagtggatgaatggtttgccacggaccaacaggtccttggcttcctgttctcctcactgtcacgtgagatcctgtcccaggtcgccggtgcaacaacggcggcacaggcgtggcaggccatcagcgacatgttcgcgtcgaagtcccgagctggcctcatcaatatgcggctggcactcacctctacacagaagggcaccatgtcagtcacagaatatgtggccaagatgagggcgattgcagatgaacttgcagcagcaggcaagccaattgatcaagatgatcttattgcttatatcattaacggtcttgatgcaaactttgatcctgttgtcgaggctctcgtcgctagggttgaacccatcacagtgcaagagatgtattctcatctgctgaactttgagaacaagatccgtcttcgtcaagcgttcctgactgcctccaccaacgctgcaaatcgcaacaatgtcacccgtggtggccgtggtggcatgccgcgcggacgcggcggtcgtggcggcggtggccgcggcggcaacggaggacgcggcaacaatggcgggggtcgaggcgataatcgccctacctgccaagtctgcaacaaaagaggccatgtggcttcagattgttggcatcgtttcgatgaaacgtatgtccctgatgaaaagattggaggtgcagcaactcatgcctatggcatagacacaaactggtatgtagatactggtgcaacagatcacatcacaagccagcttgacaagcttacaacaaaggagaaatatcaaggcaccgatcagatccacacggcgagtggcgaagaagtttttgaaaaattccatgagttccaaaatatggttgaaagacagttcaatcgtaaaattgttaccatgcaaactgattggggagggcgtgtatatgtttcccgagatgttacctttgatgaacatgagtttcctttttcccaccttcactccaatgcaggggcacgtctccgcgctgaaatttccctcctaccagaacatctcctctctcatgcctatgatcaagggggagagaaacatagcactgaccatatgcatgaatatatcctgcctgtctccactaactcccaagatttgagtcctgtttttacagaaattggcacaggaggaattattccaggtacatcagatggcttgcacccagaaaatgacgatcaggcgggaaaaactgcctcagatcagccgtcgacatcagccgtcttgcctctgcagccgcagcagtcactggagcagcaaccggacggcaccacgtcgtctcatcatccagcatctcctgcgcatgcatctcctccacgccaaccagcagtcgacgtgtcagctggcacacatcatgatgcctccggatcgtctgcatctgatgaaccagtggccacgacagcgccacctgaggtaacactcagacctaaaaccagattgcagagcggtattagaaaggagaaaatttatactgacggtacagttaagtatagctgcttcacatcatctggtgaaccccaaaatttgaatgaggctttaggagataaaaattggaaggagactatggatgcagaatatatggcacttatgaaaaataaaacctggcatttagttcctactaagaaagggattaatataataaattgtaaatgggtgtataagattaagaggaaaactgatgggagtctagatagatacaaagctagacttgtagcaaagagttttaaacaaaggtatggtattgattatgaagacaccttccgtccagtagtaaaggcagctactattagaactattctttctatagcagtgtctagaggatggagtcttcgccagttagatgttcaaaatgccttcttacatggtgttttagaagaataa

SEQ ID NO: 14533 - DNA, 5151 bp, Oryza sativa
  Clone ID: TFbOSC24701j.C1.o1.fg
atggcgcagaaatactcctggcaaagccctagatcggatgatgctgagaagggttcggccgagccccctagttcgactgaaccattggctggcccaacaagcccaggttcaaggttgttcttggcacggcaagaacagcaacaacgtggagtcggtgtaccggttgctaaggcgcagcacccctgtggtagttgtagtcggaccgccaacgtcgtatccttccccaaatcgaagtttatcctcctctcatcgaaagatcgggaacccccgttgctgcatcaagtggtatcagagctcaagttgctcggaggatcgggggagcaccctcaacattcaccacgtacgaggggcatcatacaacattttgagcgccaagtgagggagcatgctgaaggccttgatgaggatgttagggtcgccaatgatcgccttggtcaattggaggctgctcaaattgacaccaactccaagctttcctcattggagaggtcccttgtggctgtgaacacttctcttgcaggtatcttgaatacgttggagagaatgggccaagatggtcatgatggatcggctaggcgcaaccacaatggccatgatgctaatagcagcatcgcagcaagggaagaactggagtacgttgctgacactgagcatgatgaggaggtacttggtcgtccacaaagacaacagcgccggcagcgccatggcttgggcgctccaccacggcgggaggtacgtgataatgatgattctttaggcaagatcaagtttaccattccttgctttgatggaaaatatgaccctgatgcatatcttacttgggagttagccattgatcagaaatttgcttgccatgattttcctgagaataaatgtgttagggctgctactagtgagttcactgattttgcatccatttggtggagtgaatttgttcgttccaatccaaataacactccccaaacctgggatgcaatgaaaagagtcatgcgagctagatttgttccttcatatcatgcacgtgatttgctgcacaaattgcaacaacttagacagggaaacaaatctgtagaggagtattatcaagctttgcaaacaggaatgcttcgttgtggattggtagaaaatgatgatgctggtatggctagattcatgggtgggctgaaccgagaaattcaggacattctaacctacaaagaatataattcaattaatcatttgtttcatcttgcttgtaaagctgaaagggaagtacagggacgaagagctagcttcaggactaacatttctgcaggtcgtgctagctcttggacatcttctaacgctgctgcaccgtcaactcgagcagcagcaccatcgtcctcaagcaacaagctgcgtccctctacaacaaactctacaccatgcccgagtgaaccaacaagaggggttgctgctacaccttccaagacctcatcatcagtagcttcatcaggaaggacaagagatattcagtgcttacgctgcaagggctatggtcacgtgcgcaaggactgcccaagcactcgtgtaatgatcgtgagagctgatggtgggtactcctccgctagtgatttagatggagaaacctatgctttgcttgcaactaacaatgcacgggaaggtgacgcgccccaccaagatgaggaacacattggggctgaagctgcagagcactatgagagcctcgtggtgcagcgagtgctaagcgcacaaatggaaagggctgaacagaatcagcgccacaccttgtttcaaaccaagtgtgtgatcaaggaacgctcttgccgcgtgatcatagatggaggaagctgcaataatttggctagtgctgaaatggtggagaaacttgcattgagcacacagccacatccacagccctactatattcaatggcttaatagcagcggcaaggtaaaggtaacacgattggtaagagtacattttgccattggttcttatcatgattcaatcaactgtgatgttgtgcctatgcaagcatgttctatgttattaggtaggccatggcagtttgataaagattctttacactttggcaaatccaatcaatactcctttgtgcataatggaaaaaaacttgtgttacatcctatgtctcctgaagttattttaaaggatgaacttgctagagctagcaaacaaaaaaatcaggagcatactaggagtgagcatcttattgcggctaatgaacttgagaagcataagaagaaacccaccaactctgttcaaaataataaaaatgagattaagctgaagggatcttgtttcattgcaacaaaatcagatttggatgaagttgacactgacactgttgtttgctatgctttggtttgcaaagaaaccttatttccaattgaggatactcctatttctttgcctcctccggtcactaaccttttgcaggagtatgctgatattttcccaaaggaggttccaccggggctgccaccaattcgagggattgagcaccaaattgacctcattcctggggcctctctgccaaaccgtgcgccatacaggaccaacccggaggaaacaaaggagattcagcgtcaagtgcaagagttactcgacaaggggtatgtacgtgagtctcttagtccttgttctgtccccgtgcttttagttcctaagaaagatggctcatggcgcatgtgtgtggattgtagagcaattaacaacatcacaatcagatatcgtcatcctatccctaggctagatgatatgcttgatgaattgagtggttcacttgtgttctctaaaattgatttgcgtagtggttaccaccagattcgcatgaagttaggagatgaatggaaaacagcttttaaaactaaattcggcctatatgagtggttagtcatgccctttggtctcactaatgcacccagtactttcatgagattaatgaatgaagttttacgtgctttcattggcagatttgtggtggtatattttgatgacattctcatatatagcagatcaatagaggatcatcatggtcatttgcgtgctgtttttgatgctctacgagatgcacgtttatttggtaaccttgagaagtgcacattttgcacagatcgagtctcttttcttagctatgttgtgactccgcagggaattgaagtagatcaagccaaggttgaagccatacataactggccggttccaacaacgatcacacaagtgagaagctttctaggacttgctgggttctaccgccgctttgtgaaggattttagcaccattgcagccccattacatgagcttaccaagagaaatgtcacattcacttgggctgcagcacaaaggaatgcattcgacactttgaaagataagttaacacacgctcctttactccaacttcctgatttcaacaaaacttttgagcatgaatgtgatgctagtgggattggattgggtggtgtgttgttacaagaaggcaaacctgtagcatatttcagcgagaaattgagtgggcctagtttgaattattctacttatgataaggaattgtttgctctagtgcgaacattggaaacatggcagcattatttatggcccaaagaatttgttatacactctgatcatgaatctttgaaacacattcgaagtcaagcaaaacttaaccgtaggcatgctaaatgggttgaatttattgaatcttttccatatgtcatcaaacataagaagggaaaagaaaatgtcattgctgatgctttgtctagacgttacgcaatgctatcccaacttgacttcaaaatttttggcttagaaacaataaaagagcaatatgcgcacgatgatgattttaaaaatgtgttgttgaattgcaaggagggaaggacttggaacaaattcgttctcaccaatgggtttgtgtttagagctaataagttatgcattccagctagctccgtgcgtatgctattattgcaggaagcgcatggtggagggctgatgggacactttggtgtgaagaagacggaggatatccttgctgatcatttcttttggcctaagatgaggagagacgtggagaggttcgttgctcgctgcacaacatgccaaaaagctaagtcacgccttaaccctcatggtttgtatatgcctttgcctgttcctagtgtgccttgggaggatatttctatggactttgttttagggctgcctagaacaaagaaggggagggacagtatctttgttgttgtagatagattttctaagatggcgcatttcataccttgtcataagagtgatgatgctacacatgttgctgatttgttctttcgtgagattgttcgcttgcatggagtgccaaacaccatagtttctgatcgcgatacaaaattccttagtcatttttggagaaccttgtgggctaagttggggactaaatttttattttctactacatgtcacccccaaactgatggacaaactgaggtggtgaatagaacattatctacaatgcttagggctgttttgaaaaagaatattaaaatgtgggaagaatgtttgcctcatgttgagtttgcttataatcgttcacaacattctactactaagaagtgcccttttgagattgtttatggccttctaccccgtgctccaattgatcttttgccccacccaacttcagagagagtgaactttgatgcaaaatatcgcgctgaattgatgttaaaactgcatgagaccactaaggagaacatagagcgcatgaatattaaatataaacttgctgggagcaaaggaaagaaacatgttgcttttgaacctggtgatttggtttggttgcatttgagaaaggataggttccctaatttgagaaaatctaagttgctacctagagctgatggtcctttcaaagtgctacaaaagattaatgacaatgcatacaagcttgagctacctgccgattttggggttagccccacgtttaacattgcagatttaaagccatatttgggagaagaagatgagttagagtcgaggacgactcaaatgcaagaaggggaggatgatgaggacatcctttccaacgatacatccacgcctattgcacagcaaggaccaatgactagagctcgagctcatgaacttaattaa

SEQ ID NO: 14534 - DNA, 3351 bp, Oryza sativa
  Clone ID: TFbOSC27996j.C1.o2.fg
atgccgcatggaaggtggtgggactcgatcaaccctattcctgcaagcaaatcgaagaaacaagacgagcagttcgctcgttttgtgatccagaagatccacatcaaagtgccgttgttggatgctatgcaagtgccaacatacgcccgttatctcaaggacatactcaacaacaagagaccgctgccaacaacggaggtggtcaagctgacggaacaatgcagcaacctgatactccacaagctcccggagaagaagaaagatccggggtgtcctacgatcacctgctcgatcggggcacaacaattcgaccagacctggtgcgaccttggagccagcgttagcgtcatgccaaaagacgtcttcgacaagctcaacttcacagtgttggaaccaacaccgatgcgcctccaactggctgactcatcagttcgttacccagcaggaatagcggagaatgtgccagtcaagatacgggatttcttcatcccggttgattttgtggtgctagacatggacatggggaaggagatgccgctcatcctagggcgtccattccttagtaccgcaggagccaacattgacgtgggaacggggagtatccgtttccatatcaacgggaaggaggaaaagtttgagtttcaaccaaggacggaacaatgctccatgaatttcctggagaaggaaacaacgatgcccaggaaccgttattggaaaacgccggtaaaatcacccgtaccggccaagaagtcagatcagccggctcagaagaagccgccatccgcaccaaaatcaaaaaaggggtgggagaatgaccataatgatgaggacatcccttccaacgatacaaccacgcctattgcacagcaaggaccaatgactagagctcgagctcgtgaacttaattatcaggttcaaggttgttcttggcacggcaagaacagcaacaacgtggagtcggtgtaccggttgctaaggcgcagcacccctgtggtagttgtagtcggaccgccaatgtcgtatccttccccaaatcgaagtttatcctcctctcatcgaaagatcgggaacccccgttgctgcatcaagtggtatgagagctcaagttgctcggatcgtgctgttgtcggctccggaggatcgggggagcaccctcaacattcaccacgtacgaggggcatcatacaacattttgagcgccaagtgagggagcatgctgaaggccttgatgaggatgttagggtcgccaatgatcgccttggtcaattggaggctgctcaaattgacaccaactccaagctttcctcattggagatgtcccttgtggctgtgaacacttctcttgcaggtatcttgaatacgttagagagaatgggccaagatggtcatgatggatcggctaggcgcaaccacatggccatgatgctaatagcagcatcgcagcaagggaagaactggagtacgctgctgacactgagcataatgaggaggtacttggtcgtccacaaagacaacagcaccggcagcgccatggcatgggcgctccaccacggcgggagtgaatttgttcgttccaatccaaataacactccccaaacctgggatgcaatgaaaagagtcatgcgagctagatttgttccttcatatcatgcacgtgatttgctacacaaattgcaacaacttagacagggaaacaaatctgtagaggagtattatcaagctttgcaaacaggaatgcttcgttgtggattggtagaaaatgatgatgctggtatggctagattcatgggtgggctgaaccgagaaattcaggacattctagcctacaaagaatataattcaattaatcgtttgtttcatcttgcttgtaaagctgaaagggaagtacagggacgaagagctagcttcaggactaacatttctgcaggttgtgctagctcttggacatctcccaacgctgctgcaccgtcaactcgagcagcagcaccatcgtcctcaagcaacaagctgcgtccctctacaacaaactctacaccatgcccgagtgaaccaacaagaggggttgctgctacaccttccaagagctcatcatcagtagcttcatcaggaaggacaagagatattcagtgcctacgctgcaagggctatggtcacgtgcgcaaggactgcccaagcactcgtgtaatgatcgtgagagctgatggtgggtactcctccgctagtgatttagatgaagaaacctatgctttgcttgcaactaacaatgcaggggaaggtgacgcgccccaccaagatgaggaacatattagggctgaagctgcagagcactatgagagcctcgtggtgcagcgagtgctaagcgcacaaatggaaagggctgaacagaatcagcgccacaccttgtttcaaaccaagtgtgtgatcaaggaacgctcttgccgcgtgatcatagatggaggaagctgcaataatttggctagtgctgaaatggtggagaaactttcattgagcacacagccacatccgcagccctactatattcaatggcttaatagcagtggcaaggagcatactaggagtgagcatcttattgcggctaatgaacttgagaagcataagaagaaacccaccaactctgttcaaaataataaaaatgagattaagctgaagggatcttgtttcattgcaacaaaatcagatttggatgaagttgacactgacactgttgtttgctatgctttggtttgcaaagaaaccttatttccaattgaggatactcctatttctttgcctcctccggtcactaaccttttgcaggagtatgctgatattttcccaaaggaggttccaccggggctgccaccaattcgagggattgagcaccaaattgacctcattcctggggcctctctgccaaaccgtgcgccatacaggaccaacccggaggaaacaaaggagaatcagcgtcaagttgatgaggacatcccttccaacgatacaaccacgcctattgcacagcaaggaccaatgactagagctcaagctcgtgaacttaattatcaggttcaaggttgttcttggcacggcaagaacagcaacaacgtggagtcggtgtaccggttgctaaggcgcaacacccctgtggtagttgtagtcggaccgccaacgtcgtatccttcgccaaatcgaagtttatcctcctctcatcgaaagatcgggaacccccgttgctgcatcacaagtgcaagagttactcgacaagggtcgtgctccaccagattggggcgcaccccacatgggccccacttgggccggggtcccaaacgaagttacaagcccaaaggcccatga

SEQ ID NO: 14535 - DNA, 4359 bp, Oryza sativa
  Clone ID: TFbOSC31043j.C1.o2.fg
atgacaggaggatcgggggagcaccctcaacattcaccacgtacaaggggcatcatacaacattttgagcgccaagtgagggagcatgctgaaggccttgatgaggatgttagggtcgccaatgatcgccttggtcaattggaggctgctcaaattgacaccaactccaagctttcctcattggagaggtcccttgtggctgtgaatacttctcttgcaggtatcttgaatacgttggagagaatgggccaagatggtcatgatggatcggctaggcgcaaccacaatggccatgatgctaatagcagcatcgcagcaagggaagaactggagtacgctgctgacactgagcatgatgaggaggtacttggtcgtccacaaagacaacagcgccggcagcgccatggcatgggcgctccaccacggcaggaggtacgtgataatgatgattctttaggcaagatcaagtttaccattccttgctttgatgaaaaatatgaccctgatgcatatcttacttgggagttagccattgatcagaaatttgcttgccatgattttcctgagaataaacgtgttagggctgctactagtgagttcactgattttgcatccatttggtggagtgaatttgttcgttccaatccaaataacactccccaaacctgggatgcaatgaaaagagtcatgcgagctagatttgttccttcatatcatgcacgtgatttgctgcacaaattgcaacaacttagacagggaaacaaatctgtagaggagtattatcaagctttgcaaacaggaatgcttcgttgtggattggtagaaaatgatgatgctggtatggctagattcatgggtgggctgaaccgagaaattcaggacattctagcctacaaagaatataattcaattaatcgtttatttcatcttgcttgtaaagctgaaagggaagtacagggacgaagagctagctttaggactaacatttctgcaggtcgtgctagctcttggacatcttccaacgttgctgcaccgtcaactcgagcagcagcaccatcgtcctcaaacaacaagctgcgcccctctacaacaaactctacaccatgcccgagtgaaccaacaagaggggttgctgctacaccttccaagagctcatcatcagtagcttcatcaggaaggacaagagatattcagtgcctacgctgcaagggctatggtcacgtgcgcaaggactgcccaagcactcgtgtaatgatcgtgagagctgatggtgggtactcctccgctagtgatttagatgaagaaacctatgctttgcttgcaactaacaatgcagggaaaggtgacgcgccccaccaagatgaggaacacattggggctgaagctgcagagcactatgagagcctcgtggtgcagcgagtgctaagcgcacaaatggaaagggctgaacagaatcagcgccacaccttgtttcaaaccaagtgtgtgatcaaggaacgctcttgccgcgtgatcatagatagaggaagctgcaataatttggctagtgctgaaatggtggagaaacttgcattgagcacacagccacatccgcagccctactatattcaatggcttaatagcagcggcaaggagcatactaggagtgagcatcttattgcggctaatgaacttgagaagcataagaagaaacccaccaactctgttcaaaataataaaaatgagattaagctgaagggatcttgtttcattgcaacaaaatcagatttggatgaagttgacactgacactgttgtttgctatgctttggagtatgctgatattttcccaaaggaggttccaccggggctgccaccaattcgagggattgagcaccaaattgacctcattcctggggcctctctgccaaaccgtgcgccatataggaccaacccagaggaaacaaaggagattcagcgtcaagtgcaagagttactcgacaaggggtatgtacgtgagtctcttagtccttgttctatccccgtgcttttagttcctaagaaagatggctcatggcgcatgtgtgtggattgtagagcaattaacaacatcacaatcagatatcgtcatcctatccctaggctagatgatatgcttgatgaattgagtggttcacttgtgttctctaaaattgatttgcgtagtggttaccaccagattcgcatgaagttaggagatgaatggaaaacagcttttaaaactaaattcggcctatatgagtggttagtcatgccctttggtctcactaatgcacccagtactttcataagattaatgaatgaagttttacgtgctttcattggcagatttgtggtggtatattttgatgacattctcatatatagcagatcaatagaggatcatcatggtcatttgcgtgctgtttttgatgctctacgagatgaacgtttatttggtaaccttgagaagtgcacattttgcacagatcgagtctcttttcttggctatgttgtgactccgcagggaattgaagtagatcaagccaaggttgaagccatacatagctggccggttccaacaacgatcacccaagtgagaagctttctaggacttgctgggttctaccgccgctttgtgaaggattttagcaccattgcagccccattacatgagcttaccaagagaaatgtcacattcacttgggctgcagcacaaaggaatgcattcgacactttgaaagataagttaacacacgctcctttactccaacttcctgatttcaacaaaacttttgagcttgaatgtgatgctagtgggattggattgggtggtgtgttgttacaagaaggcaaacctatagaatatttcagcgagaaattgagtgggcctagtttgaattattctacttatgataaggaattgtttgctctagtgcgaacattggaaacatggcagcattatttatggcccaaagaatttgttatacactctgatcatgaatctttgaaacacattcgaagtcaagcaaaacttaaccgtaggcatgctaaatgggttgaatttattgaatcttttccatatgtcatcaaacataagaagggaaaagaaaatgtcattgctgatgctttgtctagacgttacgcaatgctatcccaacttgacttcaaaatttttggcttagaaacaataaaagagcaatatgcgcacgatgatgattttaaagatgtgttgttgaattgcaaggagggaaggacttggaacaaattcgttctcaccaatgggtttgtgtttagagctaataagttatgcattccagctagctccgtgcgtatgctattattgcaggaagcgcatggtggagggttgatgggacactttggtgtgaagaagacggaggatatccttgctgatcatttcttttggcctaagatgaggagagacgtggagagggctgttttgaaaaagaatattaaaatgtgggaagaatgtttgcctcatgttgagtttgcttataatcgttcacaacattctactactaagaagtgcccttttgagattgtttatggccttctaccccgtgctccaattgatcttttgcccctcccaacttcagagagagtgaactttgatgcaaaatatcacgctgaattgatgttaaaactgcatgagaccactaaggagaacatagagcgcatgaatataaagtataaacttgctgggagcaaaggaaagaaacatgttgcttttgaacctggtgatttggtttggttgcatttgagaaaggataggttccctaatttgagaaaatctaagttgctacctagagctgatggtcctttcaaagtgctacaaaagattaatgacaatacatacaagcttgagctacctgccgattttggggttagccccacgtttaacattgcagatttaaagccatatttgggagaagaagatgagttagagtcgaggacgactcaaatgcaagaaggggaggatgatgaggacatcccttccaacgatacaaccacgcctattgcacagcaaggaccaatgactagagctcgagctcgtgaacttaattatcaggttcaaggttgttcttggcacggcaagaacagcaacaacgtggagtcggtgtaccggttgctaaggcgcagcacccctgtggcagttgtagtcggaccgccaacgtcgtatccttccccaaatcaaagtttatcctcctctcatcgaacgatcaggaacccccgttgctgcatcagtttgtcgagcaggcataatagaagcagtttgtatgtgttctacttcttactctctccattctcgagaacttgcatatcgaactccattatagtctga

SEQ ID NO: 14536 - DNA, 5127 bp, Oryza sativa
  Clone ID: TFbOSC400192j.C1.o21.fg
atgacaggaggatcgggggagcaccctcaacattcaccacgtacaaggggcatcatacaacattttgagcgccaagtgagggagcatgctgaaggccttgatgaggatgttagggtcgccaatgatcgccttggtcaattggaggctgctcaaattgacaccaactccaagctttcctcattggagaggtcccttgtggctgtgaatacttctcttgcaggtatcttgaatacgttggagagaatgggccaagatggtcatgatggatcggctaggcgcaaccacaatggccatgatgctaatagcagcatcgcagcaagggaagaactggagtacgctgctgacactgagcatgatgaggaggtacttggtcgtccacaaagacaacagcgccggcagcgccatggcatgggcgctccaccacggcaggaggtacgtgataatgatgattctttaggcaagatcaagtttaccattccttgctttgatgaaaaatatgaccctgatgcatatcttacttgggagttagccattgatcagaaatttgcttgccatgattttcctgagaataaacgtgttagggctgctactagtgagttcactgattttgcatccatttggtggagtgaatttgttcgttccaatccaaataacactccccaaacctgggatgcaatgaaaagagtcatgcgagctagatttgttccttcatatcatgcacgtgatttgctgcacaaattgcaacaacttagacagggaaacaaatctgtagaggagtattatcaagctttgcaaacaggaatgcttcgttgtggattggtagaaaatgatgatgctggtatggctagattcatgggtgggctgaaccgagaaattcaggacattctagcctacaaagaatataattcaattaatcgtttatttcatcttgcttgtaaagctgaaagggaagtacagggacgaagagctagctttaggactaacatttctgcaggtcgtgctagctcttggacatcttccaacgttgctgcaccgtcaactcgagcagcagcaccatcgtcctcaaacaacaagctgcgcccctctacaacaaactctacaccatgcccgagtgaaccaacaagaggggttgctgctacaccttccaagagctcatcatcagtagcttcatcaggaaggacaagagatattcagtgcctacgctgcaagggctatggtcacgtgcgcaaggactgcccaagcactcgtgtaatgatcgtgagagctgatggtgggtactcctccgctagtgatttagatgaagaaacctatgctttgcttgcaactaacaatgcagggaaaggtgacgcgccccaccaagatgaggaacacattggggctgaagctgcagagcactatgagagcctcgtggtgcagcgagtgctaagcgcacaaatggaaagggctgaacagaatcagcgccacaccttgtttcaaaccaagtgtgtgatcaaggaacgctcttgccgcgtgatcatagatagaggaagctgcaataatttggctagtgctgaaatggtggagaaacttgcattgagcacacagccacatccgcagccctactatattcaatggcttaatagcagcggcaaggtaaaggtaacacgattggtaagagtacattttgccattggttcttatcatgattcaatcaactgtgatgttgtgcctatgcaagcatgttctattttcttaggtaggccatggcagtttgataaagattctttacactttggcaaatccaatcaatactcctttgtgcataatggaaaaaaacttgtgttacatcctatgtctcctgaagttattttaaaggatgaacttgctagagctagcaaacaaaaaaatcaggagcatactaggagtgagcatcttattgcggctaatgaacttgagaagcataagaagaaacccaccaactctgttcaaaataataaaaatgagattaagctgaagggatcttgtttcattgcaacaaaatcagatttggatgaagttgacactgacactgttgtttgctatgctttggtttgcaaagaaaccttatttccaattgaggatactcctatttctttgcctcctccggtcactaatcttttgcaggagtatgctgatattttcccaaaggaggttccaccggggctgccaccaattcgagggattgagcaccaaattgacctcattcctggggcctctctgccaaaccgtgcgccatataggaccaacccagaggaaacaaaggagattcagcgtcaagtgcaagagttactcgacaaggggtatgtacgtgagtctcttagtccttgttctatccccgtgcttttagttcctaagaaagatggctcatggcgcatgtgtgtggattgtagagcaattaacaacatcacaatcagatatcgtcatcctatccctaggctagatgatatgcttgatgaattgagtggttcacttgtgttctctaaaattgatttgcgtagtggttaccaccagattcgcatgaagttaggagatgaatggaaaacagcttttaaaactaaattcggcctatatgagtggttagtcatgccctttggtctcactaatgcacccagtactttcataagattaatgaatgaagttttacgtgctttcattggcagatttgtggtggtatattttgatgacattctcatatatagcagatcaatagaggatcatcatggtcatttgcgtgctgtttttgatgctctacgagatgaacgtttatttggtaaccttgagaagtgcacattttgcacagatcgagtctcttttcttggctatgttgtgactccgcagggaattgaagtagatcaagccaaggttgaagccatacatagctggccggttccaacaacgatcacccaagtgagaagctttctaggacttgctgggttctaccgccgctttgtgaaggattttagcaccattgcagccccattacatgagcttaccaagagaaatgtcacattcacttgggctgcagcacaaaggaatgcattcgacactttgaaagataagttaacacacgctcctttactccaacttcctgatttcaacaaaacttttgagcttgaatgtgatgctagtgggattggattgggtggtgtgttgttacaagaaggcaaacctatagaatatttcagcgagaaattgagtgggcctagtttgaattattctacttatgataaggaattgtttgctctagtgcgaacattggaaacatggcagcattatttatggcccaaagaatttgttatacactctgatcatgaatctttgaaacacattcgaagtcaagcaaaacttaaccgtaggcatgctaaatgggttgaatttattgaatcttttccatatgtcatcaaacataagaagggaaaagaaaatgtcattgctgatgctttgtctagacgttacgcaatgctatcccaacttgacttcaaaatttttggcttagaaacaataaaagagcaatatgcgcacgatgatgattttaaagatgtgttgttgaattgcaaggagggaaggacttggaacaaattcgttctcaccaatgggtttgtgtttagagctaataagttatgcattccagctagctccgtgcgtatgctattattgcaggaagcgcatggtggagggttgatgggacactttggtgtgaagaagacggaggatatccttgctgatcatttcttttggcctaagatgaggagagacgtggagaggttcgttgctcgctgcacaacatgccaaaaagctaagttacgccttaaccctcatggtttgtatatgcctttgcctgttcctagtgtgccttgggaggatatttctatggactttgttttagggctgcctagaacaaagaaggggagggacagtatctttgttgttgtagatagattttctaagatggcgcatttcataccttgtcataagagtgatgatgctacacatgttgctgatttgttctttcgtgagattgttcgcttgcatggagtgccaaacaccatagtttctgatcgcgatacaaaattccttagtcatttttggagaaccttgtgggctaagttggggactaaacttttattttctactacatgtcatccccaaactgatggacaaactgaggtggtgaatagaacattatctacaatgcttagggctgttttgaaaaagaatattaaaatgtgggaagaatgtttgcctcatgttgagtttgcttataatcgttcacaacattctactactaagaagtgcccttttgagattgtttatggccttctaccccgtgctccaattgatcttttgcccctcccaacttcagagagagtgaactttgatgcaaaatatcacgctgaattgatgttaaaactgcatgagaccactaaggagaacatagagcgcatgaatataaagtataaacttgctgggagcaaaggaaagaaacatgttgcttttgaacctggtgatttggtttggttgcatttgagaaaggataggttccctaatttgagaaaatctaagttgctacctagagctgatggtcctttcaaagtgctacaaaagattaatgacaatacatacaagcttgagctacctgccgattttggggttagccccacgtttaacattgcagatttaaagccatatttgggagaagaagatgagttagagtcgaggacgactcaaatgcaagaaggggaggatgatgaggacatcccttccaacgatacaaccacgcctattgcacagcaaggaccaatgactagagctcgagctcgtgaacttaattatcaggttcaaggttgttcttggcacggcaagaacagcaacaacgtggagtcggtgtaccggttgctaaggcgcagcacccctgtggcagttgtagtcggaccgccaacgtcgtatccttccccaaatcaaagtttatcctcctctcatcgaacgatcaggaacccccgttgctgcatcagtttgtcgagcaggcataatagaagcagtttgtatgtgttctacttcttactctctccattctcgagaacttgcatatcgaactccattatagtctga

SEQ ID NO: 14537 - DNA, 1062 bp, Oryza sativa
  Clone ID: TFbOSC400283j.C1.o30.fg
atggatgctgacaagtgggatgagatgaaggcgcaggcagctgcaacaatacgcttgagtctcttggattctgtcatgtaccaggtcatggatgaaaaaacgccgaaggaaatttgggacaagttggcaagcctgtatatgtccaagtcgctgacgagtaagttgtatctcaaacaacagtcgtatggtttgcaaatgcaagaggagtcagatcttaggaagcacgtggacatcttcaatcagttggttgtggatctaagaaagttagatgtgaaactggatgatgaagacaaggccataattcttctgtgctcgcttccaccgtcttatgaacacttgagaagatcaaagaaaaatgaggcaacggaggcttctcaggctgagagtttgctggtcaaggcaaagcatgattatgaagcgggggtgtcgaagagcaaggagaagggggcacggtgctataagtgtcatgagtttggacatataaggaggatttgcccgttactaaagaagaggaaaggtggcattgcaagtttagcagctcgtggtgatgattcagatagcagcagtcatgagattctcacagtgtctaacgagaagtctggagaagcgtggatgttagactcagctagttcctatcatgtgacatcgaagcgggagtggttctcttcatacaaatctggtgattttggtgttgtttacttgggcgatgacacgagttatcgtgttgttggagtgggcgatgtcaagttcaagatgtatgatggaaacgaggtgctactttcggatgtgagacacatgccgggactaaggaagagtttgatttcgcttgggagcctacatgagacgggttggttgtatcaggtggattctgataggaagaccatgaatatcatgaaggacggcaagactgttatgacttgtgagatgacgagctcatgtttgtacaagttacaagggagtgttgttgcaggtggagtcatggaagatgggtatgttggtgttgcggtacacgatcctgaaggcggcgagcctggcgtaggctcgtcgggcggctcggcatga

SEQ ID NO: 14538 - DNA, 5100 bp, Oryza sativa
  Clone ID: TFbOSC400488j.C1.o2.fg
atgtcatggcacagggccggtgtcctgctgctaggggctcagtcttgcctacctgtcccgggggttccggccgtaggtgggattgggtcggtactcttgtctatggctaggatgggttggagactatgtcacgtcttctgtccgtataccgtggtgatggccggcagcatcaaccgtggtggtctggacctgactggcttcgttttggagctgcggggcatgtgcgttgtcctggggtatccgcatggagtggactaccagggcaagcagctctcggagcaggagggtgacgatgcagagccccacgctgcttgggaggttactgcagtgatcctcactggctcacccgagaggacttcgttggcagtcaccgcgggtggagattccttctccgccgcttgccagaacgccgcactcctcaccatcggtactcttcaccagcgctacccggacgagttgcagcactcgccctaccgttaccaccctcgtcgcggaggagcccgcgactacgccaccttccgggatgctagctcggaggatgacgctaccatcatgcatctagcgcgcatggtggaggcgtacgacgcggctcgtatcgacttccatcagatggtgcgtcgcgggttggtcgagaacaacatgaagatcctggagctgcgtcaggagaatctgcagctgaagaaggacctagacgcagtggaggcgcagctgcgtcagctcaagatcgcccagggagaggtctgtcgccccaagcgtcgccgcgtctgccgcagccagaagatcaccgctcacaagagtacctccaggcccgagcttgttcgtcagtccctggcgtggacctgtttcgtcgagacccctcgtgccgagcccgcgcccgtggttcctcaggaggatggagcctccggcgttggcagcactgatgctcaccttccgtcctggcctatcgcagctgtagacaagcagttagtaggcttgcgcatggtgacgaccaggaaaaatgctgctaccggtgatggcagtcaccccgaaggcagcaaccacaaccaccagggcaacccaccttcacctcctccaccgcctccaccaccaccaccagacaccaacgccattctcacccaaatcctcgcccagcaggccaacatgatggctgctttcctccaccacatccaaaatccgccacaacataatgctccaccaccacccccacaacactctaaactcgccgagttcctccgcatccgtccacctaccttctctagctccaataaccccgtggatgcgttggattggttgcatgccgtggggaaaaagttagacaccgtgcagtgcagcgatgaggagaaagtcatcttcgccgcccaccaactgcaggggcccgcatctctatggtgggaccatttcaaggctacgcagccagaggggcaacctattacttgggcccgcttcaccgccgctttccgaagaacccatgtgcccgccggagtcatggcccttaagaaaagggaattccgagagttgaagcaaagcaaccgctccgtgatggagtatttgcatgagtttaacaacctggcccggtacgccccggaggatgttcgtgaagatgaggagaagcaagagaagttcttggcaggaatggaccctgagctgtccgtccgtctagtctccggggactatccggatttccaacgtctggtggacaagagcatccgcttggaagccaagcacaaggaactagagtcgcacaagcgtcgcttggcgagtttccgcaaccaacagggggctaaccaaagggtccgctacaccaatccctatccagggggatcctcctcacagcagcagcaacagcagcagcaacctcgctccgcgccccgacctcaattcgtggtgcgcgtcccacagccgcaacaacagcagagtcagcaagggacccgtgcgccccgtcctcctacgccagccgtgcagcctggtcaaggccgcagggacgttcaaggtccgcagtgtctgtgcttcaactgcttcgagcctgggcactttgcggataaatgcccaaagccgaggcgccagcaaggccaagcgcctccccgctccaacaacggtggtaaggatgtcattcggggtcgtgtgaaccacgtgacggccgaggacgtgctgacaactccagacgtcatcgttggtacgttcctcattcattccatccctgctaccattttgttcgactctggagcttcccactcgtttatatctatgccattcgtggggagaaatcaattgggggtagaaaggcttaggaaccctctgctcatcaccacccctggaggggttatgacagcaaagtattatagccctgccgtccctatagaaattcagggaattccttttccctcggatctgattctgctagacaccaagaacttggatgtgattcttggaatgaattggttggctcaattccaaggagtagtggattgcgcgagacgcactgtcactctgtaccgagggccagaacaaccggttgttttctttgcacccccaacctctgtcagaagttcagaacttcatcagataggattgtcagaaattcccatcgtcagggagttcggagatgtgtttccggaagaactacctggtatgccgcccaagcgagagattgagttccgaatagatcttgctccaggaaccactcctctgtacaagcgaccctaccgtatggcagcaaatgaactggccgaagtaaagaaacagctggaagagttgaaagaaaaggggtacatacgtccgagtacttccccatggggtgctcctgtgatttttgtagagaagaaagacaagacgaagaggatgtgcgtcgactacagagctctcaatgaagtcaccataaaaaacaagtaccctcttccccggatcgatgatctgttcgatcagctcaaaggtgccactgtattctccaagattgatctccgttccggatatcaccaattacgcatccgtgaagaagatattccgaagaccgcattcaccacgcgatacggactgtatgaattcacggaagaccatcagcaccatctccgtctggtgttggggaagttgcgggaacatcaattgtatgccaaacttagcaagtgtgagttctggttgtccgaagtcaaaatcttagggcacgtgatatctgctaaaggagttgctgtggaccccgaaacagtgactgccgtcaccgattggaagcaacccaagacagtcactcaaattcgcagtttcttaggtttggcaggatactactggaggttcatcgagaacttctccaaaatcgctcgacccatgacacagttgttgaagaaagaagagaaatttgatggtcatgtggtagcctatgcctcccgtcagcttcgaccgcatgaaggcaactaccctacccatgacttggaattagccgcagtggttcatgctctaaaaatctggcggcactatctcattgggaatcgctgtgaaatatataccgaccataagagtttgaaatacatcttcacccagtcggatctgaatcttcggcaaaggagatggttagaactcatcaaagactatgatgtgggaattcactatcatcctggtaaggccaacgtggttgccgacgctctaagtcgaaagagccattgcaacactcttaacgtccgtggcattccacccgaacttagtcaacagatggaagccttgaacctaagcatagttggtcgtggattcttggctgcgttggaagccaagcctaccttgctcgatcaaatccgcgaggctcagaagaatgatccggacatgcatggactcctcaagaatatgaaacaggataaagctgctggtttcacagaggatgaacacggaaccctatggaacggaaagcgggtatgcgttccagataacagagaacttaaacagctgatacttcagcgtgtcaaggcagagcaccaacgaccggccggacttctccaacctctccaagtaccagaatggaaatgggatgaaattgggatggacttcatcaccggacttccaaaaacccaaggtggatatgattctatatgggtagttgtggatcgattaaccaaggtagctcgatttattcctgtgaagaccacctatggagggaacaaactagccgagctctacttcgctaggatcgtgagtctccatggcgttcccaagaaaattgtatctgataggggaagccaattcacctctcacttttggaagaagctccaagaagagctgggtacccgattaaatttcagcaccacgtatcacctgcagacagatggacagaccgagagtctaaatcagatcctaaaagatatgcttcgcgcatgtgtcctagatttcgggaagacctgggataagagtctcccctatgccgagttctcctacaataacagctaccaagccagcatacaaatggcaccttatgaagcgttgtatgggcgcaaatgccggacaccgctattgtgggaccaagttggggaaagccaagtgttcgggactgatatcctgagagaagctgaagctaaagtcagaatcattcgggataatctaaaggtggcacagtcccggcagaaaagttatgcagataaccaacgccgtaatcaggaattcgcagtggacgattttgtgtaccttcgggtcatgccattgcggggtgtacacaggtttcagacgaaagggaagctcgcacctcggttcgtgggtcctttccgtatcattgctcggcgcggagaagtcgcttaccagttggagctggccgcctccttgggcaacgtgcatgatgtgttccatgtgtcgcaactcaagaaatgccttcgagtgccgtccgagcaggccgactcagagcagattgaagttcgcgaagacttgacctacgtggagaggccagtgaaaatcctggacaccatggagcgcaggaccaggaaccggataatccgtttttgcaaggtccaatggagcaaccacgccgaggaagaagctacttgggagcgtgaagacgagctgaaggcagcccatcccaatctcttcgccagttcttccgaatctcggggtcgagattccgtttatggggggtag

SEQ ID NO: 14539 - DNA, 3513 bp, Oryza sativa
  Clone ID: TFbOSC400798j.C1.o4.fg
atgactagagctcgagctcgtgaacttaattatcaggacattctagcctacaaagaatataattcaattaatcgtttgtttcatcttgcttgtaaagctgaaagggaagtacagggacgaagagctagcttcaggactaacatttctgcaggttgtgctagctcttggacatcttccaacgctgctgcaccgtcaactcgagcagcagcaccatcgtcctcaagcaacaagctgcgtccctctacaacaaactctacaccacgcccgagtgaaccaacaagaggggttgctgctacaccttccaagagctcatcatcagtagcttcatcaggaaggacaagagatattcagtgcctacgctgcaagggctatggtcacgtgcgcaaggactgcccaagcactcgtgtaatgatcgtgagagctgatggtgggtactcctccgctagtgatttagatgaagaaacctatgctttgcttgcaactaacaatgcaggggaaggtgacgcgccccaccaagatgaggaacacattagggctgaagctgcagagcactatgagagcctcgtggtgcagcgagtgctaagcgcacaaatggaaagggctgaacagaatcagcgccacaccttgtttcaaaccaagtgtgtgatcaaggaacgctcttgccgcgtgatcatagatggaggaagctgcaataatttggctagtgctgaaatggtggagaaacttgcattgagcacacagccacatccgcagccctactatattcaatggcttaatagcagcggcaaggagcatactaggagtgagcatcttattgcggctaatgaacttgagaagcataagaagaaacccaccaactctgttcaaaataataaaaatgagattaagctgaagggatcttgtttcattgcaacaaaatcagatttggatgaagttgacactgacactgttgtttgctatgctttggtttgcaaagaaaccttatttccaattgaggatactcctatttctttgcctcctccggtcactaaccttttgcaggagtatgctgatattttcccaaaggaggttccaccggggctgccaccaattcgagggattgagcaccaaattgacctcattcctggggcctctctgccaaaccgtgcgccatacaggaccaacccggaggaaacaaaggagattcagcgtcaaatgcaagagttactcgacaaggggtatgtacgtgagtctcttagtccttgttctgtccccgtgcttttagttcctaagaaatatggctcatggcgcatgtgtgtggattgtagagcaattaacaacatcacaatcagatatcgtcatcctatccctaggctagatgatatgcttgatgaattgagtggttcacttgtgttctctaaaattgatttgcgtagtggttaccaccagattcgcatgaagttaggagatgaatggaaaacagcttttaaaactaaattcggcctatatgagtggttagtcatgccctttggtctcactaatgcacccagtactttcatgagattaatgaatgaagttttacgtgctttcattggcagatttgtggtggtatattttgatgacattctcatatatagcagatcaatagaggatcatcatggtcatttgcgtgctgtttttgatgctctacgagatgcacgtttatttggtaaccttgagaagtgcacattttgcacagatcgagtctcttttcttggctatgttgtgactccgcagggaattgaagtagatcaagccaaggttgaagccatacatagctggccggttccaacaacgatcacacaagtgagaagctttctaggacttgctgggttctaccgctgctttgtgaaggattttagcaccattgcagccccattacatgagcttaccaagagaaatgtcacattcacttgggctgcaacacaaaggaatgcattcgacactttgaaagataagttaacacacgctcctttactccaacttcctgatttcaacaaaactttagagcttgaatgtgatgctagtgggattggattgggtggtgtgttgttacaagaaggcaaacctgtagcatatttcagcgagaaattgagtgggcctagtttgaattattctacttatgataaggaattgtttgctctagtgcgaacattggaaacatggcagcattatttatggcccaaagaatttgtaatacactctgatcatgaatctttgaaacacattcgaagtcaagcaaaacttaaccgtaggcatgctaaatgggttgaatttattgaatcttttccatatgtcatcaaacataagaagggaaaagaaaatgtcattgctgatgctttgtctagacgttacgcaatgctatcccaacttgacttcaaaatttttggcttagaaacaataaaagagcaatatgcgcacgatgatgattttaaagatgtgttgttgaattgcaaggagggaaggacttggaacaaattcgttctcaccaatgggtttgtgtttagagctaataagttatgcattccagctagctccgtgcgtatgctattattgcaggaagcgcatggtggagggctgatgggacactttggtgtgaagaagacggaggatatccttgctgatcatttcttttggcctaagatgaggagagacgtggagagggctgttttgaaaaagaatattaaaatgtgggaagaatgtttgcctcatgttgagtttgcttataatcgttcacaacattctactactaagaagtgcccttttgagattgtttatggccttctaccccgtgctccaattgatcttttgcccctcccaacttcagagagagtgaactttgatgcaaaatatcgtgctgaattgatgttaaaactgcatgagaccactaaggagaacatagagcgcatgaatattaagtataaacttgctgggagcaaaggaaagaaacatgttgcttttgaacctggtgatttggtttggttgcatttgagaaaggataggttccctaatttgagaaaatctaagttgctacctagagctgatggtcctttcaaagtgctacaaaagattaatgacaatgcatacaagctggagctacctgccgattttggggttagccccacgtttaacattgcagatttaaagccatatttgggagaagaagatgagttagagtcgaggacgactcaaatgcaagaaggggaggatgatgaggacatcccttccaacgatacaaccacgcctattgcacagcaaggaccaatgactagagctcgagctcgtgaacttaattatcaggttcaaggttgttcttggcacggcaagaacagcaacaacgtggagtcggtgtaccggttgctaaggcgcagcacccctgtggtagttgtagtcggaccgccaacgtcgtatccttccccaaatcgtagtttatcctcctctcatcgaaagatcgggaacccccgttgctgcatcaccgcgcgaatcacgaagtga

SEQ ID NO: 14540 - DNA, 3840 bp, Oryza sativa
  Clone ID: TFbOSC401314j.C1.o4.fg
atgacaggaggatcgggggagcaccctcaacattcaccacgtacgaggggcatcatacaacattttgagcgccaagtgagggagcatgcagaaggccttgatgaggatgttagggtcgccaatgatcgccttggtcaattggaggctgctcaaattgacaccaactccaagctttcctcattggagaggtcccttgtggctgtgaacacttctcttgcaggtatcttgaatacgttggagagaatgggccaagatggtcatgatggatcggctaggcacaaccacaatggccatgatactaatagcagcatcgcagcaagggaagaactggagtacgctgctgacaccgagcatgatgaggagttacttggtcgtccacaaagacaacagcgccggcagcgccatggcatgggcgctccaccacggcgggaggtacgtgataatgatgattctttaggcaagatcaagtttaccattccttgctttgatggaaaatatgaccctgatgcatatcttacttgggagttagccattgatcagaaatttgcttgccatgattttcctgagaataaacgtgttagggctgctactagtgagtttactgattttgcatccatttggtggagtgaatttgttcgttccaatccaaataacactccccaaacctgggatgcaatgaaaagagtcatgcgagctagatttgttccttcatatcatgcacgtgatttgctgcacaaattgcagcaacttagacagggaaacaaatctgtagaggagtattatcaagctttgcaaacaggaatgcttcgttgtggattggtagaaaatgatgatgctggtcgtgctagctcttggacaccttccaacactgctgcaccgtcaactcgagcagcagcaccatcgtcctcaagcaacaagctgcgtccctctacaacaaactctacaccatgcccgagtgaaccaacaagaggggttgctgctacaccttccaagagctcatcatcagtagcatcattaggaaggacaagagatattcagtgcctacgctgcaagggctatggtcacgtgcgcaaggactgcccaagcactcgtgtaatgatcgtgagagctgatggtgggtactcctccgctagtgatttagatgaagaaacctatgctttgcttgcaactaacaatacaggggaaggtgacgcgccccaccaagatgaggaacacattggggctgaagctgcagagcactatgagagcctcgtggtgcagcgagtgctaagcgcacaaatggaaagggctgaacagaatcagcgccacaccttgtttcaaaccaagtgtgtgatcaaggaacgctcttgccgcgtgatcatatatggaggaagctgcaataatttggctagtgctgaaatggtggagaaacttgcattgagcacacagccacatccgcagccctactatattcaatggcttaatagcagcggcaaggagtatgctgatattttctcaaaggaggttccaccggggctgccaccaattcgagggattgagcaccaaattgacctcattcctggggcctctctgccaaaccgtgcgccatacaggaccaacccggaggaaacaaaggagattcagcgtcaagtgcaagagttactcgacaaggggtatgtgcgtgagtctcttagtccttgtgctgtccccgtgcttttagttcctaagaaagatggctcatggcgcatgtgtgtggattgtagagcaattaacaacatcacaatcagatatcgtcatcctatacctaggctagatgatatgcttgatgaattgagtggttcacttgtgttctccaaaattgatttgcgtagtggttaccaccagattcgcatgaagttaggagatgaatggaaaacagcttttaaaactaaattcagcctatatgagtggttagtcatgccctttggtctcactaatgcacccagtactttcatgagattaatgaatgaagttttacgtgcttttattggcagatttgtggtggtatattttgatggcattctcatatatagcagatcaatagaggatcatcatggtcatttgcgtgctgtttttgatgctctacgagatgcacgtttatttggtaaccttgagaagtgcacattttgcacagatcgagtctcttttcttggctatgttgtgactccgcagggaattgaagtagatcaggccaaggttgaagccatacatagctggccggttccaacaacgatcacacaagtgagaagctttctaggacttgctgggttctaccgccgctttgtgaaggattttagcaccattgcagccccactacatgagcttaccaagagaaatgtcacattcacttgggctgcagcacaaaggaatgcattcgacactttgaaagataagttaacacacgctcctttactccaacttcctgatttcaacaaaacttttgagcttgaatgtgatgctagtggaattggattgggtggtgtgttgttacaagaagacaaacctgtagcatatttcagcgagaaattgagtgggcctagtttgaattattctacttatgataaggaattgtttgctctagtgcgaacattggaaacatggcagcattatttatggcccaaagaatttgttatacactctgatcatgaatctttgaaacacattcgaagtcaagcaaaacttaaccgtaggcatgctaaatgggttgaatttattgaatcttttccatatgtcatcaaacataagaagggaaaagaaaatgtcattgctaatgctttgtctagacgttacacaatgctatcccaacttgacttcaaaatttttggcttagaaacaataaaagagcaatatgcgcacgatgatgattttaaagatgtgttgttgaattgcaaggagggaaggacttggaacaaattcgttctcaccaatgggtttgtgtttagagctaataagttatgcattccagctagctccgtgcgtatgctattattgcaggaagcgcatggtggagggctgatgggacactttggtgtgaagaagacggaggatatccttgctaatcatttcttttggcccaagatgaggagagacgtggagagggctgttttgaaaaagaatattaaaatgtgggaagaatgtttgcctcatgttgagttttcttataaccgttcacaacattctactactaagaagtgcccttttgagattgtttatggccttctaccccgtgctccaattgatcttttgcccctcccaacttcagaaagagtgaactttgatgcaaaacatcgcgctgaattgatgttaaaactgcatgagaccactaaggagaacatagagcgcatgaatattaagtataaacttgctgggagcaaaggaaagaaacatgttgcttttgaacctggtaatttggtttggttgcatttgagaaaagataggttccctaatttgagaaaatctaagttgctacctagagctgatggtcctttcaaagtgctacaaaagattaatgacaatgcatacaagcttgagctacctgccgattttggggttagccccacgtttaacattgcagatttaaagccatatttgggagaagaagatgagttagagtcgaggacgactcaaatgcaagaaggggaggatgatgaggacatcccttccaacgatacaaccacgcctattgcacagcaaggaccaatgactaaagctcgagctcgtgaacttaattatcaggttcaaggttgttcttggcacggcaagaacagcaacaacgtggagtcggtgtaccggttgctaaggcgcagcacccctgtgaggtag

SEQ ID NO: 14541 - DNA, 2346 bp, Oryza sativa
  Clone ID: TFbOSC401783j.C1.o2.gm
atggcgttggagatgcccggcaacacaacaaacacgatgacgacccgagaacgactagatctggccataaaaaccccaaataaacaggcacccaagggggctgagggcttgacggccaacgccctacccctcccagatttgtcagccgacgccctccccctcccagctccggtggcagcgggcttgggagaggccggtcatgggtgggagcggcatggcgggcgacagtggcggggggttgagggcaacgacggctgtggacggatccggtggtggggagggtactcggtagtggctggggaactccggatccaccgtgtgggctctggcgactccaacaacaacgatgggagggggagggtctggtggcagtgtgatgaggacatcccttccaacgatacaaccacgcctattgcacagcaaggaccaatgactagagctcgagctcgtgaacttaattatcaggttcaaggttgttcttggcacggcaagaacagcaataacgtggagtcggtgtaccggttgctaaggcgcagcacccctgtgcccaaaagaaaaaccactaaaataggaggatcgggggagcaccctcaacattcaccacgtacgaggggcatcatacaacattttgagcgccaagtgagggagcatgctgaaggccttgatgaggatgttagggtcgccaatgatcgccttggtcaattggaggctgctcaaattgacaccaactccaagctttcctcattggagaggtcccttgtggctcaagggaagaactggagtacgctgctgacactgagcatgatgaggaggtacttggtcgtccacaaagacaactgcgccggcagcgccatggcatgggcgctccaccacggcgggagcagcaccatcgtcctcaagcaacaagctgcgtccctctacaacaaactctacaccatgcccgagacaagagatattcagtgcctacgctgcaagggctatggtcacgtgcgcaaggactgcccaagcactcgtgtaatgattgtgagagctgatggtgggtactcctccgctagtgatttagatgaagaaacctatgctttgcttgcaactaacaatgcaggggaaggtgacgcgccccaccaagatgaggaacacattggggctgaagctgcagagcactatgagagcctcgtggtgcagcgagtgctaagcgcacaaatggaaagggctgaacagaatcagcgccacaccttgtttcaaaccaagtgtgtgatcaaggaacgctcttgccgcgtgatcatagatggaggaagctgcaataatttggctagtgctgaaatggtggaaaaacttgcattgagcacacagccacatccacagccctactatattcaatggcttaatagcagcggcaaggagtatgctgatattttcccaaaggaggttccaccggggctgccaccaattcgagggattgagcaccaaattgacctcattcctggggcctctctgccaaaccgtgcgccatacaggaccaacccggaggaaacaaaggagattcagcgtcaagtgcaagagttactcgacaaggggtatgaagcgcatggtggagggctgatgggacactttggtgtgaagaagacggaggatatccttgctgatcatttcttttggcagagagtgaactttgatgcaaaatatcgcgctgaattgatgttaaaactgcatgagaccactaaggagaacatagagcacatgaatattaagtataaacttgctgggagcaaaggaaagaaacatgttgcttttgaacctggtgatttggtttggttgcatttgagaaaggataggttccctaatttgagaaaatctaagttgctacctagagctgatggtcctttcaaagtgctacaaaagattaatgacaatgcatacaagcttgagctacctgccgattttggggttcaaggttgttcttggcacggcaagaacagcaacaacgtggagtcggtgtaccggttgctaaggcgcagcacccctgtgtcagacaacttaagggaccgcatcaccgcggcgagcaccgcgaacaccaggcaactgatcatcgtcttctccgcgtccgacgtctgggacgcgcaccaccaccagtgtcaatattcattctcgcaggaacatgaattaatgccgccggcgtcgacgccgaggcaatgctgctcaaggctgccgacggccgacctcatctctggacatattgtccacgctgacctcttaactccaagcatcacaatcggtcatgctgttcttccacgccgcgcaggaagcatgcggatgacgtggacggaccaaaaagttagagatggatga

SEQ ID NO: 14542 - DNA, 1171 bp, Oryza sativa
  Clone ID: TFbOSC422885j.C1.o2.np
agcactcgaacagcacccctgaacccaaccttcttatggttatggggcaacgcgaccagcggcaatcaagcagtcagactggcggcggcgagcagtgacaagtagagaggcggtggtcttatcggccagacaacacctgtcagaccagcggcataggagcggtcagatcggtgcgcacatggtggtcagaccgcgttgcactgacttcatcaacaagggtaacttctatgtccgctaaaatttatgacctggccacatgttttttatggagtcaattttccttattggtgcgaaaagaaatcttatattatgtctgagagttatgatatttggcaaaaagttgcaaatccttataaaattcctgcttagattaatactgttgttcttaagactgattttaaaaacaattgcaaagctcgcaatattttgcttaatggaattccttgttcggattttgatcgtgtttctcatctgcaaaccgcgcatgagatttggaagccattatctgattttcaccaagggacttctaatatcaatgaagtgcgcaaagatctttttaaaaggattacgtaaaatttgagatgcaacctgaagagactttggatgattatcttgcacgctttaacaaagttttgagtaatcttagatctgttgattcctcttatgatacttattacacacaatctgagatttctcgacactttttgaatggtcttgatatgtcgatctgggagatgaaagtgacttcaatttaggaatctgttaacatgtccgctttgactttggattctctttacaccaagcttaaaactcatgaggtgaatattctttcccgcaagattgatccttaaattagtgccttgatctcttctgaggacttggtttaggttactaacaaactttctcagggttttgaaaaagtcaagaataggaagcgaggaggatctgttcaatgctttcagtgtggcaagttaaatcacatcaagttcaattgtcctaaccgtcaagaagacaagtcttggaggagaaagtgaacaagtatgacaagtagtaggtgtgcaagtagtttcgcaagcaaaggttaattcaagtattgatagaagcttttgatagtgtagtatcagtggttgtagttgtgtgtcatatagtaggtaaaacaggggttgtaaaa

SEQ ID NO: 14543 - DNA, 4179 bp, Oryza sativa
  Clone ID: TFbOSC900141j.C1.o1.fg
atgacaggaggatcgggggagcaccctcaacattcaccacgtacgaggggcatcatacaacattttgagcgccaagtgagggagcatgctgaaggccttgatgaggatgttagggtcgccaatgatcgccttggtcaattggaggctgctcaaattgacaccaactccaagctttcctcattggagaggtcccttgtggctgtgaacacttctcttgcaggtatcttgaatacgttggagagaatgggccaagatggtcatgatggatcggctaggcgcaaccacaatggccatgatgctaatagcagcatcgcagcaagggaagaactggagtacgctgctgacactgagcatgatgaggaggtacttggtcgtccacaaagacaacagcgccggcagcgccatggcatgggcgctccaccacggcgggaggtacgtgataatgatgattctttaggcaagatcaagtttaccattccttgctttgatggaaaatatgaccctgatgcatatcttacttgggagttagccattgatcagaaatttgcttgccatgattttcctgagaataaacgtgttagggctgctactagtgagttcactgattttgcatccatttggtggagtgaatttgttcgttccaatccaaataacactccccaaacctgggatgcaatgaaaagagtcatgcgagctagatttgttccttcatatcatgcacgtgatttgctgcacaaattgcaacaacttagacagggaaacaaatctgtagaggagtattatcaagctttgcaaataggaatgcttcgttgtggattggtagaaaatgatgatgctggtatggctagattcatgggtgagctgaaccgagaaattcaggacattctagcctacaaagaatataattcaattaatcgtttgtttcatcttgcttgtaaagctgaaagggaagtacagggacgaagagctagcttcaggactaacatttctgcagcagcaccatcgtcctcaagcaacaagctgcgtccctctacaacaaactctacaccatgcccgagtgaaccaacaagaggggttgctgctacaccttccaagagctcatcatcagtagcttcattaggaaggacaagagatattcagtgcctacgctgcaagggctatggtcacgtgcgcaaggactgcccaagcactcgtgtaatgatcgtgagagctgatggtgggtactcctccgctagtgatttagatgaagaaacctacgctttgcttgcaactaacaatgcaggggaaggtgacgcgccccaccaagatgaggaacacattaaagctgaagctgcagagcactatgagagcctcgtggtgcagcgagtgctaagcgcacaaatggaaagggctgaacagaatcagcgccacaccttgtttcaaaccaagtgtgtgatcaaggaacgctcttgccgcgtgatcatagatggaggaagctgcaataatttggctagtgctgaaatggtggagaaacttgcattgagcacacagccacatccgcagccctactatattcaatggcttaatagcagcggcaaggagcatactaggagtgagcatcttattgcggctaatgaacttgagaagcataagaagaaacccaccaactctgttcaaaataataaaaatgagattaagctgaagggatcttgtttcattgcaacaaaatcagatttggatgaagttgacactgacactgttgtttgctatgctttggtttgcaaagaaaccttatttccaattgaggatactcctatttctttgcctcctccggtcactaaccttttgcaggagtatgctgatattttcccaaaggaggttccaccggggctgccaccaattcgagggattgagcaccaaattgacctcattcctggggcctctctgccaaaccgtgcgccatacaggaccaacccggaggaaacaaaggagattcagcgtcaagtgcaagagttactcgacaaggggtatgtacgtgagtctcttagtccttgttctgtccccgtgcttttagttcctaagaaagatggctcatggcgcatgtgtgtggattgtagagcaattaacaacatcacaatcagatatcgtcatcctatccctaggctagatgatatgcttgatgaattgagtggttcacttgtgttctctaaaattgatttgtgtagtggttaccaccagattcgcatgaagttaggagatgaatggaaaacagcttttaaaactaaattcggcctatatgagtggttagtcatgccctttggtctcactaatgcacccagtactttcatgagattaatgaatgaagttttacgtgctttcattggaagatttgtggtggtatattttgatgacattctcatatatagcagatcaatagaggatcatcatggtcatttgcgtgctgtttttgatgctctacgagatgcacgtttatttggtaaccttgagaagtgcacattttgcacagatcgagtctcttttcttggctatgttgtgactccgcagggaattgaagtagatcaagccaaggttgaagccatacatagctggccggttccaacaacgatcacacaagtgagaagctttctaggacttgctgggttctaccgcctctttgtgaaggattttagcaccattgcagccccattacatgagcttaccaagagaaatgtcacattcacttgggctgcagcacaaaggaatgcattcgacactttgaaagataagttaacacacgctcctttactccaacttcctgatttcaacaaaacttttgagcttgaatgtgatgctagtgggattggattgggtggtgtgttgttacaagaaggcaaacctgtagcatatttcagcgagaaattgagtggacctagtttgaattattctacttatgataagcaattgtttgctctagtgcgaacattggaaacatggcagcattatttatggcccaaagaatttgttatacactctgatcatgaatctttgaaacacattcgaagtcaagcaaaacttaaccgtaggcatgctaaatgggttgaatttattgaatcttttccatatgtcatcaaacataagaagggaaaagaaaatgtcattgttgatgctttgtctagacgttacgcaatgctatcccaacttgacttcaaaatttttggcttagaaacaataaaagagcaatatgcgcacgatgatgattttaaagatgaagcgcatggtggagggctgatgggacactttggtgtgaagaagacggaggatatccttgctgatcatttgttttggcctaagatgaggagagacgtggagaggttcgttgctcgctgcacaacatgccaaaaagctaagtcacgccttaaccctcatggtttgtatatgcctttgcctgttcctagtgtgccttgggaggatatttctatggactttgttttagggctgcctagaacaaagaaggggagggacagtatctttgttgttgtagatagattttctaagatggcgcatttcataccttgtcataagagtgatgatgctacacatgttgctgatttgttctttcgtgagattgttcgcttgcatggagtgccaaacaccatagtttctgatcgcgatacaaaattccttagtcatttttggagaaccttgtgggctaagttggggactaaacttttattttctactacatgtcacccccaaactgatggacaaactgaggtggtgaatagaacagtatctacaatgcttagggctgttttgaaaaagaatattaaaatgtgggaagaatgtttgcctcatgttgagtttgcttataatcgttcacaacattctactactaagaagtgcccttttgagattgtttatggccttctaccccgtgctccaattgatcttttgcccctcccaactttagagagagtgaactttgatgcaaaatatcgcgctgaattgatgttaaaactgcatgagaccactaaggagaacatagagcgcatgaatattaagtataaacttgctgggagcaaaggaaagaaacatgttgcttttgaacctggtgatttggtttggttgcatttgagaaaggataggttccctaatttgagaaaatctaagttgccacctagagctgatggtcctttccaa

SEQ ID NO: 14544 - DNA, 4443 bp, Oryza sativa
  Clone ID: TFbOSC900215j.C1.o10.np
atggcggccggacctcccgcgccggtttcctcccttccccggccaccctctctcgaccgggctctatttaaaccctccccgcacctcctccgtccgtttctgcctctcgccgcccttcctcctcgccggaatcgagctcgcgccgtcgctctctctctccgccgtcaccgtcaagctccggtccgccgccgtcgtcgccccggaccacctcccacctcggcgccgcctccttcggattcgccgcatcctcgccgacctcgtccacccctccgtttcgctcgccgaccgccggaacgccgtcgaccccatcgacccgagccgcgccgccgccttcctccgctccggccgcctttttcgtcgtcgccgtcgacctagggtgagccgtggaccgctgcttcttttcccacttcccttcccctctctcggccgccgctccgccgtgcctatggccgctgccggcgaccatagaggcgcgggcgtcgcctcccgccggctgcgccggctgggccgccctcgggcgcgccgggtggctgccgcgtggggcccggccgtcagccgcccgcgcccttaggtgcggctgacgcgtgccggtgtgagcccgggtgcacccggtccaccgtggacccacctcggccatataaggaccggtcttcgggcctctgttgcaaagcactaccgtacttccacatgtctagtggggcaaatgaaggctacacgagctgcggcctggtagtcgagatgtcatggcacagggccggtgtcctgctgctaggggcttagtcctgcctacctgtcccggaggtttcggccgtaggtggggttgggtcaatgtacacctctgatcagagtataatctattcgaatagccgcgccctcggttatgggcaagccgagcaatgtacccaaatggccggcagcatcaaccgtcgtggtctggacctgactggcttcgttttggagctgcggggcatgtgcgttgtcctggggtatccgcatggagtggactaccagggcaagcggctcccggagcaggagggtgacgatgcagagccccacgctgcttgggagattactgcagtgatcctcactggctcacccgagaggacttcgttggtagtcaccgtgggtggagattccttctctgccgcttgccagaacgccgcactcctcgccatcggcactctccaccagtgctacccgaacgagttgcagcactcgccctaccgctaccacccttgccgcggaggagcccgcgactacgccaccttccgggatgctagctcggaggatgacgctaccatcatgcacctggcgcgcatggtggaggcgtacgacgcggcccatatcgacttccatcagatggtgcgtcgtgggttggtcgagaacaacatgaagatcctggagctgcgtcaggagaatctgcagctgaagaaggacctagacgcagtggacgcgcagctgcgtcagctcaagatcgcccagggagaggtctgtcgccccaagcgtcgccgcgtctgccgcagcctgaagatcaccgcccgcaagagtacctccaggcccgagcttgttcgtcagtccctggcgtggacctgcttcgtcgagacccctcgtgctgagcccgcgcccgtggttcctcaggaggatggagcctccggcgttggcagcacggaggatgtgctgctgctcaccttccatggtgacaaccaggagaagtgctgctaccggtgaaggcagtcaccccgaaggcagcaaccacaacaaccatggcagcccacctccacctcctcccccgcctccaccaccaccaccagacaccaactccatcctcacccaaatcctcgcctagcaggccaacatgatggctgctttcctccaccacatccaaaatccgccacaacataatgctccaccaccacccccacaacactctaaactcgccgagttcctccgcatccgtccacctaccttctctagctccaataaccccgtggacgcgttggattggttgcatgccgtggggaaaaagttagacaccgtgcagtgtagcgatgaggagtaagtcatcttcgccgcccaccaactgcaggggcccgcatctctatggtgggaccatttccaggctatgcagccagaggggcagcctattacttgggcccgcttcaccgccgctttccggagaacccatgtgcccgccggagtcatggcccttaagaaaagggaattccgagagttgaagcaaggcaaccgctccgtgatggagtatttgcatgagtttaacaacctggcccggtacgccctggaggatgttcgtgaagatgaggagaagcaagagaagttcttggcaggaatggaccctgagctgtccgtgcgtctggtctccggggactatctggatttccaacgtctggtggacaagagcatccgcttggaagccaagcacaaggaactggagtcgcacaagcgtcgcttggcgaatttccgcaaccaacagggggctaaccaaaaggtccgctacaccgctacaccaatccctatccagggagatcctcctcgcagcagcaacagcagcagcaacctcgctccgcgccccgacctcaattcgtggtgcgcgtcccacagccgcagcaacagcagagtcagcaagggactcgtgcgccccgtcctcctacgccagccgtgcagcctggtcaaggccgcagggacgttcaaggtcagcagtgtctgtgcttcaactgcttcgagcctgggcactttgcggataaatgcccaaagccgaggtgccagcaaggccaagcgcctccccgctccaaccacggtggtaaggatgtcatacggggtcgtgtgaaccacgtgatggccgaggacgtgctgacaactccagacgtcatcgttggtacgttcctcattcattccatccctgctaccattttgttcgactctggagcttcccacttgtttatatttgtgccattcgtggggagaaatcagttgggggtagaaaggcttaggaaccctctgctcatcaccacccctggaggggttatgacagcaaagtattatagccctgccgttcctatagaaattcagggaattcctttttcctcggatctgattcttctagacaccaagaacttggatgtgatccttgggatgaattggttggctcaattccaaggagtagtggattgtgcaagacgcactgtcactctgtaccgagggccggaacaaccggttgttttctttgcacccccaacctctgtcggtagttcagaacttcatcagataagactgtcggaaatccccatcatcagagagttcggagacgtgtttccggaagaactacccggtatgccgcccaagcgagagattgagttccggatagatcttgctctaggaaccactcctctgtacaagcgaccctaccgtatggcagcaaatgaactggccgaagtcaagaaacagttggaagagttgaaagaaaaggggtatatacggccgagtacttccccctggggtgctcctgtgatttttgtggagaagaaagacaagacgaagaggatgtgcgttgattacagagctctcaatgaagttactatcaaaaacaagtaccctcttccccggatcgatgatctgttcgatcagcttaaaggtgccacggtattctccaagattgatcttcgttccggatatcaccagttgcgcatccgtgaagaagatatcccgaagaccgcattcacctcgcgatacggactatatgaattcacggtgatgtcgttcggtttaaccaatgctcctgccttcttcatgaacttaatgaacaaagtgttcatggaatacttggatatgtttgttgtggttttcattgacgacattctggtgtactcacaatcagaggaagaccatcagcaccatctccgtctggtgttgggaaagttgcgggaacatcaattgtatgccaaacttagcaagtgtgagttctggttgtccgaagtcaaattcttagggcacgtgatatctgctaaaggagttgctgtggaccccgaaacagtgaccgccgtcactgattggaagcaacctaagacagtcactcaaattcgcagttttttgggtttggcaggatactaccggaggttcatcgagaacttctccaaaatcgctcgacccatgacacagttgttgaagaaagaagagaaatttgtgtggagcccgcaatgcgagaaggcattccaaactctcaaggaaaggctggtttcctcgccggttttaatcttaccggatactcgcaaggacttcatgttgtactgtgacgcttcgcgccaaggattgggaatattcatatcacatggacattggaatggttggattattgtggaattggattcacaccggggaaatattccccgtgattccctccctctttccccccatttttccctccctctc

SEQ ID NO: 14545 - DNA, 4404 bp, Oryza sativa
  Clone ID: TFbOSC9454j.C1.o21.fg
atgacaggaggatcgggggagcaccctcaacattcaccacgtacgaggggcatcatacaacattttgagcgccaagtgagggagcatgctgaaggccttgatgaggatgttagggtcgccaatgatcgccttggtcaattggaggctgctcaaattgacaccaactccaagctttcctcattggagaggtcccttgtggctgtgaacacttctcttgcaggtatcttgaatacgttggagagaatgggccaagatggtcatgatggatcggctaggcgcaaccacaatggccatgatgctaatagcagcatcgcagcaagggaagaactggagtatgctgctgacactgagcatgatgaggaggtacttggtcgtccacaaagacaacagcgccggcagcgccatggcatgggcgctccaccacggcgggaggtacgtgataatgatgattctttaggcaagatcaagtttaccattccttgctttgatggaaaatatgaccctgatgcatatcttacttgggagttagccattgatcagaaatttgcttgccatgattttcctgagaataaacgtgttagggctgctactagaatgcttcgttgtggattggtagaaaatgatgatgctggtatggctagattcatgggtgggctgaaccgagaaattcaggacattctagcctacaaagaatataattcaattaatcgtttgtttcatcttgcttgtaaagctgaaagggaagtacagggacgaagagctagcttcaggactaacatttctgcaggtcgtgctagctcttggacatcttctaacgctgctgcaccgtcaactcgagcagcagcaccatcgtcctcaagcaacaagctgcgtccctctacaacaaactctacaccatgcccgagtgaaccaacaagaggggttgctgctacaccttccaagagctcatcatcagtagcttcatcaggaagaacaagagatattcagtgcctacgctgcaagggctatggtcacgtgcgcaaggactgcccaagcactcgtgtaatgattgtgagagctgatggtgggtactcctccgctagtgatttagatgaagaaacctatgctttgcttgcaactaacaatgcaggggaaggtgacgcgccccaccaagatgaggaacacattggggctgaagctgcagagcactatgagagcctcatggtgcagcgagtgctaagcgcacaaatggaaagggctgaacagaatcagcgccacaccttgtttcaaaccaagtgtgtgatcaaggaacgctcttgccgcgtgatcatagatggaggaagctgcaataatttggctagtgctgaaatggtggagaaacttgcattgagcacacagccacatccacagccctactatattcaatggcttaatagcagcggcaaggaacgtactaggagtgagcatcttattgcggctaatgaacttgagaagcataagaagaaacccaccaactctgttcaaaataataaaaatgagattaagctgaagggatcttgtttcattgcaacaaaatcagatttggatgaagttgacactgacactgttgtttgctatgctttggtttgcaaagaaaccttatttccaattgaggatactcctatttctttgcctcctccggtcactaaccttttgcaggagtatgctgatattttcccaaaggaggttctaccggggctgcccccaattcgagggattgagcaccaaattgacctcattcctggggcctctctaccaaaccgtgcgccatacaggaccaacccggaggaaacaaaggagattcagcgtcaagtgcaagagttactcgataagggatttgtggtggtatattttgatgacattctcatatatagcagatcaatagaggatcatcatggtcatttgcgtgttgtttttgatgctctacgagatgcacgtttatttggtaaccttgagaagtgcacattttgcacagatcgagtctcttttcttggctatgttgtgactccacagggaattgaagtagttcaagccaaggttgaagccatacatagctggccggttccaacaacgatcacacaagtgagaagctttctaggacttgctgggttctaccgccgctttgtgaaggattttagcaccattgcagccccattacatgagcttaccaagagaaatgtcacattcacttgggctgcagcacaaaggaatgcattcgacactttgaaagataagttaacacacgctcctttactccaacttcctgatttcaacaaaacttttgagcttgaatgtgatgctagtgggattggattgggtggtgtgttgttacaagaaggcaaacctgtagcatatttcagcgagaaattgagtgggcctagtttgaattattctacttatgataaggaattgtttgctctagtgcgaacattggaaacatggcagcattatttatggcccaaagaatttgttatacactctgatcatgaatctttgaaacacattcgaagtcaagcaaaacttaaccgtaggcatgctaaatgggttgaatttattgaatcttttccatatgtcatcaaacataagaagggaaaagaaaatgtcattgctgatgctttgtctagacgttacgcaatgctatcccaacttgacttcaaaatttttggcttagaaacaataaaagagcaatatgcgcacgatgatgattttaaagatgtgttgttgaattgcaaggagggaaggacttggaacaaattcgttctcaccaatgggtttgtgtttagagctaataagttatgcattccagctagctccgtgcgtatgctattattgcaggaagcgcatggtggagggctgatgggacactttggtgtgaagaagacggaggatatccttgctgatcatttcttttggcctaagatgaggagagacgtggagaggttcgttgctcgctgcacaacatgccaaaaagctaagtcacgccttaaccctcatggtttgtatatgcctttgcctcttcctagtgtgccttgggaggatatttctatggactttgttttagggctgcctagaacaaagaaggggagggacagtatctttgttgttatagatagattttctaagatggcgcatttcataccttgtcataagagtgatgatgctacacatgttgctgatttgttctttcgtgagattgttcacttgcatggagtgccaaacaccatagtttctgatcgcgatacaaaattccttagtcatttttggagaaccttgtgggctaagttggggactaaacttttattttctactacatgtcacccccaaactgatggacaaactgaggtggtgaatagaacattatctacaatgcttagggctgttttgaaaaagaatattaaaatgtgggaagaatgtttgcctcatgttgagtttgcttataatcgttcacaacattctactactaagaagtgcccttttgagattgtttatggccttctaccccgtgctccaattgatcttttgcccctcccaacttcagagagagtgaactttgatgcaaaatatcgcgctgaattgatgttaaaactgcataagaccactaaggagaacatagagcgcatgaatattaagtataaacttgctgggagcaaaggaaagaaacatgttgcttttgaacctggtgatttggtttggttgcatttgagaaaggataggttccctaatttgagaaaatctaagttgctacctagagctgatggtcctttcaaagtgctacaaaagattaatgacaatgcatacaagcttgagctacctgccgattttggggttagccccacgtttaacattgcagatttaaagccatatttgggagaagaagatgagttagagtcgaggatgactcaaatgcaagaaggggaggatgatgaggacatcccttccaacgatacaaccacgcctattgcacagcaaggaccaatgactagagctcgagctcgttcaaggttgttcttggcacggcaagaacagcaacaacgtggagtcggtgtaccggttgctaaggcgcagcacccctgtggtagttgtagtcggaccgccaacgtcgtatccttccccaaatcgaagtttatcctcctctcatcgaaagatcgggaacccccgttgctgcatcaaaacccgtatggaaatgttggagaagcacatactcggggcagtaatacgagtaactggaaagaaggcaagacagaatctgtctcgcaacttctcccaactaccgtttacacatccaacggtagaggtgtaccattgctttgctctctcttgaagagagaacgggaacaatttccaccgcacagtttcttgcctcatgccacgaatcttaaggcatga

SEQ ID NO: 14546 - DNA, 2484 bp, Oryza sativa
  Clone ID: TFbOSC400773j.C1.o43.fg
atggctgctcatgctgttgatctgatgaggcctgagaagtttgctggtgaaaactttaagcgttggcaatccaaagttcgtcattatctggtgtcgcagaacttgtggtatgttattccacaagtgaggccgctgacccaacagcagcatgcggactttgagaccagtaatgatgtggctttaggtgtcatgctttcgctcctgtctgaccagctctacgacgtgtatggtgcttacaccagcgccgcagagctatgggaggcactggaccgtaaatattcggtttcagatgcaggacgttggatatatgtcgtggagcaatatcatgactttaagatgattgacaaccaatcagtggtgaagcaggctcatgatcttttaacgattatgggtgagatgtctcagtttggtgctattgtgaatcctaagtttgtggtggggggcattattgccaagcttcctccattttggagggattttgccactgcacttaagcacaaacgggaggacatgatggttgatgacctgattgcccacctggatgtggaggagaaggcgcgtgcgaaagacacgccgactatggcacaagaagggacatcaaatgccaacctagtgcagaagtcaaatgcaaagaacaagggcaaacaagcagtgcagaaccataaggccaaaaacacaaccaattttaagaagaaaattacttgctatgtttgcggcttggaagggcacaaggccaacaaatgccgtgacaggaagggcaagaagaatgttcagcaagggcagaaaattgccaacatggttgtgagcgaggctgggtcttcagggtatgattctactcctgttgcactttcagcgtatcaatcctttgattggtgggttgatacgggagctaacattcatgctgcaaccggttcctccatcttgatgggcaatggttcaggtgctgctgttcttggagtagggaaggttgatctgaagctcacttcagggaaaatcatctctttgaagaatgtgcagcacgccgaggctgaaaaccaactagaaagaaaaattaaacgtctacggtcagatcgtggtggtgaatatgtgtcagatgagttctcccaattctgtgcggatcatggaataattcatgaaattacacctccctattcaccccaatctaatggggtcgccgaaagaaagaaccgcactttgactgacttggttaacgccatgttagacagtgccggtatgtctaaggcatggtggggggaggctgtattaaccgcctgtcacatcctaaatagagtgcccactaaaaatagtgagatcactccatatgaaggatggaaagggagaaagccatcactatcatatttgcgcacttgggggtgcttggcgaaagtcaatgtaccaataacaaaaaagcgcaaacttggaccaaagactattgattgtgtctttctaggatatgcacataatagtgtggcctacaggtttttagtagtgagatccgatgtaccggatgtaccgataaacatggtaacggaatctcgtgatgcaacattttttgaggatatttttcctatgaaagctaacgaaacttgggagatcactgatcgaccatttggttgcaagccagtggggtgtaagtggatctttaagaaaaaacttagacccgatggtactattgaaaagtacaaggtaaggcttgtggcaaaggggtacacgcaaaaggaaggcgaggatttctttgatacttattcacctgttgctagacttactactatccgtgtgcttctgtcgctggctgccttatatggtttcgttgttcatcaaatggatgtgaaaacggctttcctaaatggtgagctagatgaagaaatctatatggagcagcccgatggctttgtagcactcggacaggaaggcaaggtggttaagttattgaaatctttgtatggcctaaagcaagctcctaagcaatggcatgagaagttcgatcgaacattaacatccgctggtttcattgtaaatgaagctgataagtgtgtgtactatcggtttggtgggggagagggtgtgattttgtgtttatatgttgatgacatactcatatttgggaccaatattaatgtggtgtctgaattaaaatcatttttgtcccaaaaatttgacatgaaggatttgggagaagctgatgttatttcaaacattaaattgatcaaaggcgaggatgggattatgctttcgcaagcccattatgtggagaaagtcctaactcgtttcgggttgatggactgtaaaatagctccaacgccttatgacccaagtcttaagcttcgaaagaacaaaggactaggaaaggatcaattgagatactctcaaatcattggctctctcatgtatttggcgtgtgctaccagacccgacatctcatatgctgttagcaagctgagccggtttacttctaacccggagatgatcattggcaagcactag

SEQ ID NO: 14547 - DNA, 3786 bp, Oryza sativa
  Clone ID: TFbOSC406055j.C1.o2.fg
atgtcaacggagattggagacaagaagatgaacgacatcaatggaggcaatactacctcaaaatccagcggtgggacgttctcggggtatactttcattctcccgattttattagatgtttctttgttaatactcttcgcaatggcagcattgcgttactttgtaaatgttgatgcttatttcatattaagcatactcaagttgtatacatctagcactgtcactagatctactcatattgtaaatgtcatgtttattatcttaatattttggattaaaatatgccgaattatgaccaaatttccaacaatccaaaaacttgttaggtctttttcggtagttggctttgctgcatcactaaaaccacatgctttcgatggttcaaattataaaagatggaaagcacgtgcacttttgtggttgacggtgatgcattgtttctttgtctcacggggcaaaccgagtgaaccgcctctctctcttgaggaggaggctaagtttgaggctacagattgcttgttccgtggagcaatgatcagtgtgctcgccgataatattgtggatgtgtatatgcacataccttcagggaaggacatgtgggatgctcttgaggccaagttcggggtttctgacgctggcagcaagctgtatgtcatggaacagttctatgactacaagatggtcgatgaccgttctgtagtggaacaggctcatgagattcagatgctgaaggaacttgagaacaacaacggcgagttgccggacaagtttgtggctggaggcattattgccaaattgccaccttcttggtcggattttgctacttctctaaaacacaagaggcaagagttcagtgtcactgatctcattggctctttgggtattgaggagaaggtgagggcaaaggataaccggtgcaaaaagatcgagggaggttctagcgccaatttgatgcagaagaagaaccctcacgcatccaacaacaacaacaagaaagtcaaacctgacgtcaaacccaaggctacaaccaattttaagaagaaaggcaagggaaaggtaaaaggagatttctttttgtgtggcaagcctgagcattgggccaaggattgtcctgagcacaaggacaagaagtttgcaaacatggttattagtgagggtagaggaacattggggtatggtaaatttttacctacagttctctctgtgtgtcactcacctgattggtgggttgatactggtgctaatattcatgtgtgtgcggacatttccctgttttcttcttatcaagtcgggagaggttcctcctttttgatgggaaacggatcgcttgcggctgttcatggtgttggtacggtcgatctaaagtttacttcgggaaagattgtgcagctgaagaatgtgcagcatgtcccttcaataaagaagaatctagttagcggctctctactgtgtagagatggttttagacttgtgtttgaatccaataaatgtgtcgtatctaaatatggaacgtttattggaaaaggttatgacagcggaggtttgtttcgcttttccttggatgatatgtgtaataaagttgtgaaccatgtaaacgatgatgatgatgagtccaatgtgtggcatttgcgactttgtcatgtgaattttggttgtatgacacgcttagccaatatgagtttaattccaaaattcactttagtcaaaggctctaagtgccatacttgtgttcaatcgaaacaacctcgcaagcctcacaaggcatctgaggcgaggaatttggcaccattagaacttgttcatttcgatctgtgcgaaatgaacggcgtgttgactaaagggggaaagaaatatttcatgacactgatagatgattgcactagattctgctatgtgtacctattgaaaacaaaggatgaagcattacattactttaagatctataaggatgaggtagaaaaccaactggaaaggaaaatcaaacggttaagaattcctactaagcataaggaagtaacaccattcgaggaatgggaaaggaagaaattaaatctctctcacctgcgcacatggggctgtttgaccaaggtaaatgtacttatagccaaaaagcgtaaacttgaaccaaagaccgtagattgtgtgttccttggttatgctatccacagtgtgggatataggttcttaatagtaaattctggagtacccgacatgcgagttggtacaattactgagtccagagatgccacattttttgagaatgaatttcctatgaaaaatgcacctagcacttctagtcaagaacctattttatcccctgagcactttgtgccgatagaacacattgatcaaacgcttgaggaaaatcctgaggaggataacattgtagcaactcgaaagagtaagagacaaaggactgcaaagtcttttggatatgactacattgtatatcttgtggatgatactccaagaaccattgaagaggcatattcatctcctgacgctgactattggaaggaagcggtatgcagtgagatggactcaattatgtctaatggtacttgggaagtcgtcgagcatccatatgggtgtaagcctgtaggatgcaaatgggttttcaagaaaaagcttaggcctgatggtacaattgaaaagtacaaggcaaggcttgtggccaagggttatacccaaaaagaaggcgaggattttttcgacacttattcatcggttgcttgcttgactacgattcgtgtactactcgctctggcagcctctcatggtctactcgtccatcaaatggatgttaagacagctttcctcaatggagagttggaggaggagatctatatggatcaaccagatggcctcaatgtgattgaggaggtcaaggactttctgtccaaaagctttgaaatgaaggatttgggagtggctgatgttattcttaacattaaactactgagaggagttgagggtgggattacacttgtgcaatctcactatgtggacaaggtcttgagtcgctttggttatagtgactgcaaggcagctcctactccttatgatcctagtgtgctattaaggaaaaaccgaagaatagcaagggatcaattgaggtactcccagattattggttcattgatgtacttagctagtgcaacgaggcctgacatctcatttgctgtgagcaagttgagccggcttgtttcaaatccgggagatgatcattggcatgctcttgaaagagtaatgcgctatctaaaaggggcaatgagctatggaattcactacgccaggtacccaaaagtgctggagggctatagtgattcaaactggatatctgatgctgatgatataaaggccacaagtgggtatgtgttcacacttggaggtggcgctgtttcctggaagtcttgcaagcagaccatcttaacgaggtcaacaatagaagcagagctcacagctttagatactgccacagttgaggctgaatggcttcgtgagctcctgatggacttgccggtggttgaaaaaccagtaccagcaatcctgatgaactgtgataatcaaacagtgattattaaagtgaacagttcgaaggacaacatgaagtcatccaggcatgttaaaagaagactgaagtctgtcagaaagcagaaaaattccggagtgatagcattggactatgtccagacggctaaaaatctggcagatcagtttaccaaggggctaccacgtaatgtgatagactgtgcatcgagggagatgggcttgagacccacttag

SEQ ID NO: 14548 - DNA, 1014 bp, Oryza sativa
  Clone ID: TFbOSC420396j.C1.o6.fg
atgctgctgagttcacagctaccattgattcgaagtcaaaaccaaaatcagtatgtgtttgatcaagcatttgccccccaggtcaatgagcttccaatgccagaagaggatgtccccttttgtcatgattgtagagaacaaggacactatgccctgaattgcccatgggtatatgccaaagaagccacttcctttggttcagcagggcagacatcgctaaaccagccaccttgcaccaagtcaagtttgcagcctagtgtgcaaagtggagagcccaatggagacaatccattgaatcctagaaaatgctttcctcctagcctttcgtaccacgtggggtcacgtactaagcaagccaaaggcaagaagagtaagactcagaagagaaaagcaccgatgcgaactgaagaagaagtacgtaagatgactattaccagcaccgaatggcctccagcagggataactattcctagacgtcaaagaggaaataccttccgaggtgcacgacagttgacccagcacctcctaagccatggtggcagagtatctgatagtgaagggtcagatcaagtctcctcggatgatgaagatgagcctccccgacatctcggcgaggaagagatggaatcaaaagcatgcacccgttgtggagaaattggacacgttgctagcatgtgtctcacactctgccctcattgtgaagaagaccatccaccaggggaatgtcccacctcaccaaccattctctgcaccgacagcctcagcaaagaattgtcgtcgatggaagaagttgtgtctctccccgacctactccaggccgagcaaagggcaatcaacctcaggagggcgataccaagcagaagaccgttatccgcttcaaccagcaatcagaaggaagcttctcctgtgaatgatagcaatatgcagtcctatcacatcatcacggaaccaatcaaggatgatgcagtcactagaacaatgccagctatatctctccaaaatcagaatgagtag

SEQ ID NO: 14549 - DNA, 1401 bp, Oryza sativa
  Clone ID: TFbOSC900190j.C1.o18.fg
atggagatggatgaagtcgggggtcgatggacattctctaggacaaatgaaggctacacgagctgcggcccggtagtcgagatgtcatggcacagggttggtgccctgctgctaggggctcagtcctgcctgcctgtcccgaaggttccggccgtaggtgggattgggtcggtactcttgtctatggctaggatgggttggaaactatgtcacgtcttccatccgtataccgtggtgatgtttaacagagaaaaaggaaagaatgtcagcgggtatgcctcaagtaactcaagttttcaactcaatctaccactggcctcaagagagttaaccagggcacacccttggtccattccaagcatgctgcttagttcacagctaccattagttggaagtcaagaccaaaatcagtatgtgtttgatcgagcatttgccacccaggtcaatgagcttccaatgccagaagaggatgtccccttttgtcacgattgcagagagcaaggacactatgccctgaattgtccatgggtatatgtcaaagaagccccttcccttggtttagcagggcagacatcgctaaaccagcctcctcacaccaagtcaagcttgcagcctagtgtgcaaagtagagagctcaacggagagaatccattgaatcccgggaaatgctttcctcctagcctctcgtaccacgtggggtcacatactaagcaagccaaaggcaagaagagtaagaatcagaagagaaaagcaccgatgcgaactgaagaagaagtacgtaagatgactattaccagcaccgaatggcctccagcagggataactattcctagacgtcaaagaggaaatactttccgaggtgcacgacagttgacccagcacctcctaagccatggtggcagagtatctgatagtgaagggtcagatcaagtctcctcggatgatgaagatgagtctccccgacatctcggcgaggaagagatggaatcaaaggcatgcacccgttgcggggaaattggacacgttgctagcatgtgtctcacactctgcactcattgtgaagaagaccatccaccaggggagtgtcccacccgcaaggtcacatgttttctgtgcgaagcaccaaccattctctgcaccgacagcctcagcaaagaattgtcatcgatagaagaagttgtgtctctccccgacctactcccggccgagcaaagggcaatcaacctcaggagggcgataccaagcagaagaccgttatccgcttcaaccagcaatcagaaggaagcttcccctgtgaatgatagcaatatgcagtcctatcacatcatcacagaaccaatcaaggatgatgcagtcaccagaacaatgccagctatatctctccagaatcagaataagtag

SEQ ID NO: 14550 - DNA, 3561 bp, Oryza sativa
  Clone ID: TFbOSC413662j.C1.o7.gm
atggggaggccgcggaagccggcgaagcccgcggccgcggcgtcctcctccgcctccgccgccgccgccttctcgatcggcaactgcaaggtggagatccacgggagcagcctgaggtgccagtccacggagcaggaggaggaggagctcaccatttctgggcccaggggcgcgaagatcgtcgtgtctgtcgacggggccaagagttcttcagttggtgacggttttgatttcatccttctcagtccgagtgatgtcaatgagcgaaacaaggcattgcttcaggtggttaaattatacagcttctgcattaatcatttccagtgcaccagcaaagcaagtgaaagtggttatgaagaggacgccgagctcgccgcagcagaggagcgcaggcgagcaacggctcagactgctgcagcagcagcgagggcggccagactggcggcagcggagttggcagcagccagggcggaggcggaggcagaggtggcggaagatgcggcacgtgcggcggaggtagaggttgagaccttgcgcagcagcatcaacggctccatcgccagcgacatcaccgctgacagggagcttgaggagctggcaagaggaagggcgcgggagcgggcagagcggtgggcagcagtccacccccacggcggcggcggcggcccaagggaccgcgcgcccgccgacgggaacccggacgggcgcgggcgtgccggcggcagcccggagcccgcgcgcggccctcgcaggcagcgcggctctccctcccctgaccggtgccatggtcaccacggcgtccagacggtggtcagggactttggtcccggcggtgggtggcctaccctcaccaaaaccaactacatcgagtgggccgcggtgatgagggtgaggctccaggtgcggcacatgtgggaggcagtctggtacagcgacgtcgactacgacgaggatcggcgggcactggatgccctcatcgctgcagtcccgcccgagatgcagttctcactttcccagaagcggactgccaaggaggcctgggacgccatcgctgcggcacgcatcggcagcgaccgcgcctgcaagtccacactgcaggcactccgcaaggagtgggagaacctggccttaaagccaggtgaggatgttgatgactttgccctccgtctcaacactcttttgcagaagatggtgcagtacggcgacaacacctacaacgaggagagagctgtcgagaagctcttccgctgcgtcctagagaagtacagacagattgctcgctcgatcgagtctctgctggacctctccatgatgtcgatcgaggaggcgttgggtcgcctcaaggtcgtcgacggtgatgagccacagcctctctcggggcctaccaccattggcgggaagctccatctcactcgggagcagtgggaggcctctcagggtgacagaagaaagggggagtcttctccctcgacaggcggcctcaagccacgcaaggcacgcggaggtgtccagctgcggtgggcgcgaagacgcgccgagggtggcgctcgcagaggcgcccagggcggcgccgccggcaaccacaagccggcacgagacgacacctgccgcaactgtggcaagcttggctattgggccaaagactgtcgacagccacgacgtggccaggcgcacgtcgcacaggtggaggaggaagagccggctctgctcctggcacacgcaagcatcgagcttcctccagcggcaccggccgcagtggctttcctccaccttgatgagccgaaggtactcgtctccctctgcaacggctccagcaacgacaaggctgatgggtggtaccttgacaccggcgccacccatcacatgaccggccgacgggagttcttcaccgagatcaagggcgttgtctccgtcaccttcaccgccaagtccggtgagcacaggctgctcaccggagtctactacatccccgcgttgaggaattctatcatcagcgtgggacagctggatgagaacggctcacgcgtgttggtcgaggacggactcatgaggatttgggatcgccgtcgtcgccttcttgccaagtggcacgagcgcttcgggcacctccacttcgaggccctgaagcgcctcagtgccaaggagatggtgcgaggcatgccgtgccttgaccacgtggagcagctctgcgacgtctgcctggtaacgaagcagcggcggctcccttttccccagcagacgaacttccgagccaaggagcggctcgagctcgtgcacggggacttcaagggagaggctgcggatgccatcaggcgcgcgcaggccgctgcagaggcggagtgcggccgcaagctgcgcgtgctgcgcaccgacaacggcggcgaattcacggcggctgaattcgcgtcatactgcgctgatgagggcattcagcgccactacaccgcgccgtacaacccgcagcagaacggcgtcgtcgagcggctcaaccagatggccctcgatggcaggacaccgtacgaggcttggcatgggcgcaagccggcggtctcccacctacgggtcttcggctgcctcgcgttcgccaaggagcttggccacatcggcaagctcgacgacaggagcaccccaggggtgttcattggctacgcggagggctcgaaggcctaccgcatcctcgacccggagacacagcgtgtgcgcacaacgcgcgatgtagtgttcgacgaagggcgagggcagctcttcttcaccgagcgtgtctaccccagtcctcgagcctccaccgactccaacaccaacacactctcgggccacgacttcgactacgacgagctcttcgtcgacaccaccccagccgctcgtgttgagcgcagcccggtggagttcgctacttcgctctcccacgacggggagcgcatcgacgcgtaccacgacggcgagcagctacggtaccgtacgatggaggatcttctcggcgaccagccggtgccgggactggtgcctcgcgacatggaggcgcagttgcaccttgcgtgcgacgacggtgagcctcggtcttttgtagaggtcgagaaacatgcggcatggcgtgccacgatgcagtcgaagatggacgcggttcaggagaaccgcacctgggagcttgctgacctccctcgtggtcaccgcgcgatcacccttaagtgggtgttcaagctgaagagggatgaagccggagccatcgtcaagcacaagactcgcttggtggcacgcggcttcatgcagcaggaggggatcgactacgacgatgccttctctcccgtggcacggatggagtccgtgcgactccttgcgctggctgctcaggaaggctggggtgtccatcacatggacgtcaagtcggcatttctgaacaacttgaaagaggaggtctacgtgcaccagccgccgggattcgtgctccctggcaaggagggcaaggtgctacgcctgcacaaggccctctacggcttgcggcaggcaccgagggcgtggaatgccaagttggattccacgctcaaggggatgggcttcgagtaa

SEQ ID NO: 14551 - DNA, 8937 bp, Oryza sativa
  unsure (1)..(8937): unsure at all n locations
  Clone ID: TFbOSC415120j.C1.o11.fg
atggattatcaacaatcagatggaatttatgacatgccagatgaaccattgtttacactaaatttgaggttgagccacagcaatgacctggatagagttcataaatctttcaccagcaagattgataaggcccgaacgtatctcacgggtaggttcagaaggattgtcaaggtcaaaggttctaagagaaaggagttcgttcttacccctgaaggccctgatgtttttaccattgctttcactgatggtactaacagagtaactgccataattgaagagagaaatatgtggttgagaggtttccaaactgcagacggacacatttttgagtttaatgatgaacacggcaatgaagggaaggatgctaatctggatgacaagactgatgaaatgaataatcagttcaatggtaatgacaaaacaagagatgaggaggtgaaggatgaggaagaggctataaaggaccaaaaactgaaggttataaaggacccaaagatgaaggctataaaggaccgagggatgaacaagcactgcaaacaaaaagaaaagagcaaagcagcatgtggatccaaaaagaagcaagtgaataggaaagaccaactcaatccaaaaaagtatattagaggatctgttctcttacggcatgatagcaattatggttctcttcttggacctaacagactgcctctgtttcaagtagtatacagtacaatgagggatatgctgcagaatttggctcactttgatccaaacaactattcagataaacacaagcgctcgatggctgcactgatcatccatacagctgagactttgaagaataaatatatatcaagtcttgtgttaaattctttcaatccacatattggtgcaaggcttcaagcactggatgatatgggagcagcacatattaacgggtggtctacagcctctgaattaattttgaaatccattcacctcccatcaaaggtttgggactttcaacagcaagaattttccaagtgcaatgaattttacaaaaatcagtgctggactacagatccaaatgtcgcaatgaagtcaattgtgtttttaaaaggcgatgcttacacggacactactgcctctactgtgatggcgccgccctcgggaaaaccgggtgccatttctcttctgaagcctccggtcatcttcaacggactcaacttccgggagtatgcattgcatatgcagatacacatgtgcagccagtggttgtggggctacctcatcggcgatcggccttgcccgccttgtccaaccttgcctgctgagcctgccatctcggcagatgctgatgagaacactaagcgtggtctccttgatgatcttgctgctgctatggaggcgtatcaaacagatctctctctatatgagacttggttagagcaggaggcctatgccaaggctattttggttgggagcatggagcagtacgagcctcgcaacgatgccatgtttcttgccgttgtgaatgaggcacaatctcttcgtcagcttgatgccactgtggatgagttctttcgcaagatgtctgcggtgtggcgtcaaatggacctacagggcgctgatgtttgtcgcacttgtacctgttgtcagcgccagagggtccagactgagaccactcgcctctatgagttcttgtctcgtttgaggcctgagtttgagcctgttcgagctcagctgttggcacgacgccctcgaccttcattgttggagaccttgcctgagctacgggctgaagagactcgttgtcgtgaggctggtataggcattgcacagcagtccacctctgtcttggttgcacagggcttgccttctcaggtccatgtctctgcccagcctgttgtggtgccatcacctttacctgttgcggctggtgctcctagtactccttcaggcattgtttgcgggtactgtagcaagacagggcacaccgcctctatgtgctacaagaagaagagagatcagagtcatcgcacctctcagggctctcgacagggctcttctcagtcaagctctcagcagatcacatcgaccgagcaagagcttgtaaggctccttcgtcgtcttatgactacagcctctacctccacccatgggtctgctgctcaggcttctagtcttccaccaccacctccatcctcttcaggtatattgtcctcgtggtttcttgattctggtgcttccttccatatgacacccgattccacacatctttcttctatgagtcctcctgatacccctctcacagttcagacagctaatggcacctcacttcctgttgttgatcgtggcacactttctacttcttcctttcgagttcctactgtctctcatgttcctaagttaaccatgcagcttatgtccgctggtcagatcactgatcatggttgtcggattatacttgaggctgactcttgttgtgtccaggatcgtcgcacagggctcctggtggggactggtcctaggcgccatgactctcagcgtctttgggagcttgattggctacatctcccttctgatgcttctaccagccagtcagtcggttccactgcttcagcgttagctacttcagccactactacttttgctcagtggcatcgttgtttaggtcatctatccggtgctagattatccacacttattggtagttggggtcttaggtcctgtttctggagacaccgctctacatttcaatttctttctatttatcagcagtttgctactatggttcgcactcagtacgattcttccatacgggtttttcgtgctgactctgttgctcctgctcctgcttctcggtatgatcttcgtgatcgccatgctattaggcctgcgcctaagtatggctttactgctgcggctattgttgagcccacgacttaccgagaggctattgcccaccaggagtggcaacaggcgatggcagaggagattgctgccttagagcgtaccaagacttgggatgttgttcctgcacctactcacgtcactcctatcacttgtaagtgggtctacaagataaagactcgctctgatggctctcttgagcggtacaaagctcgtcttgtagctcgtggttttcagcaagagcatggtcgtgactatggtgagacttttgctccagttgctcacatgaccaccattcggaccctgttagctgttgcctctattcgtcagtggtccatttctcagctcgatgtcaagaatgcctttctcaatggtgagctgcatgaggaggtctatatgcagccccctcctgggtattctgtccctgatggcatggttcttcgtctgtgtcgttctctttatggtctcaaacaggcccctcgtgcctggtttgagcgcttctcctcagttgtcactgatattggcttcaaagccagcgaccatgaccctgctctctttgttcacacttcttcttgtggtcggacccttcttcttctatatgttgatgacatgatcatcactggtgatgactctcggttcattaatcttgtgaagaagcgtcttagtgaccaattcttgatgtctgatttgggtcctctcaggtactttcttgggattgagttctcttccacgtcttctggtttctacctctcccaagagaagtatattcaggatctccttgctcgttcgggcctcactgataagcgtgtggttgacactcctatggagcttgggatacatctacggcccaatgatgctagtgaccactctgatcgtcgctctctctctgcttattgtgtctttcttggttcctctctgattgcatggaagaccaaaaagcagactgcagtttctcgttcaagtgcagaagctgagttacgagctatggcagccttgaccgctgagatcacttggctgcgttggctcctggaggattttggagtttttgtctctcccccgactccactcttgtcggacagtactggtgcaatcagcattgctcgagacccagtgaagcatgagctaaccaaacacatcggcgttgatgcctcatacatgagatcgcaggtgcaaaatgaggttgtggctcttcatctgaatgcatctgttggtgtggttgttatgggtggcattaaccatattctgatgcataattgggaggtaccatgtgcagctgaaatttccttaaaggcaagttcttactcagcaaagatccctatcgttgaaggagaggttaaagttttcaccgaccatcacaatcaactatacacctctcatctaaaactaagttcaaaagaaggtcagaaggaggttaaagtgcgtttgtatgttgatggctttttagcattaacagcgaagtcttgtcaagtggagaatgaagaagttttgcgggatgaaaagggcgaaacatgtacagataatgataaggtgactcgatgtctcgggagagtatttgcggtgatggaccgggagtcggcttggggattagacgacgtccgtggtggtcagagatcatgtgggatacttaggctagagttgatgcacgtggttgatggagattccatatggcatacgatggagttattgtgtgcgtatgggatgcggagtcgaatttggaaggagtccaaatttgagagaagtaataaagtcgtcatccactttaagagttcttcgatttatgtttcaccgggtttcggcggtctaactggcggcgcaccggcggagtacattaaatttgagatgaaatctggagaggctttggatgactatctttctagatttaataaaattttgagtaatcttagatctgttgattcttcttatgatgctaattatccacaatctaagatttctcgtcactttttgaatggtctcgacatgtctatttgggatatgaaagttacatctattcaggagtctgttaacatgtctactttgactttggattcactttatactaaattgaaaacacatgagatgaatattctttctcgcaaagttgattctaaatcgagtgctttggtttcttcttcttcttctttggttgttgatgtttcttcatctatgccttcttttcttgctgcttttaatgccacatccgatgatcaactcgaacaaatcgaggaggaggatttggctttggtcgctaacagaattgctcgagctatgaataatgccaggaacaggaaaagaggtggtccaaatcgttgctttgaatgtgattcaattgatcatcttcgttcgcattgtcctaagcttgggagaggcaaaagagaagacaaagatggtgagaagaccaataacaacaagcccaacaactacaacaagtcaaagggttctaaccaagggaggaagatggagaatcttaggaaggcttttcaacaagtttgcgccgctttcgagccactaagtgatgtagatggtgaaagtggagatgatgataatggaaagaatgtctctgatgtttgcttcatggcacgtggtgaatctgacacagaattaaaatctcttattccaaatgatgatgattgtgaaaattgtgaggttttaatgaatgatatttcaaaaattagagatgttaatgctgcacatgatttgaaaaatagatcttctcttgcttgtagttttgctttgcatacacgcactttggatgagttgtttttaactaaaaagttgttgcaaaaatatcaaattgcttttcatgctagtttgatgtttaacatgatttctgctaaaaagttaaaacaacctcatgatgttttggattgctcaacatgtaatttaaataaaatgaaactaaaagatgctttaggacgtgttgagtatatggaagatgttgtaaaaaacaatgaagtgctttctttccccaaatgtcgtaaaagcaaaggtgtaatggtagattgtgaaaattgtgctaatttggaaaaagaggtttcttatttgaaaaattccttgctaagattttctgatggcaaaaagaatctcaatatgattttggatcaattaaaggtgttggtgctagaggtggctttggtggcaaggaaggagaacgtgtggatcgtggattctggttgttcgcggcacatgaccggtgataaaaattggttctcctccctcaaaaaggcatccaagactgaatcaattgtctttgctgatgcttctactagtgccgttgtcgctataggtttggttaaggtaaatgaaaaatttgaattgaagaatgtagctttggttaaggatttaaaatacaatttgctttcagtttcacaaattgttgatgaaaattctgaggttcactttaagaaaactggaagtaaagtttttgattcttgtggtgattctgtgctgaatatttctcgctatggaagagcgtttaaagctgattttgaaaattctgtttcacctgtgacaacatgtttggttgctaagtttgataaagatgtgatgttttggcattgtagacttggacatgttggttttgatcatctcactaggttaagtggtttggatcttgttcgtggtttgcctaaacttaagaaagatcttgatttggttcagggggaggatggtcgtatttttgaagacgagagcgactacgacgacgacgacgaggtcggctcggccggtcagaccaggcaccaggccggtcagaccgccggcacacctccggtcagaccggcccatgaggagcggtcagaccggccaggtttgtcgggttcgggtactgttgatgtagatcgagatggtcctccagagaattcaacttcgaccagtactggaacaaaacgtggatcaacttcagaagttgctgctcctttgtacattcaacgacgacatccgccggaacaaattattggtaatataggtgagcggactacaaggtctaaggtaacgactcatgatgtttgtgcaaattctgcatttgttgcttcttttgaacccaaagatgtgtcacatgcattaactgatgaatcgtggattaacgccatgcatgaagaacttgaaaattttgagagaaacaaagtttggactttagttgaaccaccttctggacataatattattggaaccaagtgggttttcaaaaataaacaaaatgaggatggtttgattgtgagaaataaagctagacttgttgctcaaggttttactcaagttgagggtttggattttgatgaaacttttgctcctgttgctagaattgaggcaattagacttttgttggcttttgctgcttcaaaaggtttcaaattgtatcaaatggatgtgaaaagtgcttttctaaatggttttatactggaggaagtttctgtcaaacaaccaccgggttttgaaaatcctgattttcccaatcatgtttttaaattgtctatagctttgtatggtttgaaacaagctcttagggcatggtatgataggcttaagaactttttgcttgcgaaaggttttacaatgggaaaggttgacaaaacgctttttgttcttaagcatggtgataatcaacttttcgttcagatttatgtggatgatattatctttgtttgttcgactcacgccttggttgtagattttgctgagactatgcgcagggaatttgagatgagcatgatgggtgagttatcgtactttttgggattgcaaattaagcaaacacctcaaggtacttttgtgcatcaaacgaagtatacgaaggatcttttgcgacggttcaagatggagaatttgcagccaatttcaacaccaattggntctacagctgtgttggatcctgatgaagatggtgaagctgttgatcaaaaggaatatagaagtatgattggatctttgttgtatctaactgcttctaggcctcacatacaatttgctgtgtgtttgtgtgcgggctttcaagcttctcctcgtgcttcacatcgtcaagcggtcaaacgaataatgaggtatttgaatcatacacttgagtttggaatttggtcttctacttcatcttctatatgcttaagtggatattccgatgctgattttggaggttgtagaattgataggaaaagtactagtggaacatgtcattttcttggtacatcattgattgcatggtcttctaggaaacaatctagtgttgctcaatcaactgctgaatctgaatatgttgctgctgctagttgttgttcacagattctctggcttttatctactttgaaagattatgatcttacttttgagaaagtacatctcttttgtgataatactagtgctatcaatattgctaagaatcctgttcaacactcacgcacaaagcacattgatattcgttttcactttttgagggatcatgttgagaaaggagatgttgaattgcagtttttggacacaaagttgcaaattgctgatattttcactaaacctttggattctaatcgctttgcttttcttcgtggtgaattgggtataattcatccttttggcatggtgactcgatgtctcgggagagtatttgcggtgatggaccgggagtcggcttggggattagacgacgtccgtggtggtcagagatcatgtgggatacttaggctagagttgatgcacgtggttgatggagattccatatggcatacgatggagttattgtgtgcgtatgggatgcggagtcgaatttggaaggagtccaaatttgagagaagtaataaagtcgtcatccactttaagagttcttcgatttgtgtttcaccgggtttcggcggtctaaccggcggcgcaccggcggtcagaccggtggcatcgcggcagtccgaccggcgaacacacggcggtcagaccggcggcgacaggagtcgtcggcaggctttctcggcggttcgaccgatcaatctacatcggtcagaccgacgttcatcaggcggtcagaccggcgcaactacttcggttagaccgcgatccatcgatttcgagggtaacttttatttccgctaa

SEQ ID NO: 14552 - DNA, 1101 bp, Oryza sativa
  Clone ID: TFbOSC406457j.C1.o9.fg
atgtcctgggactggtaccgagatcgcggtttcgtaggaagcggttcgcgccgttttccctacgacacgctcctatcaggtgccgttatacggcggtatcagattgggttctcagttcctctgaagcaaatggcacctcaaccaacctgtcagacttgtgtccgcaactaccttggttctgaggaagacccagctttgtcagaaaatccaaatcaactagctgaacaagtcaccaaccaagtcgccaagactggtaatgctgttcctggaccaaacaaggaagttgcaaccagaaaccaacactcctcaatggatatttatcagattctagccaatcagactcagatgctacaagaaatagctcaaaatttggcttctatacaacaacaactgctactaccacagcccaaggtgaatccagacaagagtaagaatgaggccgcagaaatacaaggaacacaatcagtagaaggcactgatacccataaagagaagaacaaagaattcttaaatgtgatgattacagggatgaaaaccccacttcgagctaataattgccccaaccttcagaactcaatcaatgaatccgtatcgcaagaaaatagcatggttaaagaaggaagttgtcacaaaagaaagaccttgccatcagaagttgacatgcaagatgtcccacaatgtcagacactgcaatcttgccaaaacttatccaagacccccaccctcaaatcaaagaagatcagacacgttcccggattcatatgcttcatttgccacgaaattggccattacatgagacactgcccccaaaaaccctatatggatgcactactacaagctaatatgagcatctcaaggatgcccttctatccccaaggaagcccgaattcgccaaatgttaatgcagtacgtccaaccttccctgatgacaaaagagcaaaagcatcctgcgacatgtgccaagacatccaagaaaagaaagagatgcaagaatacaagagacgcaaagtaatgtccctagagattcaagcaaaagaagatttgtgtcgaaaaaacaaactcgccagcacaatactatcagaaagcatctcattcaactag

SEQ ID NO: 14553 - DNA, 1215 bp, Oryza sativa
  Clone ID: TFbOSC408556j.C1.o1.hg
atgatgaaggagatccttcaggttgttgttgagccaatcacttggctcgagtttactgttgctttcaagaagattcatgtaccatcgggagtggtggctctcaagaagagggagttcagggcactcactctgagatcttgttctatcaccgagtttctgcatgagttcaattgtctggcccgttatgctcctgaggatgtttgcatggacgagaagttggtggacaaggctattcgccaggaagacaagtacaaccgaatggaagagaagaaacacaagattgctcacaaccagcctatcaaggagcaaggaaacatgccagtggtgtgcttcaactatgatgagccaggccattttgctgacaagtgtccgaaacctcgacgtgtggagactgcccctattcagaacaagtccattgcaccagcaccgaaggctcgtgtcaatcatgttgctgccgcagaagctcaaggcgcaccagatgtgatttcgatgcgggactatccaaatgtgttcccagttgatctacgtggcataccgcctaagagagatatagaattcaggatagatctggtgatgaggacatctcccaccattacccgctggcaaagacgcaacaaggggtcaagtgggggtgggaatgatgaggacatcctctactattacccgctggcaaagactcgcgacacaaatcgatctggcttcttgaacgaacacgctcttgagccccgcaatcgcagcaccacgtcttctcttgttatcacccgtgtcgaaacgcggatgacctcgccgagaaggctaatccctgtttgcgaattgaagaacacaaacaaggacaagattctggacgtcaaattgttcagtcaagtcccgttgactcggaaagaatttggacgtgggaccaagaccattggaaaatttatcttcttagctttccatccatataaagaatgccccaacatgagcacaaaggatccggcggcggtgcgggaagaggaggagaggcgctggtcagggttgctccaccgtggcacctggtcgagcgtcacggctggctccaccccgcccacgcctgccgtcgccgccaccaaggaggccttggccgacgcggccgtcggcgagcgctggatcagagccctgagcgcgagggtttggggaaagaagaggaacaagatttggactggtgggtggtctggacttgaatttggaatcagctag

SEQ ID NO: 14554 - DNA, 5436 bp, Oryza sativa
  Clone ID: TFbOSC100811j.C1.o5.fg
atggaggaaaaatactctgcgaaaccatttgttttcgatggacacaattttgtcatttggaaggcacgaatggaggcctacctccagtcgcaagggcataatgtgtggaataaggttaaatcaccttacactatgcccgatgatgctgacatcacgcctgcaaatgtggctcaagttgattttaattatcgtgcaagaaatgcaatcattggtggaatttcttctggtgaatttaatcgtgttcaacaccaccagtccgctcatgacatgtggactgctctgtgcaatttccatgagggaaacaatgatattcaattggttcgtcagaatcaatttcataaagaatatcaaagatttgagatgcacccaggagagtccattgattcttatttcaagcgttttgaagaaattgtttcgaagttgagatctgttggaaaagaattttctgataatgataatgctcgccatcttttgaattgtcttgattatggtgtttgggaaatgaaagttacttccatcacagagagtgcacctctgagtgaccttaccatggacaagctttactcaaagctaaaaacccatgagatggatgtcttccatcggaaaggcctcaaacactcgatggctttggtagctgatccctctggtagtacttcttctaatgacttagcttttgtgtgtggtggcttctctcttgccgctttacactcagtcactgaggagcaattagagaagatccctgaagatgatcttgctctttttactagaaaattctcaagagcttacaaaaatgtgagagatagaaaaggaggaaaaaccaatgaaccatttgtgtgttttgagtgtggagagcctaaccacataagagtgaattgtcccaagttgaagaagaagagtgacaagacaaccaagaagctcgagggacaagggcgaaaggggaagaaggatttgataaagaaggcgatccacaaggtcttggcggctcttgaggaggtgcagcttagcgacatcgactccgacgacgatgatcaagaaaagggggacaaggacttctccgggatgtactgtctcgccaacaacgaggacttcatcaacctgtgtctcatggcacttgaggataaggatgactcatcggagcatcatgaggtatgtcttgatgatatcccttccttggatggttctctttgtgatgattcttgctcagataatgactctgttgatgatgaactaagcaaagaaagaatgacacacttgatgattgaaattagtgacaagtataggtcttctaagtataaaattgagaaactaaaatatgaaaatgatggaatggcgctagaaattgctaggcttcgatccatgattcctgaggaggatacctgttctacttgtgcttcatatctttctgaaattaatctcctcaaggataagttgaaatcatgtgctttaggagctgggaatccttctagtgctagtgctgcttgctctacttgctatgaaatgaaagttgatatgagtttgcttgagatggaattgaaagaactaaaagaaaattttgttcatgataggataagtagttgtgaaaattgtcccattctcactagtgacaatgatgaattaagacaacaagttgacatgcttaggaccaagaatgatttgctagaatcttatgctactaaggagcctgttcattcttcatgtgctaattgtgttatcctggaaactgaactaaaagatactaaaattgtcattgattatgtcaaatctgttgattcatgttcatcatgcatttctctgaaagttgatcttgagtccgctaagagagagaactcgtacctacaacaatctttagagaggtttgctcaaggaaagaaaaagttgaacatgatcctagaccaatccaaagtgtccataaacaatcaaggtataggctatgattttgctgagtctttgaggataggtacccatgagattttaggtgtcacagatgggatgatagaactagctcaaaaacctataaccttcaagtctgcaggtttcattggaaacactagttctagtacacccaaaacctcagaaccaaagatggtacctatgactagcaagtctaagtctgtagagttacctagacccaaaaatccaaaacaagttgagcacaagcaaaaccagaaacaaaccaagcctgtagagaaaaccaagtatgagtgcacctattgtgggaaagctggtcatttggtaggtttctgctttagaaaggctagaaaaaagcgacaagaacgtcttaggactagaagagctgctagagtccctgagaggttcgagtgtgcgtgtcattgtcattcaagtggtgtatctcgctttcctcgccgagatgtgcaccctcgatgtgacctagcagggttggggcaaaacagacatggtcatcttgcatataattatgctcataacactaaagatgcttgtactcctcgcatggattttggagtggggagaagtaattcttggcttgtagactccggttgctcacgccacatgaccggtgaagccaagtggtttacttctctcactcgtgcatccggtgatgagaccatcacttttggggatgcgagcagtggacgcgtgatggctaaaggaacaatcaaggtcaatgacaaattcatgctaaaggatgtcgcgcttgtaagtaagcttaagtacattttgctctctgttttacaactctgtgatgaaaatctggaagttcgtttcaaaaaggacaggtctcgagttcttgatgcttctgaatctcctgtttttgacatttctcgagttggtcgagttttctttgctaacttcgactcttctgctcctggtccttctcgttgtctcattgcctcagagaatagggatttgtttttctggcatcgacgtcttggtcatattggctttgaccacttgtctcgcattagtggtatggatttgattcggggtttgcctaagttgaaagctccgaaagatcttgtgtgtgcaccatgtcgtcatgggaaaatgacatcttcctcccacaagcctgttacaatggttatgacagatggaccgggacaactgcttcacatggatacggttggtcctgctcaggtccagtcagttggggggaagtggtatgtcttggttgtagtggatgatttctctcgctactcttgggtctattttcttgaaacaaaggaggaaacatgtggcttctttcagtctcttgctcgtagtttggctttgcagtttcctggtgctcttcgagccattcgcagtgataatggctctgaattcaaaaattctgcatttgaatctttctgtgattcttctggagtcgaacatcagttttcttcaccatatgtcccacaacagaatggggtggttgagaggaagaaccgcacccttgtggagatggcacgaactatgcttgatgagtttacgactccaagaaagttctggactgaagctatttctactgcttgttttatctccaatcgtgtgtttttgagaactatcttgcacaagacgccatatgagctcagatttggtcgtcgaccaaaagtttcacatctcagggtcttcggttgcaaatgctttgttcttaaatctggaaatttggacaagtttgaatctcgatcattggatggcattttccttggctatgctactcattctcgggcttatcgagtttatgttctttcaactaacaaaattgtggagacttgtgaagtcacttttcatgaggctagcccaggagctagaccagaaatttcaggtgttccagatgaaagcatctttgtggataaggattcagatgatgatgacgatgattccattcctccacctctagacagtacaccaccagtgcaagaaacagcatttgttgcctcttttgagcccaaaaatgtttgtcatgctttatctgatgagaattgggttaatgccatgcatgaagagttagaaaattttgaaagaaacaaagtttggtctttggtagaacctcccttgggttttaatgtgattggaacaaaatgggttttcaaaaacaaactaggtgaagatggttcaattgttcgaaacaaagccagactggttgcacagggtttcacccaagtcgagggcttggattttgaagaaacctttgcaccagttgctagattagaagctattcgaattcttttggcttttgctgcttcaaaaggtttcaagctttttcaaatggatgtgaaaaatgcttttctgaatggtgttattgaggaagaggtctatgtcaaacaacctcctggttttgaaaatccaaaatttccaaatcatgtgttcaaacttgataaagctctttatggtttaaaacaagctcccagagcctggtatgaaagattgaaaacctttttgcttcaaaatggttttgaaatgggggcagttgataaaactctctttactcttcatagtggcattgattttcttcttgtccagatatatgttgatgacatcatatttggtggctcttctcatgcacttgttgcccagttttctgatgtgatgagcagggaattcgaaatgatcatgatgggagagctgactttcttccttggacttcaaatcaagcaaaccaaggaaggaatctttgtacatcagaccaagtactccaaagagctcttgaagaagttcgacatggccgactgcaagccaatcgccactcccatggcaactacttcatcgcttggtcctgatgaggacggtgaagaagttgaccagcgcgagtacagaagcatgatcggctccctcctctacttgactgcgtcaaggccggacatccacttctccgtgtgcctgtgcgcaaggtttcaggcttctccaagaacatcacatcgccaagcagtcaagcgcatcttccgctacatcaagtctacacttaagtacggtatttggtactcctgctcttctgccctttcagttcgagctttttcagatgctaattttgctgggtgtaagattgatcgcaaaagtacttctggcacttgtcattttcttggcacttctttggtctcttggtcctctcgtaagcagtcttctattgctcaatcaacagctgaggctgagtacgtagctgctgctagtacatgtagtcaagttctttggatgatttcaactctaaaagattatggtctgtctttctctggtgttcctttgctttgtgataatataagtgcaatcaatattgcaaaaaatccagttcaacactccaggaccaagcacattgagatacggtaccactttctccgagacaatgttgagaaaggtaccattgtgctagagtttgttgaatctgaaaaacaattggcagacatttttacaaaaccacttgatcgctctcgttttgagttcttgcggagtgagttaggggtgatccacccctatggcttgatttga

SEQ ID NO: 14555 - DNA, 3021 bp, Oryza sativa
  Clone ID: TFbOSC28501j.C1.o1.fg
atggtgaagacaaggaatggttcccgtgactccaacaacgccagcggcagcggagagcaaatcaatggaccacgtgccagcggtgcatctgacagcagttcatctccaccgcccgagaacccaacgattgctcaggtgttggacaatcagactcagatgatgacaatgatgatgcaacagatgcaacaacagtaccatcaggtgttgcagcagtctaagctgttagagtttctccgtgtcaagccaccgactttctcaggcaccaccaacccaatcgaggccaacgactggcttcatgctattgagaagaagctgaaccttttgcaatgcaacgaccaggagaaggttgcttttgctacacaccagctgcaaggtcccgcttctgtttggtgggacaactacatggtgacccgtccagctgggacagaggttacttgggcagagttttgtaagagtttcaataaagcacaggttcccgaggggattgtggcacaaaagaagagagagtttcgttctctgcaacaaggaaccagaacagttatagagtatttgcatgagttcaaccgccttgcgcgctacgctcctgaggacgtgcgcactgatgccgagaggcaggagaagtttttgtctggtcttgatgatgaattgaccaaccagttgatctctagagattatgaggactttgagaagcttgtggacaaggctatccgtcaagaggagcaatgcaacaaaatgaaccgtaagaggaaggcagctcagctcaggactccccaggggaagagtcagaagccttgcttcacgatgggacatcaaggtgaaccttccaccatgattatccggcagcaccgtccctaccacccgggtagcttcaacaagaactacaagagtggcagtcacagcaacagtgagcagcacagcctcaaccctactccaagtccactaatgattccagctcagtcagttcagtcagctctgccagctcagccagaacagcccaagaagtttggagaaaagcccaaactctgcttcaattgtaacgagcccggacacatggttggtacgtgcccgaagccaagacgtgccagactcaagttcgttcaggcccatgtcaatcatgcatctgcagaggaggcgcagtcagcaccagaggttatattgggcacatttcccgtcaactcgacaccggcagtaatattgtttgattctggtgcaactcattccttcatttccaagcgttttgctggtgcacatgggttatctttagtgaagcttaagatacctatgcgagttcatactcctggaggtggcatgaccacatctcactattgcccatccgtgacagttgaaattcaagggttgatttttccagccaacctcattcttctcgaatccaaggacctagatgtcatacttggaatggattggttgacaaggcacagaggagtgattgattgcgctagccgcaccatcaagttgaccaatgcgaaaggagaagtggtaacagtggagaaaaccactaagaagttggaggatattcccatagctagagattatccagaggttttcccggaggatctaacaacaatgccaccaaaatgggatatcgagttcaagattgacttggtacctggaactgcaccgatccacaagaggccttacagaatgggagccaacgagttggcggaagtcaagaagcaagttgatgaacagttacagaagggatacattcgcccgagcacgtcgccttggggtgctccggtaatttttgtggaaaagaaagacaaaaccaagaggatgtgcatcgactaccgcgcactcaatgaggtcactattaagaacaagtaccctttgtcaaggattgatgatctgttcgatcagttgaaaggagctattatgttctctaagatagacctgcgatcaggctatcaccagttgaggatccgtgaagaggatattccaaagacaacattcatcactcgttatgggttgttcgaatgcacagttatgtctttcggactcaccaacgcacctgccttcttcatgaatttgatgaacaagtccgaggaagaacatgaacagcatcttcggttggtgcttgaaaagctaaaagagcaccaactatatgccaagttcagcaagtgtgacttctggctaaagaaagttcagtttcttggtcatgtcgtaagtgctcaaggagtggctatggatccaggaaatgtggagtcagttaccaagtggaccctaccaaggacggtcactcaggttcggagtttcttaggacttgcgggctattaccgtcggttcattgagaacttctctaaaattgccaagccaatgacacagcttctgaagaaggaagaaaagtttatctggtctgctgaatgcaatagagttttgaagaactcaaacgacggcaactacctgacccatgatctggagttagccgcagttgttcatgctttaaagatctggcggcactatcttatcggtaaccgttgtgagcgaagatggttggagctaatcaaagattataatatgggaatacactaccatcccggcaaggctaatgtggtagcagatgccttgagcaggaagagctactgcaatgttgcatgggtagaaaaactatgttgtgaggttcaacgcgatttggaacacctgaaccttggtatagttgagcatggattcgtggctgccctagaggcacaacccacacaggtggagcaggttcgcatagctcaagcaagtgatcctgagatagcagaactcaaaaagaacatgagggttggaaaagcccgaggttttgttgaggatgaacaagggacaatctggatgggagaaagattatgtgtacctgaaaataaggagttaaaagacctgatactgacaaaagctcatcaaactcagtattccattcatcctggcagtaccaaaatgtaccaagacctcaaagaaaagttctggtgggtcagcatgagaagggaaatagctgaatttgtcgcactctgtgacgtctgttag

SEQ ID NO: 14556 - DNA, 5166 bp, Oryza sativa
  Clone ID: TFbOSC900160j.C1.o4.fg
atggagggcatgcggtggcaccgagttgttactgtagtatgcattccaaatgagcttcacccaagcagcagcaggagtaccgtctctaatgtttttcctgcattggagtctctgaagttcagggacatgggagcctgggaggaatggtcagaattcaaggatgaacacttcccacagctcaagtatctcagcattgttaggtgtgcaaagctgacggtgctgcccaacttcacttcaggaccaaaacagagaatcaggagttgtgagaaactgctccagcctctatgtcagaatatacggcggaatttgatgaagtacataccaccaccaagtgaactgtcatatgcatgcatggcagaaggttctaccccctctttcttcttcttaagagatattttacggtgtatgcattccaaaaagggtaaagatccaatgctcctcaatcacaggtaccatgttaaagaactaccaaatggtaaaatcccaatcaatcctaaatgtgtcaacattgtgtttggtatccctcgtactggagtgactataaaaccaaacaatccaaagcatgagtttatcaagatactaaagcacttgtttagggtttcatcgggtactcaaatttctgttcaacaattacaagtgcatttgaaggagatcattgccccaacaacatcaaaccaacctagtatgcaatatgccaatgtttgcttggatgttaacaacattgcaaagtacaattgggctgaggacatgctttcaactataagaaatgcagtgctgcagctactatatttagattatatagatgcatctggatgtaatgtgccatggggagagcctagggtggcattttggacagatcaagcagcaaaaccattgaaaaatgctgatatgggatctgggctttatgcagtttatggatcatgcaaggacagcatctactctttaagcatattttcagttactaggacagctgcggtagaggttgagaccttgcgcagcagcatcaacggctccatcgccggcgacatcaccgccgacaaggagcttgaggagctggcaagaggaagggcacgggagcgggcagagcggtgggcagcagcccacctccacggcggcggcggcggcggcggcccaagggaccgcgcgcccgctgacgggaacccagacgggcgcgggcgtgccggcggcatcccggagcccgcgcgcggccctcgcaggcagcgcggctctctctcccctgaccggcgccatggccaccacggcgtccagacggtggtcagggactttggtcccgggggtgggtggcctaccctcaccaaaaccaactacatcgagtgggacgcggtgatgagggtgaggctccaggtgcggcacatgtgggaggcagtctggtacggcgacgtcgactacgacgatgatcggcgggcactggatgccctcatcgctgcagtcccgcccgagatgcagttctcgcttttccagaagcggattgccaaggaggcctgggacgccatcgctgcggcacgcatcggcagcgaccgcgcccgcaagtccacactgcaggcactccgcaaggagtgggacaacctggccttcaagccaggtgaggataagatggtgcagtacggcgatgacacctacgacgaggagagagctgtcgagaagctcttccgctgcgtccgagagaattacaggcagatcgctcgctcgatcgagtctctgctggacctctccacaatgtcgatcgaggaggcgttaggtcgcctcaaggtcgtcgacagtgatgagccacagcctctctcggggcctatcaccattggcgggaagctccatctcactcaggagcagtgggaggcctctcagggtgacaagaggaagggggagtcatcttccccgacaggcggccgcgcccagggcggcgccaccggcaaccacaagccggcacgagacgacgcttgtcgcaactgtggcaagcttggccattgggccaaagaccgtcgacagccacgacgcggccaggcccacgtcgcacgggtggaggaagagccggctctgctcctggctcacgcaagcatcgagctacctccagcggcaccggccgcagcggctttcctccaccttgatgagccgaaggtactcgtctccctctgcaacggctccagcaacaacaaggctgatgggtggtacctcaacactggcgccacccatcacatgaccggccgacgggagttcttcaccgagttcgactccagcgtccgaggctccgtcaagtttggggacgcctccggcgtggagatcaagggcgttggctccgtcaccttcaccgccaagtccggtgagcacaggctgctcaccggagtctactacatccccgcgttgaggaattctatcatcagcgtgggacagctaaatgagaacggctcacacgtgttggtcgaggacggactcatgaggatttggaatcgccgtcgtcgccttcttgccaaggtaaccagaggcactaatcgactctacatcctcagcgcacaggtcgcacaaccagtttgcctcgccgctcgtcgggacgacgaggcgtggcagtggcacgagcgcttcgggcacctccacttcgaggccctaaagcggctcagtgccaaggagatggtgcgagacatgccgagccttgaccacgtggagcagctctgcgacgtctccgtggtaacgaagcagcggcgactcccctttccccagcagacgagcttccgagccaaggagcggctcaagctcgtgcacggggacttgtgtggcccagtgacaccggccacaccaggaggacggcgttacttcctgctgctcgttgacgacctctcctgctacatgtgggcggagtgcggccgcaagctgcgcgtgctgcgcaccgacaacggcggcgaattcacggcggctgaattcgcgtcgtactacgctgatgagggcattcagcgccactacaccacgccgtacagcccgcagcggaacggcgtcgtcgagtgtcgcaaccagacggttgtggggaaggctcaggctctcctcaagcagagggggatgccggccatcttctgggggaaggcggtggtgacggctgtctacatcctcaaccgctcgtctaccaaggccctcgatggcaggacaccgtacgaggcttggcatgggcgcaagccggcggtctcccacctgcgggtcttcggctgcctcgcgttcgccaaggagcttggccacatcggcaagctcgacgacaggagcaccccaggggtgttcatcggctacgcgaagggctcgaaggcctaccgcatcctcgacccggagacagcgtgtgcgcacagcgcgcgacgtagtgttcgacgaagggcgagggtgggtatgggacaaggtggtggacgatggttcgactccgacgtacgacgacttcaccatcaaccggcgaccccacgcgctccagcaccaacagccactcctccgagcacgtctactccgacgccagctcgtgttgagcgcagctcggtggagttcgctactctgctttcccacgacggggagcgcatcgacgcgtaccacgacggcgagcagctacggtaccgtacgatgaaggatcttctcggcgaccagccggtgccgggactggtacctcgcgacctagaggcgcagttgcaccttgcgtgcgacgacggtgagcctcggtctttcacagaggccgagaaacacgcggcatggcgtgccgcgatgcagtcggagatagacgcggttcaggagaaccgcacctgggagcttgctgacctccctcgtggtcaccgcgcgatcacccttaagtgggtgttcaagctgaagagggatgaagccaaagccattgtcaagcataaggcccgcttggtggaacgcggtttcgtgcagcaggaggggatcgactacgacgatgccttcgctcccgtggcacagatggagtccgtgcgactccttgcgctggctgctcaggagggctggggcgtccatcacatggatgccaaatcggtgtttctgaacgacgacttgaaggaggaggtctacgtgcaccagccgccgggatttgtgatccccggcaagaagggcaaggtgctacgcctgcacaaggccctctacggcttacggcaggcaccgagggcgtggaatgccaagttggattccacgctcaaggggatgggcttcgagcaaatggaggaaatgccttgctggtgggatgtggaggtcgcagcgttcaaggaggagatgaaggccaccttccagatgagtgatctagggcctctctcctcctacctggggatcgaggtgcaccaggacgactccaggatcacgcttcgacagaccgcctacgccaagcgcatcgttgagctggctaggctcaccgattgcaacccagctctcactccgatggaggagagactgaagctgaaccgcaatagcatgacggaggaagtggatgctacacagtaccagcgtcttgtggggagccttcgctacctcacccacacacggccggacttggccttctccgtcggctacgtcagtcggttcatgcagcgaccgacgacggagcaccagcaggctgtgaagaggatcatccgctacgttgcggggactctcgaccacggtctctactacccgaggtgtcctggcaaggcacacttcgtcgggtacagcgacagcgaccacgccggcgacatcgacactagcaagagcacgagcgggattctcttcttcctcggcgagtgcctcgttagctggcagtcggtcaagcagcaggtggtggccctgtccagctgcgaggccgagtacatggcagcttccgccgcttcgacccaggcgctctggcttgctcgactgcttagtgatctcctcggcagagacactggagcagtggagctcagggtggatagcaagtccgctctggccctggcaaagaaccccgtttttcacgaacggagcaagcacatccgggtgaggtaccacttcatccgaagctacttggaggaagggagcatcaaggcgagctacatcaacaccaaggaccagcttgcggacttgctcaccaagcctcttgggaggatcaagttcctcaagcgctgctccaggatcgggatggcccaacttccccacaagacgacacacaagacttag

SEQ ID NO: 14557 - DNA, 2799 bp, Oryza sativa
  Clone ID: TFbOSC15292j.C1.o1.np
cctctcaaataattattgatgctataactgtcggtattctcgggcctgtgtacctactgatgcggacatcactacctcggatacacacaacaatcctccaacggtcattcaaggaccgataacaagagctcgaacaatggaggggacaaggagacacttggagaaggacttagagccatggaggatcatctgggacgtccaagtcaaggtggaggcccaaaccaagtcgacgtcgggtgcaattcggagtccaggaccagtctgcactaaaacgggcgcccagcattactatctgtcattggattgtgtaccactcatatacatatatttggccttcctagctccacatattacttctgcacagcacaggttcttgatccctgcaatcgctgactacgccttctaggtatcctttgctttgctgactcaaaaggacatcacggaggccgttgcaaagtctgttcaagatgccttcactaaaatcggtttcctgaaccacatggagaggttggacaagcggatatccacgctatctgatcaggtcgccgcgttggagacaccttccaatgaggaagtggtgagtggtgacgacgatgctcatcctgaagacacggtgtatgattccagtggctatattgatgcactggctacaaggcaagcatggctacgacatcgcctacgcacaaaccgcacaggtatgggtggcactcgccaccaacaaggtaataataataatcatgtgcccgatgatccttatgctaaggttaagtttaaaataccatctttttcgggatattatgatgctgagaaataccttgattgggagatgacggtagaacaaaagtttaatgcccaccttgtacccgagcaacatagagttagacaagccagtagtgagttcaaggattttgctattatgtggtgggctgggttatctgatgagggggtactacctactgcttgggaagaacttaaggtagctatgcgcgataggtttgttcctccatcttatcatagagatttacgcaagaaactgatgcgtttggaacaaggggataaatctgtacaggattactatggtgagctacaaaagggtttgtttcgatttgttatgcttgcagagaaggaattacaggggtgcgaccatcagggcaagagcaaggcaagcacatacactccgcgcacgacgccatctgcgggactgcccaaggccatttcgtttcgggcatccttccagccagcgggcaagcgaccagcagcattcggagcttctgcggcaccaaaaccatctccaccaccacgaccagcagagtcaggtaaaggatcctcgcaggtacccgccaagagtgcctcatatgtcgcctcgacgggacgcattcagtgccaccgttgttaagggtttgggcatgtgcagaaagattgccctagtcaacgggcctatgttgctacagaagatggctacatcaccacctccgacgtggaagaggaagaggaggaagaagaagttgaggatgaggatggcgaagctttggtcgtgatgacacaacggactacagaaccatcattgtgcagcgggtgctcagcacgcagattttctttgtcatcaacaaccgtcgtgcacgtgtgatcattgatggaggaagctgcaacaacttcgtggttaaacgattccggaagagcaaagattctgttgattgcgatgtggttcctatgcaagcttgttcacttttgttgggccgtccttgggaacatgataatgatgcttcacaccatgcaagtggctaaaactgtttttccacctaaaaaggataatctttcacctagttctaaggctaagggaattaagtcgaagggtggtgttatgcttgcaacgaaatgtgacattgctgaaaattcagatgatgatatgtgctatttcttgatatgcaaacaagccttggtttctttagatgatattgctagttcgatacatcttgttgttactaaccttttacaggagtatgaggatgtctttccagccgagatacccccaggattgccaaaccgtgctgcttatcgaactaacctagaggagactaaggaaattcagcggcaagttcaagaccttttagaccacgggtatgtacgtcaaagacttagtccctgtgcagttcctgtaattttggttcctaagaaagatggttcttggcgaatgtgtgttaattgtagagccattaataatattactatctgatatcgtcatcctattcctaggttagatgacatgcttgatgagttgtgtggctctataattttcacaaagattgacttgcgtagtggctatcaccaaattagaatgaaacttggagatgaatggaaaacagcttttaaaactaaatttgggttgtatgagtggttagtaatgccttttggtttgattaatgcacctagtactttcatgcgcttaatgaatgaggttttaaggccttttattggacgatttgtggtagtgtactttgatgacatattgatttacagcaagtctttgaatgaacacatggatcatttacgtgctgtttttaatgctctacgcgatgcacgtttgtttgctacccttgaaaagtgcatcttttgcacggaacgagtctcctttcttggatatgttgttactccacaggggaattgaggtggatgagtcgaaaattgaagccataaggagttggccggttcccgaaaccatcacacaggtgaggagctttcttgctctgtgtgatcctagccgctccgccgccactcacggttgtcggagtaacacttccg

SEQ ID NO: 14558 - DNA, 7056 bp, Oryza sativa
  Clone ID: TFbOSC18058j.C1.o2.fg
atgtcatggcacagggccggtgtcctgctgctgggggctcagtcctgcctacctgtcccgggggttccggccgtaggtggggttgggtcggtactcttgtttatggctaggatgggttgggaactatgtcacgtcttccgtccgtataccgtggtgatgtttaacagagaaaaaggaaagaatgtcagcgggtatgcctcaagtaactcaagttttcaactcaatccaccactggcctcaagagagttaacaagggcacacccttggtccattccgagtatgctgcttagttcacagctaccattggttcgaagtcaagaccagaatcagtgtgtgtttgatcgagcatttgccacccaggtcaatgagcctccaatgccaaaagagcatgtccccttttgtcatgattgtagagagcaaggacactatgccctgaattgtccatgggtatatgccaaagaagccccttcctttggtttaacagggcagacatcgctaaaccagcctcctcgcaccaagtcaagcttgcagcctagtgtgcaaagtagagagcccaatggagagaatccattgaatcccgggaaatgctttcctcctagcctttcgtaccacgtggggtcacgtactaagcaagccaaaggcaagaagagtaagaatcagaagagaaaagcgtcgatgcgaactgaagaagaagtacgtaagatggctattagcagcaccgaatggcctcccgcagggataactattcctagacgtcaaagaggaaataccttccgaggtgcacgacagttgacccagcacctcctaagccatggtggcagagtatctgatagtgaagggtcagatcaagtctcctcggatgatgaagatgagtctccccgacatctcggtgaggaagagatggaatcaaaggcatgcacccgttgtggagaaattggacacattgctagcaggtgtctcacactctgccctcgttgtgaagaagaccatccaccaggggagtgtcccacccgcaaggtttctctgaaaggcagcaggctcaagtaccacatcgtcaccagaagcatccacaactctcggagtgaaaagtacttagttgacaaaggtcgaaaggtgatcaagatgtttaacagagaaaaaggaaagaatgtcagcgggtatgcctcaagtaactcaagttttcaactcaatccaccactggcctcaagagagttaacaagggcacacccttggtccattccgagtatgctgcttagttcacagctaccattggttcgaagtcaagaccagaatcagtgtgtgtttgatcgagcatttgccacccagatggatcgacaatggatgtacgctgaccggcggtccaaagagtttattgacggcgtgcactattttttgagagtggccgaagctaacaggcaaaggggttttatttgttgtccatgcaataagtgtaagaatcagaaggagtattctgcatacaggactattcatttccacttgtttgagtcggggttcatgccaagctataattgttggacatcccacggagagcaaggtgttgaaatggaagaagatgaagtggaagacgacaatattccggactttgctcagtatgttggatttgaaggaaatcaaacgggcgaggaggaaatagctgctgatggtaacgacgttgcggatgatcttggtcagatgttgcaggacgccaaggaggtctgcgaaagtgaaaaggaggcccataaattggacaagatgttggaggaccacagaacttcgttgtacccaggttgcgagcaggggcacaaaaagttggataccactctggagttcttgcaatggaaggcaaaaaatggggttagtgacaaggcatttggcgatttattgaaactcgtcaagaacattcttccggagggaaacaaattgcccgagacaacgtacgaggctaagaagatagtctgcctgctaggactggaagttcagaagattcacgcatgtccgaatgattgtatcctatatcgcggtgaggagtatgagaacctagaagcatgccatgtttgcaaagcactacgatacaagattagacgagacgatccaggaaaagttgacgggaacaaggggaatgctagaatgatgcggtggcacactgaagagcgtcaacaggacgggatgctgagacaccccgccgatggttcgcagtggcgaaacatcgacagaaaatttaaagaatttggaaaggacgcacgaaacatacggtttggtttgagtacggatggcatgaatccttttggagagatgagcagcggccatagcacttggcccgttacgatgtgtatctacaacctccccccctggttatgcatgaagaggaagtacataatgatgtcgattattattcaaggccccaagcaacctggtaacgacatcgatgtgtacctaagaccactggtcgaagatcttaaactgttgtggaagaaggaagaaagtacgtatcttaagcactgtaggaaggttgtatacatgggtcatcgtcgattccttgcagcaaaccacccagtacggaagaaaggcaagcacttcgaacataaggccgaccaccgtacgaagcctaaacatcgcagcgggaaaacagtgttcggaaaggggcctggaagccagcctatagagagcgaagatggtcacgcggcgatgtggaaaaagaactctatattttgggagttaccatattgggaattcttggacgtacgccacgcaatcgacgtgatgcacctcactaagaacctttgcgtaaaccttcttggcttcctaggtgtatacggaaagtcaaaagatacactggaagcacgtaatgatctaaagcatatggaacaacgaggcgaccttcacccggaaccaaaggagaaaggaagtcattacttgagtgcagccagctacactcttagcaaggcagagaaggaaagtatgtttggatgcttggagagcataaaggtaccatctggatactccacgaatatcaagcgaataataagcacgaaggagaagaagttcacaaacctaaagtctcatgactatcacgtgttgatgacacaactgctaccagttgtaataaggggtatacttccagacaatgtccgggcaacaataacaaagctatgtgcattcatgaacgcaatttcacagaaggtcatcgatccggatagattagaagcccttcaaaatgaagtggtgcaatgtctcgtcagttttgagttgatatttccaccttcatttttcaatatagtgacgcatctgctttgtcaccttgtgaaagagatcagtattctcgggcctgtgtatctacacaacatgtttcctttcgagaggtacatgggcgttctgaagaagtatgttcgtaaccatgctcgtccagaggcaagcatcgccaagggttatggaacagaggaggccatcgaattttgcatagaatttatcgaagaccttcgcccaatcggggtacctgaatcacgccatgaggggagactacggggaaagggaactctcggaaggaaagcaataatgacggtagacaacaatttattccgcaaagcccatttcactattctgcaacactcttcattggtagctccttacaacgaggagcacttggctctagttcgcgccaggaacatcgcccaagacatgaagagcacgaaccaaaacagcgctgttcgtgtcgatgccatgggacacgatggaacaactgccacgtattacggtgctatcgaggacatatgggaatttgactatggtcctctcaaggttcctctgttccggtgccaatgggttaggttgactggtggaggcgtaatgattgatgacagtgggatggcaactgttgaccttaacaaggttggatactcggacgaaccttttgtccttgccaatgatgtaacgcaagtctttttcgtgaaggacatgtctagcaaaggaaagaagggcagagggcctgacgagcctaagcgtcaagtggttctcccaggcaaaagaaaaatcgtcggagttgaggacaacactgacgaggattacgatcagttggatgggcaaccccctttcacggtgacgattgaccctagcatcctcctatcaattgaagacaccccttactcatatagcgatcacaaggagggaacaatagtgaggagaaaatggctgaccgcgatgagtaacagatattatacgtacttgaatgaggaagggaacgtggagagggatgcggaggggaaccagcaggggcacgtggaaagggatgtggaggggaaccaggaggaggaggctagtggaagtcaaccctccgttggacagaagagggcacgcgggcaacgaggtgcagcgaagaagcttgagggtcggcacatcataacggaagtggaagaagatggacgtcctagtgccccggccgaagctgccaagaactatgtacgtcacagcggttgggttgtgcgggataacgtgcctatcagtacggtgtactggcgaagaacaagggcacgcggagatcatgagagctttgtcctagattcggagaaagagatgctgtggaccacaatgctcgagacattcacccttcctgcgggtacagaggacaaagtgaaaaggtggactctgaagaaaatggcagaacagtttcagagcttcaagggagatctgtaccagaagtatatcctgaaggggcagacaccgaacttcgacacattcccaaagctaagggatcactgggacgagttcgttgtatataagacaggtgaacaagggcaggtgatgatggaaagaaacaaagaaaatgccgccaagaagaagtaccatcaccacttggggtcaggaggctatagcgtcgcgatgccgaagtgggaggagatggaggctagcttgcttgagaggggtatcgaaccggcaactgctaattggccgaaacgatcgaagttctggtactatgctcacggtggaacgctcaacccagctgatggctcactggtcttcggcgatcagatacgagaggctgcgcgacgactaacagatgtagtggaagcctcctcacagggcacattccaaccggacagagatagggacgagctgacactcgccctacagactccagagcatctaggacgaacacgagggaaaggggtgattccttggaagattggtttcaaggaggacatccagacgtacaggagtcggatgaggagcaagagagataccgaggcgaagattgcagatttagagtcctgggtatcgagctatgagctcaacatgcaagaggaggtggcaaggaaggttgatgaacgcatggccgcacatcggtcccatgatccccagccgaccattcctcctgcaatgttgagcccgtcaggaaaccatagcagctacgcctcaacggggcaagtaggatcacagagcatggacgccatgcaaacccaggatgaatcgacctgtcctgttgatgacatcactcagcggacaccatgtgagctgtatattcctttcaagaacttatcaataaaggtggcgtcgggcatggccatcccaacggacccttcaggtacttaccactgcaggccgattccagcaggatactcgaaggtcgaagttgagttggtcgaaggagcgtacgaggacctcgagctagattaccctggaggagacggcggtacatcatcctccctgggcgacaagcggcgtctcatggaccatctcctccggctccgccatctcctcctcaggatcctgcaccgtctcctcctcatgctccgccagcaccgtctccacttcaggctccagcaccgactgctcctcaggctcctgcaccgactcctcctcgggctcctacacctactcctccgcaagctcctcttccggcaccttcaaagtcaagggccccctccagctccaccgcctgcccacacaagggcaacaaagaaggcgaaagttgacgccgccaagaacaaggacccggggtacgattgcacgcaagaggagcttgacgtttacgtggcatcagaagtcaagagacaattcaagcctcgaagtccagaaaagaagattcctatagacccgagtgtcaggaacttcttcaggggtatgtctgcacctgtcaaggaggccatcaagctatcggactatgagcgaacgctgaagaaagcatcttctggaaagtccaaaccagtccctcagcttggagagcaaccaaaccatgatatcgagccgttggtgaccggggaagacatgacgatagaagaatttattactgacaccggtctaactacggatcaattgctaggagtcgaaccaatagaaaaggcggaagtgaaatacatgtacaaactcggcaaaccgcttgtcaagcccgagctggtgcagtccctacccacacaaatgtacaagttccatcagctgtacatggagatgagcgccaccggtagagagatgatcggagcgaggatcagggacccggacttcttgcaaggagatgacattctctggatcaatttcaagggaatctacgaactataccagctggacgccctcgacgtctctattatgagttgctggattttattccactgggtgcttttactcttcgacctgtcggcctgcaccgtcaacgtatatgactcaatggataaaaaagagtctacgtttgacaaggttttcgaacttatagacagggcttggtatcagttccgtcatttggtccgcggcaactggagagaaagacttaagcggaagttcaaatttccttgcgcaaagcaaaagcagggaactaacttgtgcggctactacgtgtgcgagtattgccactgccttgtagaccaaatcatcaccacaagagagctcgattttattcgcatgagggataacctgaccacacacaaggaatttatcgcggcggttcaagaacaactcatgggattcatcaacgaagaaatccttgatcccaagggtgaattttactacgacggaaacacaattcataggtccttagcttctgagctagtgactactactacgtcgaaatcgtag

SEQ ID NO: 14559 - DNA, 2797 bp, Oryza sativa
  Clone ID: TFbOSC401958j.C1.o2.np
cctctcaaataattattgatgctataactgtcggtattctcgggcctgtgtacctactgatgcggacatcactacctcggatacacacaacaatcctccaacggtcattcaaggaccgataacaagagctcgaacaatggaggggacaaggagacacttggagaaggacttagagccatggaggatcatctgggacgtccaagtcaaggtggaggcccaaaccaagtcgacgtcgggtgcaattcggagtccaggaccagtctgcactaaaacgggcgcccagcattactatctgtcattggattgtgtaccactcatatacatatatttggccttcctagctccacatattacttctgcacagcacaggttcttgatccctgcaatcgctgactacgccttctaggtatcctttgctttgctgactcaaaaggacatcacggaggccgttgcaaagtctgttcaagatgccttcactaaaatcggtttcctgaaccacatggagaggttggacaagcggatatccacgctatctgatcaggtcgccgcgttggagacaccttccaatgaggaagtggtgagtggtgacgacgatgctcatcctgaagacacggtgtatgattccagtggctatattgatgcactggctacaaggcaagcatggctacgacatcgcctacgcacaaaccgcacaggtatgggtggcactcgccaccaacaaggtaataataataatcatgtgcccgatgatccttatgctaaggttaagtttaaaataccatctttttcgggatattatgatgctgagaaataccttgattgggagatgacggtagaacaaaagtttaatgcccaccttgtacccgagcaacatagagttagacaagccagtagtgagttcaaggattttgctattatgtggtgggctgggttatctgatgagggggtactacctactgcttgggaagaacttaaggtagctatgcgcgataggtttgttcctccatcttatcatagagatttacgcaagaaactgatgcgtttggaacaaggggataaatctgtacaggattactatggtgagctacaaaagggtttgtttcgatttgttatgcttgcagagaaggaattacaggggtgcgaccatcagggcaagagcaaggcaagcacatacactccgcgcacgacgccatctgcgggactgcccaaggccatctcgtttcgggcatcctcccagccagcgggcaagcgaccagcagcatccggagcttctgcggcaccaaaaccatctccaccaccacgaccagcagagtcaggtaaaggatcctcgcaggtacccgccaagagtgcctcatatgtcgcctcgacgggacgcattcagtgccaccgttgctaagggtttgggcatgtgcagaaagattgccctagtcaacgggcctatgttgctacagaagatggctacatcaccacctccgacgtggaagaggaagaggaggaagaagaagttgaggatgaggatggcgaagctttggtcgtgatgacacaacggactacagaaccatcattgtgcagcgggtgctcagcacgcagattttctttgtcatcaacaaccgtcgtgcacgtgtgatcattgatggaggaagctgcaacaacttcgtggttaaacgattccggaagagcaaagattctgttgattgcgatgtggttcctatgcaagcttgttcacttttgttgggccgtccttgggaacatgataatgatgcttcacaccatgcaagtggctaaaactgtttttccacctaaaaaggataatctttcacctagttctaaggctaagggaattaagtcgaagggtggtgttatgcttgcaacgaaatgtgacattgctgaaaattcagatgatgatatgtgctatttcttgatatgcaaacaagccttggtttctttagatgatattgctagttcgatacatcttgttgttactaaccttttacaggagtatgaggatgtctttccagccgagatacccccaggattgccaaaccgtgctgcttatcgaactaacctagaggagactaaggaaattcagcggcaagttcaagaccttttagaccacgggtatgtacgtcaaagacttagtccctgtgcagttcctgtaattttggttcctaagaaagatggttcttggcgaatgtgtgttaattgtagagccattaataatattactatctgatatcgtcatcctattcctaggttagatgacatgcttgatgagttgtgtggctctataattttcacaaagattgacttgcgtagtggctatcaccaaattagaatgaaacttggagatgaatggaaaacagcttttaaaactaaatttgggttgtatgagtggttagtaatgccttttggtttgattaatgcacctagtactttcatgcgcttaatgaatgaggttttaaggccttttattggacgatttgtggtagtgtactttgatgacatattgatttacagcaagtctttgaatgaacacatggatcatttacgtgctgtttttaatgctctacgcgatgcacgtttgtttgctacccttgaaaagtgcatcttttgcacggaacgagtctcctttcttggatatgttgttactccacagggaattgaggtggatgagtcgaaaattgaagccataaggagttggccggttcccgaaaccatcacacaggtgaggagctttcttgcgcaagccaaacccttgcgccaccaactccgcctcaccgaggtgattccatttttc

SEQ ID NO: 14560 - DNA, 1692 bp, Oryza sativa
  Clone ID: TFbOSC101997j.C1.o12.gm
atggagcagctttgctgcccggggcggagggtggcgtcggcgtccagccgtggtgaggaaggtcgccctcccgcagtggcgcaccaggggggctcctcgcaagctgggagtgagcaatccaccaaggctggaggtggagagatgaggggccagatgaacaaaggggggaagctgcagcaatatcgtccagttcagaaggagaagaatcaaactgaagagaagattgcgacatctgcagtgactcctcagactgcaacccagcaaccaactccaccacccaattctcgcactggtatgcaaactaacccacagagaattttctgccacagatgcaaaggttttggccacatggctagggattgtagcaatgttgtcttctgtataaattgtgccaaacccacacataggacagaggattgcatctatgacaagcagccgaggcctatggcaaagctagtagggtatggtgctccaggtttaggttgcatcttaattcaaaacactaagcctgacccacctaaggagcataataatcctctggctatgatctctactgtctttggtggagaattgacagaagctcaacttgagcaaggtttcacgcaacaatttaagtggaattgggtttggaaagctaaagcaatgcctaatggaagctttcagatgagatttcgtaacaagataaagtttgatgagcttgcaaactttgattatttcaatgtcaagggcactgatgtgcaagttaatgtgaaagaatggacccagaaatctgaagcagttgggaagttgcatattgtctgggtcaaaatcactggaattcctgaggaaatgaagggttaccaagctttgtatgaaattgggtcaaatctagggcctgtcttggaggttgatatggctactttcagagctagcaatgtgatcagggcaaaagttggaatgatggagctggtcagagagaggaagcaagtcctggtgccagaattgatgctgggagaacataagatcaaatgtgcacagatcttgagagacatggagttggcaatgcaactgcagaaaggagactgggataaggagaatagagtcagttttgatatgggtttgaatcaagaagacaaggacaaagtagatccgggggacagtgaagattacatggattctcaggagtctaagggaagttttgctaagaggttggggattaatctaactgaagaagctcttggaagtcaagatgaagagatgaggagaagcaagagactgaaagacaaggaagataagaggatgaaggcctttgaaggtcaagctgagctgttgagatacatcactgctttctacaaggatctttttggtcattcaaaactgaacaacataaaattagatatgggagcagaagctttgactgttttgatacaaagagctgaagataataagttgattgaaggttggtggcaagatatactaagagataagtatctcaaaaacaaaaatcttgctggtatctctgtcaaagctggtgattcacacttctggcaagggctcatggaagttaaaaacatcttctacaagttctgttcgaagaaagttggtgatggggaaaatacatgcttttgggaagacaattggattggtgaagttggaagcaaatcgaagaagattggtactgggagccagactcataaagcaggtggcaagtga

SEQ ID NO: 14561 - DNA, 299 bp, Oryza sativa
  Clone ID: TFbOSC3190j.C1.o1.np
ccatgccatttcgggtctttgggatgagagagtggtgaattttggttgtacgatgcgcttagctgacataagttttatgtcgaaattcactttcatcaaaggttttaagtgtcatgcttgtgttcaaacgaaacaatgtcgcaaggctcacaacacatttgaggcaagaaatttggcaacgctagaacttattcatttcgatatgtgcaaaatgaatggggaaagaaatacttcgtgatacttatagataattgcactagattctgtgaacttgttttgacatggacagtagaaagcaa

SEQ ID NO: 14562 - DNA, 1050 bp, Oryza sativa
  unsure (1)..(1050): unsure at all n locations
  Clone ID: TFbOSC32359j.C1.o1.fg
atgccccgttttgacagtaatggatccccccaaatccactcacctccaacagttggttccccatctccatcatctgtggggagagagcccgagaaatttagggttgagagggtgtggaggcgaaggagtggcctcgattggggatcggaggtggtgaatctcggtggagaggcacaatccaaggcgataagcgtcgatttgcaagggtggttcgtgggcgaatggcgaatcaagggcatccaggcggagggtggcgtcggcgtccaccgtggtgagaaaggtcgccctcccgcagtggcgcaccaggggggctcctcgcaagctgggagtgagcaatccaccaaggctggaggtggagagatgaggggccagatgaacaaaggggggaagctgcagcaatatcgtccagttcagaaggagaagaatcaatctgaagagaagattgcgacatctgcagtgactcctcagactgcaacccagcaaccaactccaccacccaattctcgcattggtatgcaaactaacccacagagaattttctgccacagatgcaaaggttttggccacatggctagggattgtagcaatgttgtcttctgtataaattgtgccaaacccacacataggacagaggattgcatctatgacaagcagccgaggcctatggcaaagctagtagggtatggtgctccaggtttaggttgcatcttaattcaaaacactaagcctgacccacctaaggagcataataatcctctggctatgatctctactgtctttggtggagaattgacagaagctcaacttgagcaaggtttcacgcaacaatttaagtggaattgggtttggaaagctaaagcaatgcctaatggaagctttcagatgagatttcgtaacaagataaagtttgatgagcttgcaaactttgattatttcaatgtcaagggcactgatgtgcaagttaatgtgaaagaatggacccagaaatctgaagcagttggaagttgcatattgtctgggtcaaaatcactggaattcctgagnaaatga

SEQ ID NO: 14563 - DNA, 2476 bp, Oryza sativa
  Clone ID: TFbOSC417104j.C1.o2.np
agaagatgagggcaaaggacaccgccaagcaaaaaggtcgagtgaggttctagcgcctatttggtgtagaagaagaacccttgtgcatctcacaacaataagaagaaggtcaaacccaaggctacaaccaattttaagaaaaaagacaaggaaaaagcaaagggcaactgctttgtgtgcggtaagcctgtgcattgggtcaagaattgtcctgatcacaaggacaaaaaagtctgcaaatatggttattagcgatggaggaggaacatcagggtacggtgactttttacctacagttctctttgttctcactcaccagattggtgggttcatactggtgcaaatattcatgtgtgtgcgaacattttcctattttcttcttatcaggtcggcagaggttcctccttgctgagggggaacggtttgcttgtagctgctcatggtgttggtacggtcaatctgaagtttacttcaggaaagaccgtgcaacatgtcacctcaataaaaaaagaatcttgttagcggctctttattgtgtagagatgattttagacttatgtttgaatttaacaaatgtgttgtatctaaatattggtaaaggttatgacagcggaggcttgctccacttttacttagatgatatgtgtaataaagatgtgaatcatgtaagtaatgatgatgagtctaatgagtggcattcgcgactttgtcatatgaattttggttgtacgacgcttagctaacatgagtttaatcttgaaattcactttggtcaaaagttctaagtgtcatacttgtgttcaagcgaaacaacctcgcaagcctcataaggcatcagaggtcagaaatttgacacctctagaacttgtttattccgatctatgcaaaatgaacagtgtgttgactaaagagggaaaaaatatttcatgacacttatagaggattgcactagattttgctatgtgtatttcatgaaaacaaagaataaagcattgcagtactttaagatctataaggttgaggtagaaaacctacttgaaaggaaaatcaaatggtcgaggtctaaacgaggcgaagagtattttcctaatgagtttatttcatcctgcgaagagtctggatttattcatgagaggacgcatacctattcaccctagtcaaacggggtagccaaaagaaagaaccacactctaaatgtgtttgtgaatgccatgttagacactgtagaactttcaacggaatggtggggtgaggcaatattgactgtttgtcatgtcctgaatagaattcctactaaaaataaacaagtaacaccattcgagaaacggaaaaagaagaagttaaatctctcatacttgcgcatatggagatgtttggctaagattagtgtgtctatagttaaaaagtgcaaacttggaccaaagactatagattgtgtgttccttggttatgccatccacaatgtgagatataaactcctaagagtaaattttggagtatctgacatgcgtgttggtacaataacacagtatagagaagttacattttttgagaatgaatttcctatgaaagatacacatagcacttctagtcaagagcctatttatcccctagtcttttgtgctgatagaacacaatgaatcgaacgcctgaggaaaatcctgaggaggacaatattgtagctactcgaaagagtaacagacaaaggactacaaagtcttttggtgatgactatattgtataccttgtggatgacactccaagaacaatagaagaggcatattcatctcctgacgctaactattggaaggaagctgtgtgcgatgagatggactctattatgtctaatggtacttgggaagtcgtcgagtgtctatatgggtgcaatcatgtaggatgcaagttggttttcaagaaaaagcttaggcctaatggtataattaaaaattacaaggcaagacttgtggctaagggttatacccaaaaggaaggcgaggattttttttacacttattcaccagttgctcgcttgaccacaattcgaatactacttgctctgggagcctctcatggtcttctcgttcaccggatggacgttaagataactttccatagtggagtgttggaggagaagatctatatggatcaaccagatcgggtatgtattaaaaggtcaagagggattgatgtgcaagctgctgaagtcttttcatggctacagagaagcgcctaagcagtggcatgagaagtttaacaaaactctgatatttgttggctttgttttgaacgaggctaacaaatgtgtatactactgatacggttggggagagacagtgatcttgtgtttatatgacgatgacatattgatctctaggaccagccttaatgtggttgaggaggtcaaggactttctgtccaaatgctttcagatgaaggatttgcgaatggctagtgttattcttaacattaaactaca

SEQ ID NO: 14564 - DNA, 1218 bp, Oryza sativa
  Clone ID: TFbOSC101188j.C1.o2.fg
atgtccttccccgacgaggaggaggacgaggccttcctcctcgccgtagcggccacggaggaagcggcgctggcctcctccgactcctccaagcgccgccgcctctccatgacctcgtcgacctcctcgtcaccgacttcggccactcctccccccgccgccgtccccgaggggccctacctggccgcgctcaagggaagccacagctccgcctggaagcagcagcaggagacgctgagccaggcgcgcaagcgtcccggtgggtcccaaaccctagccaccccaggtagcggcagcggcagcggcggcgcgcaggtcgcgaggggcggcgcgtgcttcaagtgcggggactcttgccactgggcaagagaatgcccgcaatccgtgccagctactggcggcggaggaggaggcggggcctttggtggaagcggaggagggggtggtgggtatggggacgcgggtggggcggtggaggagaaggcttgcccctgcggcgccgggagttgcctagtgctcacatccaacacgcccaggaatccgggccgcaagttctacaggtgccccatgcgggacaatggaggttgcaactactttgagtggtgtgataacccatctccaggtcctgcaaatgtcagtggcaatactgtttttcagtcagatacatcagttgcgcatatgctttgcccctgtggtgctggagcttgcttaattctcaccacaaagacaggaaagaatgttggaaggcagttttatcgttgcccagctaatcagggcatttcatatctctttcttaatgtacgatcgggacatatctccagggaggtagctcttgtggctatttcaagtggtgtgatgaacaacagcttaggacagctgctccactgcaagcttcaacacaatatcatactgatgttgcttcaagtggccaaattcccagcaagaggagctcctccgcctgcttcaaatgcgggcaagagaaccattgggcaaaggactgcccaaatcaatcttcagatccttatcctgacaaaggtgggagaacatttacttctgcaagctctcccgatgcgtgtttcaagtgtggtaagagcgggcactggtcccgtgattgccccaccgcaaattgtggttctagtaccgtctccagccatgtcaagtcctcttctactttgggctcatggaacagccacagatactgatagccggtacctgtga

SEQ ID NO: 14565 - DNA, 3150 bp, Oryza sativa
  Clone ID: TFbOSC400742j.C1.o1.fg
atggcagctcctgcaccatccagttttaacttgcggtctattcttgaaaaagagaagttgactggaacaaacatcatggattggtatcgcaacctgagaattgttctcaggcaagagcacaaagagtttgtgcttacacagccttttccagctgacttgcccaacaatgctcctgctgctcaacgtagggagcatgaaaagcgatgtaatgattatcttgatattagctgtctcatgcttgctactatgtcccctgagcttcaaaggcaatatgaggcattggatgctcatacgataatcacgggactgcgtaacatgtttgaggaccaagcaagagctaagaggtttaatacctcaaagtccttgtttgcgtgcaggcttgcagaaggtaatccagtgagcccacatgtgatcaaaatgattggttacaacgagactctggaaaagcttggttttccccttagccaagagttggctactgatttgattctccagtcgctccctcccagctttgagccgttcatattaaatttcaacatgaacaacatgaacaggaccttgacaaaattgcctgggatgctaaagactgccgaggaaagcattaagaaaaactccaaccatgtgatggttatgcataagcgcaagcccaacaacaagaagagtgggcctgctaaggatgcagagtgcttcttttgcaaggaggcaggtcattggaagagaaactgtaagaaatacctagagcagctcaagcagaagcagcaggatggaaagagttccacctcagagggttatggttttagatctgtggacaatgattgttcagtctattataatgacattttctatttccatgcacccatgatgagtggcttatacattgtgaatcttaatggatattcagtctataacattaatgcaaaaaggcaacgtcctaatgatttgaatcccacttttatttggcattgtcgcttgggtcatataaatgagaaacgcatggagaagattcatagagatggacttctacactcttttgattttgaatcatttgagacatgcgaatcttgtttacttggcaagatgacaaaggcacctttcacgggtcaaagtgaaagggcaagtgaactattggcactagtacatactgatgtatgtggaccaatgagctcaactgccagaggtggttttgggtacttttttacctttaccgatgactttagtagatatggttatgtctacttaatgaggcataagtctgagtcctttgaaaagttcaaggaatttcataatgaggtacaaaatcatttgggaaagacaatcaagtatctacgatctgatcgtggtggagagtacttgagccttgaatttggcaatcatctaaaggagtgtggaattgttccacaactcactccgccaggaacgcctcaatggaatggggtgtccgaatggaggaatcgtacattgttggacatggtgcgatcaatgatgagccaaactaatcttctgctaagcttttggggttacgctctagagacaactgcgttcacactaaacagtgttccatctaaatcggtggataagacaccatacgagatatggacagggaagcgtcccagtttgtctttcctaaagatttggggatgtgaggtctatgtaaaacgtttgcaatcggacaaactcacacccaaatcagataaatgcttctttgtggggtatcctaaagaaacgaaaggatattatttttataatcaggaagagggcaaagtgtttgtcgcccgacacggtgttttcttggaaaaagagtttatttcaagaaaggatattgggagcatgttgtggaagcaccggtttcgcgaagatccgaagaaaaagacagatgtagatggcaatgttcacatctacaaggcacgattggtggcgaaaggtttcagacaaattcaaggtgttgactatgatgaaactttctcaccagtcgccatgctaaaatttatttggattgttttagcgattgctgcctatttcgattatgagatatggcaaatgtatgtcaaaactgctttccttaatggaaatctggatgaggatgtatacatgacacaacctaagggatttgacgatccacaatcagctaaaaagatatgcaagttgcatcaatccatttatgggttgaagcaagcatctcggagttggaatattcgttttgacgaagttgtcaaggcgttgggctttgtcagaaacgaagaagaaccttgtgtatacaagaagattagtgggagcgcactagtgtttctaatcttatatgtagatgacatattgttgattgggaatgatatttctatgcttgaatccgttaagacatcgttgaaaaatagtttttcaatgaaggacttaggggaagcagcatatattctgggcataaggatctatagagatagatcaaagaggctaattggattaagccagagtacatacattgacaaggtgttgaagaggttcaacatgcaagattctaagaaaggtttcttaccgatgtcacatggcattaatcttggcaagaatcagtgtcctcaaacgactgatgagcgaaataagatgagtgtgattccatatgcttcggcaattggatccatcatgtatgctatgctatgtacacgtccagatgtttcatatgcacttagtgcaacaagccgataccaatcagatccaggtgagagtcactggatagctgtaaagaatatcctgaagtacttgagaagaactaaggatatgttccttgcctatggaggacaggaagagctcgttgtaaatggttacactgacgcaagcttccaaatcgacaaagatgattttagatcgcagtctggatttgtgttctgcctgaatggaggcgctgtgagttggaagagttccaagcaagatatagtcgttgattctaccacagaagccgaatacattgccgcttctgaggctgtttggataaagaaatttgtttctcaactgggtgtgatgacgagtgcttctagctctatggacctctattgcgataatagtggtgccattgcgcaagccaaggagcctaggtcgcatcaaaagtccaaacacattttacggcagtatcacctcattcgcgagaagtgggtagaggagatgtga

SEQ ID NO: 14566 - DNA, 4119 bp, Oryza sativa
  Clone ID: TFbOSC26817j.C1.o2.np
atgattatttcaggtggctactgcttgatgggttgcattaaagatattccgaccctgaagggagataactacgcagaatggaaaagaaaactcgacattgctttcatcttgggagaggtggactgggtgttgactaccccatgtcctatagaacctgctgcacttgtcagagttgaaaatgagtcagatgctgactggcaaagaagacagagggacaatgctcccctcataatgtcgtattacattgagcaaaagaaatggtccttagtcaacaagaaatgtttggctgtggtaaagaacacgattgagccaaccttattgggctcaatcccagagtgtgacaccatctctaagtaccttgaaagaataaagagccaatttactggttcttcaaagacttatgctacacagctaataaagcagcttgtgacagaaaggtaccatggaggtggtgtaagagaccacattcttaggatgagcaacatggcttccaagttgaagccaatggatttgggcatctcagatgactttcttgtccatttggttatggcctcattgccaaagcactttgacaactttgttgtcaactacaatataagtccagagaaatggaactttgaaaagctcatcgctaattgtgtgcaagaggaggaaagaatcaaagagtccaatggagactctattaactatgttaaagataacaagaaaaagaactacaagtcaccctcctcaaaagcaaaacagcctcagcatctgccttagcaacaacagttcactgttgaaaaggatcagtgtctccactgcaagaagacagggcattacaagaatgattgtcctgacttcctgaaaataatcatggcaaagaaaggtgagaacattattacatttgtaaatgaatctcattatgttggttattccagatccacatggtggattgattctggagcaactattcatgtgtctaattgtttaaagggattccgttcgacgagaactacgtaaagaagcgaaagctccattagagtcgccaatggagttgaagcaaaagttgaagctgttggagatcttcgcctagagctcgcgaatggcttcacacttttacttagagatgatttttatgttccttctttgcaaagaaatttaataagtgtatcgaaattggatttcggtggataggattgccattttggaaatggaaaatgtaaactatggtataataatgcatgtattggtcttgctgtgttgcaagacgagctttatttgttatctcttcctgagaatgtgaatgttgtgtcctcgttgacaaaagaaaacaagaaaagaaagagaactcctgatgtctcatcgaaattatggcactgtcgtttaggccatatttcaagggggagaattgagagactagttaagaatgaaattcttcctccattagagttatcagatttagaacaatgcattgaatgcattaaaagaaaatttgtaaagagcataaaaaagtgtgcaaaacgaagcgtaggaattttcgagatcattcacacagatatttgtggtccatttcctgtgaaaagtgtagatggctatgactcgttcataacattcacagatgattactcccgatatggttatatttattcaattaaagaaagatcagaagcattggataaatttaagatattcaaagctgaagttgaaaatcagcatgacataaagattaaagtagtaagatctgaccgtggggggagtactatggtcggcatacgccttatgggcaattccatggaccttttgcaaggttcttgctagagaatggtatagtagcccagtattcaacaccaggtgaacctcaacagaatggggtagtgaaaggtgtaaccgtacccttatggatatggtgcgcagcatgatgagctactccaccttaccattgggtttatggatggaggcattaaaaacctcaattcatatcctcaacatagttccaagcaaattggtgcccaaaacaccgtatgagctatggacaggaagagtaccctcgctagctcacctccatgtgtgggggagtcctgcagaggctaaaatatttaacccaaaccttgggaaattggatcccaaaacagtaagctgtcattttattggctatcctgaaagatcgaagggttatcgtttctactgtccaaacagttatacaaagtttgtagaaatgagacacgccgtcttcttggaagacgaaatgattaggaggagctcggtagttcgagaaattgatcttgaggagaggcaggtgtctgtaccggctccgtcgactcaagagccttttttctctctacctgctgatgttgtgcctgcaatgcatgacgttgcggtactagcacctattgttacccctcctgtggcaacattgaatgaaagtgaggaacctgttctacaggattcaacaaaaattattgccatacaagaggaggaggtgcaacagcctcaaacagagaatgtgccaaatgtggaggcccctagaaggtctgaaagagtcagaagatcggctatctgtgatgactatgaagtttataatatagatagtcgcatatggaggatgatcccacctcatatgaagaggccatgagaagcgttcgctcatctgaatgattggaagccatgaaagatgaaatgaaatcaatgaaactaaacgatgtctgggatttagaagaaattcctaaaggagccaagacagtaggctgtaaatgggtctataaaaccaaatatgagtccagagggaatatagaaaagtttaagacgcggcttgtggcaaaagttttcacgcaaagagaagaaattgattacaatgagacattttctccagtctcttgtaaagattccttcaggattataatggctttggtggcacattatgatttggaattacatcagatggatataaaaacggtatttctaaatggagatttgaaggaaaaagtatacatggcacaaccgaaaggttttgtcgtgaaaggaaacgaaaatatgggatgtcgtctaaagagatccatttatggattaaaacaagcttcgagacagtggtacttgaagtttgatgggacaataaagaaatttgggtttcgagagaatattgaggacaactgtatttatacaaagtttaagaatgggagattcattttcctagttctgtatgtaaatgacattctactggctagtagtgatgtcagtgtactgcaggaaacaaagaaattcttgtcctcaaactttgacatgaaagacctcggtgaggcttcatatgttttgggcatagagattcaccgagacaaaacaaagtatgtattgggactttctcaaaagacatatatagaaaaggtgttgaagaaattcaacatgtacagatgcagtgccacacctgctcctatagtcaagggtgaaaagtatgggacatggcgatgtcccaaaaatcagtatgagctcaacgaaatgaaaacaaagccatatgcgtcagctgtgggaagcctacagtatgcgtaagtgtgcacacgtcctgacttggcatttatcaccgggttacttggcagatttcagagtaatccaggcccagagcactggaaattggtaaagaaagtcttgcgttatttgcaaggtacaaaaggcctcatgttgtcttatagaagatcagagccgctccggatagtggggtattcaggttctgattttgcaaaagataatacaaagtcaacatcaggatacgtgttcacccttgcagggggagctatttcatggaaaagctccaaacagactatcactgcagggtctactatgtatgccgagtttatagcatgctatgaggccacggggcaggtaaactagcgaaagaagttcatacccggtttaaaggtggttgacagtattgagaaaccactaaagttatgctgcgacaacgaacccacagtaatgtacgctcacaacaatcagtcaagtggtgctgccaaacacattgacataaagtactattttgtgaaggacaaagtccgggattaaacaatcagtctcgagcacattagaacagaaaggatgctcgtggatccgctcacgaaaggcctaccacccaacgtgttcaaggaacat

SEQ ID NO: 14567 - DNA, 5928 bp, Oryza sativa
  Clone ID: TFbOSC409754j.C1.o2.fg
atggatcggcaatggatgtacgctgaccggcggtccaaagagtttattgacggcgtgcattattttttgagagtggccaaagctaacaggcataagggttttatttgttgtccatgcaataagtgtaagaatcagaaggagtattctgcatccaggactattcatttccacttgtttgagtcggggttcatgccaagctataactgttggacatcccatggagagcaaggggttgaaatgaaaaaagataaagtggaagacgacaatattccggactttgctcagtacgctggatttgaaggaaatcaaacaggcgaggaggaaagggatgctgatggtaacgacgttgcggatgatcttggtcagatgttgcaggataccaaggagtactgcgaaagtgaaaagggggcccataaattggacaagatgttagaggaccacagaacgtcgttgtacccaggttgcgagcaggggcacaaaaagttggatccaactctggagttcttgcaatggaaggcaaaaaatagtgttagtgacaaggcatttggcgatttattgaaactcgtcaagaacattcttccggagggaaacaaattgcccaagacaacgaacaaggggaatgctagaatgatgcgatggcacgctgaagagcgtcaacaggacgagatgctgagacaccccgccgatgattcacagtggcgaaacatcaacagaaaatttaaagactttggaaaggacgcacgaaacatacggtttggtttaagtacggatggcatgaatccttttggagagatgagcaacggctatagcacttggcccgttacgatgtgtatctataacctccccccttggctatgcatgaagaggaagtacataataatgccgattattattcaaggccccaagcaacctggtaacaacatcgatgtgtacctaagaccactggtcgaggatcttaaactgctgtggaaaaaggaaggtgtccccgagttaccctattgggaattcttggacgtccgccacgcaatcgacgtgatgcacctcactaagaacctttgcgtaaaccttcttggcttcctaggtgtatatggaaagtcgaaagatacactggaagcacgtaatgatctgaagcatatggaacaacgcggcgaccttcactcagaaccaaaggagaaaggaagccattacttgagtccagccagctacactcttagcaaggctgagaaggaaaatatgtttgaatgcttggagagcataaatgtaccgtctggatactccacgaatataaagcgaataataagcacaaaggagaagaagttcacaaacctaaagtctcatgactgtcacgtgttgatgacacaactgctaccagttgtaataaggggtatccttccagacaatgttcgggcaacaataataaagctatgtgctttcatgaacgcaatttcgcagaatgtcatcgatccggatatattagaagcccttcagaatgatgtggtgcaatgtcttgtcagttttgagttgatatttccaccgtcatttttcaatataatgacgcatctgctttgtcactttgtcaaagagattggtattctcgggcctgtgtacctacacaacatgtttcctttcgagaggtacatgggcgttctgaagaaatatgttcgtaaccgtgctcatccagaggcaagcatcgccaaggggtatggaacagaggaggtcatcgaattttgcgtagaatttattgaagaccttcgcccaatcgggggatatgagatcaatgggtacacattctacacgagagcccaagacataaagtgcacgaaccaaaacagcgttgttcgtatcgatgccatgggacacgatggaacaactggcacgtattacggtgccatcgaggacatatgggaacttgactatggtcctctcaaggtccctccgttccggtgccaatgggttaggttgactggtggaggcgtaacgattgatgacagtgggatgacaatggttgatcttaacaaggttggatactcggacgaaccttttgtcctttccaatgatgtaacgcaagtcttttacgtgaaggacatgtctagcaaaggaaagaagggcagaggtgaagcatctaggcccccgttgttaattttggctcggcctgaccaggggcggtcagaccggccacatagtggcggtatgaccggcgtgccctggcagtcgacatctcaatactacaagtggtatcagagcttggtctctcttgattgggcttcaccgcctagagtgaagatgttgaacgaggtgaaccatgtagggaaggctcccatgtttaatggcacaaactactccacttggaaaattaaaatgtctactcacctcaaagctatgagcttccatatttggagtattgtggatgtaggctttgctatcaccggcacgcacttgacggggattgatcaccgcaacctccaactcaatgcccaagctatgaatgctttgttcaactgtttgagccaagaggagtgcgatagagtgagcaaccttgagaccgcatatgagaattggaacaagttggcggagatccatgagggcacaagcgagtacaatgatgccaagcttcatttcctcaaaatccaatatgagacattctccatgttgcctcatgagagtgtaaatgccatgtatgggaggctcaatgcctcatggggaaagatcaacaccaatgacatgtacaagttgaagaagaaggagatggaggaaacctcaccttccaagaagtgcattgctccccaagccgaagttgaagacaagggcaagggcaagtgctttgagtgtggtgagaagagacactttgcttccaagtgcccttccaaggatgatgatggagacaagtcatccatgaagaagagtggaggctacaagctcatgaagaagctcaagaaggaaggcaagaagattgaggtcttcatcggggattgggtcacaaatgaggagagctccgcctcatccgggtccgaggaagaaggtggtgatgatgcaagctccaagaagaagaagatggccgttgttgccatcaaggaggctccatcacccttcgctccactttgtctcatggcaaagggctcctctaaagtaacatctcttagtgatagtgagagtgatgatgattgtgattatgcttcctatgatgagcttgtgagtatgtttgaggagctccatgcttatagtgagaaggagattgtcaagttcaaggctctaaagaaggaccatgcttctttggaggtcttgtatgaggagctaaagacttctcatgagagactcaccatttctcatgagaagcttaaggaagctcatgacaacctcctttctacttatcaacatggagctctcattgatgttggcatatcttgtgttttgcttgatgatagtgctacttgccatattgctcatgttgcatcatctagcatttctacctcttgtgatgatcttgtggatatgcctagctctagctctagcccttgtgtttctatttgcgatgcctcacttgttgagaacaatgagcttaaggagcaagtggctaagctcaacaagagtttggagaggtgcttcaagggtaagaacactcttgacaagattttgagtgagcaacggtgcatccttaacaaggagggacttggattcattccaaagaagggtaagaaaccttctcaccgtgccactcgttttgtcaagagcaatggaaggctcatgatggtagcattgttgctagatatgtgggttctcctatactcggtggtgaactaccgcaccggtgggagccattgggtgcttgatagtggatgcactcaacacatgaccggtgatagggctatgttcaccacatttgatgtaggagggaatgaacaagagaaaggtgttagactaaccaaatttgaaagtcggtgtgatgaagggtttcttctaggttatgtctcaaatagcaaggcatatcgggtctacaacaagaacaaaggtattgtggaagaaaccgccgatgttcaatttgatgagactaatggctcccaagaggggcacgagaatttggatgatgtaggtgatgaaggcttgatgagagctatgaagaacatgtcaattagagatgtcaagcctattgaagtggaagacaagccatccacctccactcaagatgagccatctactttcgctacgccaagtcaagctcaagttgaagtggaggaggagaaggcacaagatccacctatgccacaaaggatacacactgctctttccaaggatcacccaattgaccaagtgttgggtgacattagtaaggatgttcaaactcgatctcgtgtcgcttcgatttgtgaacattactcgtttgtttcttgtcttgagccaaaacatgtagatgaagctctttgtgatctggattggatgaatgctatgcatgaagagctcaacaactttgcaagaaacaaggtgtggactttggttgaaagacctagagaccacaatgtcatagggacaaagtgggtctttaggaacaaacaagatgagaaagggttggtggtgagaagcaaggcaagattggtggcacaagatttcacacaagttgaaggtttggactttggtgaaacttttgcccccgtggcaagacttgaggctattcgcatccttcttgcatttgcatcatgctttgatataaaactatttcaaatggatgtgaaaagtgcttttctaaatggtgaaattgccgaacttgtctttgttgaacaacctcccggttttgaagatcctaaaaatcctaaccatgtttacaaactctcaaaagctctttatggtttaaaaccagctcctagggcttggtatgaaagattgagagattttcttttgccaaaggatttcaaaattggaaaagttgacaccaccctttctacaaaaatcattgatgatgatttcgttgtgtgtcaaatttatgttgatgatatcatattcggttctactaatgaagtattttgcaaggaatttggtgatatgatgtctagggaatttgagatgtccatggttggagagttgagcttcttccttggacttcaaatcaagcaacttaaggatgggacgttcgtgagccaaaccaagtatatcaaggatctactcaagaggtttggcttggaggatgcgaagcccatcaagacacctatggcaaccaacgggcatcttgaccttgatgagggaggtaaaccggtagatttaaagctttatcattctatgattggtagcttgctttaccttaccgcatctaggccggatatcatgtttagtgtttgcatgtgtgcacggtttcaagccgctcctaagaagtgtcacttagtagccgtgaaaaggattctaagatatttaaagcattcctctactattggcttgtggtacccaaaaggagctaaatttaagattgttagctattccgatttggattatgccgtttgcaaagtggatagaaagagcacatccggtagttgccaaatgcttggtagatcccttgtgtcatggtcatccaagaaacaaaactccgtagccctctctaccgccgaggcggaatatgtttcggcgggtagttgttgtgcccaattgctttggatgaaacaaacattgttggactatggcatatccttcaccaaaaccccacttctatgtgacaatgatagtgccataaagatagccaataacccggtccaacattctagaaccaagcatattgacatacgctatcacttcctaaaagaccatgttgttgccaagagtgacatagtcattagccacataagaaccgagaatcaactagccgacatatttaccaagcctcttgatgaaacccgcttttgcaagttgagaaatgagttaaatgtcatagacttctctaatgtggcttga

SEQ ID NO: 14568 - DNA, 4494 bp, Oryza sativa
  Clone ID: TFbOSC101289j.C1.o1.fg
atggacatctctagggcaaatgaaggctacacgagctgcggcccggtagtcgagatgtcatggcacagggccgatgtcctgctgctaggggctcagtcctgcctacctgtcccggaggttccggccgtaggtggggttgggtcggtactcttgtgtatggctaggatgggttggaaactatgtcacgtcttccatccgtataccgtggtgatggccggtagcatcaaccgtcgtggcctggacctgactggcttcgttttggagctgcggggcatgtgcgttgtcctggggtatccgcatggagtggactaccaaggcaagcagctcccggagcaggagggtgacgatgcagagccccacgctgcttgggaggtcactgcagtgatcctcactggctcacccgagaggacttcgttggcagtcaccgcgggtggagattctttctccgctgcttgccagaacgccgcactcctcgccattggcactcttcaccagtgctacccggacgagttgcagcactcgccctaccgctaccaccctcgtcgcggaggagcccgtgactacgccaccttcagggatgctagctcggaggatgacgctaccatcatgcacttggcgcgcatggtggaggcgtacgacgcagcccgtatcgacttccatcatatggtgcgccgtgggttggtcgagaacaacatgaagatcctggagctgcgtcaggagaatctgcagctgaagaaggacttggacacggtggaggcgcagctgtgtcagctcaagatcgcccagggagagatggtgacaaccaggagaagtgctgctaccggtgaaggcagtcaccccgaaggcagcaaccacaacaagcatggcagcccacctccacctccttccccgccaccaccaccaccaccagacaccaactccatcctcacccaaatcctcgcccagcaggccaacatgatggctgctttcctccatcacatccaaaatccgccacagcataatgctccacctccaccaccacccccgcaacattctaaactcgctgagttcctccgcatccgtccgcctaccttctctagttccaataaccccgtggatgccttggattggttgcatgccgtggggaaaaagttggataccgtgcagtgcaacgatgaggagaaagtcatctttgctgctcaccaactgcagggacccgcatctctatggtgggaccacttccaggctacgcagccaaaaggacagcctattacttgggcccgcttcaccgccgctttccggaggacccatgtgcccgccggagtcatggcccttaagaaaagggaattccgggagttgaagcaaggcaaccgttccgtgatggagtatttgcatgagtttaacaacttggcccggtacaccccggaggatgttcgggaagatgaggaaaagcaggagaagttcttggcaggaatggaccctgagctgtccgtgcgtctggtctccggggattatcctgatttccagcgtctggtggacaagagcatccgcttggaagccaagcacaaggaactggagtcgcacaagcgtcgcttggcgaatttccgcaatcaacagggggctaaccaaaggcctagtcaaggccgcaaagacgctcaaggtcagcagcgtctgtgcttcaattgcttcgagcccgggcactttgtggataaatgcccgaagccgcggcgccagcaaggccaagcgcctccccgccccaacaacggtggtaaggatgtcattcggggtcgtgtgaaccacgtgactgccgaggatgtgctgacgactccggacgtcatcgttggtacgttcctcattcattctattcctgctaccattttgttcgactctggagcttcccactcatttatatctgtgcccttcatggggagaaatcagttgggggtagaaaggcttaggaaccctctgctcatcaccacccctggaggggttatgacagcaaagtattatagccctgccgttcctatagaaatccagggaatcccttttcccttggatttgattcttctggacaccaataacttggatgtgatccttgggatgaattggttggctcaattccaaggagtagtggattgcgcaaggcgcactgtcactctgtatcgggggccggaacaaccggttgttttctttgcaccctcaacctctgtcggcagttcagaacttcatcagataggactgtcagaaatacccatcgtcagagagttcggagatgtgtttccggaagaactacccggtatgctgcccaagcgagagattgagttccggatagatcttgctccaggaaccactcctctatacaagcggccctaccgtatggccgcgaatgaactggccgaaaaggacaagacaaagaggatgtgtgttgactacagagctctcaatgaagttactataaaaaacaagtaccctcttccccggatcgatgatctgttcgatcagcttaaagctgccactatcttttctaaaatcaatcttcgctccggatatcaccaattgcgtattcgtgaagaagatatcccgaagaccgcattcaccacgcgttatgggctgtatgaattcacggtgatgtcgttcggtctgaccaatgctcctaccttggataagtttgttgtggttttcatcgacgacattctggtgtactcacaatcagaggaagaccatcagcagcatctccgtctagtgttgggaaagctgcgggaacatcaactttatgccaagtttagcaagtgtgagttctggttgtccgaagtcaagttcttagggcacgtgatatctgctaaaggagttgctgtggaccccgaaacagtgaccgccgtcactgattggaagcaacccaagacagtcactcaagtccgcagctttttgggtttggccgggtactatcggaggttcatcgagaacttctccaaaatcgctcgacccatgacacagttgctgaagaaagaagaaaaatttgtgtggagcccgcaatgcgagaaggcattccaaactctcaaggaaaagctggccaacgtggtcgccgacgctctaagtcgaaaaagccgttgcaacactctcggcgtctgtggcattccaccggaacttaatcaacagatggaagccctgaacctaagcatagttggtcgtggattcttggctacgctggaagccaagcctaccttactcgatcaaatccgcgaggctcagaagaatgatccagatatgcatggactcctcaagaatatgaaacagggtaaagccgctggtttcacagaggatgaacacggaatcctatggaacggaaatcgggtatgcgttccagacgacagggaacttaaacagttgatacttcaggaagctcacgaaagtccttattccatccaccctggctgtacgaagatgtacttggacttgaaagagaaatattggtggggcggttatgattctatatgggtagtcgtggatcgactaaccaaggtagctcggtttattcctgtgaagaccacctatggagggaacaaactagccgaactctacttcgctaggatcgtaagtctccatggcattcctaagaaaattgtatctgatcggggaagccaattcacctctcatttctggaagaagctccaagaagagttgggtacccgattaaatttcagcaccgcgtatcacccgcagacagatggacagaccgagcgtctaaatcagatcctagaagatatgcttcgcgcatgtgtcctagatttcaggaagacctgggataagagtctcccctatgccgagttctcctacaataacagctaccaagccagcatacaaatggcaccctacgaagcgttgtatggccgcaaatgccggacaccgctattgtgggaccaagttggggaaagccaagtgttcgggactgatatcctgagagaagctgaagctaaagtcagaaccattcgggataatctaaaggtggcacagtcccggcaaaagagttatgcagataaccgacgccgtaacctagaattcacagtggacgattttgtgtacctacgggtcacgccattgcgaggagtacacaggtttcagacgaaagggaagctcgcacctcggttcatgggtcctttccgtatcattgctcgacgcggagaagtcgcttaccagttggagctgcccgcatccttgggcaacgtgcatgatgtgttccatgtgtcgcaactcaagaaatgtcttcgagtgccatcggagcaggccgattcagagcaaattgaagttcgcgaagacttgacctacgtggagaggccagtgaaaatcctggacaccatggagcgcaggaccaggaaccgggtaatccgtttttgcaaggtccaatggagcaaccacgctgaggaagaagctacttgggaacgtgaagacgagctgaaggcagcccatcccgatctcttcgccagttcttccgaatctcggggtcgagattccgtttaa

SEQ ID NO: 14569 - DNA, 2130 bp, Oryza sativa
  Clone ID: TFbOSC400523j.C1.o2.fg
atgtcatggcacagggccggtgtcctgctgctaggggctcagtcctgcctgcctgtcccgggggttccggccatggccggcagcgtcacccgtcgtggtttggacatgactggcttcgtcttggagctgcggggcatatgcgtggtcttggggtacccacatggagtggactaccaggccaggccgcttccggagcaggagggtgacgacgcggagccccacgctggttgggaggtcactgcagtgatcctctctggctatcccgagcggacttcgctggcagtcaccgcgggtggggattccttccccgccgcttgccagaacgacgctctcctcgccatcgtcactcttcaccagcgctacccggacgagttgcagcactcgccctaccgctaccaccctcgtcgcggaggagcccgcgactacgccaccttccgagatgctagctcggaggatgacgctaccatcgtgcacctggcgcgcatggtggaggcgtacgacgcggctcgtatcgacttccatcagatggtgcatcgcgggatggtcgagaacaacatgaagatcctggagctgcgtcaggagaacctgcagctcaagaaggacctagacgtggtggaggcgcagctgcatcagctcaagatcgcccagggagaggtctgccgccccaagcgtcgccgcgtctgccgcagccagaagatcaccgcccgcaagagcacctccaggcccgagcttgttcgtcagtccctggcgtggacttgcttcgtcgagacccctcgtgccgagcccgcgcccgtggttccccagaagggggaagcctccggcgttggtagcacggaggatgcgctgttgctcaccttccgtcctggcccgtcgcagcggagaaatgctgctaccggtgatggcaaccaacctgaaggcagcaaccacaaccaccagggcaacccacctccacctcctcctccacctccaccaccaccaccagataccaatgccattctcacccaaatcctcgcccagcaggccaacatgatgactgctttcctccaccacctccaaaatccaccacaacataatgctccaccaccacccccacaacactctaaactcgccgagttcctccgcatccgtccacccaccttctctagctccaacaaccccgtggatgcgttggattggttgcatgccgtggggaaaaagctagacacggtgcagtgcagcgatgaggagaaagtcatcttcgccgcccaccagctgcaggggcccgcatctctatggtgggaccatttccaggctacgcagccagaggggcaacctattacttgggcccgcttcaccgccgctttccggagaacccatgtgcccgccggagtcatggcccttaagaaaagggaattccgagagttgaagcaaggcaaccgcttcgtgatggagtatttgcatgagttcaacaatctggcccgttacgccccggaggatgtgcgggaagatgaggagaagcaagagaagttcttggcaggaatggaccccgagctgtccgtccgtctagtctctggggactatccggatttccaacgtctggtggacaagagcatccgcttggaagccaagcacaaggaactggagtcgcacaagcgccgcttggcgaatttccgcaatcaacagggtgctaaccaaagggtccgctacaccaatccctatcccgggggatcctcttcgcagcagcaacaacagcagcagcaaccccgctctgcgccccgacctcaattcgtggtgcgcgtcccacagccgcagcagcagcagaatcagcaagggactcgtgcgccccgtcctcctacgccaacggtgcagcctggtcaaggccgcagggacgctcaaggtcagcagcgtctgtgcttcaactgcttcgagcccgggcactttgtggataaatgcccgaagccaaggcgccagcaaggccaagcgcctccccgctccaacaacggtgggaaggatgtcattcggggtcgtgtgaatcacgtgacggccaaggacgtgctgacaactccagacgtcatcgttgggagttcggagatgtgtttccggaagaactacccggtatgccgcccaagcgagagattgagttccggatag

SEQ ID NO: 14570 - DNA, 4074 bp, Oryza sativa
  Clone ID: TFbOSC400610j.C1.o9.fg
atgtcatggcacagggccggtgtcctgctgctaggggctcagtcctgcctacctgtcccgggggttccagccatggccggcagcatcaaccgtcgtggtctggacctgactggcttcattttggagctgcggggcatgtgcgttgtcctggggtatccgcatggagtggactaccagggcaagcagctcccggagcaggagggtgacgatgcagagccccacgctgcttgggaggtcactgcagtgatcctcactggctcacccgagaggacttcgttggcagtcaccgcgggtggagattctttctccgccacttgccagaacgccgctctcctcgccatcggcactcctcaccagcgctacccggacgagttgcagcactcgccctaccgctaccaccctcgtcgcggaggagcccgtgactacgccaccttcagggatgctagctcggaggatgacgctaccatcatgcacctggcgcgcatggtggaggcgtacgacgcgcctcgtatcgacttccatcagatgtcatgggtgattagttttaatagtcagctctctctgtttgccgggtctgtgtgggattttcatatggtgacaaccaggagaagtgctactaccggtgatggcaaccaacccgaaggtagcaaccacaacaaccatggcagcccacctccacctcctcccccgcctccaccaccaccaccagacaccaactccatcctcatccaaatcctcgcccagcaggccaacatgatggctgctttcctccaccacatccaaaatccgccacagcataatgctccacctccaccaccacccccgcaacattctaaactcgcagagttcctccgcatccgcccgcctatcttctctagctccaataaccccgtggatgctttggattggttgcatgccgtggggaaaaagttagacaccgtgcagtgcaacgatgaggagaaagtcatctttgccgctcaccaactgcaggggcccgcatctctatggtgggaccacttccaggctatgcagccagaaggacagcctattacttgggcccgcttcaccgccgctttccggaggacccatgtgcccgctggaatcatggcccttaagaaaagggaattccgagagttgaagcaagacaaccgctccgtgatggagtatttgcatgagtttaacaacctggcccggcacgccccggaggatgttcgaatggaccctgagctgtccgtgcgtctggtctccggggactatccagatttccagcgtttggtggacaagagcatccgcttggaagccaagcacaaggaactggagtcgcacaagagtcgcctagcgaatttccgcaatcaacagggggctaaccaaagggtccgctacaccaatccctatccagggggatccttctcgcagcagcagcagcagcaaccacgctccgcgccccgacctcaattcgtggtgcgcatcccacagccgcagcaacagcagagtcagcaagggacccgtgcgccccgtcctcctacgccagccgtgcagcctggacaaggccgcagagacattcaagttcagcagcgtctgtgtttcaactgcttcgagcccgggcactttgtggataaatgcccaaagccgaggcgccagcaaggccaagcgcctccccgccccaacaacggtggtaaggatgtcattcggggtcgtgtgaaccacgtgaccgccgaggatgtgctgacaactccagacgtcatcgtgggtacgttcctcattcattctacccctgctaccattttgttcgactctggagcttcccactcgtttatatctgtgccattcgtggggagaaatcagttgggggtagaaaggcttaggaaccctctgctcatcaccacccctggaggggttatgacaacaaagtattatagccctgccgttcctatagaaatccagggaattccttttccctcggatctgattcttctagacaccaagaacttggatgtgatccttgggatggattgtgagttcggagatgtgtttccggaagaactacccggtatgccgcccaagcgagagattgagttccggatagatcttgctccaggaaccactcctctgtacaagcgaccctaccgtatggcagcaaatgaactggccgaagtcaagaaacagttggaagagttgaaagaaaaggggtatatacggccgagcacttcgccctggggtgctcccgtgatttttgtggaaaagaaggacaagacaaagaggatgtgtgttgactacagagctctcaatgaagttactatcaaaaacaagtaccctcttccccggatcgatgatctgttcgatcagcttaaaggtgccactgtcttttcaaaaatcgatcttcgctccggatatcaccaattgcgtattcgtgaagaagatatcccgaagacctcattcaccacgcgatacgggctgtatgaattcacggtgatgtcgttcggtctaaccaatgctcctgccttcttcatgaacttaatgaacaaagtgttcatggaatatttggataagtttgttgtggttttcattgacgacattctggtgtactcacaatcagaggaagaccatcagcagcatctccgtctggtgttgggaaagttgcaggaacatcaattgtatgccaagcttagcaagtgtgagttctggttgtccgaagtcaaattcttagggcacaagcaacccaagacagtcactcaagtccgcagctttttgggtttggccgggtactaccgaagattcatcgagaacttctccaaaatcgctcgacccatgacacagttgctgaagaaagaagaaaaatttgtgtggagcccgcaatgcgagaaagcgttccaaactctcaaagaaaagctggtttcctcgccagtgttgatcttaccggatactcataaggacttcctggtgtactgtgacgcttcgcgccaaggattggggtgcgtattaatgcaggaaggtcatgtggtagcctatgcctcacgccagcttcggcctcatgaaggcaactaccctacccatgatttggagttagccgctgtggttcatgctctaaagatctggcggcactatctcattgggaatcgctgtgaaatatatactgatcataagagtttgaaatacatcttcactcggtcggatctgaatcttcggcagagaagatggttagaactcatcaaggattatgatgtgggaatccactatcatcctgaggatgaacacggaaccctatggaacggaaatcgggtatgcattccagacgacagagaacttaaacagttgatacttcaggaagctcacgaaagtccttattccatccaccctggcagtacgaagatgtacttagacttgaaagagaaatactggtgggttagtatgaagcgggaaattgcagagttcgtggccctttgtgatgtgtgccagcgtgtcaaggcagagcaccagcgaccggccagacttctccaacctctccaagtagcccggtttattcctgtgaagaccacctatggagggaacaaactagctgaactctacttcgctaggatcaagaaactccaagaagagttggatacccgattaaatttcagcaccgcgtatcacccgcagacagatggacagaccgagcgtcttaatcagatcctagaagatatgctctgtgcctgtgttctagattttgggaagacctgggataagagtctccccaatgccgagttctcctacaataacagctaccaagccagcatacaaatggcaccctatgaagcgttgtatggacgcaaatgccggacaccgctattgtgggaccaagttggggaaaaccaagtgttcgggactgatatcctgagagaagctgaagcgaagaaatgtcttcgagtgccatccgagcaggccgattcagagcaaattgaagttcgcgaagacttgacctacgtggagagaccggtgaaaatcctggacgccatggagcgcaggacaaggaaacgggtaatcagtttttgcaaggtccaatggagcaaccacgctgaggaagaagctacttga

SEQ ID NO: 14571 - DNA, 5367 bp, Oryza sativa
  Clone ID: TFbOSC400722j.C1.o34.fg
atgtcatggcacagggccggtgtcctgctgctaggggctcagtcctgcctgcctgtcccgggggttccggccgtaggcgggattgggtctgtactcttgtctatggctaggatgggttggaaactatgtcacgtcttccgtctgtataccgtggtgatggccggcagcgtcacccgtcgtggtttggacatgactggcttcgtcttggagctgcggggcatgtgcgtggtcttggggtatccacatggagtggattaccaggccaggccgctcccggagcaggagggtgaggacgcggagccccacgctggttgggaggtcactgcagtgatcctttctggctctcccgagcggacctcgctggcagtcaccgcgggtggagattccttccccgccgcttgccagaacgccgctctcctcgccatcggtacccttcaccagcgctacccggacgagttgcagcactcgccctaccgctaccaccctcatcgcggaggagcccgcgactacgccaccttccgggatgctagctcggaggatgacgctaccatcgtgcacctggcacgcatggtggaggcgtacgacgcggctcgtatcgacttccatcagatggtgcgccgcgggatggtcgagaacaacttgaagatcctggagctgcgtcaggagaacctgcagcttaagaaggacctagacgcggtggaggcgcagctgcatcagctcaagatcgcccagggagaggactgccgccccaagcgtcgccgcgtctgccgcagccagaagatcaccgcccgcaagagcacctccaggcccgagcttgttcgtcagtccctggcatggacctgcttcgtcgagacccctcatgccgagcctgcgcccgtggttccccaggagggggaagcctccggcgtaggtagcacggaggatgcgctgttgctcaccttccgtcctggcccgtcgcagcggagaaatgttaacaccggtgatggcaatcaacctgaaggcagcaaccacaaccaccagggcaacccacctccacctccccctccgcctccaccaccaccaccagacaccaacgccattctcacccagatcctcgcccagcaggccaacatgatgactgctttcctccaccacctccaaaatccgccacaacagaatgctccaccaccacctccacaacactctaaactcgccgaattcctccgcatccgcccacctaccttctcgagctccaacaaccccgtggatgcgttggattggttgcatgccgtggggaaaaagctagacacggtgcagtgcagcgaagaggagaaagtcatcttcgccgcccaccagctgcaggggcccgcatctctatggtgggaccacttccaggctacgcagccagaggggcaacctatcacttgggctcgcttcaccgctgctttccggagaacccatgtgcccgcgggagtcgtggctcttaagaaaagggaattccgagagttgaagcaaggcaaccgctccgtgatggagtatttgcatgagttcaacaacctggcccgttatgccccggaggatgtgcgggaagatgaggagaagcaagagaagttcttggcaggaatggaccctgagctgtccgttcgtctagtctctggggactacccggacttccaacgtctggtggacaagagcatccgcttggaagccaagcacaaggagctggagtcgcacaagcgccgcttggcgaacttccacaatcaacagggtgctaaccaaagggtccgctacaccaatctctacccagggggatcctcctcacagcagcaacaacagcagcagcaacctcgctccgcgcctcgacctcaattcgtggtgcgcgtcccacagccgcagcagcagcagaatcaacaagggactcgtgcgccccgtcctcctacgccaactgtgcagcctggtcaaggccgcagggacgctcaaggccagcagcgtctgtgcttcaactgcttcgagcctgggcactttgtggataaatgcccaaagccgaggcgtcagcaaggccaagcgcctccccgctccaacaacggtgggaaggacgtcatacgaggtcgtgtgaaccacgtgacggccgaggacgtgctgacaactccagacgtcatcgttggtacgttcctcatccattccatccctgctaccattttgttcgactctggagcttcccactcgtttatatctgtgccattcgtggggagaaatcagttgggggtagaaaggcttagaaaccctctgctaatcaccacccctggaggggttatgacagcaaagtactatagtcctgccgtccctatagaaatccaggggattccttttccctcggacctgattctgctagacaccaagaacttggatgtgatccttggaatgaattggttggctcaattccaaggagtagtggattgcgcgggacgcacggtcactctgtaccgagggccggaacaaccggttgttttctttgcacccccaacctctgtcagaagttcagaagtgcatcagatagggctgtcagaaatccccatagtcagagagttcggagacgtgtttccggaagaactacctggtatgccgcccaagcgagagattgagttccggatagatcttgctccaggaaccactcctctgtacaagcgaccctaccgaatggcagcaaatgaactggccgaagtaaagaaacagttggaagagttgaaggaaaaggggtatatacgtctgagtactttcccatggggtgctcctgtgatttttgtggagaagaaagacaagacgaagaggatgtgcgttgactacagagctctcaatgaagtcaccatcaagaacaagtaccctcttccccggatcgatgatctgttcgatcagcttaaaggtgccactgtattctccaagatcgatcttcgttccggatatcaccaattacgtatttgtgaagaagatattccgaagaccgcattcaccacgcgatacgggctgtatgaattcacggtgatgtcgttcggtctaaccaatgcacctgccttcttcatgaacttaatgaacaaagtgttcatggaatacttggacaagtttgttgtggttttcatcgatgacattctgatatactcacaatcagaggaagaccatcagcaccatctccgtctggtgttgggaaagttgcgggaacatcaattgtatgccaagcttagcaagtgtgagttctggttgcccgaagtcaaattcttggggcatgtgatatctgctaagggagttgctgtggaccccgaaacagtgaccgccgtcaccgattggaagcaacccaagacagttactcaagtccgcagtttcttaggtttggcaggatactaccggagattcatcgagaacttctccaaaatcgctcgacccatgacacagttgttgaagaaagaagagaaatttgtgtggagcccgcaatgcgagaaggcgttccagactctcaaagaaaagctggtttcctcgccggtgttaatcttgccggatactcgcaaggatttcatggtgtactgtgatgcttcgcgccaaggattcgggtgcgtgctcatgcaggatggtcatgtggtggcctatgcctcacgccagctacggcctcatgaaggcaactatcctacccatgatttggagttagccgcggtggtgcatgctctaaaaatctggcggcactatctcattgggaatcgctgtgaaatatatactgatcataagagtttgaaatacatcttcactcagtcggacctgaatcttcggcaaaggagatggttagaactcatcaaggattatgatgtgggaattcactatcatcctggtaaggccaacgtggttgccgacgctctaagtcggaaaagccattgcaacactcttaacgtccgtgacatcccacccgaacttaatcaacagatggaagccctgaacctaagcatagttggtcgtggattcttggctgcgttggaagccaagcctaccttgctcgaccaaatccgcgaggctcagaagaatgacccggacatgcatggactcctcaagaatatgaaacagggtaaagccgctggtttcacagaggatgaacacggaaccctatggaacggaaagcgggtatgcgttcccgataacagagaacttaaacagctgatacttcaggaagctcacgagagcccttattccattcacccgggcagtacaaagatgtacctagacttgaaggagaaatactgcgtgtcaaggcagagcactagcgaccggccggacttctccaacctctccaagtaccagaatggaaatgggatgaaattgggatggatttcatcaccggacttccaaaaacccaaggtagctcaatttattcctgtgaagaccacctatggagggaacaaactagccgagctctacttcgctaggatcgtgagtctacatggcgttcccaagaaaatcgtatctgataggggaagccaattcacctctcacttttggaagaagctccaagaagagctgggtacccgattaaatttcagcaccgcgtatcacccgcaaacagatggacagaccgagcgtctaaatcagatcctagaagatatgcttcgcgcatgtgtactagatttcgggaagacctgggataagagtctcccctatgccgagttctcctacaataacagctatcaagccagcatacaaatggcaccttatgaagcgttgtacgggcgcaaatgccggacaccgctcttgtgggaccaagttggagaaagccaagtgttcgggactgatatcctgagagaagctgaagctaaagtcagaatctttcgggataatctaaaggtggcacagtcccggcagaaaagttatgcagataaccgtcgccgtgacctggaattcgcagtgggtgattttgtataccttcgggtcacgccattgcgaggtgtacacaggtttcagacgaaagggaagcttgcacctcggtatgtgggtcctttccgtatccttgctcggcgcggagaggtcacttaccagctggagctgcccgcctccttgggcaacgtgcatgatgtgttccatgtgtcgcaacttaagaaatgtcttcgagtgccatccgagcaggccgactcagagcaaattgaagttcgcgaagatttgacctacgtggagaggccagtgaaaatcctggacaccatggagcgctggaccaggaaccgggtaatccgtttttgcaaggtccagtggagcaaccacgctgaagaagaagctacctgggagcgtgaagacgagctgaaggcagcccatcccgatctcttcgccagttcttccgaatctcggggtcgagattccgtttaa

SEQ ID NO: 14572 - DNA, 1989 bp, Oryza sativa
  Clone ID: TFbOSC900139j.C1.o9.fg
atgtctgcacctggagccgccgccgccgctggagccactgtcgccatccctgaagatggcgcgccgggagccggagccgctgcgaacgtcaacgtcaacggaggcagttctgcctcacaatccagcggagggacattctcggggtcattttcggtagttggctttgctgctgcactgaaaccacatgcatttgatggttctaactataagaggtgtaaagcacgtgcactattgtggttgacagcgatgcaatgcttctatgtttcacgcggtatacgaagtgaaccacctctctctcctgaggaagaggttaagttcgaggcttcggattgcctgttccgtggggcattgatcagtgtactcgctgacaacatagtggacgtgtacatgcacatgccttctgggaaggacatgtgggatgcacttgaggccaagtttggagtttccgataccggcagtgagctgtatgtcatggagcagttctatgactataagatggtcgatgaccattctgtagtagaacaagctcatgagattcagatgctggctaaggaacttgagaacaacaactgtgagttgccggacaagtttgtagcgggtggcattattgccaagttgccaccttcttcgtcggactttgccacttctctaaagcacaagagacaagagttcagtgtttctgatctcattggctctttgggtgttgaggagaaggcgagggcaaaggacaaccggggcaaaaaggttgagcgaggttctagtgccaatatggtacagaagaagaacccacatgcatcccacaacaacaagaaagtcaagcctgatgtcaaatccaaggctacaatcaattttaagaagaaaggcaagggaaaggcaaagggagactgctttgtgtgtggcaagtctgggtattgggccaaggactgtcctgagtgcaaagacaggaagtctgccaacatggtcgggagaggttcctccttgttgatgggaaacgggtcgcttgcggctgttcatggtgttggtacagtcgatctgaagtttacttcgggaaagaccgtgcagctgaagaacatgcagcatgtcccttcaataaagaagaatcttgttagcggctctctattgtgtagagaaggttttaggcttgcgtttgaatccaataaatgtgtcgtatctaaatatggaacttttgttggaaaaggttatgacagaggaggcttgttccgctcttctttggatgacatgtgtaataatcataatgttgtgaaccatattagcaagaatgatgagtctaatgtgtggcattcgcaactctgtcatgacgcctccctattcaccccaatcaaattgggtggccgaagaaagagccgtactctaactgagatggtgaatgccatgttagacactgcggggctttccatggaatggtggggtgaggcaattttgactgcgtgtcatatcctgaataaaattccaatgaagcataaggaagtgacaccattcgaggaatggaaaaggaagaaattaaacctcccatacctacgaacatggggctgtttggccaaggtaagtgtacctatagccaaaatgcgaaaacttagaccaaatactgttgattgtgtgttccttggttatgttattcatagtgtgggttatagattcttaatagtaaactctggagtacccaacatgcgtgttggtacaattattgagtccagagatgctacattctttgagaatgaatttcccatgaaacatacacctagcacttctagtcaagaaactgtcataccccatgagcactttgcaccgatagaacacaatgatcaaacgcctgaggaaaatcctgaggaggacaacattgtagatactcgtaagagtaagagacaaagggttgcaaaatcctttggagatgactacgttgtatacctcgtggatgacaccccaagaatcatagaagaggcatattcatctcctaacgctgactactga

SEQ ID NO: 14573 - DNA, 260 bp, Oryza sativa
  Clone ID: TFbOSC100123j.C1.o2.np
atgtcgagaatcagacttatgtataaatgggctcagaattgacacgatgaactgggccaaaattcacaagtttgcgcatgggagcaatagaggaggccacttgccgattttgggccaggctggcccagcccatggttcggccaaacccaccacggcgccattcgatccagggttctcctggacggctgggattgactccctatggcggttggagggtatttccgaccattccaaccgccacaaccgtcattctcaagcta

SEQ ID NO: 14574 - DNA, 1284 bp, Oryza sativa
  unsure (1)..(1284): unsure at all n locations
  Clone ID: TFbOSC15733j.C1.o1.np
ncaatccttgccaacagggcaaaataatgatgcttccctccccaatccaaaatccgcaaaacttattgttccacacaccccccacaacatatacctggcggagttcctcggaatcgccccacttctttttttagctccaacaaccccaggatgcgttggattggttgcatgccgtggggaaaaagctagacactgtgcagtgcagcgatgaggagaaagtcatcttcgccgcccaccagctgcaggggcccgcatctctatggtgggaccatttccaggctacgcagccaagaggggcaacctattacttgggcccgtttcaccgccctttcgggagaacccatgtgcccgccggagtcgtggcccttaagaaaagagaattctgagagttgaagcaaggcaaccgctccgtgatggagtatttgcatgagtcaacaacctggcccgttacgccccggaggatgtgcgggaagatgaggagaagcaagagaagtacttggcaagaatggaccctgagctgtccgtccgtctagtctccggggactatccggatttccaacgtctggtggacaagagcatccgcttggaagccaagcacaaggaactggagtcgcacaagcgccgcttggcgaattgccgcaaccaacagggtgctaaccaaagggtccgctacaccaatccctatccagggggatcctcctcgcagcagcaacaataacagcagcaacctcgctccgcgcctcgacctcaattcgtggtgcgcgtcccacaaccgcagcaacagcagagtcagcaagggactcgtgcgcctcgtcctcctacgccaactgtgcagcctggccaaggccgcagggacgcttcaggtccgcagcatctgtgcttcaactgcttcgagcccgggcactttgcggataaatgcccaaagccgaggcgtcagcaaggccaagcgcctccccgctccaacaacggtgggaaggatgtcattcggggatgggtgaaccatgtgacggccgaggacgtgctgacaactccagacgtcatcggtggtacgttcctcattcatttcattcctgctaccatttttgttcgacttctggagcttcccactcgtttatatttgtgccattcgtggggaggaatcagtttgggatagaaaagcttaagaaaccctctgcttcataaccacccctggaggggttatgacaacaaagtattataattcctgccggccctatagaaattaaggggattcctttttccttccccctctctttgttccgcgcg

SEQ ID NO: 14575 - DNA, 2348 bp, Oryza sativa
  Clone ID: TFbOSC900144j.C1.o4.np
atgtcatggcacagggccggtgtcctgctgctaggggctcagtcctgcctacctgtcccgggagttccggccgtaggtgggattgggtcggtactcttgtctatggctaggatgggttggaaactatgtcacgtcttccgtctgtataccgtggtgatggccggcagcgtcagccgtcgtggtttggacatgactggcttcgtcttggagctgcggggcatgtgcgtggtcctggggtatccacatggagtggactaccaggccaggccgcttccggagcaggagggtgacgatgcagagccccacgctggttgggagcggacttcgctggcagtcaccgcgggtggagattctttccccgccgcttgccagagcgccgctctcctcgccatcggcactcttcaccagcgatacccggacgagttgcagcactcgccctaccgctaccaccctcgccgcggaggagcccgcgactacgccaccttccgggatgctagctcggaggatgacgctaccctcgtgcacctggggcgcatggtggaggcgtacgacgcggctcgtatcgacttccatcagatggtgcgccgtgggatggtcgagaacaacatgaagatcctggagctgcgtcaagagaatctgcagctcaagaaggacctagacgcagtggaggcgcagctgcatcagctcaagatcgcccagggagaggtctgccaccccaagcgtcgccgtgtctgccgcagccagaagatcaccgcccgcaagagcacctccaggcccgagcttgttcgtcagtccctggcgtggacttgcttcgtcgagacccctcgtgccgagcccgcgcccgtggttccccaggagggggaagcctccggcgttggtagcacggaggatgcgctgttgctcaccttccgtgctggcccgtcgcagcggagaagtgctaacaccggtgatggcaaccaacctgaaggcagcaaccaccaccaccagggcagcccacctccacctcctcctccgcctccaccaccaccaccacataccaacgccattctcacccaaatcctcgcccagcaggccaacatgatgactgctttcctccaccacatccaaaatccgccacaacataatgctccaccaccacccccacaacactctaaactcgccgagttcctccgcatccgcccacctaccttctctagctccaacaaccccatggatgcgttggattggttgcatgccgtggggaaaaagctagacactgtgcagtgcagcgatgaggagaaagtcatcttcgccgcccaccagctgcaggggcccgcatctctatggtgggaccatttccaggctacgcagccagaggggcaacctattacttgggcccgtttcaccgccgctttccggagaacccatgtgcccgccggagtcgtggcccttaagaaaagagaattctgagagttgaagcaaggcaaccgctccgtgatggagtatttgcatgagttcaacaacctggcccgttacgccccggaggatgtgcgggaagatgaggagaagcaagagaagtacttggcaagaatggaccctgagctgtccgtccgtctagtctccggggactatccggatttccaacgtctggtggacaagagcatccgcttggaagccaagcacaaggaactggagtcgcacaagcgccgcttggcgaattgccgcaaccaacagggtgctaaccaaagggtccgctacaccaatccctatccagggggatcctcctcgcagcagcaacaataacagcagcaacctcgctccgcgcctcgacctcaattcgtggtgcgcgtcccacaaccgcagcaacagcagagtcagcaagggactcgtgcgcctcgtcctcctacgccaactgtgcagcctggccaaggccgcagggacgcttcaggtccgcagcatctgtgcttcaactgcttcgagcccgggcactttgcggataaatgcccaaagccgaggcgtcagcaaggccaagcgcctccccgctccaacaacggtgggaaggatgtcattcggggatgggtgaaccatgtgacggccgaggacgtgctgacaactccagacgtcatcgttggtacgttcctcattcattccatccctgctaccattttgttcgactctggagcttcccactcgtttatatctgtgccattcgtggggagaaatcagttggggatagaaaggcttaggaaccctctgctcatcaccacccctggaggggttatgacagcaaagtattatagtcctgccgtccctatagaaattcaggggattccttttccctccgacaaatgaaggctacacgggctgcg

SEQ ID NO: 14576 - DNA, 5391 bp, Oryza sativa
  Clone ID: TFbOSC100588j.C1.o8.np
tcggcaatggatgtacgctgaccggcggtccaaagagttcattgacggcgtgcactattttttgagagtggccgaagctaacgggcaaaggggttttattcgttgtccatgcaataagtctaagaatcagaagaagtattctgcatccaggactattcatttccacttgtttgagtcggggttcatgccaagctataattgttggacatcccacagagagcaaggtgttgaaatggaagaagatgaagtggaagacgacaatattccggactttgctcagtacgttggatttgaaggaaatcaaacaggcgaggaggaaagggatgctgatggtaacgacgttgcggatgatctcggtcagatgttgcaggacgccaaggaggactgcgaaagtgaaaagggggcccataaattggacaagatgttagaggaccacagaacgtcgttgtacccaggttgcgagtaggggcacaaaaagttggataccactctggagttcttgcaatggaaggcaaaaaatggggttagtgacaagacatttggcgatttattgaaactcgtcaagaacattcttccagagggaaacaaattgctcgagacaatgtacgaggctaagaagatagtctgcccgctaggactggaagttcagaagattcacatatgtccgaatgattgtatcctatatcgcggtgaggagtatgagaacctagaagcatgccctgtttgcaaagcactacgatacaagattagacgagacgatccaggagaagttgacgggcagctaacaaagaagagaattcctactaaggtgatgtggtatttccctataataccacggctaaggcgtttgttcaggaacaaggggaatgctagaatgatgcgatggcatgttgaagagcgtcaataggacaggatgctgagacaccccgccgatggttcgcagtggcgaaacatcgacagaaaatttaaagaatttggaaaggacgcacgaaacatacggtttggtttgagtacggatggcatgaatccttttggagagatgagcagcggccatagcacttggcccgttacgatgtgtatatacaacctcccccctggctatgcatgaataggaagtacataatgatgccgattattattcaaggccccaagcaacctggtaacgacatcgatgtgtacctaagaccactggtcgaagatcttaaactgttgtggaaaaaggaaggtgtccccgtgtgggacgaggacaaacaggaggtgtttaacctacgagcgctgctgttcgtaaccatcaacgattggcctgcacttagcaaactatccggacagtccaacaaggggtacaaggcttgcactcactgtatggatgaaacagaaagtgtatacggaaagtcgaaagatacactggaagcacgtaatgatctgaagcatatggaacaacgcggcgaccttcacccggaaccaaaggagaaaggaagccattacttgagtccagccagctacactcttagcaaggcagagaaggaaagtatgtttgaatgcttggagagcataaaggtgccgtctggatactccacgaaggaaaagatgttcacaaacctaaagtctcatgactgtcacgtgttgatgatacaactgctaccagttgtaataaggggtatccttccagacaatgtccgggcaacaataacaaagctatgtgcattcatgaacgcaatttcgtagaaggtcattgatccggatagattagaagccctttagaatgatgtgaggtacatgggcgttctgaagaagtatgttcgtaaccgtgctcgtccagaggcaagcatcgccaagggttatgaaacagaggaggtcatcgaattttgcgtagaatttatcgaagaccttcgcccaatcggggtacctgaatcacgccatgaagggagactacagggaaagggaactctcggaaggaaagcaataatgacggtagacaacaatttattccgtaaagcccatttcacggttctgcaacaatcttcattggtagctccttacatcgaggagcacttggctctagttcgcgccaggaacatcggtaagtccgatgcatggattacacggcatcacattgatactttccccgcgtggctactacaacatctcgtgggtaacgagtcgatcaaccaacaacttaccttcctggcgaggggaccgtcctggtcgatcgcgacattccagggatatgagatcaatgggtacacattctacacgagagcccaagacatgaagagcacgaatcaaagcagcgctgttcgtgtcgatgccatgggacacgatggaacaactggcacgtattacggtgccatcgaggacatatgggaacttgactatggtcctctcaaggtccctctgttccggtgccaatcggttaggttgactggtggaggcgtaatgattgatgacagtgggatgacaacggttgaccttgacaaagttggatactcggacgaaccttttgtccttgccaatgatgtaacgcaagtcttttacgtgaaggatatgtctagcaaaggaaagaagggcagagggcctgacgagcctaagcgtcatgtggttctcctagtcaaaagaaaaatcgtcggagctgaggacaagactgacgaggattacgatcagttggatgggcaaccccctttcacggtgatgattgaccctagcatcctcctatcaaatgaagacaccccttactcacgcagcgatcacaaggagggaacaatatatttgaacgaggaagggagcgttgagagggatgcggaggggaaccaggaggggcacgtggaaagggatgtggaggggaaccaggaggaggaggctagtggaagtcaaccctccgttggacagaagaggggacgcgggcaacgaggtgccacgaagaagcttgagggtcggcacatcataacggaagtggacgaagacggccgacctagtgccccggcagaagccgccaagaactatgtacgtcacagcggttgggttgcgcgggataacgtgcctgttagtacggtctactggcgcagaacaagggcacgcggagatcatgagagctttgtcccagattcggagaaagagatgctgtggaccacaatgctcgagacattcacccttcccgcgggtacagaggacaaagtgaaaaggtggactctgaagaaaatggcagaacagtttcggagcttcaagggagatctgtaccagaaatatatcctgaaggggcagacaccgaacttcgacacattcccaaagctaagggatcactgggacgagttcgttgcatataagacaggtgaacaagggcaggcgatgatggaaagaaacaaagaaaatgccgccaagaagaagtaccatcaccacttggggtcaggcggctatagcgtcgcgatgccgaagtgggaggagatggaggctagcttgcttgagaggggtatcgaaccggccaccgctaattggccggaacgatcgaagttctggtactatgctcacggtggaatgctcaacccagctgatggctccctggtcttcggcgatcagatacgcgaggctgcgcgtcgactaacagacacagtggaagcctcttcttagggcacgttccgaccgaacagagagaaggacgagctgagtcggatgaggagcaagagagataccgaggcgaagattgcagatctagagttcagggtatcgagctacgagctcagcatgcaagaggaggtggcaaggaaggttgatgaatgcatggccgcacatcggtcccatgatccccagccgaccattcctcctgcaatggtgagcccgtcaggaaaccgtagcagctgcgcctcaaaggggcaggtggcgtcgggcatggccatcccaacggacccttcaggtacttaccactgtaggccgattgcagcaggatactccaaggtcgaagttgagttggtcgaagacgcgtacgaggacctcgagctggattaccctggaggagatggtgagacgcatctacgagacacaagccacaccattattctatggcgcaagcgatacatcatcctccctgggcgacaagcggcgtctcgtgcaccatctcctctggctccgccgtctcctcctcaggctccagcaccgtctcctcctcatgctccagcaccgtctccacctcaggctcctccggcaccttccaagtcaagggcaacccaagctccaccgcctgcccccacaagggcaataaagaaggcgaaagttgacaccgccaagaacaaggacccggggtacgattgcacgcaagaggagcttgaagcttacgtggcatcagaagtcaacagacaattcaagcctcgaagtccagaaaagaagattcctatagacccgagtgttaggaacttcttcaggggtatgtctgcacctgccaaggaggccataaagctatcggactatgagcgaacgctcaagaaagcatcttctggaaagtccaaaccagtccctcagcttggagagcaaccaaaccaggagatcgagccgttggtgactggtgaagattttggaatacaagaatttattaatgacaccgggctaactacggatcaattgctaggagacgcaccaatcgaaaaggcggaagtgaaatacatgtacgaactcggtaaaccgcttgtcaagcctgagctgctgcagtccctacccacacaaatgtacaagttccatcagctgtacatggagatgagcgccaccggtagagagatgattggagcaaggatcagggacacggacttcttgcaaggagatgacattctctggatcaatttcaagggaatctacgaactataccagctggacgccctcgacgtctctattatgagttgctggattttaatggagattcaaagggcctaacggcggggggttttcgatactggattcatcgaccctcggaaagtaaacgtcgcaatgctcgaccaatatccgcaagccacagaggacaatctcgtccatctcctgaaggcgcagcattacaagacgttcatactgttgccgtacaacacagagttaaacgtatatgactcaatggataaaaaagagtctacgtttgacaaggttttcgaacttatagacagggcttggtatcggttctatcatttggtccgcggcaaatggagagaaagacttaggcggaagttcaaatttccttttattcgtatgagggataacctgatcacacacaaggaatttatcgcggcggttcaagaacaactcatgggattcatcaataaacaaatccttgatcccaagggtgaattctactacgacggaaacacaattcataggtccttagcttctgagctagcgactactactacgtcgaaatcgtagcta

SEQ ID NO: 14577 - DNA, 5322 bp, Oryza sativa
  Clone ID: TFbOSC101237j.C1.o3.fg
atggaggaaaaatattctgcgaaaccatttgttttcgatggacacaattttgtcatttggaaggcacgaatggaggcctacctccagtcgcaagggcataatgtgtggaataaggttaaatcaccttacactgtgcccgatgatgctgacatcacgcctgcaaatgtggctcaggttgattttaattatcgtgcaagaaatgcaatcattggtggaatttcttctggtgaatttaattgtgttcaacaccacaagtccgctcatgacatgtggactgctctgtgcaatttccataagggaaacaatgatattcaattggttcgtcagaatcaatttcataaagaatatcaaagatttgagatgcacccaggagagtccattgattcttatttcaagcgttttggagaaattgtttcgaagttgagatctgttggaaaagaattttctaataatgataatgctcgccatcttttgaattgtcttgattatggtgtttgggaaatgaaagttacttccatcacagagagtgcacctctgagtgaccttaccatgggcaagctttactcaaagctaaaaacccatgagatggatattttccatcggaaaggcctcaaacactcgatggctttggtagctgatccctctggtagtacttcttctaatgactcagcttttgtgtgtggtggcttctctcttgccgctttacactcagtcactgaggagcaattagagaagattcctgaagaggatcttgctctttttgctagaaaattctcaagagcttacaaaaatgtgagagatagaaaaagaggaaaaaccaatgaaccatttgtgtgttttgagtgtggagagcctaaccacataagagtgaattgtcccaagttgaagaagaagagtgacaagacgaccaagaagcccgagggacaagggcgaaaggggaataaggatttgatgaagaaggcgatccataaggtcttggcggctcttgaggaggtgcagcttagcgacatcgactccgacgacgatgatcaagaaaagggggacaaggacttctccgggatgtgctgtctcgccaacaacgaggacttcatcaacctgtgtctcatggcacttgaggataaggatgactcatcggagcatcctgaggtatgtcttgatgatatcccttccttggatggttctctttgtgatgatttttgctcagataatgactctgttgatgatgaactaagcaaagaaagaatggcacacttgatgattgaaattagtgacaagtataggtcttctaagtataaaattgagaaactaaaatctgaaaatgatggtatggcgctagaaattgctaggcttcgatccatgattcctgaggaggatacctgttctacttgtgcttcatatctctctgaaattaatctcctcaaggataagttgaaatcatgtgctttaggagctgggaatccttctagtgctagtgttgcttgctctacttgctatgaaatgaaagttgatatgggtttgcttgagatggaattgaaagaactaaaagaaaaaaaatttcatgataggattggtaggtgtgaaaattgtcccattctcactagtgacaatgatgaattaagacaacaagttgccatgcttaggaccaagaatgatttgttagaatcttttgctactaaggaacctattcattcttcatgtgctaattgtgctatcctggaaactgaactaaaagatgctaaaactgtcattgattctatcaaatctattgattcttgttcatcatgcatttctctgaaagttgatcttgagtctgctaagagagagaacttttacctacaacaatctttagagaggataggtacccatgagatattaggtgtcacagatgggatgatagaactagctcaaaagcctataaccttcaagtctgcaggtttcattggaaacactagttctagttcacccaaaacctcagaaccaaagatggtacctatgactagcaagtctaagcctgtagagttacctagacccaaaaatccaaaacaagttgagcacaagcaaaaccagaaacaaaccaagcctgtagagaaaaccaagtatgagtgcacctattgtgggaaagctggtcatttggattttggagtggggagaagtaattcttggcttgtggactccggttgctcacgccacatgaccggtgaagccaagtggtttacttctctcactcgtgcatccggtgatgagaccatcacttttggggatgcgagcagtggacgcatgatggctaaaggaacaatcaaggtcaatgacaaattcatgctgaaggatgtcgcgcttgtaagtaagcttaagtacaatttgctctctgtttcacaactctgtgatgaaaatctagaagttcgtttcaaaaaggataggtctcgagttcttgatgcttctgaatctcctgtttttaacatttctcaagttggtcgagttttctttgctaactttgactcttctgctcctggtccttctcgttgtttcattgcctcagagaatagggatttgtttttctggcatcgtcgtcttggtcatattggctttgaccacttgtctcgcaatagtggtatggatttgattcggggtttgcctaagttgaaagctccgaaagatcttgtgtgtgcaccatgtcgtcatgggaaaatgacatcttcctcccacaagcctgttacaatggttatgacagatggaccgggacaactgcttcacatggatacggttggtcctgctcaggtccagtcagttggggggaagtggtatgtcttggttgttgtggatgatttctctcgctactcttgggtctattttcttgaatcaaaagaggaaacgtttggcttctttcagtctcttgctcgtagtttggctttggagtttcctagtgctcttcgagccattcgtagtgataatggctctgaattcaaaaattctgcatttgaatctttctgtgattcttctggagtcgaacatcagttttcttcgccatatgtcccacaacagaatggggtggttgagaggaagaaccgcacccttgtggagatggcacgaactatgcttgatgagtttactactccaagaaagttctggactgaagctatttctgctgcttgttttatctccaatcgtgtgtttttgagaactatcttgcacaagacgccatatgagctcagatttggtcgtcgaccaaaagtttcacatctcagggtcttcagttgcaagtgctttgttcttaaacctggaaatttggacaagtttgaatctcgatctgtggatggcatttttcttggctatgctactcattctcgggcttatcgagtttatgttctttcaactaacaaaattgtggagacttgtgaagtcacttttgatgaggctagcccaggagctagaccagaaatttcaggtgttccagatgaaagcatccttgtggatgaggattcagatgatgatgacgatgattccatttctccacctctagacagtacaccaccagtacaagaaaccggttctccatcgactacatcgccttcaggagatgcaccaactacatcatcttcagcagctgaggagattgatggtggcacatcaggaccaacagctccccgacacatccagaaccgacatccgcctgactcgatgatcggaggcctgggtgaaagggtaactaaaaatcggtcttatgaacttgtcaattcagcatttgttgcctcttttgagcccaaaaatgtttgtcatgctttatctgatgagaattgggttaatgccatgcatgaagagttagaaaattttgaaagaaacaaagtttggtctttggtagaaccttccttgggttttaatgtgattggaacaaaatgggttttcaaaaacaaactaagtgaagacggttcaattgttcgaaacaaagccagactagttgcacagggtttcacccaagttgagggcttggattttgaagaaacttttgcaccagttgctagattagaagctattcgaattcttttggcttttgctgcttcaaaaggtttcaagctttttcaaatggatgtgaaaagtgcttttctgaatggtgttattgaggaagaggtctatgtcaaacaacctcctcgttttgaaaatccaaaatttccaaatcatgtgttcaaacttgataaaactctttatggtttaaaacaagctcccagagcctggtatgaaagattgaaaacctttttgcttcaaaatggttttgaaatggggggagttgataaaactctctttactcttcatagtggcattgattttcttcttgtccagatatatgttgatgatatcatatttggtggctcctctcatgcacttgttgcccagttttctgatgtgatgagcagggaattcgaaatgagcatgataggagagttgactttcttccttggacttcaaatcaagcaaacaaaggaaggaatctttgtacatcagaccaagtactccaaagagctcctgaagaagttcgacatggccgactgcaagccaatcgccacccccatggcaactacttcatcgcttggtcctgatgaggacggcgaagaagttgaccagcgcgagtacagaagcatgatcggctccctcctctacctgactgcgtcaaggccggacatccacttctccgtgtgcctgtgcgcgaggtttcaggcttctccaagaacatcacatcgccaagcagtcaagtgcatcttccgctacatcaagtctacacttgagtacggtatttggtacccctgctcttctgccctttcagttcgagctttttcagatgctgattttgctgggtgtaagattgatcgcaaaagtacttctagcacttgtcattttcttggcacttctttggtctcttggtcctctcgtaagcagtcttctgttgctcaatcaacagctgaggctgagtacgtagctgctgctagtgcatgtagtcaagttctttggatgatttcaactctgaaagattatggtctgtctttctctggtgttcctctgctttgtgataatacaagtgcaatcaatattgcaaaaattccagttcaacactctaggaccaagcacattgagatacagtaccactttctccgagacaatgttgagaaaggtaccattgtgctagagtttgttgaatctgaaaatcaattggcagacatttttacaaaaccacttgatcgctctcattttgagttcttgcggactttcatttgcttaagtagcttgtgtgatcatgttatgctgttcaagcttgttgaaacctgcttaaattga

SEQ ID NO: 14578 - DNA, 1010 bp, Oryza sativa
  Clone ID: TFbOSC14140j.C1.o1.np
atgactaacaagactctccgtgaattcgctgctccctctgctgacaatgtgaccattgggccacaaattaacctgggagacgtggattttgatttgaagtctagcctcatcacgatgcgcaggctagccctttctgtggcaaccaaatgagaatgccaatgctcatttacagtagttcctagagatttgcagcacatacaccatgaagggtgtcagtccaaacaacgttaggctacgactgtttccgttttctctccttgggaaagcgaagaagtagttttatgctaaccatgctacgatcaatacctgggatagatgcttcacgacattcctctcaaagttctttccgatggaggcacgggaacgacttcaagaatatgtggccgcctgtcctcatcatgggatggatgactggctgatcttgcaaaatttctataatggactcactcccatgtcccatgaccacctagacacggcagctggatgagatttcttctcaaagacggttcgaggagccatcgatttgatagagaagatggtctctaatatgggttggagcgaggaacgactccaaacccgtcagcgaggcatgcacaccgtcaaggagatggaaatgctcgctgccaagatggacctcctcatgaaatgattggacgaccatgacaaaaggccacaaggcatcgtcaaagccttggactcacacgttacatgtgaagtctgcggcagcacgggtcattctgggaatgattgcccggaaacccatgaattggcgatgtacatgggcaacaacaacaatgggtatcgtccacaaggaggtcaggggtggaatcagccatgcccatattatcaaggagctaacaacaacggtaacttttctaaccaaccctccttgaaagatctcgtttttgtgcaagctaagaccactgatgctttaagcaaaaagctagctgccaattctcaattagctgccttagtacctgcaaatgagtctgggaggattccggggcagc

SEQ ID NO: 14579 - DNA, 2022 bp, Oryza sativa
  Clone ID: TFbOSC15762j.C1.o1.np
atgactaacaagactctccgtgaattcgctgctccctctgctgacaatgtgaccattgggccacaaattaacctgggagacgtggattttgatttgaagtctagcctcatcacgatgcgcaggctagccctttctgtggcaaccaaatgagaatgccaatgctcatttacagtagttcctagagatttgcagcacatacaccatgaagggtgtcagtccaaacaacgttaggctacgactgtttccgttttctctccttgggaaagcgaagaagtagttttatgctaaccatgctacgatcaatacctgggatagatgcttcacgacattcctctcaaagttctttccgatggaggcacgggaacgacttcaagaatatgtggccgcctgtcctcatcatgggatggatgactggctgatcttgcaaaatttctataatggactcactcccatgtcccatgaccacctagacacggcagctggatgagatttcttctcaaagacggttcgaggagccatcgatttgatagagaagatggtctctaatatgggttggagcgaggaacgactccaaacccgtcagcgaggcatgcacaccgtcaaggagatggaaatgctcgctgccaagatggacctcctcatgaaatgattggacgaccatgacaaaaggccacaaggcatcgtcaaagccttggactcacacgttacatgtgaagtctgcggcagcacgggtcattctgggaatgattgcccggaaacccatgaattggcgatgtacatgggcaacaacaacaatgggtatcgtccacaaggaggtcaggggtggaatcagccatgcccatattatcaaggagctaacaacaacggtaacttttctaaccaaccctccttgaaagatctcgtttttgtgcaagctaagaccactgatgctttaagcaaaaagctagctgccaattctcaattagctgccttagtacctgcaaatgagtctgggaggattccggggcagcggactcctccattgaaaatgttaaggtgatcaccacgaggggaggtaagtccacttgtgatctgccatatcctaaccctgtaggaactaacaaggaagcgccatctggtacttcagctgacaaaaagattcagctagagaaggttgtgccacaagcatactatgacacgcaattgctgccatttcctcaaaggaacaggaaaccgtcagtggacgagcagtttgctcgttttgttgaagtgatctagaagattcacatcaatatgccgtagttggatgctatataagtgctaacatacgcacgttacctcaaggatatcctcaacaacaagagaccgctcccaacaatggaggtggtcaagctgatggagcagtgcaacaatgccatactccacaagttcccggaaaagaagaaagatccggggtgtcctacgatcacctgctcgatcggggcacaacagttcaaccaagccttttgtgatattggagcaagtgtcagcgtcatgcccatggacgtctttgaaaagctcaacttcacgatgttggcaccaacgccaatgcacctgcagctggccgactcattagtccgttacccaacagggatagcagaggatgtgccggtcaagatacgggattctttcatcccagatggtttcgtggtgctggacatggaaacaggaaaggaaacactgctcatcttggtgcatccattccttaaaactgcaggagccaacattgatgtgggaacgggaagtatccgtttccgtattaacgggaaggaagagaaatttgagtttcagccaaggactaaacactgctccatggtcagaatcaagtacgggccaaacctacaaaatatcctggtgaagttcatgcaaaatttcctggaaaaggaaaccacgtttcccaggaaccgttattggaacacactggtaaaacctagtgttccggccaagaagctagagcagccggcttagaagaagttgtctcccgcaccaaagccaaagaaggtg

SEQ ID NO: 14580 - DNA, 2301 bp, Oryza sativa
  Clone ID: TFbOSC19000j.C1.o1.fg
atgtcatggcacagggccggtgtcctgctgctaggggctcagtcctgcctgcctgtcccgggggttccggccatggccggcagcgtcagccatcgtggtctggacatgactggtttcgtcttggagctgcggggcatgtgcgttgtcctggggtatccgcatggagtggactaccagggcaggccgcttccggagcaggagggtgacgatgcagagccccacgctgcttgggaggttactgcagtgatcctcactggctctcccgagcggacttcgttggcagtcaccgcgggtggagattctttccccgccgcttgccagaacgccgctctcctcgccatcggcactcttcaccagcgctacccagacaagttgcagcactcgccctaccgctaccaccctcgccgcggaggagcccgcgactacgccacctttcgggatgctagctcggaggatgacgctaccatcatgcacctggcgcgcatggtggaggcgtacgacgcggcccgtatcgacttccatcagatggtgtgccgtgggatggtcgagaacaacctgaagatcctggagctgcgtcaggagaatctgcagctgaagaaggacctagacgcagtggaggcgcagctgcatcagctcaagatcgcccagggagaggtctgtcgccccaagcgtcgccgcgtctgccgcagccagaagatcaccgcccgcaagagcacctccaggcgcgagcttattcgtcagtccctggcgtggacctgcttcgtggagacccctcgtgccgagcccgcgcccgtggttccccaggagggggaagcctccggcgttggtagcacggaggatgcgctgttgctcaccttccgccctggcccgtcgcagcggagaagtgctaataccggtgatggcaaccaacctgagggcagcaaccacaacaaccatggcagcccacctccacctcctcccccgcctccaccaccaccaccagacaccaacgccattctcacccaaatcctcgcccagcaggccaacatgatgactgctttcctccaccacctccaaaatccgccacaacagaatgctccaccaccacccccacaacactctaaactcgccgagttcctccgcatccgtccaccaaccttctctagctccaacaaccccgtggatgcgttggactggttgcatgccgtggggaaaaagctagacactgtgcagtgcagcgatgaggagaaagtcatcttcgccgcccaccagctgcaggggcccgcatctctatggtgggaccatttccaggctacgcagccagaggggcagcctattacttgggcccgcttcaccgccgcttttcggaggacccatgtgcccgccggagtcatggcccttaagaaaagggaattccgagagttgaagcaaggcaaccgctccgtgatggagtatttgcatgagtttaacaacttggcccggtacgccccggaggatgtgcgggaagatgaggaaaagcaggagaagttcttggcgggaatggatcctgagctgtccgtccgtctagtctccggtgactatccggatttccaacgtctggtggacaagagcatccgcttggaagccaagcacaaggaactggagtcgcacaagcgccgcttggcgaatttccgcaatcaacagggagctaaccaaaggatccgctacaccaatccctatccagggggatcgtcctcgcagcagcaacagcagcagcaacctcgctccgtgccccgacctcaattcgtggtgcgcgtcccacagccgcagcaacaacagagccagcaagggacccgtgcgccccgtcctcctatgccaaccgtgcagcctggtcaaggccgcagggacgttcaaggtccgcagcgtttgtgcttcaactgcttcgagcctgagcactttgcggataaatgcccaaagccgaggcgccagcaaggccaagcgcctccccgctccaacaaaggtggtaaggatgtcattcggggtcgtgtgaaccacgtgacagccgaggacgtgctgacaactccagacgtcatcgttggagttgctgtggaccccgaaacagtgaccgccgtcaccgattggaagcaacccaagacagtcactcaaattcgcagtttcttaggtttggcaggatactactggagcgtgtcaaggcagagcaccaacgaccggccggacttctccaacctctccaagtaccggaatggaaatgggatgaaattgggatggatttcatcaccggacttccaaaaacccaaggtggatatgattctatatgggtag

SEQ ID NO: 14581 - DNA, 4482 bp, Oryza sativa
  Clone ID: TFbOSC23329j.C1.o1.fg
atggtgaagacaaggaatggttcccgtgactccaacaacgccagtggcagcgaagagccgatcgatggaccacgtgccagcaatgcacctaatagcagtccgtccccaccgcccgagaacccaacgatcgctcaggtgttggacaatcagactcagatgatggcaatgatgatgcaacagatgcagcaacagtaccatcaggtgctgcagcaggtgcagcagcaagcacagcagcagcagcagaacctgcagtttggtcctccacctcctcagtccaaactgttagaatctcttcgtgtcaagccgcccaccttctcaagcaccaccaacccaatcgaggcccacgactggcttcatgccattgagaagaagctgaatcttttgcaatgcaacgagcaagagaaggttgcttttgctacacaccagctgcaaggtcccgcttctgtttggtgggacaactacatggtgacccgtccagcttgggcagaagttacttggacagagttttgtcatagtttcaataaagcacaggttcccgagggaattgtggcacaaaagaagagagagttccgttccctgcaacaaggaaccagaacagttatagagtatttgcatgagttcaaccacctcgcgcgctacgctcctgaggacgtgcgtaccgatgccgagaggcaggagaagtttctgtctggtcttgatgatgaattgattaaccagttgatctctagagattatgaggactttgagaagctggtggataaggctatccgtcaggaggagcactgtaacaaaataaaccgtaagaggaaggcagctcagttcaggacttcccaggggaagagtcagaagcctcgtttcacgatgggacatcacggtggaccttccaccatgattatccggcagtaccgtccctaccacccgggtagcttcaacaagaaccaccatagtggcagtcacaacaacagtgagcagcacagcctcaaccctactccaagttcattaaagattccagcccaatcagttcagccagctctgccagaacagcccaagaggttgggagaaaaacccaaactctgcttcaattgtaacaaacccggacacacggttggaaagtgcccgaagccaagacgtgctggacccaagttcgttcaggcccgtgttaatcatgcatctgcagaggaggcgcagtcagcaccagaggttatattgggcacattccccgtcaactcgacactggcagtaatattgtttgattctggtgcaacccattccttcatttccaagcgttttgctggtgcacatgggttatctttagtgaagcttaagataccaatgcgagttcatactcctggaggtggcatgaccacaactcactactgcccatctgtgacagttgaaattcaagggttgatttttccagccaacctcattcttctcgaatccaaggacctagatgtcatacttggaatggattggttgacaaggcacagaggagtgattgattgcgccagccgcaccatcaagttgaccaatgcaaaaggagaggaggtaaccttccagtctccagtgccgcggaagccagggattagtttaaaccaggctgctggtgaagaacaagaggtagcagtggagaaaaccactaagaagttggaggatattcccatagtcagagagtatccagaggtttttccggatgatctgacaacaatgccaccaaaaagggatatcgagttccggattgacttggtacctggaactgcaccgatccacaagagaccttacagaatgggagccaacgagttggcggaagtcaagaagcaagttgatgaacagttacagaagggatacatccgcccgagcacatcgccttggggtgctccggttatctttgtggagaagaaagacaaaaccaagaggatgtgcgttgactaccgcgcactcaatgaggtcaccatcaagaacaagtatcctttgccaaggattgatgatctgtttgatcagttgaaaggagctactgtgttctctaagatagacctgcgatcaggctatcaccagttgaggatccgcgaagaggatatttcaaagacagcattcatcactcggtacgggttgttcgaatgcacagttatgtctttcggactcactaatgcacctgccttcttcatgaatttgatgaacaaggtgtttatggaatttctagacaagtttgtcgtggttttcatcgatgacatacttatctactccaagtccgaggaagaacatgagcagcatcttcggctggtacttgaaaagttaaaagagcaccagctatatgccaagttcagcaagtgcgacttctggcttaaggaagttcagtttctcggtcacatcgtgaatgctcaaggagtagctgtggatccagcaaatgtggagtcagttaccaaatggaccccaccaaggacagtcactcaagttcggagtttcttaggacttgcgggctattaccgccggttcattgagaacttctctaaaattgctaagccaatggcacagctattgaagaaggaagaaaagtttatctggtccgctgaatgcaataggagttttgaagaactcaaacgacggttggatggcaaagtggtttcttatgcttcacggcagttgcgtcctcatgaaggcaactacccgacgcacgatctggaattggccgcagtcgttcatgctttaaagatttggcggcactatctcatcagtatccgttgtgaggtatatacagatcacaaaagtctaaagtacatcttcacccaacctgatctgaatctccgacaacgaagatggttggagctaatcaaagattatgatatgggaatacactatcatcccggcaaggctaatgtggttgcagacgccttgagcaggaagagtcactgcaacgtcgcatgggtagaggaactatgctgtgaggttcaacgtgatttggaacatttgaaccttggtatagttgagcacggattcgtggctgccctagaggcacagcccacactggtggagcaggttcgcatagctcaagcaagtgatcctgaaatagcggagctcaaaaggaacatgagagttggaaaagcccgaggttttgttgaggatgaacaaggaacaatctggacgggagaaagattgtgtgtacccgaaaacaaggaattaaaagacctgatactaaccgaggctcatcaaactcagtattccattcatcccggtagtactaagatgtaccaagacctcaaagagaagttttggtgggtcagcatgagaagggaaatagctgaattcgtagcactctgtgacgtctgtcaacgagtaaaggcagaacaccaaaggccagcaggtttgctacagccacttcagattccagaatggaagtgggaagaaatcggaatggatttcatcaccggtttgcccaggacgtcatcggggcatgattctatttgggtagtcgttgaccgactcaccaaagtggctcacttcattccggttcacactacctactcagggaagaaattagcagaactctatctggcaagaattatgtgtttacatggtgtacctaagaagatcgtgtctgatcgaggaagccaattcacttcaaagttctggcagaaattacaagaagaattgggaacccggttgaatttcagcactgcttaccatccacaaacagatggccagactgagcgagtcaatcaaatactagaggatatgttgagagcatgtgcgcttgactttggtggagcatgggacaaaagcttgccgtatgccgagttctcttacaacaacagttaccaggctagtctgcagatggcaccgtttgaagcactgtatggacggaggtgtcgtactccgctcttctgggatcagacaggggaacgccagttgtttgggacagaagttttaaatgaggcagaagagaaagtcagagttgttagggaaagattgagaatcgcgcaatctcggcagaaaagctatgcagacaaccgccgaagggagctcgctttcgaaacaggggattatgtgtatctccgtgtcactccgctcaggggagtacatcgcttccaaaccaaaggaaagttggcaccacgctttgtgggaccatacaggatcttggaacgtagaggtgaagttgcttaccagcttgagcttccctccaacatgcttggcatccataacgtgttccacgtctctcagttgaagaaatgtttgagagttcccgaggaacaggcaagtccggatcacatcgaaattcaggaagatctgacgtatgtggagaagccgacccgtatccctgaaaccagcgagagaaggaccagaaacaaagtaatcagattctgcaaggttcagtggagccaccactcagaggaagaggccacttgggaaagagaagatgagttgaaggccacccacccatacctcttcgccagctcttccgaatctcggggtcgagattccgtttaa

SEQ ID NO: 14582 - DNA, 249 bp, Oryza sativa
  Clone ID: TFbOSC23329j.C1.o2.gm
atgaggggcgcgacgtggagcggagaaggcggggcggcagcggcggttgccggtgtgggcgcacggctggaggttggggacgacccgacaggtggggcccacctgtcggcgtcccgaagggatggggagggggcgcgggccggcccaagaaggagatgggcgcacgcggcggcgggtgtgaaccggaatgaagtgagccactttggtgagtcggtcaacgactacccaaatagaatcatgccccgatga

SEQ ID NO: 14583 - DNA, 3147 bp, Oryza sativa
  Clone ID: TFbOSC28109j.C1.o1.fg
atggccagcaagactctttgcgagttcgctgctccctctgctgccaatgtggccgtcgggccgcaagtcaacataggagatgtggatttcgacttgaagtccagcctcatcacgatggcgcaggctagcccgttctgtggcaagcctaatgaggatgccaacgctcatctgcaacaattccaggagatatgtaccacgtacaccatcaagggcgttagtcctgacgccgtcaggctgcggctgtttccgttgtccctcctcgggagagcaaagcagtggttctatgccaaccgtgctgctatcaacaccagggataaatgctctacggcattcctctcgaagttcttcccgatgggcaaaaccaacgcccttcatggacgaatttccagtttccagcagacaagggacgagtctgttccagaagcatgggaacgactgcaggagcacatggccgcctgtcctcatcatgggatggacgactggctaatcctgcagaatttttacaatgggctcaccccaatgtcccgcgatcacttggacgcggcagctggaggagccttcttctctaaaacggttcaaggagccgttgaactcatagagaagatggtctccaatatgggttggagcgaggaacgactccagacctgtcagcgaggcatgcacaccgtcaaggagacggagttacttgctgccaagctggacctcctcatgaaacgcttggacgaccatgagaaacggccacaaggcaccgtcaaggccttggactcacacgtcacgtgtgaagtctgcggcagcacgggtcattctgggaacgactgcccggaaacccgtgaggaggcgatgtacatgggcaacaacaacgggtatcgtccacaaggaggtcaggggtggaaccaactaagcccatattatcatgaggatcttgtttttgcgcaagctaaaaccattgatgtgctaagcaaaaagcttgctgctaatgataagatcttagagaacataaatgtcaagctagatggctttgcttccgcatttcaaaaccagatgagctttaataagatgatagaaacccagttagctcagttggaatctttagtccctgcaaatgaatccgggaggattccggggcaacccgacccctccattgaaaatgtcaaggcgatcacgacgaggagaggaactaatgagatatcaaaaggagcgccatctagtgactcggttgacaaggaggttcagccagaaaagaccatgccgcaggagaaaccgtcagtggacgagcaattcactcgttttgttgaagtaatccagaagatccacatcaacgtgccgttgttggacgctatgcaagtgccaacatacgcccgttatcttaaagagatactcaacaacaagagaccgctcccaacaacagaggtggtcaagctgatggaacaatgcagcaacgtgatactccacaagctcccggagaaggagaaagatccggggtgtcctacgatcacctgctcgatcagggcacaacaattggaccaggccttgtgcgaccttggagccagtgttagcgtcgtgccaaaagacgtcttcgacaagctcaacttcacggtattggcaccaaaaccgatgcgccttcaactggctgattcatcagtctgttacccggcaaggatagcagaggatgtgccagtcaagatacgggatttcttcatcccagttgattttgtggataaagtacgggccgaacccacagaatattcaagtggtcgaagtggagccacccaagacggacagcctcgtgaagtttatgcagaatttcctggaggaggaaacaacgatgcccaggaaccgttattggaggacgcaggtaaaatcacctgcactcgccaaaaagtcagagcagccagcttagaagaagccgtcttccgcaccgaaatcaaagaaggtgcggaaggaaaagccaaagacacccgctccatcacctccggagacgggtggaaaatccgtgaactgaatcaaaatgacgcgaccttcgcaaacagtgatcgggagagacaagcctactacatgctgagcgaccgggaatatgctcacactcaagaatactctctggagctgctgaaaaagataggtttggatgttgaatttcgttctatttggaaagctgttggttggcagagatttgttgtggtagatgagcctggttctcgtttgcttactttgcaatttctatgcactttgaaagaaatagaagatggtatttcttttcgcttcttccgtaaggagttcacactcacatggaaaggcttgagtacacttcttggttttcacgattcctgtaaaatcgatctccagaaaggaatttctgggttcgagaaaaataggttttgggaagatatttctggtgctccaatttgcaagaaacctagaacgaatgatatccataatcctacacttgggctcatgcacaaatggattgctatgactttgtttcctagaagtgatctgagacccattaggggagatgaattaattatcatgtttgccatggttagaaagatcaaaatttctcctatgaaatgtatgataagacaatggttagaaagtataaagttctctgctcctattgagtgcacttctctgattactcggatagcaaaagggctaggggtcgttagcaaccagattgcttttatctcagccgctcgtccgcatatttatgaggcctatctagtgcaagggcatattttgaaacatggagcagatggatctttgatatactttttccccggttgtacaaatgaaatcccattaccaaatgtggggtatcatttgtacaactgccatgaactaaccattcccctgcagaccatagaagaatcttgtgcaggtggaacatacagggagacgcgcaacatgacaaggaacgaacaaggaagttcatcatcctcgacacccgtgcagatgagaatggacacccttgatgtgcagatgggggagatccagtatgacctcacggaacacatagctcaaacgcaagaatggcaacaatctgctgatgctcagttcaccaacatcaacaacatgatgcagcaacagcatgatgaccttcaggcgtactttcgctttcaggggttcaatccttatcaaggaccctga

SEQ ID NO: 14584 - DNA, 3571 bp, Oryza sativa
  Clone ID: TFbOSC29791j.C1.o1.fg
atgccggatgacaagattggacataaggttgcacacggtggacgaacaccgtgtaaggaggtcttcgcaacggacttcgcaagggaggccaagccaatccagcccttcctcgtggctcaagatgatggatggatcagcaggcagggaggccaggccgagcaggcccaagacaagacgacggcccacggcattggcaccatgcgcgggcaagcgcgggagatcgcgcgaggcacgcgcgcgcagtggacacgcggcggcaaggaattcggcgcgtgcgggcgtggggtccacgctgtttcaagtggctcggaggcgggagttgtactgggacccacgcgcgatttcgcgagcatgcgcgggagcagctcggcgggacgcgtggaggctttggactggatgcgcgcagatccggcttctctaatagctgcggttctagcacgaatggaggcctacctccagtcgcaagggcataatgtgtggaataaggttaaatcaccttacactgtgcccgatgatgctgacatcacgcctgcaaatatggctcaggttgattttaattatcgtgcaagaaatgcaatcattggtggaatttcttctggtgaatttaatcgtgttcaacaccacaagtctgctcatgacatgtggactgctttgtgcaatttccatgagggaaacaatgatattcaattggttcgtcagaatcaatttcataaagaatatcaaagatttgagatgcacccaggagagtccattgattcttatttcaagcgttttggagaaattgtttcaaagttaagatctgttggaaaagagttttctgataatgataatgctcgtcatcttttgaattgtcttgattatggtgtttgggaaatgaaagttacttccatcacagagagtgctcctctgagtgaccttaccatggacaagctttactcaaagctaaaaacccatgagatggatgttttccatcggaaaggcctcaaacactccatggctttggtagctgatccctctggtagtacttcttctaatgactcagcttttgtgtgtggtggcttctctcttgccgctttacactcagtcactgaggagcaattagagaagatccctgaagatgatcttgctctttttgctagaaaattctcaagagcttacaaaaatgtgagagataaaaagagaggaaaaaccaatgaaccatttgtgtgttttgagtgtggagagcctaaccacataagagtgaattgtcccaagttaaagaagaagagtgacaagacgaccaagaagcccgagggacaagggcgaaaggggaagaaggatttgatgaagaaggcgattcacaaggtcttggcggctcttgaggaggtgcagcttagcgacatcgactccgacgacgatgatcaagaaaagggggacaaggacttctccgggatgtgctgtctcgccaacaacgaggacttcatcaacctgtgtctcatggcacttgaggataaggatgactcatcggagcatcctgaggtatgtcttgatgatatcccttccttggatggttctctttgtgatgatttttgctcagataatgactctgttgatgatgaactaagcaaagaaagaatggcacacttgatgattgaaattagtgacaagtataggtcttctaagtataaaattgagaaactaaaatctgaaaatgatggaatggcgctagaaattgctaggcttagatccatgattcctgaggaggatacctgttctacttgtgcttcatatctttctaaaattaatctcctcaaggataagttgaaatcatgtgctttaggagctgggaattcttctagtgctagtgctgcttgctctacttgctatgaaatgaaagttgatatgggtttgcttgagatggaattgaaagaactaaaagaaaaatttgttcatgataggattggtaggtgtgaaaattgtcccattctcactagtgacaataatgaattaagacaacaagttgccatgcttaggaccaagaatgatttgttagaatcttttgctactaaggaacctattcattcttcatgtgctaattgtgctatcctggaaactgaactaaaagatgctaaaactgtcattgattctatcaaatctattgattcttgttcatcatgcatttctctgaaagttgatcttgagtctgctaagaaagagaactcatacctacaacaatctttagagaggtttgctcaaggaaagaaaaagttgaacatgatcctagaccaatccaaagtgtccataaacaatcaaggtataggctatgattttgctgagtctttgaggataggtacccatgagattttaggtgtcacagatgggatgatagaactagctcaaaaacctataaccttcaagtctgcaggtttcattggaaacattagttctagtacacccaaaacctcagaaccaaagatggtttctgctttagaaaggctagaaaagagcgacaagaacgtcttaggactagaagagctactagagtccctgagaggttcgagtgattttggagtggggagaagtaattcttggcttgtggactccggttgctcacgccacatgaccggtgaagccaagtggtttacttctctcactcgtgcatccggtgatgagaccatcacttttggggatgcgagcagtggacgcgtgatggctaaaggaacaatcaaggtcaatgacaaattcatgctgaaagatgtggcactagtaagtaagcttaagtacaatttgctctctgtttcacaactctgtgatgaaaatctggaagttcgtttcaaaaaggacaggtctcgagttcttgatgcttctgaatctcctgtttttgacatttctcgagttggtcgagttttctttgctaacttcgactcttctgctcccggtccttctcgttgtctcattgcctcagagaatagggatttgtttttctggcatcgacgtcttggtcatattggctttgaccacttgtctcgcattagtggtatggatttgattcggggtttgcctaagttgaaagctccgaaagatcttgtgtgtgcaccatgtcgtcatgggaaaatgacatcttcctcccacaagcctgttacaatggttatgacagatggaccgggacaactgcttcacatggatacggttggtcctgctcgggtccagtcagttggggggaagtggtatgtcttggttgttgtggatgatttctctcgctactcttgggtctattttcttgaatcaaaggaggaaacatttggcttcttccagtctcttgctcgtagtttggctttggagtttcctggtgctcttcgagccattcgcagtgataatggctctgaattcaaaaattctgcatttgaatttttctgtgattcttctggagtcgaacaacagttttcttcgccatatgttccacaacagaatggggtggttgagaggaagaaccgcacccttgtggagatggcacgaactatgcttgatgagtttacgactccaagaaagttctggactgaagctatttctgctgcttgttttatctccaatc

SEQ ID NO: 14585 - DNA, 1896 bp, Oryza sativa
  Clone ID: TFbOSC400128j.C1.o22.fg
atgactggtttcaacctgccggaaaacttcaaagaaaatccagaagctttcttccgaagggtcaggccgcgagtcgttgctccgcagaaaactctaccaacagagaaaccagtcgtactagcgccaccgaccttcaagataatggctagcaggactcttcgtgagttcgctgctccctctactgacaatgtggccgtcgggccgcaagtcaacataggagaggtggatttcgactttaagtctagcctcatcacgatggcgcaggctagcccgttctgtggcaagcctaatgaggatgccaatgctcatctgcagcaattcctggagacatgcagcatgtacaccatcaagggtgtcagtcccgacgccgtcaggctgcggctatttctgttctctcttctcgggagagcgaaacagtggttctatgccaaccgtgctgctatcaacacctgggataaatgctctatggcattcctctcgaagttcttcccaatgggcaaaaccaacgcccttcgtggacgaattttcagtttccagcagacaagggacgagtccattcctgaagcatgggaacgactgcaggagtacgtggccgcctgtcctcatcatgggatggacgactggctgatcctgcagaacttttacaatgggctcaccccaatgtcccgcgatcacctggacgcggcagctggaggagcgttcttctctaaaatggttcaaggagccgttgatctcatagagaagatggacacggaactacttgctgccaagctggacctcctcatgaaacgcttggacgaccacgagaaaaggccacaaggcaccgtcaaggccttggacacacacgtcacgtgtgaggtctgcggcagcacgggtcattctgggaatgattgcccagagacccatgaggaggcgatgtacattggcaacaaaaacaacgggtatagtccacaaggaggtcaggggtggaaccaaccacgcccacattatcaaggagaaacccagttagctcagttggcatccctagtccctgcaaatgaaattgggaggattccggggcaactcgactcctccattgagaatgttaaggcgatcacaacgaggggaggaactagtgggatgtcaaaagaaacgccatctaataactcagctgacaaggagattcagccagagaagaacgtgccgcaggagtacggagacacgcggtggctgccattccctcaacggagtaggaaaccgtcagtggacgagcagttcgctcgttttgttgaagtgatccaaaagatctacatcaatgtgccattgttggacgctatgcaagtgccaacatacgcccgttatctcaaggacatactcaacaacaagagaccgctcccaacaacggaggccttgtgcgaccttggagccagcatcagcgtcatgcccaaagacgtctttgacaagctcaacttcacggtgttggcaccaacaccgatgcgcctccaactggctgactcatcagtccgttacccgacagggatagcgggaggacgtgccagtcaagaatcaagtacgggccaaacccgcagaatattcaagaggttgaagtggagccacccaagacggatagcctgtatgaggaggcgactgtctcgtccgttcaagggattgggctcttcattaagtcatcatgatgaggctagtactcatttagctgatgtttcgatggaagacgccaacactccacgacaactcttgaacaacgctgacctcgaccttgtgagtgatcgggagagacaagcctactacatgctgagcgaccgggagtatgctcagacgcgagaatactcaccggagttgctgaaaaagataggtatggatgttgaatttcgttctatttggaaagctgttggttag

SEQ ID NO: 14586 - DNA, 5214 bp, Oryza sativa
  Clone ID: TFbOSC400850j.C1.o79.fg
atgccgggtgacaagattggacataaggttgcacacggtggacgaacaccgtgtgaggaggtcttcgcaacggacttcgcaagggaggccaagccaatccagcccttcctcatggctcaagatgatggatggatcagcaggcagggaggccaggccgagcaggcccaagacaagacgacggcccacggcattggcaccatgcgcgggcaagcgcgggagatcgcgcgaggcacgcgcgcgcagtggacacgcggcggcaaggaattcggcgcgtgcgggcgtggggtccacgctgtttcaagtggctcggaggcgggagttgtactgggacccacgcgcgatttcgcgagcatgcgtgggagcagctcggcgggacacgtggaggctttggactggatgcgcgcagctatggaggaaaaatactctgcgaaaccatttgttttcgatggacacaattttgtcatttggaaggcacgaatggaggcctacctccagtcgcaagggcataatgtgtggaataaggttaaatcaccttacactgtgcccgatgatgctgacatcacgcctgcaaatatggctcaggttgattttaattatcgtgcaagaaatgcaatcattggtggaatttcttctggtgaatttaatcgtgttcaacaccacaagtctgctcatgacatgtggactgctctgtgcaatttccatgagggaaacaatgatattcaattggttcgtcagaatcaatttcataaagaatatcaaagatttgagatgcacccaggagagtccattgattcttatttcaagcgttttggagaaattgtttcgaagttaagatctgttggaaaagagttttctgataatgataatgctcgtcatcttttgaattgtcttgattatggtgtttgggaaatgaaagttacttccatcacagagagtgcacctctgagtgaccttaccatggacaagctttactcaaagctaaaaacccatgagatggatgttttccatcggaaaggcctcaaacactccatggctttggtagctgatccctctggtagtacttcttctaatgactcagcttttgtgtgtggtggcttctctcttgccgctttacactcagtcactgaggagcaattagagaagatccctgaagatgatcttgctctttttgctagaaaattctcaagagcttacaaaaatgtgagaaataaaaagagaggaaaaaccaatgaaccatttgtgtgttttgagtgtggagagcctaaccacataagagtgaattgtcccaagttgaagaagaagagtgacaagacgaccaagaagcccgagggacaagggcgaaaggggaagaatgatttgatgaagaaggcgatccacaaggtcttggcggctcttgaggaggtgcagcttagcgacatcgactccgacgacgatgatcaagaaaagggggacaaggacttctccgggatgtgctgtctcgccaacaacgaggacttcatcaacctgtgtctcatggcacttgaggataaggatgactcatcggagcatcctgaggattttggagtggggagaagtaattcttggcttgtggactccggttgctcacgccacatgaccggtgaagccaagtggtttacttctctcactcgtgcatccggtgatgagaccatcacttttggggatgcgagcagtggacgcgtgatggctaaaggaacaatcaaggtcaatgacaaattcatgctgaaagatgtggcactagtaagtaagcttaagtacaatttgctctctgtttcacaactctgtgatgaaaatctggaagttcgtttcaaaaaggacaggtctcgagttcttgatgcttctgaatctcctgtttttgacatttctcgagttggtcgagttttctttgctaacttcgactcttctgctcccggtccttctcgttgtctcgttgcctcagagaatagggatttgtttttctggcatcgacgtcttggtcatattggctttgaccacttgtctcgcattagtggtatggatttgattcggggtttgcctaagttgaaagctccgaaagatcttgtgtgtgcaccatgtcgtcatgggaaaatgacatcttcctcccacaagcctgttacaatggttatgacagatggaccgggacaactgcttcacatgaatacggttggtcctgctcgggtccagtcagttggggggaagtggtatgtcttggttgttgtggatgatttctctcgctactcttgggtctattttcttgaatcaaaggaggaaacgtttggcttctttcagtctcttgctcgtagtttggctttggagtttcctggtgctcttcgagccattcgcagtgataatggctctgaattcaaaaattctgcatttgaatctttctgtgattcttctggagtcgaacaccagttttcttcgccatatgtcccacaacagaatggggtggttgagaggaagaaccgcacccttgtggagatggcacgaactatgcttgatgagtttacgactccaagaaagttctggactgaagctatttctgctgcttgttttatctccaatcgtgtgtttttgagaactatcttgcacaagacgccatatgagctcagatttggtcgtcgaccaaaagtttcacatctcagggtcttcggttgcaaatgctttgttcttaaatctggaaatttggacaagtttgaatctcgatcattggatggcattttccttggctatgctactcattctcgggcttatcgagtttatgttctttcaactaacaaaattgtggagacttgtgaagtcacttttgatgaggctagcccaggagctagaccagaaatttcaggtgttctagatgaaagcatctttgtggatgaggattcagatgatgatgacgatgattccattcctccacctctagacagtacaccaccagtgcaagaaaccggttctccttcgactacatcaccttcaggagatgcaccaactacatcatcttcagcagctgaggagattgatggtggcacatcaggaccgacagctccccgacacatccagaaccgacatccgcctgactcgatgatcggaggcctgggtgaaagggtaactagaaatcggtcttatgatcttgtcaattcagcgtttgttgcctcttttgagcccaaaaatgtttgtcatgctttatctgatgagaattgggttaatgccatgcatgaagagttagaaaattttgaaagaaacaaagtttggtctttggtagaaccacccttgggttttaatgtgattggaacaaaatgggttttcaaaaacaaactaggtgaagatggttcaattgttcgaaacaaagccagactggttgcacagggtttcacccaagttgagggcttggattttgaagaaacctttgcaccagttgctagattagaagctattcgaattcttttggcttttgctgcttcaaaaggtttcaagctttttcaaatggatgtgaaaagtgcttttctgaatggagttattgaggaagaggtctatgtcaaacaacctcctggttttgaaaatccaaaatttccaaatcatgtgttcaaacttgataaagctctttatggtttaaaacaagctcccagagcctggtatgaaagattgaaaacctttttgcttcaaaatggttttgaaatgggggcagttgataaaactctctttactcttcatagtggcattgattttcttcttgtccagatatatgttgatgacatcatatttggtggctcctctcatgcacttgttgcccagttttctgatgtgatgagcagggaattcgaaatgagcatgatgggagagctgactttcttccttggacttcaaattaagcaaaccaaggaaggaatctttgtacatcagaccaagtactccaaagagctcctgaagaagttcgacatggccgactgcaagccaatcgccactcccatggcaactacttcatcgcttggtcctgatgaggacggtgaagaagttgaccagcgcgagtacagaagcatgatcggctccctcctctacttgactgcgtcaaggccggacatccacttctccgtgtgcctgtgcgcgaggtttcaggcttctccaagaacatcacatcgccaagcagtcaagcgcatctttcgctacatcaagtctacacttgagtacggtatttggtactcctgctcttctgccctttcagttcgagctttttcagatgctgattttgctgggtgtaagattgatcgcaaaagtacttctggcacttgtcattttcttggcacgtctttggtctcttggtcctctcgtaagcagtcttctgttgctcaatcaacagctgaggctgagtacgtagctgctgctagtgcatgtagtcaagttctttggatgatttcaactctgaaagattatggtctgtctttctctggtgttcctctgctttgtgataatacaagtgcaatcaatattgcaaaaaatccagttcaacactccaggaccaagcacattgagatacggtaccactttctccgagacaatgttgagaaaggtaccattgtgctagaatttgttgaatctgaaaaacaattggcagacatttttacaaaaccacttgatcgctctcgttttgagttcttgcggagtgagttagggataactctcaaagctctcaaaacactaaaatttgtgatcggggtcgatcttggtcaacggcggatcgggactagactcagggaggagttgaggtccaaagcgatcaaggatgccggggaggccaagccaatccagcccttcctcatggctcaagatgatggatggatcagcaggcagggaggccaggccgagcaggcccaagacaagacgacggcccacggcattggcaccatgcgcgggcaagcgcgggagatcgcgcgaggcacgcgcgcgcagtggacacgcggcggcaaggaattcggcgcgtgcgggcgtggggtccacgctgtttcaagtggctcggaggcgggagttgtactgggacccacgcgcgatttcgcgagcatgcgtgggagcagctcggcgggacacgtggaggctttggactggatgcgcgcagtggttgcaatagaggttgctatatactccagtgtaaaaatccactatcgttataatgaccgctacaaaagctatttattacctcgtttgtaa

SEQ ID NO: 14587 - DNA, 5322 bp, Oryza sativa
  Clone ID: TFbOSC401256j.C1.o18.fg
atggaggaaaaatattctgcgaaaccatttgttttcgatggacacaattttgtcatttggaaggcacgaatggaggcctacctccagtcgcaagggcataatgtgtggaataaggttaaatcaccttacactgtgcccgatgatgctgacatcacgcctgcaaatgtggctcaggttgattttaattatcgtgcaagaaatgcaatcattggtggaatttcttctggtgaatttaattgtgttcaacaccacaagtccgctcatgacatgtggactgctctgtgcaatttccataagggaaacaatgatattcaattggttcgtcagaatcaatttcataaagaatatcaaagatttgagatgcacccaggagagtccattgattcttatttcaagcgttttggagaaattgtttcgaagttgagatctgttggaaaagaattttctaataatgataatgctcgccatcttttgaattgtcttgattatggtgtttgggaaatgaaagttacttccatcacagagagtgcacctctgagtgaccttaccatggacaagctttactcaaagctaaaaacccatgagatggatattttccatcggaaaggcctcaaacactcgatggctttggtagctgatccctctggtagtacttcttctaatgactcagcttttgtgtgtggtggcttctctcttgccgctttacactcagtcactgaggagcaattagagaagattcctgaagaggatcttgctctttttgctagaaaattctcaagagcttacaaaaatgtgagagatagaaaaagaggaaaaaccaatgaaccatttgtgtgttttgagtgtggagagcctaaccacataagagtgaattgtcccaagttgaagaagaagagtgacaagacgaccaagaagcccgagggacaagggcgaaaggggaataaggatttgatgaagaaggcgatccataaggtcttggcggctcttgaggaggtgcagcttagcgacatcgactccgacgacgatgatcaagaaaagggggacaaggacttctccgggatgtgctgtctcgccaacaacgaggacttcatcaacctgtgtctcatggcacttgaggataaggatgactcatcggagcatcctgaggtatgtcttgatgatatcccttccttggatggttctctttgtgatgatttttgctcagataatgactctgttgatgatgaactaagcaaagaaagaatggcacacttgatgattgaaattagtgacaagtataggtcttctaagtataaaattgagaaactaaaatctgaaaatgatggtatggcgctagaaattgctaggcttcgatccatgattcctgaggaggatacctgttctacttgtgcttcatatctctctgaaattaatctcctcaaggataagttgaaatcatgtgctttaggagctgggaatccttctagtgctagtgttgcttgctctacttgctatgaaatgaaagttgatatgggtttgcttgagatggaattgaaagaactaaaagaaaaaaaatttcatgataggattggtaggtgtgaaaattgtcccattctcactagtgacaatgatgaattaagacaacaagttgccatgcttaggaccaagaatgatttgttagaatcttttgctactaaggaacctattcattcttcatgtgctaattgtgctatcctggaaactgaactaaaagatgctaaaactgtcattgattctatcaaatctattgattcttgttcatcatgcatttctctgaaagttgatcttgagtctgctaagagagagaacttttacctacaacaatctttagagaggataggtacccatgagatattaggtgtcacagatgggatgatagaactagctcaaaagcctataaccttcaagtctgcaggtttcattggaaacactagttctagttcacccaaaacctcagaaccaaagatggtacctatgactagcaagtctaagcctgtagagttacctagacccaaaaatccaaaacaagttgagcacaagcaaaaccagaaacaaaccaagcctgtagagaaaaccaagtatgagtgcacctattgtgggaaagctggtcatttggattttggagtggggagaagtaattcttggcttgtggactccggttgctcacgccacatgaccggtgaagccaagtggtttacttctctcactcgtgcatccggtgatgagaccatcacttttggggatgcgagcagtggacgcatgatggctaaaggaacaatcaaggtcaatgacaaattcatgctgaaggatgtcgcgcttgtaagtaagcttaagtacaatttgctctctgtttcacaactctgtgatgaaaatctagaagttcgtttcaaaaaggataggtctcgagttcttgatgcttctgaatctcctgtttttaacatttctcaagttggtcgagttttctttgctaactttgactcttctgctcctggtccttctcgttgtttcattgcctcagagaatagggatttgtttttctggcatcgtcgtcttggtcatattggctttgaccacttgtctcgcaatagtggtatggatttgattcggggtttgcctaagttgaaagctccgaaagatcttgtgtgtgcaccatgtcgtcatgggaaaatgacatcttcctcccacaagcctgttacaatggttatgacagatggaccgggacaactgcttcacatggatacggttggtcctgctcaggtccagtcagttggggggaagtggtatgtcttggttgttgtggatgatttctctcgctactcttgggtctattttcttgaatcaaaagaggaaacgtttggcttctttcagtctcttgctcgtagtttggctttggagtttcctagtgctcttcgagccattcgtagtgataatggctctgaattcaaaaattctgcatttgaatctttctgtgattcttctggagtcgaacatcagttttcttcgccatatgtcccacaacagaatggggtggttgagaggaagaaccgcacccttgtggagatggcacgaactatgcttgatgagtttactactccaagaaagttctggactgaagctatttctgctgcttgttttatctccaatcgtgtgtttttgagaactatcttgcacaagacgccatatgagctcagatttggtcgtcgaccaaaagtttcacatctcagggtcttcagttgcaagtgctttgttcttaaacctggaaatttggacaagtttgaatctcgatctgtggatggcatttttcttggctatgctactcattctcgggcttatcgagtttatgttctttcaactaacaaaattgtggagacttgtgaagtcacttttgatgaggctagcccaggagctagaccagaaatttcaggtgttccagatgaaagcatccttgtggatgaggattcagatgatgatgacgatgattccatttctccacctctagacagtacaccaccagtacaagaaaccggttctccatcgactacatcgccttcaggagatgcaccaactacatcatcttcagcagctgaggagattgatggtggcacatcaggaccaacagctccccgacacatccagaaccgacatccgcctgactcgatgatcggaggcctgggtgaaagggtaactaaaaatcggtcttatgaacttgtcaattcagcatttgttgcctcttttgagcccaaaaatgtttgtcatgctttatctgatgagaattgggttaatgccatgcatgaagagttagaaaattttgaaagaaacaaagtttggtctttggtagaaccttccttgggttttaatgtgattggaacaaaatgggttttcaaaaacaaactaagtgaagacggttcaattgttcgaaacaaagccagactagttgcacagggtttcacccaagttgagggcttggattttgaagaaacttttgcaccagttgctagattagaagctattcgaattcttttggcttttgctgcttcaaaaggtttcaagctttttcaaatggatgtgaaaagtgcttttctgaatggtgttattgaggaagaggtctatgtcaaacaacctcctcgttttgaaaatccaaaatttccaaatcatgtgttcaaacttgataaaactctttatggtttaaaacaagctcccagagcctggtatgaaagattgaaaacctttttgcttcaaaatggttttgaaatggggggagttgataaaactctctttactcttcatagtggcattgattttcttcttgtccagatatatgttgatgatatcatatttggtggctcctctcatgcacttgttgcccagttttctgatgtgatgagcagggaattcgaaatgagcatgataggagagttgactttcttccttggacttcaaatcaagcaaacaaaggaaggaatctttgtacatcagaccaagtactccaaagagctcctgaagaagttcgacatggccgactgcaagccaatcgccacccccatggcaactacttcatcgcttggtcctgatgaggacggcgaagaagttgaccagcgcgagtacagaagcatgatcggctccctcctctacctgactgcgtcaaggccggacatccacttctccgtgtgcctgtgcgcgaggtttcaggcttctccaagaacatcacatcgccaagcagtcaagtgcatcttccgctacatcaagtctacacttgagtacggtatttggtacccctgctcttctgccctttcagttcgagctttttcagatgctgattttgctgggtgtaagattgatcgcaaaagtacttctagcacttgtcattttcttggcacttctttggtctcttggtcctctcgtaagcagtcttctgttgctcaatcaacagctgaggctgagtacgtagctgctgctagtgcatgtagtcaagttctttggatgatttcaactctgaaagattatggtctgtctttctctggtgttcctctgctttgtgataatacaagtgcaatcaatattgcaaaaattccagttcaacactctaggaccaagcacattgagatacagtaccactttctccgagacaatgttgagaaaggtaccattgtgctagagtttgttgaatctgaaaatcaattggcagacatttttacaaaaccacttgatcgctctcattttgagttcttgcggactttcatttgcttaagtagcttgtgtgatcatgttatgctgttcaagcttgttgaaacctgcttaaattga

SEQ ID NO: 14588 - DNA, 4989 bp, Oryza sativa
  Clone ID: TFbOSC401367j.C1.o83.fg
atggaggaaaaatactctgcgaaaccatttgttttcgatggacacaattttgtcatttggaaggcacgaatggaggcctacctccagtcgcaagggcataatgtgtggaataaggttaaatcaccttacactgtgcccgatgatgctgacatcacgcctgcaaatatggctcaggttgattttaattatcgtgcaagaaatgcaatcattggtggaatttcttctggtgaattcaatcgtgttcaacaccacaagtccgttcatgacatgtggactgctctgtgcaatttccagggaaacaatgatattcaattggttcgtcagaatcaatttcataaagaatatcaaagatttgagatgcacccaggagagtctattgattcttatttcaagcgttttggagaaattgtttcgaagttgagatctgttggaaaagagttttctgataatgataatgctcgccatcttttgaattgtctttattatggtgtttgggaaatgaaggttgcttccatcacagagagtgcacctctgagtgaccttaccatggacaagctttactcaaagctaaaaacccatgagatggatgttttccatcggaaaggcctcaaacactcggtggctttggtagctgatccctttggtagtacttcttctaatgactcagcttttgtgtgtggtggcttctctcttgccgctttacactcagtcactgaggagcaattagagaagatccctaaagatgatcttgctctttttgctagaaaattctcaagagcttacaaaaatgtgagagatagaaaaagaggaaaaaccaatgaaccatttgtgtgttttgagtgtggagagcctaaccacataagagtgaattgtcccaagttgaagaagaagagtgacaagatgaccaagaagaccgagggacaagggcgaaaggggagaaaggatttgatgaagaaggcgatccacaaggtcttggcggctcttgaggaggtgcagcttagcgacatcgactccgacgacgatgatcaagaaaagggggacaaggacttctccgggatgtgctgtctcgccaacaacgaggacttcatcaacctgtgtctcatggcacttaaggataaggatgactcatcggagcatcctgaggtatgtcttgatgatatcccttccttggatggttctctttgtgatgattcttgctcagataatgactctgttgatgatgaactaagcaaagaaagaatggcacacttgatgattgaaattagtgacaagtataggtcttctaagtataaaattgagaaactaaaatctgaaaatgatggaatggagctagaaattgctaggcttcgatccatgattcctaaggaggatacctgttctacttgtgcttcatatctttctgaaatttatctcctcaaggataagttgaaatcatgtgctttaggagctgggaatccttctagtgctagtgctacttgctctacttgctatgaaatgaaagttgatatgggtttgcttgagatggaattgaaagaactaaaagaaaaatttgttcatgataggattggtaggtgtgaaaattgtcccattctcactagtgacaatgatgaattaagacaacaagttgacatgcttaggaccaagaatgatttgttagaatcttttgctactaaggaacctgttcattcttcatgtgctaattgtgctatcctagaaactgaacaaaaagatgctaaaactgtcattgattctatcaaatctattgattcttgttcatcatgcatttctctgaaagttgatcttgagtctgctaagagagagaactcatacctacaacaatctttagagaggtttgctcaaggaaagaaaaagttgaacatgatcctagaccaatccaaagtgtccataaacaatcaaggtataggctatgattttgcttatgattttgctgagtctttgaggataggtacccatgagattttaggtgtcagatgggatgatagaactagctcaaaaacctataaccttcaagtctgcagctggttagaaaggctagaaaagaacgacaagaacgtcttaggactaggagagctactagagtccctgggaggttcgagtgtgcgtgtcattgtcgttcaagtggtgtatctcgctttcctcgccgagatgtgcaccctcgacgtgacccagcagggttggggcaaaacagacatggattttggagtagggaggagtaactcttggcttgtggactccggttgttcacgccacatgaccggtgaagccaagtggtttacttctctcactcgtgcatccggtgatgagaccatcacttttagggatgcgagcagtggacgcgtgatggctaaaggaacaatcaaggtcaatgacaaattcatgctgaaggatgtcgcgcttgtaagtaagcttaagtacaatttgctctctgtttcacaactctgtgatgaaaatctggaagttcgtttcaaaaaggacaggtctcgagttctcgatgcttctaaatctcctgtttttgacatttctcgagttggtcgagttttctttgctaacttcgactcttctgctcctggtccttctcgttgtctcattgcctcagagaatagggatttgtttttctggcatcatcgtcttggtcatattggctttgaccacttgtctcgcattagtggtatggatttgattcggggtttgcctaagttgaaagctccgaaagatcttgtgtgtgcaccatgtcgtcatgggaaaatgacatcttcctcccacaagcctattacaatggttatgacagatggaccgggacaactgcttcacatggatacggttggtcctgctcgggtccagtcagttggggggaagtggtatgtcttggttgttgtggatgatttctctcgctactcttgggtctattttcttgaatcaaaagagaaaacgtttggcttctttcagtctcttgttcgtagattggctttggagtttcctggtgctcttcaagcaattcgcagtgataatggctctgaattcaaaaattctgcatttgaatatttctatgattcttctggagtcgaacatcagttttcttcgccatatgtcccacaacagaatggggtggttgagaggaagaaccgcacccttgtggagatggcacgaactatacttgatgagtttactactccaagaaagttctggactgaagctatttctatggcttgttttatctccaatcgtgtgtttttgagaactatcttgcacaagacgccatatgagctcagatttggtcatcgaccaaaagtttcacatctcagggtcttcggttgcaagtgctttgttcttaaacctggaaatttggacaagtttgaatctcgatctgtggatggcatttttcttggctatgctactcattctcgggcttatcgagtttatgttctttcaactaacaaaattgtggagacttgtgaagtcacttttgatgaggctagcccaggagctagaccagaaatttcaggtgtttcagatgaaagcatctttgtggatgaggattcagatgatgatgacgatgattcctttcctccacctctagacagtacaccaccagtgcaagaaaccggttctccttcgactacatcgccttcaggagatgcaccaactacatcatcttcagcagctgaggagattgatggtggcacatcaggaccgacagctccccgacacatccagaaccgacatccgcctgacttgatgatcggaggcctgggtgaaagggtaactagaaatcggtcttatgaacttgttaattcagcatttgttgcctcttttgagcctaaaaatgtttgtcatgctttatctgatgagaattgggttaatgccatgcatgaagagttagagaattttgaaagaaacaaagtttggtctttggtagaaccgcccttgggttttaatgtgattggaacaaaatgggttttcaaaaacaaactaggtgaagatggttcaattgttcgaaacaaagccagactagttgcacagggtttcactcaagttaagggcttggattttgaagaaacctttgcaccagttgctagattagaagccattcgaattcttttggcttttgctgcttcaaaaggtttcaagttttttcaaatggatgtgaaaagtgcttttctgaatggtgttattgaggaagagatatatgttgatgacatcatatttggtggctcttctcatgcacttgttgcccagttttcttatgtgatgagtagggaattcgaaatgagcatgatgggagagctgactttcttccttggacttcaaatcaagcaaaccaaggaaggaatctttgtacatcagaccaaatactccaaagagctcttgaagttcgacatggccgactgcaagccaatcgccactcccatggcaactacttcatcgcttggtcctgatgaggacggtgaagaagttgaccagcacgagtacagaagcatgatcggctccctcctctacctgactgcgtcaaggccggacatccacttctccgtgtgcctgtgcgcaaggtttcaggcttctccaagaacatcacatcaccaagcagtcaagcgcatcttccgctacatcaagtctacacttgagtacgctgaggctgagtacgtagctgctgctagtgcatgtagtcaagttctttggatgatttcaactctgaaagattatggtctgtctttctctggtgttcctctgctttgtgataatacaagtgcaatcaatattgcaaaaaatccagttcaacactccaggaccaagcacattgagatacggtaccactttctccgagacaatgttgagaaaggtaccattgtgctagagtttgttgaatctgaaaaacaattggcagacatttttacaaaaccacttgatcgctctcggtttgagttcttgcggagtgagttaggagtgatccacccctatggcttgatttga

SEQ ID NO: 14589 - DNA, 6168 bp, Oryza sativa
  Clone ID: TFbOSC401864j.C1.o2.fg
atgatgtcatcatccccttacacaaggacttgtcatgtggtgcccgccaccaatgtacactgcatatcatggcacatgatggaagtcattagttctcattcaacgactgtgatcggggtcgatcttggtcaacggcggatcgggactagactcagggaggagttgaggtccaaagcgatcaaggatgccggggaggccaagccaatccagcccttcctcgtggctcaagatgatggatggatcagcaggcagggaggccaggccgagcaggcccaagacaagacgacggcccacggcattggcaccatgcgcgggcaagcgcgggagatcgcgcgaggcacgcgcgcgcagtggacacgcggcggcaaggaattcggcgcgtgcgggcgtggggtccacgctgtttcaagtggctcggaggcgggagttgtactgggacccacgcgcgatttcgcgagcatgcgcgggagcagctcggcgggacgcgtggaggctttggactggatgcgcgcagatccggcttctctaatagccgcggttctagcacgaatggaggcctacctccagtcgcaagggcataatgtgtggaataaggttaaatcaccttacactatgcccgatgatgctgacatcacgcctgcaaatatggctcaggttgattttaattatcgtgcaagaaatgcaatcattggtggaatttcttctggtgaatttaatcgtgttcaacaccacaagtctgctcatgacatgtggactgctctgtgcaatttccatgagggaaacaatgatattcaattggttcgtcagaatcaatttcataaagaatatcaaagatttgagatgcacccaggagagtccattgattcttatttcaagcgttttggagaaattgtttcgaagttaagatctgttggaaaagagttttctgataatgataatgctcgtcatcttttgaattgtcttgattatggtgtttgggaaatgaaagttacttccatcacagagagtgctcctctgagtgaccttaccatggacaagctttactcaaagctaaaaacccatgagatggatgttttccatcggaaaggcctcaaacactccatggctttggtagctgatccctctggtagtacttcttctaatgactcagcttttgtgtgtggtggcttctctcttgccgctttacactcagtcactgaggagcaattagagaagatccctgaagatgatcttgctctttttgctagaaaattctcaagagcttacaaaaatgtgagagataaaaagagaggaaaaaccaatgaaccatttgtgtgttttgagtgtggagagcctaaccacataagagtgaattgtcccaagttgaagaagaagagtgacaagacgaccaagaagcccgagggacaagggcgaaaggggaagaagaatttgatgaagaaggcgatccacaaggtcttggcggctcttgaggaggtgcagcttagcgacatcgactccgacgacgatgatcaagaaaagggggacaaggacttctccgggatgtgctgtctcgccaacaacgaggacttcatcaacctgtgtctcatggcacttgaggataaggatgactcatcggagcatcctgaggtatgtcttgatgatatcccttccttggatggttctctttgtgatgatttttgctcagataatgactctgttgatgatgaactaagcaaagaaagaatggcacacttgatgattgaaattagtgacaagtataggtcttctaagtataaaattgagaaactaaaatctgaaaatgatggaatggcgctagaaattgctaggcttagatccatgattcctgaggaggatacctgttctacttgtgcttcatatctttctgaaattaatctcctcaaggataagttgaaatcatgtgctttaggagctgggaattcttctagtgctagtgctgcttgctctacttgctatgaaatgaaagttgatatgggtttgcttgagatggaattgaaagaactaaaagaaaaatttgttcatgataggattggtaggtgtgaaaattgtcccattctcactagtgacaataatgaattaagacaacaagttgccatgcttaggaccaagaatgatttgttagaatcttttgctactaaggaacctattcatttttcatgtgctaattgtgctatcctggaaactgaactaaaagatgctaaaactgtcattgattctatcaaatctattgattcttgttcatcatgcatttctctgaaagttgatcttgagtctgctaagaaagagaactcatacctacaacaatctttagagaggtttgctcaaggaaagaaaaagttgaacatgatcctagaccaatccaaagtgtccataaacaatcaaggtataggctatgattttgctgagtctttgaggataggtacccatgagattttaggtgtcacagatgggatgatagaactagctcaaaaacctataaccttcaagtctgcaggtttcattggaaacattagttctagtacacccaaaacctcagaaccaaagatggtttctgctttagaaaggctagaaaagagcgacaagaacgtcttaggactagaagagctactagagtccctgagaggttcgagtgattttggagtggggagaagtaattcttggcttgtggactccggttgctcacgccacatgaccggtgaagccaagtggtttacttctctcactcgtgcatccggtgatgagaccatcacttttggggatgcgagcattggacgcgtgatggctaaaggaacaatcaaggtcaatgacaaattcatgctgaaagatgtggcactagtaagtaagcttaagtacaatttgctctctgtttcacaactctgtgatgaaaatctggaagttcgtttcaaaaaggacaggtctcgagttcttgatgcttctgaatctcctgtttttgacatttctcgagttggtcgagttttctttgctaacttcgactcttctgctcccggtccttctcgttgtctcattgcctcagagaatagggatttgtttttctggcatcgacgtcttggtcatattggctttgaccacttgtctcgcattagtggtatggatttgattcggggtttgcctaagttgaaagctccgaaagatcttgtgtgtgcaccatgtcgtcatgggaaaatgacatcttcctcccacaagcctgttacaatggttatgacagatggaccgggacaactgcttcacatggatacggttggtcctgctcgggtccagtcagttggggggaagtggtatgtcttggttgttgtggatgatttctctcgctactcttgggtctattttcttgaatcaaaggaggaatcgtttggcttctttcagtctcttgctcgtagtttggctttggagtttcctggtgctcttcgagccattcgcagtgataatggctctgaattcaaaaattctgcatttgaatttttctgtgattcttctggagtcgaacaccagttttcttcgccatatgtcccacaacagaatggggtggttgagaggaagaaccgcacccttgtggagatggcacgaactatgcttgatgagtttacgactccaagaaagttctggactgaagctatttctgctgcttgttttatctccaatcgtgtgtttttgagaactatcttgcacaagacgccatatgagctcagatttggtcgtcgaccaaaagtttcacatcttagggtcttcggttgcaaatgctttgttcttaaatctggaaatttggacaagtttgaatctcgatcattggatggcattttccttggctatgctactcattctcgggcttatcgagtttatgttctttcaactaacaaaattgtggagacttgtgaagtcacttttgatgaggctagcccaggagctagaccagaaatttcaggtgttctagatgaaagcatctttgtggatgaggattcagatgatgatgacgatgattccattcctccacctctagacagtacaccaccagtgcaagaaaccggttctccttcgactacatcaccttcaggagatgcaccaactacatcatcttcagcagctgaggagattgatggtggcacatcaggaccgacagctccccgacacatccagaaccgacatccgcctgactcgatgatcggaggcctgggtgaaagggtaactagaaatcggtcttatgatcttgtcaatttagcgtttgttgcctcttttgagcccaaaaatgtttgtcatgctttatctgatgagaattgggttaatgccatgcatgaagagttagaaaattttgaaagaaacaaagtttggtctttggtagaaccacccttgggttttaatgtgattggaacaaaatgggttttcaaaaacaaactaggtgaagatggttcaattgttcgaaacaaagccagactggttgcacagggtttcacccaagttgagggcttggattttgaagaaacctttgcaccagttgctagattagaagctattcgaattcttttggcttttgctgcttcaaaaggtttcaagctttttcaaatggatgtgaaaagtgcttttctgaatggagttattgaggaagaggtctatgtcaaacaacctcctggttttgaaaatctaaaatttccaaatcatgtgttcaaacttgataaagctctttatggtttaaaacaagctcccagagcctgtggcattgattttcttcttgtcgagatatatgttgatgacatcatatttggtggctcctctcatgcacttgttgcccagttttctgatgtgatgagcagggaattcgaaatgagcatgatgggagagctgactttcttccttggacttcaaattaagcaaaccaaggaaggaatctttgtacatcagaccaagtactccaaagagctcctgaagaagttcgacatggccgactgcaagccaatcgccactcccatggcaactacttcatcgcttggtcctgatgaggacggtgaagaagttgaccagcgcgagtacagaagtatgattggctccctcctctacttgactgcgtcaaggccggacatccacttctctgtgtgcctgtgcgcgaggttccaggcttctccaagaacatcacatcgccaagcagtcaagcgcatctttcgctacatcaagtctacacttgagtacggtatttggtactcctgctcttctgccctttcagttcgagctttttcagatgctgattttgctgggtgtaagattgatcgcaaaagtacttctggcacttgtcattttcttggcacttctttggtctcttggtcctctcgtaagcagtcttctgttgctcaatcaacagctgaggctgagtacgtagctgctgctagtgcatgtagtcaagttctttggatgatttcaactctgaaagattatggtctgtttttctctggtgttcctctgctttgtgataatacaagtgcaatcaatattgcaaaaaatccagttcaacactccaggaccaagcacattgagatacggtaccactttctccgagacaatgttgagaaaggtaccattgtgctagaatttgttgaatctgaaaaacaattggcagacatttttacaaaaccacttgatcgctctcgttttgagttcttgcggagtgagttagggataactctcaaagctctcaaaacactaaaatttgtgatcggggtcgatcttggtcaacggcggatcgggactagactcagggaggagttgaggtccaaagcgatcaaggatgccggggaggccaagccaatccagcccttcctcgtggctcaagatgatggatggatcagcaggcagggaggccaggccgagcaggcccaagacaagacgacggcccacggcattggcaccatgcgcgggcaagcgcgggagatcgcgcgaggcacgcgcgcgcagtggacacgcggcggcaaggaattcggcgctgtttcaagtggctcggaggcgggagttgtactgggacccacgcgcgatttcgcgagcatgcgcgggagcagctcggcgggacgcgtggaggctttggactggatgcgcgcaggtgagcgtgggatccacgcggtggagcgcgcgctctcgcgtgctgaggcgtga

SEQ ID NO: 14590 - DNA, 4713 bp, Oryza sativa
  Clone ID: TFbOSC402311j.C1.o16.fg
atggaggaaaaatactctgcgaaaccatttgttttcgatggacacaattttgtcatttggaaggcacgaatggaggcctacctccagtcgcaagggaataatgtgtggaataaggttaaatctccttacactgtgcccgatgatgatgacatcacgcctgcaaatgtggctcaggttgattttaattatcgtgcaagaaatgcaatcattggtggaatttcttttgaattttctgataatgataatgctcgccatcttttgaattgtcttgattatggtgtttgggaaatgaaagttacttccatcacagatagtgcacctctgagtgaccttaccatggacaagctttactcaaagctaaaaacccatgagatggatgttttccatcggaaaggcctcaaacactcgatggctttggtagctgatccctctggtagtacttcttctaatgactcagcttttgtgtgtggtggcttctctcttgccgctttacactcagtcactgaggagcaattagagaagatccctgaagatgatcttgctctttttgctagaaaattctcaagagcttacaagaatgtgagagagagagaaaggagaaaaaccaatgaaccatttgtgtgttttgagtgtggagagcctaaccacataagagtgaattgtcccaagttgaagaagaagagtgacaagacgaccaagaagcccgagggacaagggcgaaaggggagaaaggatttgatgaagaaggcgatccacaaggtcttggcgactcttgaggaggtgcagcttagcgacatcgactccgatgacgatgatcaagaaaagggggacaaggacttctccaggatgtgctatctcgccaacaacgaggacttcatcaacctgtgtctcatggcacttgaggataaggatgactcatcggagcatcttgaggtatgtcttgatgatatcccttccttggatggttctccttgtgatgattcttgctcagataatgactctgttgatgatgaactaagcaaagaaagaatggcacacttgatgattgaaattagtgacaagtataggtcttctaagtataaaattgagaaactaaaatctgaaaatgatggaatggcgctagaaattgctaggcttcgatccatgattcctgaggaggatacatgttctacttgtgcttcatatctttctgaaattaatctcctcaagaataagttgaaatcatgtgctttaggagctgggaatccttctagtgctagtgctgcttgctctacttgctataaaatgaaagttgatatgggtttgcttgagatggaattgaaagaattaaaagaaaaatttgttcatgataggattggtaggtgtgaaaattgtcccattttcactagtgacaatgatgaattaagacaacaagttgccatgcttaggaccaataatgatttgttagaatcttttgctactaaggaacctgttcattcttcatgtgctaattgtgctatcctggatactgaactaaaagatgctaaaactgtcatttattctatcaaatctattgattcttgttcatcatgcatttctctgaaagttgatcttgagtctgctaagagagagaactcatacctacaacaatctttagagaggtttgctcaaggaaagaaaaagttgaacatgatcctagaccaatccaaagtgtccataaacaatcaaggtttcattggaaacactagttctagttcacccaaaacctcagaaccaaagatggtttctgctttagaaaggctagaaaagagcgacaagaacgtcttaggactagaagagctactagagtccctgagaggttcgagtgattttggagtggggagaagtaattcttggcttgtggactccggttgctcacgccacatgaccagtgaagccaagtggtttacttctctcactcgtgcatccggtgatgagaccatcacttttggggatgcgagcagtggacgcgtgatggctaaaggaacaatcaaggtcaatgacaaattcatgctgaaggatgtcgcgcttgtaagtaagcttaagtacaattcgctctctgtttcacaactctgtgatgaaaatctggaagttcgtttcgaaaaggacaggtctcgagttcttgatgcttctgaatctcctatttttgacatttctcgagttggtcgagttttctttgctaacttcgactcttctgctcctggtccttctcgttgtctcattgcctcagagaatagggatttgtttttctggcatcgtcgtcttggtcatattggctttgactacttgtctcgcattagtggtatggatttgattcggggttcgcctaagttgaaagctccgaaaggtcttatatggaccgggataactgcttcacatggatacggttggtcctgctcgggtccagtcaattggggggaagtgtctcttgctcgtagtttggctttggagtttcctggtgctcttcgagcaattcgcagtgataatggctctgaattcaaaaattctgcatttgaatttttctgtgattcttctggagtcgaacatcagttttcttcgccatatgtcccacaacagaatggggtggttgagaggaagaaccatacccttgtggagatggcacgaactatgcttgatgagtttactactccaagaaagttctggactgaagctatttctgctgcttgttttatctccaatcgtgtgtttttgagaactatcttgcacaagacaccatatgagctcagatttggtcatcgaccaaaagtttcacatctcagggtcttctgttgtaagtgctttgttcttaaacctggaaatttggacaagtttgaatctcgatctgtggatggcatttttcttggctatgctactcattctcgggcttatcgagtgtatgttctttcaactaacaaaattgtggagacttgtgaagtcacttttgaagaggctagcccaagagctagaccggaaatttcaggtgtttcagatgagactatctttgtagaagatgattcagatgaagatgacgatgattccattcctccacctctagacagttcaccaccagtgcaagaaaccggttctccttcgactacatcgccttcaggagatgcaccaactacatcatcttcagcagctgaggagattgatggtggcacatcaggaccgacagctccccgatacatccagaaccgacatccgccagacttgatgatcggaggcctgggtgaaagggtaactagaaatcggtcttatgaacttgtcaatttagcatttgttgcctattttgagcccaaaaatgtttgccatgctttatctgatgagaattgggttaatgccatgcatgaagagttagaaaattttgaaagaaacaaagtttgttggtctttggtagaaccacccttgggttttaatgtgattggaacaaaatgggttttcaaaaacaaaataggtgaagatggttcaattgttcgaaacaaagccagactggttgcacagggtttcacccaagttgagggcttggattttgaagaaacctttgcaccagttgctagattagaagctattcgaattcttttggcttttgctgcttcaaaaggtttcaagctttttcaaatggatgtgaaaagtgcttttctgaatggagttattgaggaagaggtctatgtcaaacaacctcctggttttgaaaatccaaaatttccaaatcatgtgttcaaacttgataaagctctttatggtttaaaacaagctcccagagcctggtatgaaagattgaaaacctttttgcttcaaaatggttttgaaatgggggccattgataaaactctctttactcttcatagtggcattgattttcttcttgtccagatatatgttgatgacatcatatttggtggctcttctcgtgcacttgttgcccagttttctgatgtgatgagtagggaattcgaaatgagcatgatgggagagctgactttcttccttggacttcaaatcaagcaaactaaggaaggaatctttgtacctcagaccaagtactccaaagagctcctgaagaagttcgacatggccgactgcaagccaatcgccactcccatggcaactacttcatcgcttggtcctgatgaggacggtgaagaagttgaccaacgcgagtacagaagcatgatcggctccctcctctacctgaccgcgtcaaggccagacatccacttctccgtgtgcctatgcgcgaggtttcaggcttctccaagagcatcacatcgccaagcagtcaagcgcatcttccgcgcatcttccgctacatcaagtctacacttgagtacgtcttctgttgctcaatcaacagctgaggctgagtacgtagctgctgctagtgcatgtagtcaagttctttggatgattttaactctgaaagattatggtctgtctttctctggtgttcctctgctttgtgataatacaagtgcaatcaatattgcaaaaaatccagttcaacactccaggaccaagcacattgagatacggtaccactttctccgagacaatgttgagaaaggtaccattgtgctagagtttgttgaatctgaaaaacaattggcagacatttttacaaaaccacttgatcgctctcgttttgagttcttgcggagtgagttaggggtgatccacccctatggcttgatttga

SEQ ID NO: 14591 - DNA, 1761 bp, Oryza sativa
  Clone ID: TFbOSC900064j.C1.o21.gm
atggccagcaagactctttgcgagttcgctgctccctctgctgccaatgtggccgtcgggccgcaagtcaacataggagatgtggatttcgacttgaagtccagcctcatcacgatggcgcaggctagcccgttctgtggcaagcctaatgaggatgccaacgctcatctgcaacaattccaggagatatgtaccacgtacaccatcaagggcgttagtcctgacgccgtcaggctgcggctgtttccgttgtccctcctcgggagagcaaagcagtggttctatgccaaccgtgctgctatcaacaccagggataaatgctctacggcattcctctcgaagttcttcccgatgggcaaaaccaacgcccttcatggacgaatttccagtttccagcagacaagggacgagtctgttccagaagcatgggaacgactgcaggagcacatggccgcctgtcctcatcatgggatggacgactggctaatcctgcagaatttttacaatgggctcaccccaatgtcccgcgatcacttggacgcggcagctggaggagccttcttctctaaaacggttcaaggagccgttgaactcatagagaagatggtctccaatatgggttggagcgaggaacgactccagacctgtcagcgaggcatgcacaccgtcaaggagacggagttacttgctgccaagctggacctcctcatgaaacgcttggacgaccatgagaaacggccacaaggcaccgtcaaggccttggactcacacgtcacgtgtgaagtctgcggcagcacgggtcattctgggaacgactgcccggaaacccgtgaggaggcgatgtacatgggcaacaacaacgggtatcgtccacaaggaggtcaggggtggaaccaactaagcccatattatcatgagtccctgcaaatgaatccgggaggattccggggcaacccgacccctccattgaaaatgtcaaggcgatcacgacgaggagagaagatccacatcaacgtgccgttgttggacgctatgcaagtgccaacatacgcccgttatcttaaagagatactcaacaacaagagaccgctcccaacaacagaggtggtcaagctgatggaacaatgcagcaacgtgatactccacaagctcccggagaaggagaaagatccggggtgtcctacgatcacctgctcgatcagggcacaacaattggaccaggccttgtgcgaccttggagccagtgttagcgtcgtgccaaaagacgtcttcgacaagctcaacttcacggtattggcaccaaaaccgatgcgccttcaactggctgattcatcagtctgttacccggcaaggatagcagaggatgtgccagtcaagatacgggatttcttcatcccagttgattttgtggaagtgaagtttgagttccaaccatggacggaacaatgctccatggtcaggataaagtacgggccgaacccacagaatattcaagtggtcgaagtggagccacccaagacggacagcctcgtgaaagcagccagcttagaagaagccgtcttccgcaccgaaatcaaagaaggtgcggaaggaaaagccaaagacacccgctccatcacctccggagacgggtggaaaatccgtgaactgaatcaaaatgacgcgaccttcgcaaacaggtggaacatacagggagacgcgcaacatgacaaggaacgaacaaggaagttcatcatcctcgacacccgtgcagatgtatga

SEQ ID NO: 14592 - DNA, 4482 bp, Oryza sativa
  Clone ID: TFbOSC900185j.C1.o17.fg
atggtgaagacaaggaatggttcccgtgactccaacaacgccagtggcagcgaagagccgatcgatggaccacgtgccagcaatgcacctaatagcagtccgtccccaccgcccgagaacccaacgatcgctcaggtgttggacaatcagactcagatgatggcaatgatgatgcaacagatgcagcaacagtaccatcaggtgctgcagcaggtgcagcagcaagcacagcagcagcagcagaacctgcagtttggtcctccacctcctcagtccaaactgttagaatctcttcgtgtcaagccgcccaccttctcaagcaccaccaacccaatcgaggcccacgactggcttcatgccattgagaagaagctgaatcttttgcaatgcaacgagcaagagaaggttgcttttgctacacaccagctgcaaggtcccgcttctgtttggtgggacaactacatggtgacccgtccagcttgggcagaagttacttggacagagttttgtcatagtttcaataaagcacaggttcccgagggaattgtggcacaaaagaagagagagttccgttccctgcaacaaggaaccagaacagttatagagtatttgcatgagttcaaccacctcgcgcgctacgctcctgaggacgtgcgtaccgatgccgagaggcaggagaagtttctgtctggtcttgatgatgaattgattaaccagttgatctctagagattatgaggactttgagaagctggtggataaggctatccgtcaggaggagcactgtaacaaaataaaccgtaagaggaaggcagctcagttcaggacttcccaggggaagagtcagaagcctcgtttcacgatgggacatcacggtggaccttccaccatgattatccggcagtaccgtccctaccacccgggtagcttcaacaagaaccaccatagtggcagtcacaacaacagtgagcagcacagcctcaaccctactccaagttcattaaagattccagcccaatcagttcagccagctctgccagaacagcccaagaggttgggagaaaaacccaaactctgcttcaattgtaacaaacccggacacacggttggaaagtgcccgaagccaagacgtgctggacccaagttcgttcaggcccgtgttaatcatgcatctgcagaggaggcgcagtcagcaccagaggttatattgggcacattccccgtcaactcgacactggcagtaatattgtttgattctggtgcaacccattccttcatttccaagcgttttgctggtgcacatgggttatctttagtgaagcttaagataccaatgcgagttcatactcctggaggtggcatgaccacaactcactactgcccatctgtgacagttgaaattcaagggttgatttttccagccaacctcattcttctcgaatccaaggacctagatgtcatacttggaatggattggttgacaaggcacagaggagtgattgattgcgccagccgcaccatcaagttgaccaatgcaaaaggagaggaggtaaccttccagtctccagtgccgcggaagccagggattagtttaaaccaggctgctggtgaagaacaagaggtagcagtggagaaaaccactaagaagttggaggatattcccatagtcagagagtatccagaggtttttccggatgatctgacaacaatgccaccaaaaagggatatcgagttccggattgacttggtacctggaactgcaccgatccacaagagaccttacagaatgggagccaacgagttggcggaagtcaagaagcaagttgatgaacagttacagaagggatacatccgcccgagcacatcgccttggggtgctccggttatctttgtggagaagaaagacaaaaccaagaggatgtgcgttgactaccgcgcactcaatgaggtcaccatcaagaacaagtatcctttgccaaggattgatgatctgtttgatcagttgaaaggagctactgtgttctctaagatagacctgcgatcaggctatcaccagttgaggatccgcgaagaggatatttcaaagacagcattcatcactcggtacgggttgttcgaatgcacagttatgtctttcggactcactaatgcacctgccttcttcatgaatttgatgaacaaggtgtttatggaatttctagacaagtttgtcgtggttttcatcgatgacatacttatctactccaagtccgaggaagaacatgagcagcatcttcggctggtacttgaaaagttaaaagagcaccagctatatgccaagttcagcaagtgcgacttctggcttaaggaagttcagtttctcggtcacatcgtgaatgctcaaggagtagctgtggatccagcaaatgtggagtcagttaccaaatggaccccaccaaggacagtcactcaagttcggagtttcttaggacttgcgggctattaccgccggttcattgagaacttctctaaaattgctaagccaatggcacagctattgaagaaggaagaaaagtttatctggtccgctgaatgcaataggagttttgaagaactcaaacgacggttggatggcaaagtggtttcttatgcttcacggcagttgcgtcctcatgaaggcaactacccgacgcacgatctggaattggccgcagtcgttcatgctttaaagatttggcggcactatctcatcagtatccgttgtgaggtatatacagatcacaaaagtctaaagtacatcttcacccaacctgatctgaatctccgacaacgaagatggttggagctaatcaaagattatgatatgggaatacactatcatcccggcaaggctaatgtggttgcagacgccttgagcaggaagagtcactgcaacgtcgcatgggtagaggaactatgctgtgaggttcaacgtgatttggaacatttgaaccttggtatagttgagcacggattcgtggctgccctagaggcacagcccacactggtggagcaggttcgcatagctcaagcaagtgatcctgaaatagcggagctcaaaaggaacatgagagttggaaaagcccgaggttttgttgaggatgaacaaggaacaatctggacgggagaaagattgtgtgtacccgaaaacaaggaattaaaagacctgatactaaccgaggctcatcaaactcagtattccattcatcccggtagtactaagatgtaccaagacctcaaagagaagttttggtgggtcagcatgagaagggaaatagctgaattcgtagcactctgtgacgtctgtcaacgagtaaaggcagaacaccaaaggccagcaggtttgctacagccacttcagattccagaatggaagtgggaagaaatcggaatggatttcatcaccggtttgcccaggacgtcatcggggcatgattctatttgggtagtcgttgaccgactcaccaaagtggctcacttcattccggttcacactacctactcagggaagaaattagcagaactctatctggcaagaattatgtgtttacatggtgtacctaagaagatcgtgtctgatcgaggaagccaattcacttcaaagttctggcagaaattacaagaagaattgggaacccggttgaatttcagcactgcttaccatccacaaacagatggccagactgagcgagtcaatcaaatactagaggatatgttgagagcatgtgcgcttgactttggtggagcatgggacaaaagcttgccgtatgccgagttctcttacaacaacagttaccaggctagtctgcagatggcaccgtttgaagcactgtatggacggaggtgtcgtactccgctcttctgggatcagacaggggaacgccagttgtttgggacagaagttttaaatgaggcagaagagaaagtcagagctgttagggaaagattgagaatcgcgcaatctcggcagaaaagctatgcagacaaccgccgaagggagctcgctttcgaaacaggggattatgtgtatctccgtgtcactccgctcaggggagtacatcgcttccaaaccaaaggaaagttggcaccacgctttgtgggaccatacaggatcttggaacgtagaggtgaagttgcttaccagcttgagcttccctccaacatgcttggcatccataacgtgttccacgtctctcagttgaagaaatgtttgagagttcccgaggaacaggcaagtccggatcacatcgaaattcaggaagatctgacgtatgtggagaagccgacccgtatccctgaaaccagcgagagaaggaccagaaacaaagtaatcagattctgcaaggttcagtggagccaccactcagaggaagaggccacttgggaaagagaagatgagttgaaggccacccacccatacctcttcgccagctcttccgaatctcggggtcgagattccgtttaa

SEQ ID NO: 14593 - DNA, 525 bp, Oryza sativa
  Clone ID: TFbOSC13261j.C1.o1.np
aatgagaaaagaaaatgccgagtccgggaagatatctgtgcttcaattgtcaaggaatgggtcatttcgccgacaagtgcccaaaaccgagaaacatagctgccggcacgtcagtccacgcaactccctgcaatcagaagcttgctcctcaacgaatggtcatccatgcatcccgaagcagtcctatagcccgcgttgcaacagctccaattccaatgagtgcactaccacaaggtgtcaatgctcaatttcagccccagccaccagttgacaagacagatgccagtatctgcgttgtacctttggaagctccaatacagcagctgagaaatcaagtacaagatgaagaacccgagtgtaagaaagttattgtttgtcacaactgcagtggagaagggcattactccaaaaaactgtccccgacctccacattttcgccaatttacacgaagcagacattccaatcgtattgtggtcactggagcaaacgccgtacccgtaaggcctcgtgttaatcagaaccca

SEQ ID NO: 14594 - DNA, 1532 bp, Oryza sativa
  Clone ID: TFbOSC25450j.C1.o1.fg
atgtcgaacgaggtgaaccatgtagggaaggctcccatatttaatggcacaaactactccacttggaaaattaaaatgtctactcacctcaaagctatgagcttccatatttggagtattgtgtatgtaggctttgccatcaccggcacacccttgacggagattgatcaccgcaacctccaactcaatgcccaagccatgaatgccttgttcaactctttgagccaagaggagttcgatagagtgagcaaccttgagaccgcatatgagatttggaacaagttggcggagatccatgagggtacaagtgagtacaaggatgccaagcttcatttcctcaagatccaatatgagacattctacatgttgcctcatgagagtgtgaatgacatgtatgggaggctcaatgtcattgtgaatgatctcaaggggcttggggcaaactacaccgatcttgaggttgcccaaaagatgcttagagccctaccggagaagtatgagacccttgtcaccatgctcatcaactccgacatgtcaagaatgacacccgcaagcctcttggggaagatcaacaccaatgacatgtacaagttgaagaagaaggagatggaggaagcctcaccctctaagaagtgcattgctctccaagccgaagttgaagacaagagcaagagtaaggtgaatgaagtcaatgaggacttggaggaagagatgatccttcttgctagaaggttcaatgatctcttggaaaggagaaaggagagaggaaggggctccaactccaataggagaagaaatagaagactcaataagactctctccaacttgaggtgttttgagtatggtgagaagggacactttgcttccaagtgcccttccaaggatgatgatggagacaagtcatccaagaagaagagtggaggctacaagctcatgaagaagcttaagaaggaagggaagaagattgaggctttcatcggggaatgggactcaaatgaggagagctccgcctcatccgggtctgaggaagaaggtggtgatgatgcaagctccaagaagaagaagatggtcgttgttgccatcaaggaggctccatcactcttcgctccactttgtctcatggcaaagggttcctctaaggtaacatctcttagtgatagtgagagtgatgatgattgtgatgatgtttcctatgaagagcttgtgagtatgtttgaggagctccatgcttatagtgagaaggagattgtcaagttcaaggccctaaacaaggattatgcttctttggatgtcttgtatgaggagctaaagacctctaatgagagactcaccatttctcatgagaagcttaaggaagctcatgacaacctcctttccactactcaacatggagctcacattgatgttggcatatcttgtgatttgcttgatgatagtgctacttgccatattgctcatgttgcatcatctagcatttctacctcttgtgatgatcttatggatatgcctagcccttgctctagttctagctc

SEQ ID NO: 14595 - DNA, 1311 bp, Oryza sativa
  Clone ID: TFbOSC100511j.C1.o3.fg
atggagatggacgaagtcggaggtcgatggacatctctaggacaaatgaaggctacacgagctgcggcccgaataagtgaaacaaacaacacatcagcaagaagagttagttcctttaaggtcctgtccctagttctgatgtttaacagagaaaaaggaaagaatgtcagcgggtatgcctctagtaacttaagtttccaactcaatccaccactggcctcaagagagttaacaagggcacacccttggtccattccaagcatgctgcttagttcacagctaccattggttggaagtcaagaccaaaatcggtatgtgtttgatcgagcatttgccacccaggtcaatgagcttccaatgccagaagagcatgtccccttttgtcatgattgtagagaacaaggacactatgccctgaattgtccatgggtatatgccaaagaagccccttcctttggtttagcagggcagacatcgctaaaccagcctcctcacaccaagtcaagcttgcagcctagtgtgcaaagtagagagcccaatggagagaatccattgaataccgggaaatgctttcctcctagcctttcgcaccacgtggggtcacgtactaagcaagccaaaggcaagaagagtaagaatcagaagagaaaagcaccgatgcgaactgaagaagaagtacgtaagatgactattaccaacaccgaatggcctccagcagggataactattcctagacgtcaaagaggaaataccttccgaggtgcacgacagttgacccagcacctcttaagccatggcggcagagtatctgatagtgaagggtcagatcaagtctccttggattatgaagatgagtctccccgacatgtcggcagggatgagatggaatcaaaagcatgcccccattgtggagaaattggacatgttgctagcatgtgtctcacactctgccctcattgtgaggaagaccatccaccaggtgaatgtcccacccgcaaggtgacatgttttctgtgcgaagcaccaaccattctctgcaccgacggcctcagcaaagaattgtcgtcgatggaagaagttgtgtctctccccgacctactccaggccgagcaaagggcaatcaacctcaggagggcgataccaagcagaagaccgttatctgcttcgaatagcaatcagaaggaagcttctcctgtgaatgatagcaatatacagtcctatcacatcatcacagaaccaatcaaggatgcagtcactagaacaatgccagctatatctctccagaatcagaatgagtatccatgtttgtga

SEQ ID NO: 14596 - DNA, 3885 bp, Oryza sativa
  Clone ID: TFbOSC409287j.C1.o3.fg
atggcggatccagcgagggggagctcgggaagcgcgttcctttaccctcaactcacatcaaccaactacactagttgggtgatacgggtgcaggcaatgatggaagatcaaggcgtatgggaggcgatcgagccggcagccggagcggctgtcgacccgaggaaggacaagaaggtgaaatcccatcttctccagtcactgccggaagatctcttgatgcaggtggcaaagaagcggacggcaaaggaggtttgggactgtctcaagacgaggttcgtcggggcagacaaggtgcgcgacgcgcgcctgcagactctgaaaggagaattcgccagcatggtgatggaggccggggagtcgcttgaccagtacgctggccggatcaccatgatgggggtccggcactctgctctcggcgcgacgttgaacgacgccgccatggtgaagaagctgttcgacaccgtcccggagaagttcgtcagcctcgtcgtagggatcgagcaattctacaacgtcgatgacatgccgttcgaggaggcagtgggccgcctcaaggcgtacgatgagcgggtgcgcaagaagaaagcggcggctagcggagtgaccgccgacggtcaggtgctccttactaaggccgagtgggaagcgcgcttcaagaaaggcaggggagaaacctcgtcgccacaaaagaacaagccctctggtgagggggcgaaccgcggccaggccaggcgcagtcgtggcaggggtcgcggacgcggcggaacgcagagcagcggtggcggctccggcggcggtggccgcgacaagagccacatcaaatgtttcaactacgaagagttcggccactactcaacgcagtgcccacatccgaagaaaaagaaagccgaagcccatcttgtgcagacggacgatgccggtccagctctgctcctcgcggtgacgaaggcggtgcagaacgcgccggggcagggcatggactgtgggctggtcgtgcacgaggagcgtgtatggcctcgcctgatgctggcagagaagggagcagctgctggtgatctatggtacttggataatggtgctagcaaccatatgactggggatcgacggaagttccgggagctggacgagaccgttacaggggtggtcagattcggcgacgcctcatcagtacagattatggggaagggtttaatccttttcgcatgcaagaatggtgaccagtggctgcttgatgacgtctactacatccccagcctctgctgcaacatggtgagcttagggcaactcactgaaactggccaccgagttgtgatggataatgatgaccttgaggtgttcgacaaaaatccctggcgcctggtgataaaggtgaggagaacctcgaatcgtttgtaccggattgagttgcaactagcgtcccctgtgtgcttgctgaccagtctcggcgatccggcgtggctgtggcacgcgcggctcggacatgtaaacttccagacgctgaaactcttggtggacaaggagatggcagcgggagttcctcaagtacatcatcccaaccagctttgccaggcttgcctcatggcgaagcagatcaggcagccattccctgcgatggcgaattatcgagcagaagcgccactcgagctactgcacatggacctatgtggcccaatcacaccgtcgacgtttgccgttaatcgttattttctgttgattgttgatgatttttcgcgttggatgtgggtgtttgttatcaagacgaaggatcaagcactggagatgttcgcaaaattcaagccgctggccgagaacacggccgatcactccatcaaaacactccggacagaccacagtggcgagttcttgtccggcgagttcgcgcgggtgtgcgatgaggccggcatcgagcgacatctgacggcgccgtactcaccgcagcagaacggcgttgttgaacaccgcaacagatcggtgatggcgatggcgcgctccctcctgaagggaatgtctgttcccggcaggatgtggggggaggcggtgcggcacgccgtgttcctgctcaaccggctgccaaccaagtcgatgggtgaacacactccgttcgaggcatggacggggaagaagccacacttaggacacttgcaagtgttcgggtgtactgcgcacaccaaggtgacaactccaaatctgaagaaattggatgatcggagagaggagaattccaccgagtttgtggtagaggaacctgttggcgagcagcagccggcgctggcagaacagtctaccacggtggaggcgtcactgagcacggccggcagcgacgacggcccgctgcggtacaggagtctggcggacatcatgctagaggcgccacgcgtagacttggtggatgaagaggatggtgaagcattgctcgcagagacggaggagccgtcatcgtaccgcgaggccgcaggggagccggcgtgggtcgacgcaatgcagaaggagctggaggccatcgagaagaactcaacgtggtcgctgtgcacattgccggtgggccacaaagcaatcggactcaagtgggtgttcgagttaaagaaaaacactaccggggaagtaatcaagcacaaggcatggctggtcgcaaagggctatgtgcagaggcacggtgtagactttgaagaagtgttcgccccggtggcgaggttggatacggtgcgtaccatacttgctgtcgcagcggaccgaggttggcgggtgcatcaccttgatgtcaagtcagcttttctcaacggggagctagaagaagaggtgtatgttgcccaactggaggggttcattaagaagggacaagagcaccttgtgctgaaattgagcaaggcactatatggcttgaggcaggcgccacgggcctggaacatttgcttggacaagagtctgaaggaacttgggtttatgcggtgcaagcaagaacaagccgtatacactcgaggcagaggagcagaagctatgattgttggcgtttacgtcgatgatttaattgtgacaggggagaatcctgccagggtagaagcattcaagaaacaaatgatgggggagttcgagatgaatgatctagggctcttgagttattatctgggaattgaggttggacaagttcctgttgatccaaagacacagcttcaaaaggatgcagatggacaccctgttgatgctattgaatatcggcgtgtgatcggttgccttcggtatttgctgcatacaagaccggacctgtcatatgctgttggagtggcgagcagattcatggagcatcccaccatgacgcacttgaaggcagtgaagcaaattctcaggtatttgaaggggacaatcgactgtggccttgtgtataccgcaggaattggtgagatcacaatcacggggtacactgacagcgatctagccggagatgttgatgatcgtcggagtacaggaggtatggcgttctatatcaacaacagtttggtggcatggagctcgcagaagcagaagacagtaactctttcttcttgtgaagcagaattcatggcagccactgcagctgcctgtcatgcactttggctaagggcattgctgggagagctactcggtgaggaggcaaaattggtaaagttgtttgttgacaacaaatcagctattgctttgatgaagaatcctgtttttcgtgggaggagcaagcatatagatactcggtatcaattcattcgtgagtgcatcgaaagaagacagattttggtcgaatttgttcgttcagaagaacagcgtgcagatgcgctgacaaaagggttgccggcggcaaagctagtgacggcaaggtttctgcttagagttcgtgatcttggagaacgccaggcctaa

SEQ ID NO: 14597 - DNA, 1715 bp, Oryza sativa
  Clone ID: TFbOSC19560j.C1.o3.np
atggcaggattgcgcacggggaaatgagatggtcatgctcaacgtcaacatcttcaccatcaacgagatatagcgacttcttcacgcatcacatatgaggtacctgataatgatcttgcaagggtagaatctaaattgccagtttttgatggtaagtatgattctgccgcttatgttaattgggagctagcagtagaaaaacaatttgatgagtatgatttttctaatgctcaaatgattaaggctgttagtaataagtgtatcggttctgcatctttttggtggcatactgtgggaaataagcttgaaacttgggatgaatgcaaaatactgatgagaaaaagatttgtgttttcatactatagacgtgctctctttgagaaatttgaacatataaaacaaggtgacaaaactgttagggagtactttcatgattttaaaatttgtatcacttatagtggtttacaagaatctaatgagaacacaatgactagatttttcagagggcttaattccaatattcaggttgggcttgttaatgtgacatataatcatataggccaattgttcatgcttgcttgcaatattgagcgcaaaattttggagaacccaatggagcaacaagctatgcttgtgcctcctatcgctgatattttgcaggaagttcagaacagtccccaaaatgagaagaacgatatgtttgagatgtcacttccatcactcgcgaatgaggagaaggctgatgcacctacattatctgaagagggcataaaaggtaaattaaatggtgcagaaattactcaagtagagcaaccattagtggaatcaattactgagttgcctttgtcacaagttgatttacttgctgttccttgtgataaagaagagttgtgtgataatgtttcacttatatccatgccacaactagtgaatgaacatgttagttctactatttctttgtgtgctgattctaagcatgttgttcacattgctaatgaagtagaggaacgcaaattgctatcttctttaaatactttgggctatgttcagtttgatgatttttgtgagctcgataatttgaaggagaaattatttgctaaatctgatttgccatgtccaactaatgctatttttcatatctttggcgaatataatgatagaggaatatttttggtgcatagagtttacatttgttcagatttagaacatcttgtagttccggataaaatatgcaagctagagagacatgttactgctaatcatattgtctcgagtttgtcttgttttgattgcaagaaacaggttgttttcagtggactgcgcgaagagcaccatatggaaaaaccgaggacggttttctgtgaagaaggggaggatgatgtgaccatggctactatggatacgaccattgctcacatcatgaatcaacaagaagacatcaagatcaagtcctccatgtgctgcaatctgattcggccacgtgttacattgctgacttcaaacggccgccaaatctacatacgtgctccgttttgggcccgtgagtacttgatggaaagctctcgaagtcctccttccaacggatccagcctcatctcggaaatctatctcgtttggccgcaatcacaaaagcaaggaataaggttgatctgcaccggcaagatcaacaacccacagagaggtgtatcgatcgctaaggcgcaacacaacgtctc

SEQ ID NO: 14598 - DNA, 2549 bp, Oryza sativa
  Clone ID: TFbOSC19560j.C1.o5.fg
atgggccccacttgggccggggtcccaaacgaagttacaagcccaaaggaccatgacagtaggtggccgaatcggattccagcatttggaggccttgaccttgatgtcttcttgttcatctatgatgtgagcaatggttgtatccatagtagctatggtcacatcacaaaggctagtgggccccacagaatgaggaggcgattgtctcaactgttcaaagggtccggcccttcatcaagtcatcatgacgggtctagcactcgttcatcagctaatatctcgatggaagacgccgaagctccgcgacatgatacggacatcactacctcggatacacacaacaatcctccaatggtcattcaaggactgatagcaagagctcgtgcgcgacaattaaatttagaggtgagctcgttcctatgttcttctttgtatgaattcgagaaaagattgctacctaatgaatatattgtgattagaaataatagaggggacaaggagacacttggagaaggacttagagccatggaggatcatcgaggacgtccaagtcaaggtggaggcccaaaccaattcgacctcggtgcaattcggagtctaggaccagtctgcactaaaacgggcgcccaggtcgcatacgtgctcggattggggcgttctttatatgaatggaaaactaagaagataacctttccaatggttttggtcccacatccaaatactttccgagtcaatgggtatcgaccgaacaagttgacatccagaatctgtcccggtgctgtgtcaccgtatttgggcctttgggccataacctttcggaagatcgggaaccctagtgcacatcaagtggtatcggaggccgttgtaaagtctgtccaagatgccttcactaaaatcggcttcctgaaccacatggagaggttggacaagcagatatccacgctaactgatcgggttgccgcgttggagacaccttccaatgaggaagtgtgggctgggttatctgatgagggggtactacctactacttgggaagaacttaaggtagctatgcacgataggtttgttcctccatcttatcatagagatttacgcaagaaattgatgcgtttggaacaaggggataaatccgtacaggattactatggtgagctacaaaagggtgtgagacgctgtggcatagtggagggggtcgaggatgctatttttcgtttttattctggtttgagggaggaaattcaaaacattgttgattataaggaatttaactctatgaaccagttgttttggtttgcaatgcttgaagagaaggaattgcaggggcgtgaccatcagggcaagaacaaggcaagcacatacactccacgcacgatgccatctacgggactacccagggccgtttcttttcgggcgccttcccagccagcgagcaagcgaccagctgcattcggagcttctgcggcaccaaaaccatctccaccacaaccagcagagtcaggtaatggttcttcgcaggtacccgccaagagtgcctcatctgtcgcctcgacgggacgcattcagtgccaccgttgccaagggtttgggcatgtgcagaaagattgccctattcaacgggcctatgttgctacagaagatggctacatcaccacctccgacgtggaagaggaagaggaggaagaagaagttgaggatgaggatggagaagtctttggccgtgatgacacaactgactacaggaccatcgttgtgcagcgggtgctcagcatgcagattttcttcgtcatcaacaaccgtcgtgcacgtgtgatcattgatggaggtagctgcaacaatttggtgagttctgatttggtcaagaagcttggcttgactacacgtacacatccacatccttaccatattcagtggttaaacgattttggaagagcaaagattctgttgattgtgatgtggttcctatgcaagcttgttcacttttgcaaggagcatcattgccaaaccgtgctgcttatcgaaccaacccagaggagactaagggaattcagcggcaagttcaagatctcttggaccgcgggattctatcgccgtttcgtcaaagatttcagtacctttgctgcaccattgaatgagttgatgaagaaaggggtggtcttccattgggaaaagacacaggagaagtcgtttgacactttgaaggacaagcttacacacgcaccattgctacaacttccaaactttggaggcaagactgagccacaaactaagccttacccactagacatgtggaagtacggtagtgctttgcaacagaggcccgagcttaatcctgatagtacccgaggtgtgttgatgcaagatggtaagcctgttgcatactttagcgagaagttgcatggtcctgttttgaattattccacgtatgataaggaattgtatgctcttgaagcgcatggaggagggttgatgggacattttggagctaagaagacggtagatgttttggccatgcatttcttttggccaaggatgagaaaagatgttgagag

SEQ ID NO: 14599 - DNA, 1314 bp, Oryza sativa
  Clone ID: TFbOSC33342j.C1.o1.fg
atggaggatcatcgaggacgtccaagtcaaggtggaggcccaaaccaattcgacctcggtgcaattcggagtctaggaccagtctgcactaaaacgggcgcccaggtcgcatacgtgctcggattggggcgttctttatatgaatggaaaactaagaagataacctttccaatggttttggtcccacatccaaatactttccgagtcaatgggtatcgaccgaacaagttgacatccagaatctgtcccggtgctgtgtcaccgtatttgggcctttgggccataacctttcggaagatcgggaaccctagtgcacatcaagtggtatcggaggccgttgtaaagtctgtccaagatgccttcactaaaatcggcttcctgaaccacatggagaggttggacaagcagatatccacgctaactgatcgggttgccgcgttggagacaccttccaatgaggaagtgtgggctgggttatctgatgagggggtactacctactacttgggaagaacttaaggtagctatgcacgataggtttgttcctccatcttatcatagagatttacgcaagaaattgatgcgtttggaacaaggggataaatccgtacaggattactatggtgagctacaaaagggtgtgagacgctgtggcatagtggagggggtcgaggatgctatttttcgtttttattctggtttgagggaggaaattcaaaacattgttgattataaggaatttaactctatgaaccagttgttttggtttgcaatgcttgaagagaaggaattgcaggggcgtgaccatcagggcaagaacaaggcaagcacatacactccacgcacgatgccatctacgggactacccagggccgtttcttttcgggcgccttcccagccagcgagcaagcgaccagctgcattcggagcttctgcggcaccaaaaccatctccaccacaaccagcagagtcaggtaatggttcttcgcaggtacccgccaagagtgcctcatctgtcgcctcgacgggacgcattcagtgccaccgttgccaagggtttgggcatgtgcagaaagattgccctattcaacgggcctatgttgctacagaagatggctacatcaccacctccgacgtggaagaggaagaggaggaagaagaagttgaggatgaggatggagaagtctttggccgtgatgacacaactgactacaggaccatcgttgtgcagcgggtgctcagcatgcagattttcttcgtcatcaacaaccgtcgtgcacgtgtgatcattgatggaggtagctgcaacaatttg

SEQ ID NO: 14600 - DNA, 1260 bp, Oryza sativa
  Clone ID: TFbOSC401549j.C1.o27.fg
atggcggcgacggtggtttccaaatttgaggtggtgaagttcgatggcaccgggaatttcgttctctggcagatgaggctgaaggatctgttggctcaacaggggatatccaaggctcttgaggagacgatgccggaaaagatggatgctggcaagtgggaggagatgaaggcgcaggcagctgcaacaatacgcttgagtctctcggattctgtcatgtatcaggtcatggatgaaaaatcactgaaggaaatttgggacaagttggcaagcctgtatatgtccaagtcgctgatgagtaagttgtatctcaaacaacagctatatggtttacagatgcaagaggagtcagatcttaggaagcacgtggacgtcttcaatcagttggttgtggatctaagtaagttagatgtgaaactggatgatgaagacaaggccataattcttctgtgctcgcttccaccgtcttatgaacatgtggtgactaccctgacgcacggcaaggatactgtcaaaactgatgagataatttcgtcgttgcttgcacgagacttgagaagatcaaagaaaaacgaggcaatggaggcttctcaggctgagagtttgctggtcagggcaaagcatgatcatgaagcgggggtgtcaaagagcaaggagaagagggcacggtgctataagtgtcatgagtttggacatataaggaggaattgcctgttactgaagaagaggaaaggtggcattgcaagtttagcagctcgtggtgatgattcagatagcagcagtcatgagattctcacagtgtctaacgagaagtctggagaagcgtggatgttggacttagctagttcctatcatgtgacatcgaagcgggagtggttctcttcatacaaatctggtgattttggtgttgtttacttaggcgatgacacgagttatcgtgttgttggagtgggcgatgtcaagttcaagatgtatgatggaaacgaggtgctactttcaaatgtgagacacgtgccgggactaaggaagagtttgatttcgcttgggagcctacatgagacgggttggttgtatcaggtggattctaataggaagaccatgaatatcatgaaggacggcaagactgttatgactggtgagaggacaagttcatgtttgtacaagttacaagggagtgctgttgcaggtggagtcatggaagatgggtatgctggtgttgttgtgcacgatcctgaaggcggcaagcctggcgtaggctag

SEQ ID NO: 14601 - DNA, 1875 bp, Oryza sativa
  Clone ID: TFbOSC417388j.C1.o2.gm
atggcggcgacggtggtttccaaatttgaggtggtgaagttcgatggcaccgggaatttcgttctctggcagatgaggctgaaggatctgttggctcaacaggggatatccaaggctcttgaggagacgatgccggaaaagatggatgctggcaagtgggaggagatgaaggcgcaggcagctgcaacaatacgcttgagtctctcggattctgtcatgtatcaggtcatggatgaaaaatcactgaaggaaatttgggacaagttggcaagcctgtatatgtccaagtcgctgatgagtaagttgtatctcaaacaacagctatatggtttacagatgcaagaggagtcagatcttaggaagcacgtggacgtcttcaatcagttggttgtggatctaagtaagttagatgtgaaactggatgatgaagacaaggccataattcttctgtgctcgcttccaccgtcttatgaacatgtggtgactaccctgacgcacggcaaggatactgtcaaaactgatgagataatttcgtcgttgcttgcacgagacttgagaagatcaaagaaaaacgaggcaatggaggcttctcaggctgagagtttgctggtcagggcaaagcatgatcatgaagcgggggtgtcaaagagcaaggagaagagggcacggtgctataagtgtcatgagtttggacatataaggaggaattgcctgttactgaagaagaggaaaggtggcattgcaagtttagcagctcgtggtgatgattcagatagcagcagtcatgagattctcacagtgtctaacgagaagtctggagaagcgtggatgttggacttagctagttcctatcatgtgacatcgaagcgggagtggttctcttcatacaaatctggtgattttggtgttgtttacttaggcgatgacacgagttatcgtgttgttggagtgggcgatgtcaagttcaagatgtatgatggaaacgaggtggattctaataggaagaccatgaatatcatgaaggacggcaagactgttatgactggtgagaggacaagttcatgtttgtacaagttacaagggagtgctgttgcaggtggagtcatggaagatgggtatgctggtgttgttgtgcacgatcctgaaggcggcaagcctggcgagcgcgatggtgtagacgtggctggactagctgtcggtgaggaggtgggagccgtgttgcgccatgaccgcgtggggacaggcagcgaccgcgtgggcgcccgcaacaggaggatggagcaggcacccgaattgggcttgcgtggagctagggcgtgcgcccatggtgagcacctcgcacccaaactgaggcacgcggtaccttctctcgcgaggcccggtagcggctgcttttccgcactgtggagctcgtgccctcgcgcctcccgtgcccttgcgccggcaactaatctacacaaatcgcggcaacaaaagcggcaacaaatcgggcggcgcggtcgacggcgaggcgaggcgcacgacggcggcatccccgacgtgccgccgcagcatgggaggcgaggaggtgcgacggcgtgggaggaaccgctggccgcaagcaccatcgtctcagccttctggatccaccgccgcgtccccaacctccttcgccgcgtccccagcctacttcgctgccgccgccgtgaggagaggggagaggagaggccaccggcggggagaagggagaagccgccggcggggagaggggagaggagaggccaccggcggggagaaaggagaagccgccggcggggagaggggaaatgcagtgtcgtcgaggagaggaggggacagccggtggagttggaagagggtgaggggcgtggtgactga

SEQ ID NO: 14602 - DNA, 3519 bp, Oryza sativa
  Clone ID: TFbOSC418783j.C1.o5.fg
atggtgaagacaaggaatggttcccgtgaatcccacaacgccagtggcagcgaagagcagatcagtagagcacgtgctagcgatgcatctagcaacagttcatctccaccgcccgagaacccaacaattgctcaggtgttggacaatcagactcagatgatgacaatgatgatgcaacagatacaacaacagtaccatcagtccaaactgctagagtttctccgtgtcaagctgcccactttctcaagaaccaccaacccaatcgaggccaccgactggcttcatgctattgagaagaagctgaaacttttacaatgcaacgaccaagagaaggttgcttttgctacacaccagctgcaaggtcccgcttctgtttggtgggacaactacatggtgacccgtccagctgggacagaggttacttggttagagttttgtaagagttttaacaaagcacaggttcccgagagaattgtggcacaaaagaagagagagttccgttccctacaacaaggaaccagaacagttatagagtatctgcacaagttcaatcgcctcgcgcgctacgctcctgaggacgtgcgcactgatgacgagaggcaagagaagtttttgtctggtattgatgatgaattgaccaaccagctgatctccagagactatgaggactttgagaagctagtggacaaggctatccgtcaagaggagcagtgcaacaaaatgaaccgtaaaaggcaggcaactcagttcagggctccccaggggaaaaatcagaagcctcacttcacgatgggatgtcagggtggaccttccaccatgattatccggcagcatcgtccttaccacccaggaaatttcaacggtatcaacaacagtggcaatcacagcaacagtgagcatcacagcctcaatccgactccaagtccactaatgaatgaagctcaatcagttcagccagctctgcctgctcagtcaaaacagcccaaggagttcgaaggaaagcccgaactctgcttcaattgtaacgagcccggacacatggttggtacatgcccgaagccaagacgtgccggactcaagttcgttcaggcccatgtcaatcatgcatctgcagaggaggcacaatcagcaccagaggtcatattgggcacatttcccgtcaactcgacaccggcaataatattgtttgattctggtgcaactcattccttcatttccaagcgttttgctggtgcacatgggttatctttagtgaagcttaagataccaatacgagttcatactcctggaggtggcatgaccacaactcactactgcccatcagtgacagttgaaattaaagggttgatttttccagccaacctcattcttctcgaatccaaggatctagatgttattcttggaatggattggctgacaaggaatagaggagtgattgattgcgctagccgcaccatcaagttgaccaaacaagaggtagcggtggagaaaaccactaagaagttggaggatattcccatagtcagagagtatccagaggtttttccggaggatctgacatcaatgccaccgaaaagggatatcgagttccggatcgatttggcacctggaactgcaccgatccacaagaggctttacagaatgggagccaacgagttggaggaagtcaagaagcaagttgatgaacagttacagaagggatacattcgcccgagcacgtctccttggggtgctccggtagtttttgtggaaaagaaagataaaaccaataggatgtgcattgactaccgcacactcaatgaggtcactattaagaacaagtaccatttgccaaggattgatgatttgtttgatcagttgaaaggagctacggtgtttatggaatttttggacaagtttgccgtggttttcatcgatgacatactgatctactccaagtccaaggaaggacatgagcagcatcttcggctggtacttgaaaagttaaaggagcaccggctatatgccaagttcaacaagtgtgacttctggcttaaggaagttcagtttctcggtcacgtcgtgaatgctcaaggagtagctatggatccagcaaatgtggagtcagttcccaagtggaccccaccaaggacagtcactcagattcggagttttcgggacttgcgggctattaccgccgatcagacgaaagatttccaggtatattgtgatgcatcctgccaagggctggggtgtgtgttgatgcaagatggcaaagtggttgcttatgcttcacgtcagttgcgtcctcatgaaggcaactacccgacccacgatctggaattggccgcggttgttcatgctttaaagatatggcggcactacctcatcggaaactattgtgagcgaagatggttggagctaatcaaagattatgatatgggaatatactacattcccggcaaggctaatgtggttgcagatgccttgagcaggaagagttactgcaacgtcgtatgggtagaggaactatgctgtgaggttcaacgtgatttggaacatctgaaccttggtatagttgagcacagattcgtggctgccctagaggcacaacctacactggtggagcaggttcgcataactcaagcgagcgattctgaaatagaggaactcaaaaagaacatgagggttggaaaagcccgaggtttcactgaggatgaaaatggaacaatctggatgggagaaagattgtgtgtacctgaaaacaaggagttaaaagacctgatactgacagaggctcatcaaactcattattcaatttatcccgacagtaccaagatgtaccaagacctcaaagaaaaattctattaccaggctagtctgcagatggcaccctttgaagcactgtacggacggaggtgccgcacttcgctcttctgggatcagacaggggaacgccagttgtttggtacaaaagttttaaatgaggcagaagagaaagtcagagctgtcagggaaagattgagaatcgcgcaatctcgacagaaaagctatgcagacaatcatcgaagggagcttactttcgaagcaggggactatgtgtaccttcgtgtcactccactcaggggagtgcactgctttcaaaccaaaggaaagttggcaccatgctttgtgggaccatacaggatcttggaacgcaggggtgaagttgcttaccggcttgagcttccctccagcatgcttggcatccataatgtgttccacgtctctcagttgaagaaatgtttgagagttcctgaggaacaggcaagtccggatcacatcgaaatccaagaagatctgacttatgtggagaagccggctcgtatccttgaaaccagcaacagaaggaccagaaacaacgtaatcagattctgcaaagttcagtggagccaccactcagaagaagaggccacctgggaaagagaagatgagttgaaagccgaccatccgcacctctttgccagctcttccgaatctcggggtcgagattccgtttaa

SEQ ID NO: 14603 - DNA, 1622 bp, Oryza sativa
  Clone ID: TFbOSC28636j.C1.o1.gm
atgcacatagtcaaggagacggaattacttgctgccaagcttgacctcctcatgaagcgcttagacgaccacgacaaacggcctcaagacactgtcaaggctctggactcacacgttacatgtgaggtctgcggcaacacgggtcactctaggaacgactgccgggaaacccgtgaggaggcgatgtatatgggcaacaacaacaacaacgggtatcgtccacaaggaggccaggggtggaaccaaccacgcctatattatcaagggggtaacaacaatggtaacttttctaaccaaccctccttgaaggatctcgtcattgcacaagctaaaaccactgatgcgctaaacaaaaagctcgctgccaatgacaagatccttgaaaatataaatgttaagctagatgtccctgcaaaagaaactgggaggattccggggcaacccgactcctcccttgaaaatgttaaggcgatcacgacgatgggagtaatccagaaaatccacataaacgtgctgttgttggatgctatgcaagtactaacatatgcccgttatctcaaggacatactcaacaacaagagaccactcccaacaacggagcagttcgaccaggccttatgcgatcttggagccagtgtcagcgtcatgccaaaagacgtctttgacaagctcaacttcacggtgttggcaccaacactgatgcgcctacaactagctgactcgttagtccgttacccagcagggatggcggtggatgtgccagtcaagatacgggatttcttcatcccggttgactttgtggtgctagacatggacacgggaaaagagatgtcgctcatcctggggcgcccattccttagcactacggaagccaacattgacgtgggagcgggaagtatccgttttcatattaacgggaaggaggaaaagtttgagtttcaaccaagggtcgaacaatgctccatggtcaggataaagtacgggccgaacccgcagaatattcaagtggtcgaagtggagccacccaagacggatagcctggtgaagttcatgcagaatttcctagagaaggaaacaacgatgcctaggaaccgttattggaggacgttgataaaaccaactataccggccaagaagtcagagcagtcggctgagaagaagccgccttctgcaccaaagccatggaaggtgtggagggaaaagccaaacacgcccgctccatcacctccagagacggctgatgtctcgttggaagacgccgaagctccgcgacgactcctgaacgacaccgacctcgaccttgtctgtgatcgggagagaaaagcctactacatgctgagcaaccgggagtatgctcatacacgagaatactctccggagctgctgaaaaagatagatatggatgttgaatttcgtgctatttggaaagctgttgggaaccaactggggatgcacccggatggacccaagttccacgccacagcattagagtctcaagctgggcaagtgccagtgaggaccggtggcgtgtgcctcatgatatccaatggggggacaaccaacgtcttagatcaagtgacgggggagatccagtacaacctcacggaacacatagctcaaac

SEQ ID NO: 14604 - DNA, 1329 bp, Oryza sativa
  Clone ID: TFbOSC25720j.C1.o1.fg
atgtcatggcacagggccggtgtcctgctgctaggggctcagtcctgcctacctgtcccgggggttccggccgtaggtgggattgggtcggtactcttgtctatggctaggatgggttggaaactatgtcacgtcttccgtccgtataccgtggtgatgtttaacagagaaaaaggaaagaatgtcagcgggtatgcctcaagtaactcaagttttcaactcaatccaccactggcctcaagagagttaacaagggcacacccttggtccattccaagcatgctgcttagttcacagctaccattggttggaagtcaagaccaaaatcagtatgtgtttgatcgagcatttgccacccaggtcaatgagctttcaatgccagaagagcatgtccccttttgtcatgattgtagagagcaaggacactatgccctgaattgtccatgggtatatgccaaagaagccccttcctttggtttagccgggcagacatcgctaaaccagcctcctcgcaccaagtcaagcttgcaggctagtgtacaaagtagagaacccaatggagagaatccattgaatccaaggaaatgctttcctcctagcctttcgtaccacgtggggtcacgtactaagcaagccaaaggcaagaagagtaagaatcagaagagaaaagcgctgatgcgaactgaagaagaagtacgtaagatgactattaccagcaccgaatggcctccagcagggataactattcctagacgtcaaagaggaaataccttccgaggtgcacgacagttgacccagcacctcctaagccatggtggcagagtatctgatagtgaagggtcagatcaagtctcctcggatgatgaagatgagtctccccgacatcttggtgaggaagagatggaatcaaaggcatgcacccgttgtggagaaattggacacgttgctagcaggtgtctcacactctgccctcattgtgaagaagaccatccacccggggagtgtcccacccgcaaggtgacatgttttctgtgcgaagcaccaaccattctctacaccgacagcctcaacaaagaattgtcgtcgatggaagaagttgtgtctctccccgacctactccaggccgagcaaagggcaatcaacctcaggagggcgataccaagcaaaagaccgtcatccgcttcaaacagcaatcagaaggaagcttctcctgtgaatgatagcaatatgcagtcctatcacatcatcacagaaccaatcaaggatgcagtcactagaacaatgccagctatatctctccagaatcagaatgagtatccatgtttgtga

SEQ ID NO: 14605 - DNA, 4011 bp, Oryza sativa
  Clone ID: TFbOSC400775j.C1.o70.gm
atggcgaatgacagggatctcccccgtgtcaggcgggggacggtgttgggtcccacccaaggatgcacaaccaccttgcttccggttgaaggcacccgcctctccctcctcgccggagcgccgtccggtcgcgccgtcgcctcctccagcatcgcagtggcctccccttccccggcttgccctccgtttcccgcggagacccccggagctgcgttcccgccgtcgcccttccctttcctccgcgccggccgcctccagccgcctctgtctccctgcctgagcgccggtcgacgtcgccaccacctccctcggctccgcgacgccaccctcatccccggcatcacctcctcctcgcccgaatttcgccggaacaccgtcgcccgcgccggcctcaccttcctcctcgtcgacgtctcctccggcaacccctttcgccatgcccgtgcgtcagccggcgctgccgtcccctccctcggcacggtgaccggcgtggaacacgccgtcctcgtctccgtgcagccgctgccggctgccctcgtcgcctcctcgctggttccggtcgtcgtcgtcgtcgtcctctcgtcgttcccggtttcgctcgtcgtggcgttcgtccctccgtcaagccgttctcgtccgtcgtctgcgttcgtccagtgtgccgctgcagcccccgtcgtcgtcttcgtcctcggctccgtgtcgtcaagcctcgtgccggccgcgtctcgccttcgtccaaggatcgccgccgaagtcgttccctcgccgtccgtctccgccgcgcccgttcgtcgttgtcgttcccacgcctcatcgcgtggtggtaaggatctctcctctcgctgccccgtcctcgtcctttcggtgtcgccccgtacccgttgtgcggtcgtcgaccccgtgaccatggttgaggtattggagcaagaggtggtggtgcgcacccctactccttccgggagtgacgatgcaagcgggagccgcgatccccgccaccgtcgccagaattctccgactcctctgcgccgcagcccccgacggcaggaggaccccaatcggtctgggggctcggccctctccccgccacctggcggggggaggccacgccgcgccggggtgcggcgccacttgacctacggcgacggtggctcgccccagggcgcacttcaagcagtgggggctcttctatggcaccccctcgttaacccggagcccgagactcccgtccagcgatggttgtacgacgtggccaacctggtcaccgccgctcagcgcacaaaggagagcccgtcggtcagccttgacatcgaggcgatcgacagctccaacgttgtcaaggccctcgggcagccgaaggcacggcgacgacctgtatggggaacaagacgctcggatcaacatcgagcgcagcagggacaagcgccgtgctgcccgcatggggagggcgcctactcgtcaggagtgtcgcgcctctccgcgcgagacgcccgctccccgcgaccattcccggtgggaccgggtgcaaggccttcgtgcatcaacccctccgagttcctccagatctataccacgatcatcatggcagcagggggtgatgaccgggtcatggcgaattactttcccatggcccttaagggcgtgcggcataaccgcatgcttgagaagatcgcctctaaggagccgaagaccaccaccgagcttttcgagctagcggacaaggcggtgggacaagaggaggaacaggaagccggcccactccgacgacgagggctacgtccttgctgcggacgcctcgctgactaccgcacggtaaagaacttggtcgagcggtacagaaagaccgatggggagaggcgacagagtcgccgggagggcaaggcccccgcgacctccgctagcgaccggcgagaggaggccaagaaaaaggcccccgccgatgacgacgacgacagcgataatctggagttccaggtacctcacggaaccgtcgccacgctcgacggaggggcttgtgctcacgcctcccgtcgcagcttcaaggccatgaggcgtaaagttctagccgccgttccaacccgcgaggcggcacggcaggcgcgttggtcggagaacttttacaatgggctcaccccaatgtcccgcgatcacctggacgcggcagctggaggagccttcttctctaaaatggttcaaggagccattgaactcatagagaagatggtctccaatatgggttggagcgaggaacgactccagacccgtcagcgaggcatgcacaccgtcaaggagatggagttacttgctgccaagctggacctcctcatgaaacgcttggacgaccacgagaaacggccacaaggcaccgtcaagcccttggactcacacgtcacgtgtgaggtctgcggcggcacaggtcattctgggaatgactgcccggaaaccctcactgcaaatgaatccgggaggattctggggcaacccgactcctccattgaaaatgttaaggcgatcacgacgaggggagtaatccaaaagatccacatcagcataccattgttggacgctatgcaagtgccaacatacgcccataatctcaaggacatactcaacaacaagagaccgctcccaacaacggaggtggtcaagctgacggaacactgtagcaacctgatactccacaagctcccagaaaagaagaaagatccagggtgtcccacgatcacctgctcgatcagggcacaacaattcgaccaggccttgtgcgaccttggagctagcatcagcgtcatgccaaaattgacgtctttgacaagctcaacttcacggaggaaaagtttgagtttcaaccaaggacggaacaatgctccatcgtcagaatcaaaacttcctagaaaaggaaacaacaatgcccaggaactgttattggaggacgccagtaaaatcacctgcaccggccaagaagtcagagcagtcggctcagaagaagccgtctcccgcaccgaaatcaaagaaggtgtggaggaagaagccaaagatgcccgctccatcacctccggagacggatggaagatccgtgaactgaatcgaaaggaggggtcgggctctccatcaagtcgtcatgacgagtctagcactcgttcatcagctgatgtctcgatggaagacgccgacgctccgcgacaactcctgagcgacgatgaccttgaccttgtcagtgatcgggagagacaagcctactacatgctgagcgactgggagtatgctcacatgcgagaatactcaccggagttgctgaaaaagataagtggaacatacagggagacacgcaacatgacaaggaacgaacaagaaagttcatcatcctcgacacccatgcagatgtatgaggcaggttgggcaccaattggggatgcacctggatggactcaagctccacgccatagcatcggagtctcaacctggtcaagcactagtgaggaccggtggcatgcgcctcatgacatccactgggggaacaaccaaccctccagatcaagtggtgtgcctccagctccaagtgaatggcactcgagttcctctcgttgggacttgggtgaaatcactaggaggatggacacccttgatatgcagacgggggagatccgccgcgccgcgccggggttgtggtcgcagtcgccgcttagcgtcgtcgccgtagggttcgcgcggagtaggagcacctcggccgccccttttcagccgccgaagaccgccggagcgccgtcgctgacgttgacgcgtgccgagccgccgttggagttcgtcgccggccttcgttcgtcgtcgtccgtcgttgtttttcacactgggtgccagactgagaagcggcgagaagtccgtggggtcgctggggactccatgcctctggttatatttatagaggagtggtacacctctggccagagtaaaactattcgaatagccgtgcccgcggtcatgggcgggttgagcaatgtttttcgtgattag

SEQ ID NO: 14606 - DNA, 3875 bp, Oryza sativa
  Clone ID: TFbOSC401354j.C1.o14.np
tcagctagagttcgagcaaaggagagagaatggaggtctggctagctgcgctcccctccacattgactaaccaggagatttctaaagactatgctgattttgagagacttgtggacaggaccattcgttaggaagatcaacgtaacaagatagatcgcaagaggaaagctatgcagttcaggtttcagcaaggtggacagcagaagcatcgctgtggttatggacagcacagtggttctactattatgattgttcgatagcacaggccatatcagctaggaaatttcagccgaggcaacagtggaaatcagaacaaccataatccagttccgcgcccgcccagtctcaagctttgcagccccaccagccaaagaagaagtcagaacaaaagccccttatgtgtttcaactacggagataccggacattttgcaaataagtgccctaaaacaatgcgcaatggacccaaggtcgttcaagctcgtgtttatcatgtgtctacaaaggaagctcaagcagcgtcagaagtggttttgggtacgttccctgtgaactcaattccttctacagttttattcgattctggtgctacgcattcatttatatccaagagatttgtttgggtacacgggttaagaaaagtgtaacttagtactcccatgaaagttaatacaccaagtaatagcttaacattagttagtttttgttcctctttgatgatagaaatccaagggtcaccttttctagccaatcttatccttctggagtgcaaagacctagatgtcatactaggaatggattggttgacaagacataaaggagttattgattgtgcaagccgcacaattacgttggttaattgaaatggagaagtggtagtaattcaatctccatttattcagaagaaagaagtaagcttgaattaagtggaaagtgaacaacaggatgaagtcatgaaagatgtcccaaagttagaagacattcctgtggtttgtgagtattctgaagtttttttggaggagtcgacagctatgctgccaaagaaagacattgagttccgtatcaatttggtcctaggtacagctcccatctacaagagaccgtacaggatggcagccgaagaaatggcagaagttaagaagcaagtggatgagcagttgcagaaaggatacattcgacccagcacatcgccttggggtgctctagtgatttttgttgagaagaaagacaagacaaagaggatgtctactgattatagagcgcttaatgatgttacgatcaagaataagtaccctttgctaaggatagatgatatgtttcatcagctgaagggagcaactgtgctttcgaagatatatctgtgatcaggttaccatcagttcagaattcgcgaggaggatattcctaagacaacttttacgactcgctatgaattgttcgagtgcatagtaatgtcgtttggacttaccaatgcacccacattcttcatgaatttgatgaataatgtgttcatggaatacctggatagtttgttgtggttttcattgatgatatcttggtttattcaaagtctaaggaagaacatgggaatcatcttcacgtagtgttggagaagatgaaggagcattagttgtatcccaagttcagcaagtgtgatttttggttgaaagaagtcaagttcggcatgttattaccactaaaagagtagcagtcgattcgtgaaatgtggaagcagtcactaagtggattccaccgaagacagtgatgcaagtgaggagttttcttggacttacagggtattactgtcggttcattgagaatttctcgagaattgccaagccaatgacacagttgttgaagaaagaggaaaagtttgttcgtacttcgcagtgtcaggagagttttgaggaactcaagaggagattagtgtccgctctaattttgattctgcccaatcagagaaaggattttgaagtgtattgtgatgcatctcgtcaaggtttgggatgggtgcttattcaagaaggtagagttgttgcttacgcctcgcgtcagttgcgtacacatgaagacaattatccgactcatgatttggagttagcagtagtggttcatgctttgaagatctggcgacactacttgattggtaatcgttctgagatatatatactgatcataagagcatgaagtatatcttcacccagcccgatttgaatctccgtcagtgccgattgttagagttgatcaaagattatgatgtgtgtatagattatcatcctggtaaagctaatgtcgttgccgatgcgttaagccggaaaaattattgcaatgcaacatgcttagaagaagtaagtactcaactgatacaagacctagaacgtctgaatttgggaattgtagaacatggttttgttgccgctttggaagcacagccgacactcgttgcgcatgcaaaatatccagagatagcagagcttaagaaaaatatgcgagtggataaagcccgagattttactgaggatgaacatggaacgatatggatgggtgaaagattgtgtgtgcctgacaacaaagagttgaaggagttgactcttagtgaagctcaccagatccaatattcaattcatccgggaagcacaaagatgtaccaatatttcaaggagaagttttggtcggtcagtatgaaaagagagatagcagaattcgtagcactccgtgacgtatgtcagcgagtaaaagcagaacactagagaccagcaggtttgcagtctattcagattccagaatggaagtgggaagaaattggtatggatttataaccggattgccaaggacatcatcaggtcatgattctatttgggtaatagtggatcgtctcatgaaagtggcacattttcttccggttcatacaacttatataggaaagaggttagcagagttgtatctttcgaggattgtctgtttgcatggtgtgccgaagaagatcgtgtctgatagaggaagtcagtttacgtcaaagttttggcataagctgcaagaggaacttggaacccgtttgaactttagcacagcatatcatctgcagaccgatggtcagacagagcaagtaaatcagattttggaggatatgttgagagtttgcgcccttgattttggtggatcttgggataagaatctactgtatgctgagttttcatacaacaacagttatcaagctagtttgtacatggcaccgtttgaagcactttaaggtcgaaagtgtcgtatgcctctgttttgggatcaaactagagaacgtcagttgtttggtacagaagtgttgagttaggccgaagtgaaagtaagagcaatcagggagagattgacgattgcccaatcccgtcagaaaagcaatgccgataatcatcggagagagctcagtttcgaggttgttgatcaagtgtaccttacagttatgtcgctcagaggagtgcaccgttttcagaccaagggaaaatggtgcaacgttacatcgggtcataccgaattcttgaacgtagaggtgaagtggcatatcagtttgaaattccacctaacatggccagcattcacgatgtattccaggtatctcagttgaagaaatgcctaagtgtgcttgaggaaccagcaagtccagataatgttgagattcaggaggatttgacttatgtggagaagcctacatgtattttggagaccagtgagaggagaaccagaaataaagtgatcaggttttgcagactatagtggagccatcattcgtaagatgaagcaacttgggaaagagaagatgagttgaaagccacccatccccatctcttcaccagttcttccgaatctcgaggacaagattctgtt

SEQ ID NO: 14607 - DNA, 2043 bp, Oryza sativa
  Clone ID: TFbOSC402891j.C1.o9.fg
atgcacaccgtcaaggagacgaagttacttgctaccaagctgaacctcctcatgaaacgcttggacgaccacgagaaaaggccacgaggcaccgtcaaggccttggactcacacgttacgtgtgaagtctgcggtggcacgggtcattctgggaatgattgcccggaaacccgtgaggaggcgatgtacatgggcaacaacaacaacgggtaccgtccacaaggaggtcaagggtggaaccaaccatgcccatattatcaaggaggtaacattaacggtaacttctctaaccagccctccttgaaggatcttgtttttgcgcaagctaaaaccactgattcgctaagcaaaaagcttgctgccaatgataagatcctagataacataaatgtcaaattagatggctttgcttccacatttcaaaaccagctgagcttcaataaaatgatagagacccagttagctcagttggcatctttagtccctgcaaatgaatctgggaggattccggggcaacccgactcctccattgaaaatgtcaaggcgatcacaaggagaggagtaatccagaagatccacatcaacgtgccgttgttggacgccatgcaagtgccaacatacgcccgttatctcaaggacatactcaacaacaagagactgctcccaacaacggaggtggtcaagctgacagaacaatgcagcaaccagatactccacaagttcccggagaagaagaaagatccggggtgtcctacgatcacctgttcgatcggggcacaacagttcaacgggaaggaggaaaagtttgagtttcaaccgaggacggaacaatgctccatggttcgcgaggatctccagaagatgcgggagctagtggctggcaatgagcgacaacggcaagggctcgagcaccgtatgtcgaagcttgagaaccacttgtcggagatctgtggctcactgtgggtcacctacaccggtctgcaccagctcgccggggagtgcggcgtcaaggccaccatcccggcgaatcccgacgagttctcgctgacatctttgctcgcggaactggcaacagcgatggagcattatgatcttgagtactttgttgtagtttgtagagacgttgatgtcaaggatgtccagcaaagcgggcagcctgagttgccagtgatcgttccggcacttgcgtccgagccacatgtgccgaggacgaagtttgaggtcgcggaactcgagagaattatgctggaagtaaaaaaggaccaggccgtagagacactcgggggtcgtgaggtgtggttcaactcgtatctgaagagttgctgcacgtccatgtcaagagtctgtagagagctccgagtaccccgtggggatcccgaggaatcggcggccggatacatctcgtggctgaatggggcctgcgcccagctcgacagcatcggtcaacgcattgacgaggccttcaagcaggagtgtggtcgatcaagccgatatgccgaggggcatgtgttggcttgcatacgagatcatcgtccgcagctgcacctcgagttcctccgcgaagggttttctcgttctcggagaactcctacggagataaatggcctggcgaagtcgatggcgccgctggcagagaaggaatttgccaacttgcgaccatcgccgtctgcaattttgaatgcgcctggccgcagaacttgtgtgatcgtctcggtggggagcatggcctctgagccgtacacgaggaagaagggtgtctccttgttggacgttgtcggtgtgtactatgccgtttgccctctcgacttgtccattgctctgagggtgagaaaccgaggcgaagcagatcttgactcccaacctgatgcagtaatcctggaaatcggcactgatgaactgggagccgttgtccgttatgatacggtggggcaatccgaatctgcagaatatccctttgatgaatttgatggcgttgtcggccttgatttcccccgtgggtgtcgcttcaatccacttagtgaatttgtcggtcgccacgaatag

SEQ ID NO: 14608 - DNA, 2871 bp, Oryza sativa
  Clone ID: TFbOSC415111j.C1.o9.gm
atgcccgccggaaatttctgggtccgttacgcgcggcggtttctcggacttcagtttaaattcactcatgaccgttgggcttcacatggtgctgtcgattacgtcttacgatggaaggagtcctactcggacaggactgggtcgtcaatgtatcgtgcagggtccgggtggtgcatgactggtttcaacttgccgaaaaacttcaatgaaaatccagaagctttctttcggagcgttaggccgcgagtcgttgctccgcagaaaactcttccgacagagaaaccagccataccagtgccaccgaccttcaagactatggccagcaagactcttcgcgagtttgctgctccctctgctgacaatgtggccattgggccgcaagtcaacataggagacgtggatttcgacttgaagtccagccttatcacgatggcgcaggctagcccgttctgtggcaagccaaatgaggatgccaatgctcatctgcaacagttcctggagatctgtagcacgtacaccatcaagggcgtcagtcccgacaccatcaggctgcggctgtttctattctcccttctcgggagagcgaagcagtggttctatgccaaccatgctgctgtcaacacctgggacaaatgctatacggcattcctctcgaaattcttcccgatgggcaaaaccaatgctcttcgtggaaggattttaagtttccagcagacaagggatgggtctattcctgaggcatgggagtgtctgcaggagtatgtggccgcctgtcctcattatgggatggacgactggctaatcctgcagaacttttataatggactcaccccaatgtcccgcgatcacctggacacggcagctggaggagccttcttctctaaaacggttcaaggggccgttgaactcatagagaagatggtctccaatatgggttggagtgaggaacgactccagacctgtcagcgaggcatgcacaccgtcaaggagacggagttacttgctgccaagctggacctcctcatgaaatgcttggacaaccacgagaaaaggccacaaggcaccgtcaaggccttggactcacatgtcacgtgtgaggtctgcggcggcacgggtcattctgggaatgactgcccggaaacccgtgaggaggcgatgtacatgggaaacaacaacgggtaccatccacaaggaggtcaggggtggaaccaaccacacccatattatcaaggaggtaacaataacggtaacttctctaaccagccctccttaaaggatctcatttttgtgcaagccaaaaccactgatgcgctaagcaaaaagcttgctgccaatgataagatcctagagaacattaatgtcaaattagacggcttcgcttctgcttttcaaaatcagctgagctttaacaaaatgatagaaacccagttagctcagttagcatctttagtccctgcaaatgaaactgggagaattctggggcaacccgactcctccattgaaaatgtcaaggcgatcacaatgaggggaggtaagtccactcgtgatccgccatatcctaaccctgcaggaactaatgggatgtcaaaagaagcgccatctaatgacttggctgacaaggagattcagccagacaagaccgtgccgcaggaatactgcgacacacggttactgccattcctccaacggatgaggaaaccgtcagcggacgagcagttcgctcgttttgttgaagtgatccaaaagatccacatcaacatgtcattgttggatgctatcgtcagcgtcatgccaaaagacgtcttcgacaagctcaacttcacggtgttgtcaccaacaccgatgtgccttcaactagctgactcatcagtccgttacccggcagggatagaggaggatgtgccagtcaagatacaggatttcttcatctcggttgattttgtggtgctagacatggacacggggaaggagacgccgctcattctgggacgtccgttccttagcaccgcaggagccaacattgatgtgggaacggggaatatccatttcgatatcaatcggaaggaggaaaagtttgagttccaaccaaggacggaacaatgctccatgcctggtgaaatttatgcagaacttcctggagaaggaaacaacgatgcccaggaaccgttattgaaaaacgctggtaaaatcacccgtaccggccaagaagttagaccagccggctcagaagaagctgtcttccgcaccaaaaccaaagaaggtgtggaaggaaaagccaaaggcgcccgctccatcacctttggagacgggtggaaaatacgcaaactgaaccgaaaggaggtacggtcttgcacgtcagactttaaacgacgtgaccttcgccaacaggggttcggccgaacaccctggttcggcctaaccggccaggccaacggtcggctgcctctttctttgaggcaatggctagtaggccccacagccgatgtctcgatgaaagacgccgaagctccgcgacgactcctaaacgacactgacctcgaccttgtcagtgatcgggagaggcaagcctactacatgctgagcgaccaggagtatgctcacacacgagaatactcaccggagctgctgaaaaagatagtgaggaccggtggcatgcgcctcatgacatccaatggggggacaatcaacctcccagaccaagtgacgggggagatccagtacaacctaatggaacacatagctcaaacgcaagaatggcaacaatctgctgatgctcagttcaccaacatcaacaacatgatgcagcaacagcgcgatgaccttcaagcgtacttccgttttcaggggttcaatccttatcaaggaccctga

SEQ ID NO: 14609 - DNA, 1386 bp, Oryza sativa
  Clone ID: TFbOSC6294j.C1.o3.fg
atggcattcctctcgaaattctttccgatgggcaaaaccaatgcccttcgtggaaggatttccaatttccagcagacgagagacgagtccattcctgaagcatgggaacgtcctcatcatgggatggacaactcgctaatcctgcaaaatttctataatggactcactacaatgtcccatgaccatctggacgcggcagctggaggagcgttcttctctaagacggttcgaggagccattgatctaatagagaagatggtctccaatatgggttggagcaaggaacgactccaaacccgacagcaaggtatacacacagtcaaggagacggaattactcgctgccaagctagacctcctcatgaagcgattggacgaccacgacaatcggccacaagacaccgtcaaggccttggacttacacgtcacgtgtgaggtttgcggtggcacgggtcattctgggaacgactgcccggaaacccatgaagaggcgatgtacatgggcaaaaacaacaacgagtatcgtccacaaggaggtcaggggtggaaccagccacgcccgtactatcaaggagaaaacaacaacagtaacttctctaaccaaccctccttgaaggatctcatttttgtgcaagctaaaaccactgatgctttaagcaaaaagctagctgccaatgacaagatcctagagaacatcaacgttcagctagatggtttcacttcctcttttcaaaaccaactgatcttcaataaaatgatagaaacccagctagctcaattggcttctctagtccctgcaaatgaaattgggaggattccgaggcggggaggtaagtccactcgtgatcggccgtatcctaaccctgcaggaactaatggggtagctagagaagcgccatctagtgactcggctaacaaagaggttcaaccagaaaaggccgtgccgcaagaatactacgacacacgattgttgtcgtttcctcaacggagtaggaaaccatcagtagacgagcagttcgctcgttttgttgaagtaatccaaaagattcacatcaacgtgtcgttgttcgatgctatgcaagtgccaacatatgcccgttatctcaaggatatactcaacaacaagagaccgctcccaacaacggaggtgattgagctgacggagcaatgcagcaacgtcatactccacaagctctcggaaaagaggaagcatccagggtgtcccacgatcacttgctcgattggggcacagcagttcaaccaagcactccgtgatctcggtgtcagtgttagtgtcattccaatggacgtctttgacaagctcaacttcacggtgttggcaccaacaccgatgcgcctacaactggctgactcgtcagtccgttaa

SEQ ID NO: 14610 - DNA, 1425 bp, Oryza sativa
  Clone ID: TFbOSC900064j.C1.o23.gm
atgcacaccgtcaaggagacggagttacttgctgccaagctggacctcctcatgaaatgcttggacgaccatgagaaacggccacaaggcaccgtcaaggccttggactcacacgtcacgtgtgaagtctgcggcggcacgggtcattcagggaacgactgcccggaaacccgtgaggaggcgatgtacatgggcaacaacaacggtaatccaaaagatccacatcaacgtgccgttgttggacgctatgcaagtaccaacatatgcccatttctcaaggacatactcaacaacaagagaccgctcccaacaacggaggtggtcaagctgacggaacactgcagcaacctgatactccacaagctcctggagaagaagaaagatccggggtgtcccacgatcacctgctcgatcggggcacaacaattcgaccaggccttgtgcgaccttgaagccagcgtcagcgtcatgccaaaagacgtctttgacaaactcaacttcacggtgttggcaccaacaccgatgcgcctccaactgactgatttatcagttcgttacccggcggagatagcggaggatgtgccagtcaagatacgggatttcttcatcccggttgattttgtggtgctagacatggacacggggaaggagacgccgctcatcctgggccgtccgttccttagcaccgcaggaaccaacattgacgtgggaacggggagtatccgtttccatatcaacgggaaggaggaaaagtttgagtttcaaccaaagacggaacaatgctccatggtcagaatcaagtacgggccgaacccgcagaatatccaagtggtcaaagtggagccacccaagacagatagcctggtaagatttatgcagaacttcctggaaagggaaacaacaatgctcaggaaccgttattggagaacgccggttaaagcacctgtaccagccaaaaagtcagagcagccggctcagaagaagccgtcttccgcaccgaaatcaaagaagaccatagaagaatctcgtgcaggtggaacatacagggagacgcgcaacatgacaaggaatgaacaaggaagttcatcatcctctacacccgtgcagatgtatgaggtaggttgggcaccaactgggatgcacctggatggacccaagctccacgccatagcatcagagtctcaacctgggcaagcgccagtgaggaccggtggcatgcgcctcatgacatccactggggggacaaccaaccctccagatcaagtgacgggggagatccagtatgacctcacggaacatatagctcaaacgcaagaatggcaacaatctgctgatgctcagttcaccaacatcaacaacatgatgcagcaacagcacgacgaccttcaagcgtactttcgctttaaggggttcaatccaccctga

SEQ ID NO: 14611 - DNA, 1698 bp, Oryza sativa
  Clone ID: TFbOSC900333j.C1.o23.fg
atggcgaacgatctatcccaatcacttgatttaagtatatatcgacatgaggattatatattgttaatatctacagtcgatcaagctagcccgttttgtggcaagcctaatgaggatgccaacgctcatctacaacaattcctggagatatgtagcacgtacaccatcaagggcgtcagtcctgacgccgtcaggctgcggctgtttccgttctccctcctcgggagagcgaagcagtggttctatgccaaccgtgctgctatcaacacctgggataaatgctctatggcattcctctcgaagttcttcccgatgggcaaaaccaacgcccttcgtggacgaatttccagtttccagcagacaagggacgagtccattccgaaagcatgggaacgaccgcaggagcacgtggccgcctgtcctcatcatgggatggacgactggctgatcctgcaaaacttttacaatgggctcaccccaatgtcccgcgatcacctggacgcggcagctggaggagccttcttctctaaaacagttcaaggagccgttgaactcagagagaagatggtctccaatatgggttggagcgaggaacgactccagacccgtcagcgaggcatgcacaccgtcaaggagacggagttacttgctgccaagctggacctcctcatgaaacgcttggacgaccacgagaaacggccacaaggcacagtcaaggccttggactcacacgtcacgtgtgaagtctgcggcggcacgggtcattctgggaacgactgcccggaaacccgtgaggaggtgatgtacatgggcaacaacaaccggtatcgtccacaaggaggtcaggggtggaaccaaccacgcccatattatcaaggagtccctgcaaatgaatccgggaggattccggggcaacccgactcttccattgaaaatgttaaggcgatcacaacgaggggagtaatccaaaagatccacatcaacgtgccgttgttggacgctatgcaagtaccaacatacgctcgttatctcaaggacatactcaacaacaagagaccgctcccaacaatggaggtggtcaagctgacggaacactgcaacaacctgaaactccacaagctcccggagaagaagaaagatccggggtgtcccacaatcacctgctcgatcggggcacaacaattcgaccaggccttatgcgaccttggagccagcgtcagcgtcatgcccaaagacgtctttgacaagctcaacttcacggtgttggcaccaacaccgatgcgcctccaactggctgactcgtcagtctgttacccggagatgcagctcatcttgggccgttcgttccttagcaccgcaggaggcaacattgacgtaggaaaggggagtatctgtttccatatcaacgggaaggaggaaaagtttgagtttcaaccaaggacggaacaatgctctatggtcagaatcaagtacgggccgaacccacagaatatccaagtggtcgaagtggagccacccaagacggatagcctggtaagattcatgcagaacttcctggaaaaggaaacaacaatgcccaggaaccgttattggaggacgccggtaaaatcacctgtaccggccaaaaagttagagcagccggctcagaagaagccgtcttccgcaccgaaaccaaagaaggtgtggaaggaaaagtaa

SEQ ID NO: 14612 - DNA, 417 bp, Oryza sativa
  Clone ID: TFbOSC11082j.C1.o1.fg
atggaatcaaaagcatgcaaccgttgtggagaaattggacacattgctagcatgtgtctcacactctgccctcattgtggggaagaccatccaccaggtgaatgtcccacccgcaaggtcacatgttttctgtgcgaagcaccaaccattctctgcaccgacagcctcagcaaagaattgtcatcgatggaagaagttgtgtctctccccgacctactccaggccgagcaaagggcaatcaatctcaggagggcgataccaagcagaagaccgttctctgcttcgaatagcaatcagaaggaagcttctcctgtgaatgatagcaatatgcagtcctatcacatcatcacagaaccaatcaaggatgcagtcactagaacaatgccagctatacctcttcagaatcagaatgagtag

SEQ ID NO: 14613 - DNA, 4347 bp, Oryza sativa
  Clone ID: TFbOSC1509j.C1.o1.fg
atggttggcctgggttggcttgggacgagctgggacccagcgtcgggttgccagaacgccgcactcctcgccatcggcactcttcaccagcgctacccggacgagttgcagcactcgccctaccgctaccaccctcgtcgtggaggagcccgcgactacgccatcttccgggatgctagctcggaggatgacgctaccatcatgcacctggcgcgcatggtggaggcgtacgacgcgacccgtatcgacttccatcagatggtgcgtcgtgggttggtcgagaacagcatgaagatcctggagctgcgtcaggagaatctgcagctgaagaaggacctagacgcagtggaggcgcagctgcatcagcttaagatcgcccagggagagatggtgacaaccaggagaagtgctgctacaggtgaaggcagtcaccccgaaggcagcaaccacaacaaccatggcagcccacctccacctcctcctccgcttccaccaccaccaccagacaccaacgccatcctcacccaaatcctcgcccagcaggccaacatgatggctgctttcctccaccacatccaaaacccgccacaacataatgctccaccaccacccccacaacactctaaactcgccgagttcctccgcatccgtccgcctaccttctctagctccaataaccccgtggatgcgttggattggttgcatgccgtggggaaaaagttagacatcgtgcagtgcagcgatgaggagaaagtcatcttcgccgcccaccaactgcaggggcctgcatctctgtggtgggaccatttccaggctacgcagctagaggggcaacctattacttgggcccgcttcaccacgtctttccggagaacccatgtgcccgccggagtcatggcccttaagaaaagggaattccgagagttgaagcaaggcaaccgctccgtgatggagtacttgcatgagtttaacaacctggcctggtacgccccggaggatgttcgtgaagatgaggagaagcaagagaagttcttggcaggaatggaccctgagctgtccgtgcgtctggtctccggggactatccggatttccagcgtttggttgacaagagcatccgcttggaagccaagcagaaggaactggagtcgcacaagcgtcgcttggcgaatttccgcaaccaacggggggctaaccaaagggtccgctacaccaatccctatccagggggatcctcctcgcagcagcagcagcagcagcagcctcgctccgcgccccgacctcaattcgtggtgcgcgtcccacagccgcagcaacagcagagtcagcaagggactcgtgcgccccgtccccctacgccagctctgcagcctggtcaaggccacagggacgctcaaggtcagcagcgtctgtgcttcaactacttcgagcccgggcactttgcagctaaatgcccaaagacgaggcgccagcaaggccaagcgcctccccgctctaacaacggtggtaaggatgtcattcggggtcgtgtgaaccacgtgacggccgaggacgtgctgacaactccagacatcatcgttggagtagtgtattgtgcaagacgcactgtcactctgtaccgagggccggaacaaccggttgttttctttgcacccccaacctctgttggcagttcagaacttcatcagataagactgtcggaaatccccatcgtcagggagttcggtgacgtgtttccggaagaactacccggtatgccgccgaagcgagagattgagttccggatagatcttgctccaggaaccactcccctgtacaagcatccctaccgtatggcagcaaatgaactggccgaagttaagaaacagttggaagagttgaaagaaaaggggtatatacggccgagtacttccccctggggtgctcctgtgatttttgtggagaagaaagacaagacgaagaggaggtgcgttgactacagagctctcaatgaagttactatcaaaaacaagtaccctcttccccggatcgatgatctgttcgatcagcttaaaggtgccacgtttgttgtggttttcattgacgacattctggtgtactcacaatcagaggaagaccatcagcaccatctccgtctggtgttgggaaagttgcggcaacatcaattgtatgccaaacttagcaagtgtgagttctggttgtccgaagtcaaattcttagggcacgtgatatctgctaaaggagttgctgtggaccccgaaacagtgaccgccgtcactgattggaagcaacccaagacagtcactcaaattcgcagtttcttgggtttggcaggatactaccggaggttcatcgagaacttctccaaaatcgctcgacccatgacccagttgttgaagaaagaagagaaatttgtgtggagcccacaatgcgagaaggcgttccaaactctcaaggaaaagctggtttcctcgccggtgttaatcttaccggatactcgcaaggacttcatggtgtactgtgacgcttcacgccaaggactggggtgcgtgctcatgcaggaaggtcatgtggtagcctatgcctcacgccagctacggccccatgaaggcaactaccctacccatgatttggagttggccgctgtggttcatgctctaaaaatctggcggcattatctcatcgggaatcgctgcgaaatatatactgatcataagagtttgaaatacatattcactcagtcggatctgaatcttcggcagagaagatggttagagctcatcaaggattatgatgtgggaattcactatcatcctggtaaggccaacgtggtcgccgacgctctaagtcgaaaaagccattgcaacactcttgaagtccgtggcattccacccgaacttaatcaacagatggaagccctgaacctaagcatagttggtcgtagattcttggcaacgctggaagccaagcctaccttgctcgatcaaattcgcgaggctcagaagaatgatccggatatgcgtgaactcctcaagaatatgaaacagggtaaagccgctggtttcacagaggatgaacacggaaccctatggaacggaaatcggatatgtgttccagacgacagagaacttaaacagctgatacttcaggaagctcacgaaagtccttattccattcaccctggcagtacgaagatgtacttagacttgaaagggaaatactggtgggttagtatgaagcgggaaattgcagagttcgtggccctttgtgatgtgtgccagcatgtcaaggcagagcaccaacgaccggccgaacttctccaacctctccaagtaccagaatggaaatgggatgaaattgggatggatttcatcaccggacttccaaaaacccaaggcggatatgattctatatggaccacctatggaggtaacaaactagccgagctctacttcgctaggatcgtgagtctccatggcattcctaagaaaattttatctgataggggaagccaattcacctctcacatttggaagaagctccaagaagagctgggtacccgattaaatttcagcaccgcgtatcacccgcagacagatggacagaccgagcgtctaaatcaggtcctagaagatatgcttcgcgcatgtgtcctagatttcaggaagacctgggataagagcctcccctatgccgagttctcctacaataacagctaccaagccagcatacaaatggcaccctatgaagcgttgtatggacgcaaatgccggacactgctattatgggaccaagttggggaaagccaagtgttcgggactgatatcctgagagaagctgaagctaaagtcagaaccattcgggataatctaaaggtggcacagtcccggcagaagatggacgattttgtgtaccttcgggtcacgccattgcgaggtgtacacaggtttcagacgaaagggaagctcgcacctcggtttgtgggtcctttccgtatcattgctcgacgcggggaagtcgcttaccagttggagctgcccgcctccttgggcaacgtgcatgatgtgttccatgtgtcgcaactcaagaaatgtcttcgagtgccatccgagcaggccgattcagagcaaattgaagttcgcgaagacttgacctacgtggaaaggccagtgaaaatgctggacaccatggagcgcaggaccaggaactgggtaatccgtttttgcaaggtccaatggagcaaccacgctgaggaagaaactacttgggagcgtgaagacgagatgaaagcaacccatcccgatctcttcgccagttcttccgaatctcggggtcgagattccgtttaa

SEQ ID NO: 14614 - DNA, 3261 bp, Oryza sativa
  Clone ID: TFbOSC400628j.C1.o8.fg
atgcggcagaggcggccggaggcggaacagtggcagcaacgccactgttgccggtggggatgcacttccggaggtctccgcgggaaatggacggcatgccggggaaggggaggtgactgcgacgccgggggaggcgacggcacggccggccggcgcaaggcgcgcacgtgcgccgcgcatgcagaggggcgcgagggagaggagggaggcggcctagggcggcaggtcggctgggccgggatagggcaggggcggcccaagcggaagaggagggaagagcggaagctcactctcattcactgccccgacgccgagaagaccaacctggcagccgagcaactccaaggcgcagcaggtgattggtgggagaactttctcgccatgcaacccgccggccgtgtcgtcacttgggctcaatttcgggatgcttttcatgctgcccatgtgccgaagggtattatggacctcaaacaacgtgagttcctatctctcactcaaggcaacaagtccgtcatggagtatctccgcgagttcaaccacttaactcgctatgctccggatgatgtcaataccgacacctgcaagcaaaattggtttatgaatgggttgtcggcggagatgcaactcgagctcgttgcacactcttttctggactttcaggaccttgtcaacaggtccgtggtcattgaaagcaagatgaagaaccttgaagctgagtgcaagcgcaagagggctgcgcagatttcagccgcgggtggttcgcaaaaaccccatggttggcagccgccccctccgcgttttcaagcaccaccacctcctcgtccacaaggattcgtgccatgccctcctcagcagcgtgtcgcgcctcctgtgggcggaaatcagcaagctattcgcccacctgttcgctccaacaactgcttcaattgcgggcaagcgggccactacatcaaccaatgctcgtaccctcatcatgcacaactccaaggaccaagaccagcagcaccatgtcctaatccacctctcaggtcagcacctcagggtcagcaaactcagaagaggggtagagtgaaccatgtcacagccgaggaggcgaacgatgcattggatgttcttgtcgggtttaggtgttatcctaggcatggattggctgcacaaaaatcatgggttatcgactgtggccatcgtctcattacactcaaaaataataccggcgaaccgatctttcttgcacttgatgatcattccccacaactccatgctctttcgggcgccaaaaccattgatatagctgctgtaccagtggtgtgtgattaccccgatgtcttcccagaggaattaccaggaatgccgccggatcgggatgttgaatttgtgatagatttgctgcccggaacagctccaatctctaaaagaccgtaccgtatgcctccaaatgagctagaagaattgaaaaagcaactcacggagctgcaagcaaaaggtttcattaagccaagctcctcaccttggggatgtccggctctctttgtaaaaaaggaccttagcttgcggatgtgtgttgattaccgtccgttgaatgaagtcgctgtcaagaacaagtacccattgccccgaattgatgatctctttgaccaactgacaggtgctcatgtgttctccaaaattgatttaaggttgggttaccatcaaatcaaaatcagaccagaagatataccaaaaatagccttctctacccgttttggtctatatgagtacaccgtcatgtcctttggtttgaccaatgcaccggcaaacttcatgagcttgattaattcggttttcatggagtatcttgatcagtttgtggtcatttttattgatgacatcctcatctactccaaatctgaagaagaacatgaaaagaacctctatcttgtattggaaaaattacgtgagcaccgcctatatgccaaatttagcaaatgtgagttttggttgaaagaagttggatttcttggtcatgttttatctgaaggtggagttgctgtagatccaagtaatgttcaaaaggtattagattggggacaacccaaaaatccatccgacatccggagttttcttggtctagctggctactaccgtcggtttattgagaatttctccaaaattgctaagcctatgacccaattattgaagaagaatgagaagtatgtatggtcagctgagtgtgagcaaagttttcaaaccttgaaagaaaagttaaccactgctcccgttcttatcctacccgatatacacaaaagcttcgatatctattgcgatgcctctcgtcaaggactcggttgtgttcttatgcaagaaggccgagttgtggcatatgcatctcgtcaattgagacctcatgaagtgaactatccaacccatgaccttgaattagcctctgttgttcatgcactaaaaatatggcggcactatcttatcggtaaccgttgtgaaatctacaccgaccacaagagtttgaaatatatcttatcccaatcagatctgaacctaaggcaaagaaggtggttagaactcatcaaagactatgacatgggtttacattatcacccgaggaaggctaatgttgttgctgatgcgttgagccgaaaaccgcaatgcaattgcttgtcggtaaaaccccgatcggagaccttatgttcagaaattcataaacttggtttagaaatggtaccacatggttcccttgctgccctagaagtgaaacctactttatatgatcagatcaaagaggcccaaaaagatgacaaagccttgtatggaagaagatgtaggacacctctcaactggtccgagtccggggagaggccattctttggtccagacttagtcaaggaagccgacgaacaagtacggttaattcgggagcgcttgcaaaccgctcaatctagggaaaagagctatgccgaccgtcgtcgacgtgagcttaccttcgatgttggtgactatgtgtacctcaaagtcactccattcaagtccacacaccggtttggagtgaaaggaaaattggcacctcaatccttggcgcgaagcgtcacagtacaccaggaagtccttgcgagtatccgtgattggaagcaacccaagacagtcactcaaattcgcagctttttgggtttggccgggtactaccgaagattcatcgagaatttctccaaaattgccagacccatgacgcagttgctttataaaacctttttaactttgtttatttcttaa

SEQ ID NO: 14615 - DNA, 3693 bp, Oryza sativa
  Clone ID: TFbOSC400732j.C1.o4.fg
atggagcaaaacaacaacaacaacaatggtactagtcaggatggaaataatactagtcatggtgccactggattaataatacctagtgcaagtaatcaagacccttgggctaacttactcgcaaatatactgggcaagcaacaggaaacccagcaacgacagatggaaattttagaacgtattactaaaagtgatgctaaccggaatggacttggggaatttcagaaattaaagccaccaacattttcaggaactgccaatccactcgaagcggaagaatggattgtagccatggaaaagtcatttgaagctatgggttgtacagataaagaaaagattatatatgctacctatatgcttcagtctagtgcttttgaatggtgggatgctcacaaaaagtcatattccgaacgtatctttattacatgggaattattcaaggaagctttttacaagaaatattttccagaaagtgttaagagaatgaaggagaaggaatttctagagcttaagcaaggtaataaatccgtagcagaatatgaaatagaattttcgagactggcaagatttgctcctgaatttgtacagacggatggctctaaagctcgacgatttgaaagtggattacgtcaaccgctcaaaaggcgcgtcgaagcctttgaattaaccatattcagggaggtagtaagtaaagcacaacttcttgagaaggggtatcatgaacaaagaatagaacacggacaacctcaaaagaagtttaagactaataatccacaaaatcagggaagattccgtggaaactactctggacaaatgcagagaaaatcttcagaaaatcaaggcagaaaatgtcccatatgccaaggtagccatgttccatcaatttgtcctaattgctggggaaggtgctttgagtgtggagaagcaggacatactaggtaccaatgtccactgttacagaagggtaaaaatcgagttagttcaactactcagccaaatactaaagtattgactccagtaccctcgctttatttacctggaccgtcttcagcaaataatcatgggccaaatcaaggaaagccacttgcaaatactaataccacacgaggaatgcggtcgaataattcacaaggtgggaatcatgctcgggtatacaacttaactaagagcacagctgaagaatccaacaccgtggttacaggtaatgtcttaatctgctcttatcctggtaaagttttatttgattctggtgccacacattcgtttatctccaccaactttgtgagaaaatacaccatccctactagtcagctaaaagaaagaatttgcatagaaactcctttggatagccaaacaactaatctaatttgcaaattgtgtccaattactattgatggatgggaattaactgctgacctcatacccttggacatgcatgattttgatattatacttggtatggattggttattaccaggaacttctccgatttataaggcaccctacagaatggcccctgttgagctaaaggaactaaagttacaactaaaagaattagaagataaaggattcattcatcccagtgtctccccgtggggtgctcctgttctatttgtcaagaaaaaggatggaagtttgagattatgcacggattaccgagaactgaataaggtgactatcaaaaacaaatatcctttaccaaggatagatgatttatttgatcaactacaaggagctcgtgttttctcaaaaattgatcttcaatcaggctaccatcaactaaagattaaacctagtgatatacccaagactgcttttcgtgcacgctatggacactatgaatatctagtaatgccatttggtttgactaatgcaccggcagcttttatggacttaatgaatcgtatattcaagccttatcttgatcaatttgtagtggtattcatagatgatattttgatatattccaagactaaggaagatcatgcaaatcatttgagaatagtactacagacattgcgagatcataaactatttgccaaattaaagaaatgtgatttttggatggataaagtatcattccttggtcatgttatttcgggtgaagctcctctaacccggttgacacagaagggagtaagatatgagtggactcagacttgcgaagaaagtttccaagaattgaagaatcggttaaccacagcacctattcttgccttacctattatgggagaagaatttaccatttactgcgatgcttcaaaaattggattgggttgtgttcttatgcaaaaagatgctttaagtcgaaaggctctctgtaatatggctattcagatcacacaggatcaacatatacttagagacttggaaagattggatgtggaattaaagatccatgaacccggagtattattagcagtgctccaaataaagcctactttagaagaaaatattctagagaaacaaagagacgacagtgaattacaaaaggcaaagaaaaatattgaagaagggaagcgcgtcaaagctgaacatcaaaggccagcaggactgttacaacccttaagtattccactatggaaatgggaagaaattagtatggactttgttcaaggattacctaccacacctgccggaaatgacagtatttgggtaatagtagatcggctaacaaaatctacccatttcttaccggtaaaaagaaatttttctttgaaaaagttagctaaactatatgtcaaagaaatagtatctttacatggggttccagtaaggattgtgtcagacagagatacccggtttctgtccaaattttggaaaagcttacatagggccccgggaacaaaactagatttcagcacagcgtatcaccctcaaaccgatggacaaactgaaagggtgaatcaaataattgaagatatgttacgatcttgcatcctagaatttaaaggatcatgggaagaatttatgccattagcagaatttgcatataacaatagttatcaatctagtatacgaatggccccgtatgaagccttatatggaaggaaatgcagaacacctgtttgctggaacgaagtaggagaaagaaaattgctaggaccagatataatacaacagacaaaagaaacaatacgactgatacggaaacgactgcaaactgctcaaaatagacagaaaagttatgtagataataggagaagggatcttcgttttgatataggtgactgggtatatttaaaagtatcacctatgaagggagttaagcgatttggacttgggaaaaaattaagtcccagatatgttggaccatttgccatcgtcaagcgaattggagaggttgcttacaaggtgaaactaccagatgctttgatcggagtacatgatgtatttcacatctccatgattcgtaaatgccttcggaggccaagtgatcaagttgaaattcctatggctgagttgcgtaacgatttaacatatcaagaatatcctgtttgcattctggatactaaagatggaaaaacaagaaaccgaaacattcgatttttaaaggtacaatggagtcatcacactcaagatgaggccacatgggagaaggaagatgatttgcaaaagaactatcctcagtttttccatcaccaaggtacaacaatttcgaggacgaaattcctcaaggaggggagcctgtag

SEQ ID NO: 14616 - DNA, 2049 bp, Oryza sativa
  Clone ID: TFbOSC423363j.C1.o9.fg
atgagaggtgggccgcttatggtgacagctcagtacgggctaaccttgtttgttttcactttttgttgtgaaaacagggtagtgcatgactggtttcaacctgccggaaaactccaaagaaaatctagaagctttcttccagagcgtcaggccgcgagtcgttgctccgtagaaaactctaccaacagagaaaccagccgtaccagcgccaccaactttcaagattatggccagcaagaatctcgtgagttcgttgctccctctactgacaatatggccgtcgggccgcaagtcaacataggagatatggatttcgacttgaagtccagcctcatcacgatggcgcagactagcccgttctgtggcaagcctaatgaggatgccaacgctcatctgcaacaattcctggagatatgtagcacgtacaccatcaaggaattcttcccgatgggcaaaaccaacgctcttcgtggacgaatttccagtttccagcagacaagggacgagtccattcctgaagcatgggaacgactacaggagtacgtggccgcctgtcctcatcataagatggacgactggctgatcctgcagaacttttacaatgggctcaccccgatgtcccgcgatcacctggacgtggcagctggaggagcattcttctctaaaacggttcaaggagccgttaaacttatagagaagatggtctccaatatgggttggagcgaggaacgactccagacccgtcagcgaggcatgcacaccgtcaaggagacggagttacttgctgccaagctggacctcctcatgaaacgcttggacgaccatgagaaacggccacaaggcaacgtcaaggccttggagtcacacgtcacgtgtgaggtctgcggcggcatgggtcattctgggaatgactgcccagaaacccatgaggaggcgatgtacatgggcaacaacaacgggtatcgtccacaaggaggtcaggggtggaaccaaccgcgcccgtattatgaaggaggaaataataacggtaacttctctaaccaactcttgaataagatgacagaaacccagttaactcagttggcatctttagtccctgcaaatgaatccgggaggatttcagggcaacctgactcctccattgaaaatgttaaggcgatcacaacgaggggagtaatccaaaagatccacatcaacgtgccgttgttggacgctatgcaagtaccaacatacgcccgttatctcaaggacatactcaacaacaagagaccgctcccaacaacggaggtggtcaagctgacggaacactgcagcaacgtcatactcaacaagttcccggagaagaagaaagatccggggtgtcccatgatcacctgctcgatcggggcacaacaattcgaccaggccttgtgcgaccttggagctagcgtcagcgtcatgccaaaggatgtctttgacaaactcaacttcacggtgttggcaccaacaccgatgcgcctccaactggctgactcgttagtccgttacccggcggggatagcggaggatgtgccagtcaagatacgggatttcttcatcccggttgattttgtggtgctagacatggacacggggaaggagacgccgctcatcctagggcgtccattccttagcaccgcaggagccaacattgacgtgggaactgggagtatccgtttccatatcaacgggaaggaggaaaagtttgagtttcaaccaaggacggaacaatgctccatggtcagaatcaagtacgggccgaacccgcagaatattcaagtggtcgaagtggagccacccaagacagatagcctggtaaagttcatgcagaacttcctggagaaggaaacaacaatgccaaggaaccgttattggaggacaccggtaaaatcacctgtaccagtcaagaagttagagcacccggctcagaagaagccgtttttcgcaccaaaatcaaagaaggtgtggaaggaaaagccaaagacgcccgctccatcacctctggagacgggtggaaaatccgcgcactga

SEQ ID NO: 14617 - DNA, 3318 bp, Oryza sativa
  Clone ID: TFbOSC33327j.C1.o1.fg
atgtgggccaatatatgccatgatgaggacatcccttccaacgatacaaccacacctattgcacagcaaggaccaatgactagagctcgagctcgtgaacttaattatcaggttcaaggttgttcttggcacggcaagaacagcaacaacgtggagtcggtgtaccggttgctaaggcgcagcacccctgtggtagttgtagtcggaccgccaacgtcgtatccttccccaaatcgaagtttaccctcctctcatcgaaagatcgggaacccccgttgctgcatcaagtgctgtaccttgatattacttgcagccacctatagctccacaaatttttatctactatatcacaggatcgtgcttgttgtcggctccggaggatcgggggagcaccctcaacattcaccacgtatgaggggcatcatacaacattttgagcgccaagtgagggagcatgctgaaggccttgatgaggatgttagggtcgccaatgatcgccttggtcaattggaggccgctcaaattgacaccaactccaagctttcctcattggagaggtcccttgtggctgtgaacacttctcttgcaggtatcttgaatacgttggagagaatgggccaagaaggtcatgatggatcggctaggcgcaaccacaatggccatgatgctaatagcagcatcgcagcaagggaagaactggagtacgctgctgacactgagcatgatgaggaggtacttggtcgtccacaaagacaacaacgccggcagcgccatggcatgggcgctccaccacggcgggaggtacgtgataatgatgattctttaggcaagatcaagtttaccattccttgctttgatggaaaatatgaccctgatgcatatcttacatgggagttagccattgatcagaaatttgcttgccatgattttcctgagaataaacgtgttagggctgctactagtgagttcactgattttgcatccatttggtggagtgaatttgttcgttccaatccaaataacactccccaaacctgggatgcaatgaaaagagtcatgcgagctagatttgttccttcatatcatgcacgtgatttgctgcacaaattgcaacaacttagacagggaaacaaatctgtagaggagtattatcaagctttgcaaacaggaatgcttcgttgtggattggtagaaaatgatgatgctggtatggctagattcatgggtgggctgaaccgagaaattcaggacattctagcctacaaagaatataattcaattaatcgtttgtttcatcttgcttgtaaagctgaaagggaagtacagggacgaagagctagcttcaggactaacatttctgcaggtcgtgctagctcttggacatcttctaacgctgctgcaccgtcaactcgagcagcagcaccatcatcctcaagcaacaagctgcgtccctctacaacaaactctacaccatgcccgagtgaaccaacaagaggggttgctgctacaccttccaagagctcatcatcagtagcttcatcaggaaggacaagagatattcagtgcctacgctgcaggggctatggtcacgtgcgcaaggactgcccaagcactcgtgtaatgattgtgagagctgatggtgggtactcctccgctagtgatttagatgaagaaacctatgctttgcttgcaactaacaatgcaggggaaggtgacgcgtcccaccaagatgaggaacacattggggctgaagctgcagagcactatgagagcctcgtggtgcagcgagtgctaagcgcacaaatggaaagggctgaacagaatcagcgccacaccttgtttcaaaccaagtgtgtgatcaaggaacgctcttgccgcgtgatcatagatggaggaagctgcaataatttggctagtgctgaaatggtggagaaacttgcattgagcacacagccacatccacagccttactatattcaatggcttaatagcagcggcaaggtaaaggagcgtactaggagtgagcatcttattgcggctaatgaacttgagaagcataagaagaaacccaccaactctgttcaaaataataaaaatgagattaagctgaagggatcttgtttcattgcaacaaaatcagatttggatgaagttgacactgacactgttgtttgctatgatttggagtatgctgatattttcccaaaggaggttccaccggggctgccaccaattcgagggattgagcaccaaattgacctcattcctggggcctctctgccaaaccgtgcgccatacaggaccaacccggaggaaacaaaggagattcagcgtcaagtgcaagagttactcgacaagggatttgtggtggtatattttgatgacattctcatatatagcagatcaatagaggatcatcatggtcatttgcgtgctgtttttgatgctctacgagatgcacgtttatttggtaaccttgagaagtgcacattttgcacagatcgagtctcttttcttggctatgttgtgactccgcagggaattgaagtagatcaagccaaggttgaagccatacatagctggccggttccaacaacgatcacacaagtgagaagctttctaggacttgctgggttctaccgccgctttgtgaaggattttagcaccattgcagccccattacatgagcttaccaagaaaaatgtcacattcacttgggctgcagcacaaaggaatgcattcgacactttgaaagataagttaacacacgctcctttactccaacttcctgatttcaacaaaacttttgagcttgaatgtgatgctagtgggattggattgggtggtgtgttgttacaagaaggcaaacctgtagcatatttcagcgagaaattgagtgggcctagtttgaattattctacttatgataaggaattgtttgctctagtgcgaacattggaaacatggcagcattatttatggcccaaagaatttgttatacactctgatcatgaatctttgaaacacattcgaagtcaagcaaaacttaaccgtaggcatgctaaatgggttgaatttattgaatcttttccatatgtcatcaaacataagaagggaaaagaaaatgtcattgctgatgctttgtctagacgttacgcaatgctatcccaacttgacttcaaaatttttggcttagaaacaataaaagagcaatatgcgcacgatgatgattttaaagatgtgttgttgaattgcaaggagggaaggacttggaacaaattcgttctcaccaatgggaagcgcatggtggagggctga

SEQ ID NO: 14618 - DNA, 4542 bp, Oryza sativa
  Clone ID: TFbOSC400098j.C1.o17.fg
atgctggctactgagtcagcaccttacttggtggacccgacagtgacacagccacctgccccggagattgtgcacactccactgatctctacaccttctccgcagctgggtttcagtttagagactccgatccaggtcgactccaagacagaggggaccgacactgagccagagatcgagccagacatcactgatctttcagaggatgagacccctgttctccgcatcaccttcctcggaggccctcgcaccctcagcactgcccgcaagagcacccgacccccgggcaagaagcccaagccagatccagaggccactacttccgagccatggggactcagagttatggccactcaaacccaacttctgcaagccattgtaaacaaccaaggcaaccgcggaggatcaagctttggagagtttatgaggaccaagccacccacattcgccacagctgaagaacctatggatgccgaggattggttaaggattattgagaagaagctgacccttgttcgagtacgtaaagccgataaagtgatcttcacagcgaaccaactggaaggaccagccggagactggtgggacacatacaaagaagcccgagaagaggatgctggagaaccaaactgggaggagttcactacggccttccgtgacaacttcgtgcctgctgccgtgatgcgaatgaagaagaatgagttcaggaggctacaacaagggaataccactatacaagagtacctgaaccgtttcactcaactggcgcgttacgcaactggagacctagccgacgaggaggaaaagatcgataagtttatcgaaggcctgaacgacgagttgcgtgggcccatgattggacaggaccatgatagtttccagcgtctaatcaataaggtcgttaggctggaaaacgaccggaaggttgtggagcacaatcacaaaaggagacttgccatgaaccgcccgcctcaggtcgcaccccagcgtcctaaaggggcagcctcctcagtatggaaaccaacagtggtgacaaccaatcgtcctgccgcatccagtaatttccacaggacggttaccattcagaacagagctcctgctccacatcaggccgctactggatcagtgaggccaggaagctatttcaactgtggagagtacgggcatttcgccaacaaatgtcctcatccaaacaagacacccattcgcaccagagctaatgtaatggctattcacgggactactacccctgctgctggacgaggtctattcaggactccgcagactaacaggaccgctaccggatttggccgcgggcaagttaaccacgttcgagctgaagaggcacaggaagaccagggcgtactgatgggtacgttttctatccacttcactccagttaaagttctcttcgatttaggagcatcgcattcatttatatctttgaaagcaagccaacgacacaatttgaccagagttaaactaaggcaaccaatgttagtacattcacctgggggtgaaatagccgtggatacagcttgcattgatgtacctattcgccttagggatgtggtatttccctctaaccttatggtcttggtaccacagacccttgatgttatattaggtatggattggttaacaaagaataggggagtaatcgactgtagacgtagagaagttaccctgaccacaccctggggatcgggtatgagagccaccatggatcaagatcctagactaaccgaacgtgccggaggcatatttaccatgctacccatgaaaggaatgcctatagtgcaacaatttcccgatgtgtttccagaagatttacctgggatgccaccagatcgtgacatagagtttattattgacctgatacccggaactgcccccatatccaagagaccatatcggatgccagtcaatgagttggaggagcttaaaaagcaaatcagagagttgcaagaaaagggatttgtacgtcccagttcatcaccttggggagccccagtgttatttgttaagaagaaggatggtagcatgagaatgtgtgtggactaccgctcactgaacgaagtaactatcaagaacaagtatccactaccacggattgatgaccttttcgatcaacttaaaggagctaaggtgttctctaagattgaccttcgatcaggataccaccaattgaaaattaggaccggggatatacctaagaccgcgttttcaacacgctatggattgtataagttcacagtaatgtcgtttgggttaaccaacgccccggcatactttatgaatcttatgaacaaagtgttcatggattacttggacaaatttatggtagtattcatcgatgatatcctgatctactccaaagacgaggaggagcatgcggagcacttacgattggtactcgagaaacttcggaagcataaattatatgcaaagtttagtaaatgtgagttctggttaaaagaagtcgcttttctaggccacgtaatctcagccggtggagtagcagtggatcctactaaagttgaggccgttacggaatggaaggcacccaaatctgtgactgaaattcggagttttctaggtttggctggatactatcgaaggttcattgaaggattctctatgatagctcgaccaatgacacaactactcaagaaggaaaagaagtttgtgtggtcagaacagtgccaggaaagctttgagcagctcaaagaaaagctgacctcagcgcctattttagttcttcccgacatcaggaaagactttgttatatattgtgatgcatcaaggcaaggactaggaggagtactgatgcaggacggaaaggttgtggcctatgcatcgcgacaattgcgaccacatgaggaaaactaccctacccatgacctagaactcgcagctgtggttcatgcgctaaagatttggagacactatttgattggaaaccattgcgatatctacactgaccacaagagtctgaagtatatttttacccagtcagacctcaacttgaggcaaaggcgatggctggaattaatcaaggattatgacttagaggttcactatcaccccggcaagacaaacgttgtggccgacgctttgagtcagaagagccattgcaatcatctgaggacggaaggaatggctcctgagcttaaggaggaaatagcccaactaaacctacatataataccttatgggcagataaacaccttggacatccaacctcttatgagaacccaaatagaagaggcccagaaggacaacgaggaaatccgagaggtgaaggaatgtctagctgcaggatttgcaaaggaattttcaactgacgagaaggatgtcctatggtataaaaagaggatttatgtacccgaacagggtggacagagaggattaatcctaatggaagctcacgaatcggcatattcattgcaccccggaagtaccaagatgtaccaggatctgaaggaaggatactggtggcccaatataaagagagatgtggccgagtacgtagcgctctgtgatgtatgccagaaggtgaaggctgagcaccagagaccggcaggtttgttgcaaccccttaggattcccgaatggaaatggaatgagataggtatggattttattgttggattgcccaagaccacaacaggatatgattccatttgggtgatcgtggatcgactcaccaagacggcgagattcattcccgttaagacaaattatagcagtgctaagctagccgagttatacatgaccaggatagagaaagtacatgaagccctaggaagttaccttgcgtttagcacagcttatcacccacaaacagatggccagacagagagaacaaaccaggtcttggatgacatgttgagagcttgtgctctggattttagcaaagactgggagagatgtttgtcctacgccgaattctcctacaacaacagctttcaagcaagcctaaagatgtcacccaatgaggcattgtttggtcgacgatgtcgaactccactaatgtggtccgagactggagaacgggcagtatttggacttgacattatccaagaagccgaggaaaagagttacgccgacacccgaagaagaaacctggaatttaaggagggagattatgtttatctaaaggtttctccgttgaggggaacaaaaaggtttaaggtcaaaggaaaactagcaccaagatatgtggaacctttccaaatcaacgctagacgaggagaagttgcctaccagttacagctacccgaaaatatcgccgatgtgcacccagtcttccatgtgtctgaattaaagaagtgcttacgagtgctagaggaacaagctacgttggaagaaattcatattagcaatgatctcacgtatccagaacacccagtccggatattggatgaagctgaaaagaggactagaatgaaagtgtggcgtatgtacaaagtacaatggagtaatcacactaaggatgaagccacttgggaaagcgaagagttcttgaagacggaatag

SEQ ID NO: 14619 - DNA, 3831 bp, Oryza sativa
  Clone ID: TFbOSC400773j.C1.o68.gm
atggccacccaaactcaagttctgcaagctatcgcgaacaaccaaggcgaccgcggagggtcaagctttggagagtttatgaggaccaagccacccacattcgccacagctgaagaacctatggatgctgaagattggttaaggatcattgagaagaagctaactcttgttcgagtacgtgaggccgataaagtgatctttgcggcaaaccaattggaaggaccagccggagactggtgggacacgtacaaagaagcccgagaagaagatgccggagaaccaaactgggaggaatttaccacagccttccgtgacaacttcgtgcctgctgcggtgatgcggatgaagaagaatgagttcaggagactacagcaagggaataccacagtacaagagtacctgaaccgtttcactcagctggcgcgctacgcgactagagatcttgccgacgaggaggaaaagatcgacaaattcattgaaggcttgaatgataaattacgcgggcccatgattggacaagaccacgatagtttccagagtttaatcaataaggtcgttaggctggagaacgaccggaaggtcgtggagcacaatcgtaaaaggaggcttgccatgaaccgctcgcctcagaccgcaccccagcgtcctaaagggacaacctcctcggcatggagaccaacagtggtgacaaccagtcgacctgccgcctccagcaatttccacaggccggttaccattcagaaccgcgctcctgcaccgaatcaggccgccactggatcagtaaggccaggaagctatttcaactgtggagagtacgggcatttcgccaataaatgtcctcatccaaacaagacacccattcgcaccggagctaatgcaacggctattcacgggactgctacccctgctgctggacgagcaaagcatagaggaataattgactgtagacatagagaagttaccctgaccacaccctggggatcggatatgagagcaaccatggatcaagatcctaggctaaccgaacgtgccggaggtatatttaccatgctacccctaaagggaatgcccgtagtgcagcgatttcctgatgtgttcccagaagatttacctggaatgccaccagatcgtgacatagagttcattattgacctgatacccggaactgcccccatatccaagagaccatatcggatgccggtcaatgagttagaagaacttaaaaagcaaatcagggagttgcaagagaagggatttgtacgccccagttcatcaccttggggagccccagtgttatttgttaaaaagaaagacggtagcatgagaatgtgtgtagactaccgatcactgaacaaagtaactattaaaaacaagtatccactaccatggattgatgatctttttgatcaactcaaaggagctaaggtgttctctaagattgaccttcggtcaggataccaccaattgaaaattagaaccggggacatacccaaaaccgcgttctcaacacgctatggattatatgagttcaccgtaatgtcgtttggtttaaccaacgctccggcatactttatgaatcttatgaacaaagtgttcatggactacttggacaaatttgtggtggtattcatcgatgatattctaatctactctaaagatgaggaagaacatgcggaacacttgcgattggtactcgagaaacttcggaagcataagttatatgcaaaattcagcaagtgtgagttctggttaaaagaagtcgcttttctaggccacgtaatctcggccggtggagtagcagtggattctgctaaagtggaggctgtcacggaatggaaagcacccaaatatgtgactgaaattcagagttttctaggcttggctggatactaccgacggttcattgaagggttctctaagatagcccgaccaatgacacaactactcaagaaggaaaagaagtttgtgtggtcagaacagtgtcaggaaagctttgagcagctcaaagaaaagctgacctcggcacctattttagttcttcccgacatcaaaaaagactttgttatatattgtgatgcttcaaggcaaggactaggaggagtattgatgcaggacgggaaagttgtggcctatgcgtcacgacaattgcgaccacatgaggaaaactaccctacccatgacctagaactcgcagctgtggttcatgcgctaaagatttggagacattatctaattggaaaccattgcgatatctacactgaccacaagagtctaaagtatatcttcacccagtcagatctcaacttgaggcaaaggcgatggttagaattaatcaaggactatgatttagaggttcactatcacccaggcaaagcaaacgtggtggccgacgctctgagtcgtaagagccattgcaatcatgtgagaatggaagggatggtccctgagcttagggaggaaatagctcagctgaacctacatatagtacgtcgtggacggataaacaccctagacattcaacctcttttgagaacccaaatagaagaagcccagaaggacaacgaggaagtccgagaggtttctccgatgaggggaacaaaaaggtttaaggtcaaaggaaaactggcaccaagatatgtgggaccattccagatcatcgccaagcgaggagaagttgcatatcagttacagttaccagagaatatcgcggatgtgcacccagtcttccatgtgtctcagctaaagaaatgtttacgagtgccggaggagcaagctccgctggaagagattcacattagcaatgatctcacatatccagaacacccgatccggatattggatgaagccgaaaagaggactaggagcaaacccctcctctgccgcgttgccctcgcgccccgcgcgccgcgcgccgtgcgccgctccgcctcccctctgccgtcgccgtcgccatcaccgcgcgtgccgccgtcgcctcgccgcccgcccgtcgccatcgccgcctgccgccgcgccgacgtcaccgagccgccccgagcccgcgccgacatcgccacccccgtgccgcgcgtgctgccgtcccgttgccgcgtcgcctcgagccccgcgccgccgtcccttcgccacgtcgccgcccgtcgccgtcaagcccgcgccgcgccgcgccgcgccgtcctatcattgctgtcgcgccgtgccgtcgtgtcgccgcccatcgcatcccgccctgagccgcgcgccaccgctgtcgccgtcgccatcgacgtcccgtcgccgcgcgcgtcccatcgccgctgccgcgccgcgcgccgtctcgtcgcctcgcgccgcgagcccgccgcctcgcgccccgcgccgccgtcgtttcacccctcctcctccttcccctctctttattcccctctcccctataaagaccccggcccaatcccccccttctccaccccactccattcccacctcttctccctcttccccttctccacgcgccgccgtcgtcgcgctgccgcgccgccgttgtcgtgccgccgcgccgccaccttcgaagccgccgcgccgtcgccccggagccgccgcgccgtgcgtcgccgccttgcgccgccatcgccgtcgtcgccgccaccgccgccgccgagcccgagggagttgcggatccaagcgaaggccaagacccgcaagactctgagcaaggtgcgctacgatgggacagccgttgaggtagggccgagaagcgtgccctacatcggtgtcgccattgaagcgggagatgaagcctcggaggatccctatgcctactaccaggagggagatgaagacgatggcgctcagtag

SEQ ID NO: 14620 - DNA, 2394 bp, Oryza sativa
  Clone ID: TFbOSC401834j.C1.o22.fg
atgacgagtttggcctcatcagcgacaggtagagagaataacccgttagagttctactctcttccaatctcccccaacattgaacaaaggtcattttcggtagttggctttgctgctgcactgaaaccacatgcttttgatggttctaattataagaggtggaaaacacgtgcactactgtggttgactgtgatgcaatgtttctatgtttcacggggtaaacgaagtgaaccacctctctctcctgaggaagaggttaagttcgaggcttcggattgcctgttccgtggagcattgatcagtgtacttgctgacaatatagtggacgtgtatatgcacatgccttcagggaaggacatgtgggatgcacttgaggccaagttcggagtttccgacgccggcagtgagctgtatgtcatggagcagttctatgactacaagatgtttgtggtaggtggcattattgccaaattgccaacttcttggtcggactttgccacttctctaaagcacaagagacaagagttcagtgtttctgatctcattagctctttgggtgttgaagagaacgcgagggcaaaggacaacagggacaaaaaggttgagggtggttctagtgccaatatggtacagaagaagaaccctcatgcatcccacaacaacaagaaattcaagcctgatgttaaacccatggctacaaccaattttaagaagaaaggcaagggaaaggcaaagggagactgctttgtgtgtggcaagtctgggtattgggccaaggactgtcctaagcgcaaagataggaagtctgccaacatggtcactagcgagggcagaggaacatcggggtacgattggtgggttgatactggtgctaatattcatgtcgggagaggttcctccttgttgatgggaaacgggtcacttacggctgttcatggtgttgatgaagcattgcattactttaagacctataaagctgaggtagaaaaccaacttgaaaggaaaatcaaacggttgaggtctaataggggtggagagtatttttccaatgagtttacatccttttgcgaggagtttggaattattcatgagaggacgcctccctattcaccccaatcaaatggggtagccgaaagaaagaaccgtactctaactgagatggtgaatgccatgttagacactacggactttccaaggaatggtgggcataaggaagtaacaccattcgagaaatgggaaaggaagaaattaaatctctcatacctacgaacatggggctgtttggctaaggtaaatgtacctatagccaaaaagcgtaaacttgtaccgaatactgttgattgtgtgttccttggttatgctattcacagcgtgggttatagattcttaatagtaaactctagagtacccaacatgcgtgttggtacaattattgagtccagggatgctacattctttgagaatgaatttcccatgaaaaatacacctagcacttctagtcaagaaactgtcatatcctatgagcactttgcaccgatagaacacaatgatcaaacgcctgagggaaatcgtgaggaggatagcattgtagatactcgtaggagtaagagacaaagggttgcaaaatcctttggggatgactgcattatatacctcgtggatgacactccaagaaccatagaagaggcatattcatctcctgacgctgactactggaaggaagcagtacacagtgagatggactcaattatgtctaatggtacttgggaagtcgttgagcatccatatgggtgcaagcctgtaggatgcaaatgggttttcaagaaaaagcttaggcctgatggtacaattgaaaagtacaaggcaaggcttgtggccaaggcctctcatggtcttctcgtccatcagatggacgttaagacagctttcctaaacggagagctggaggagatctatatggatcaaccagactgcctcaatgtgattgaggtggtcaaggactttctgtctaagagttttgaaatgaaggatttgggagaggctgatgttattcttaacattaagctactaagaggagatgagggtgggattacacttgtgcaatcccactatgtggacaaggttctgagtcgctttggatacagcgactgcatgccagatcctactccttatgatcccagcgtgctattaaggaaaaaccgaagaatagcaagggatcaactgagatactcccaaatcattggttcattgatgtacttggctagtacaacgaggcctgacatctcatttgctgatggcttataccttaatgtgatccaagtggcttttctaagcagagatgttgacctgaagaacatctcagaaggaacacacctatatgagttcgactgctag

SEQ ID NO: 14621 - DNA, 780 bp, Oryza sativa
  Clone ID: TFbOSC6577j.C1.o3.fg
atggccgcatcaacctctaagggcaaaggctcatggcgagagaagattgagatagcacttgcgctgtctaatatagatttagctctcaccgagccctgtcccactgcgccagttgcgccaaagtacgacactgatcatgcgaagtgggagtcttccaaccgcaagtgcttgatggtaatcaagagctcaatagtggaggcagtaaggggagcaatcccagtatgcaccaccgccacagagtatcttcagagagtggagaatcagtttactatttcttcaaaggcttatgcgagctccttaatcaagagcttagttactatgaagtaccatggcggagatgttagagagtatattttgaagatgagcggtatcacttcaaagctcaagaagatagacttggttctccctgacgacttcctagttcacctcatttttgcctccttgccttcagaattcgagtcatttgctgtgaattacaactcattgcccgaaaactggaacattgagaagttgattgccatgtgtgtgcaagaagaggatagacccaaaactcgtggtgattctgcaaattatgtgaagaacaagaagaggaacaaccacagtcagaatgtcgcctctcccaaagcacgtggaaaggcaccacaggttgatccaaatccacgacaagaagtggagagggacgcttgcaggtggtgcaagcagaaggggcactttcagaaggattgccctgaattcctgaagcatcttttaaaaaagggtgagacatcattacattcgtag

SEQ ID NO: 14622 - DNA, 1529 bp, Oryza sativa
  Clone ID: TFbOSC11374j.C1.o1.fg
atggcagttaaggaccggttcacgggaaaccctgggagacttaccgtgcttaccacaagcgggagtggggatttaatgcacattcagcttagaaattctggttcgagaatttctgggcgtgacaagttggtatcagagccgactttgaccatggagataaggaatggttcacgcgactcgaacaacgccagtggcagcgaagagccgaacaatggagcacgtgccaacggtgcatctgacaacagtccgtccccaccgcccgagaacccaacaattgctcaggtgttggacaatcagactcagatgatgacaatgatgatgcaacagatgcagcaacagtaccatcaggtgttgcagcaggtgcagcagcaagcacagctgcagcagcagaacctgcagtttggtcctccacctcctcagtccaaactgttagaatttcttcgtgtcaagccgcccaccttctcaagcaccaccaacccaatcgaagcccacgactggcttcatgccattgagaagaagctgaatcttttgcaatgcaacgagcaggagaaggttgcttttgctacacaccagctacaaggtcccgcttctatttggtgggacaactacatggtgacccgtccagctggggcagaggttacttggacagagtttcgtcatagtttcaataaagcacaggttcccgagggaattgtggcacaaaagaagagagagttccgttccctgcaacaaggaaccagaacagttatagagtatttgcatgagttcaaccgcctcgcgcgctacgcccctgaggacgtgcgtaccgatgccgagaagcaggagaagtttctgtctggtcttgatgatgaattgactaaccagttgatctctagagattatgaggactttgagaagctggtggataaggctatccgtcaggaggagcacggtaacaaaataaaccgtaagaggaaggcagctcagttcaggactccccaggggaagagtcagaagcctcgtttcacgatgggacgtcacggtggaccttccaccatgattatccgacagcaccgtccctaccacccgggtagcttcaacaagaaccaccataatggcagtcacaacaacagtgagcagcacagtctcaaccctactccgagttcactaaagattccagctcaatcagttcagccagctctgccagaacagcccaagaggttgggagaaaaacccgaactctgcttcaattgtaacaaacccggacacacggttggaaagtgcccgaagccaagacgtgctggacccaagttcgttcaggcccgtgttaatcatgcatctgcagaggaggcgcagtcagcaccagaggttatattgggcacattccccgtcaactcgacaccggcagtaatattgtttgattctggtgcaacccattcctttatttccaagcgttttgctggtgcacatgggttatctttagtgaagcttgcatgcctgcaggtcgactctagaggatccccgggtaccgagctcgaattcgccctata

SEQ ID NO: 14623 - DNA, 1497 bp, Oryza sativa
  Clone ID: TFbOSC11376j.C1.o1.fg
atggcagttaaggaccggttcacgggaaaccctgggagacttaccgtgcttaccacaagcgggagtggggatttaatgcacattcagcttagaaattctggttcgagaatttctgggcgtgacaagttggtatcagagccgactttgaccatggagataaggaatggttcacgcgactcgaacaacgccagtggcagcgaagagccgaacaatggagcacgtgccaacggtgcatctgacaacagtccgtccccaccgcccgagaacccaacaattgctcaggtgttggacaatcagactcagatgatgacaatgatgatgcaacagatgcagcaacagtaccatcaggtgttgcagcaggtgcagcagcaagcacagctgcagcagcagaacctgcagtttggtcctccacctcctcagtccaaactgttagaatttcttcgtgtcaagccgcccaccttctcaagcaccaccaacccaatcgaagcccacgactggcttcatgccattgagaagaagctgaatcttttgcaatgcaacgagcaggagaaggttgcttttgctacacaccagctacaaggtcccgcttctatttggtgggacaactacatggtgacccgtccagctggggcagaggttacttggacagagtttcgtcatagtttcaataaagcacaggttcccgagggaattgtggcacaaaagaagagagagttccgttccctgcaacaaggaaccagaacagttatagagtatttgcatgagttcaaccgcctcgcgcgctacgcccctgaggacgtgcgtaccgatgccgagaagcaggagaagtttctgtctggtcttgatgatgaattgactaaccagttgatctctagagattatgaggactttgagaagctggtggataaggctatccgtcaggaggagcacggtaacaaaataaaccgtaagaggaaggcagctcagttcaggactccccaggggaagagtcagaagcctcgtttcacgatgggacgtcacggtggaccttccaccatgattatccgacagcaccgtccctaccacccgggtagcttcaacaagaaccaccataatggcagtcacaacaacagtgagcagcacagtctcaaccctactccgagttcactaaagattccagctcaatcagttcagccagctctgccagaacagcccaagaggttgggagaaaaacccgaactctgcttcaattgtaacaaacccggacacacggttggaaagtgcccgaagccaagacgtgctggacccaagttcgttcaggcccgtgttaatcatgcatctgcagaggaggcgcagtcagcaccagaggttatattgggcacattccccgtcaactcgacaccggcagtaatattgtttgattctggtgcaacccattcctttatttccaagcgttttgctggtgcacatgggttatctttagtgaagcttgagtattctatagtgtcacctaaatag

SEQ ID NO: 14624 - DNA, 448 bp, Oryza sativa
  Clone ID: TFbOSC11376j.C1.o2.np
atggcaaggcgacgacggcgcacgaccgccggcggtgaccggcggcgcggggagacggcggcggccggcgcgaaggcggcggcggcagccgaagacgacggcgcacgcgcggagggcggcggcgctcacgggggagaggaaaggaaggaggaaaggggattcctcaccggcgagcacgacggccggcgggaaggcgaccatggcggcttgaattgccggccggagacggaggggagagagggtctcaccggcgcgcgaggagaaaagggctccggcggtgattcgcggcaatgaagcggcggccgaggtgcgggcgggctcggtgagcgcgacggcggcgactgcgcggcgcggcggtggctatagtggcggcggcgcgtggccggagacggcggtaggcggcggcgcaaggggcgagcggcgcggcgacgataggaagcacgggagg

SEQ ID NO: 14625 - DNA, 4476 bp, Oryza sativa
  Clone ID: TFbOSC14967j.C1.o1.fg
atggagacaaggaatggttcacgcgactccaacaacgccagtggcagcgaagagccgatcaatggagcacgtgccaacggtgcatctgacaacagtccgtccccaccgcccgagaacccaacgatcgctcaggtgttggacaatcagactcagatgatgacaatgatgatgcaacagatgcagcaacagtaccatcaggtgttgcagcaggtgcagcagcaagcacagctgcagcagcagaacctgcagtttggtcctccacctcctcagtccaaattgttagaatttcttcgtgtcaagccgcccactttctcaagcaccaccaacccaatcgaggcccacgactggcttcatgccgttgagaagaagctgaatcttttgcaatgcaacgagcaggagaaggttgcttttgctacacaccagctacaaggttcccgagggaatcgtggcacaaagaagagagagttccgttccctgcaacaaggacccagaccagttatagagtatttgcatgagttcaaccgcctcgcgcgctatgcccctgaggacgtgcgtaccgatgccgagaggcaggagaagtttttgtctggtcttgatgatgaattgactaaccagttgatctctagagattatgaggactttgagaagctggtggataaggctatccgtcaggaggagcactgtaacaaaataaaccgtaagaggaaggcagctcagttcaggactccccaggggaagagtcagaagcctcgtttcacgatgggacatcacggtggaccttccaccatgattatccggcagcaccgtccctaccacccgggtaacttcaacaagaaccaccatagtgacagtcacaacaatagtgagcagcacagcctcaaccctactccgagttcactaaagattccagctcaatcagttcagccagctctgacagaacagcccaagaggttgggagaaaaacccgaactctgcttcaattgtaacaaacccggacacacggttggaaagtgcccgaagccaagacgtgccggacccaagttcgttcaggcccgtgttaatcatgcatctgcagaggaggcgcagtcagcaccagaggttatattgggcacattccccgtcaactcgacaccggcagtaatattgtttgattctggtgcaacccattcctttatttccaagcgttttgctggtgcacatgggttatctttagtgaagcttaagataccaatgcgagttcatactcctggaggtggcatgaccacaactcactactgcccatctgtgacagttgaaattcaagggttgatttttccagccaacctcattcttctcgaatccaaggacctagatgtcatacttggaatggattggttggcaaggcacagaggagtgattgattgcgccagccgcaccatcaagttgaccaatgcaaaaggagaggtggtaatcttccagtctccagtgccgcagaagccagggattagtttaaaccaggctgctggtgaagaacaagaggtagcagtggagaaaaccactaagaagctggaggatattcccatagtcagagagtatccagaggtttttccggatgatctgacaacaatgccaccaaaaagggatatcgagttccggattgacttggtacctggaactgcaccgatccacaagaggccttacagaatgggagccaacgagttggcggaagtcaagaagcaagttgatgaacagttacagaagggatacatccgcccgagcacgtcgccttggggtgctccggttatctttgtggagaagaaagacaaaaccaagaggatgtgcgttgactaccgcgcactcaatgaggtcaccatcaagaacaagtatcctttgccaaggattgatgacctgtttgatcagttgaaaggagctactgtgttctctaagatagacctgcgatcaggctatcaccagttgaggatccgcgaagaggatattccaaagacagcattcatcactcggtacgggttgttcgaatgcacagttatgtctttcggactcactaacgcacctgccttcttcatgaatttgatgaacaaggtgtttatggaatttctagacaagtttgtcgtggttttcatcgatgacatacttatctactccaagtccgaggaagaacatgagcagcatcttcggctggtacttgaaaagttaaaagagcaccagctatatgccaagttcagcaagtgcgacttctggcttaaggaagttcagtttctcggtcacatcgtgaatgctcaaggagtagctgtggatccagcaaatgtggagtcagttaccaaatggaccccaccaaggacagtcactcaggttcggagtttcttaggacttgcgggttattaccgccggttcattgagaacttctctaaaattgctaagccaatgacacagctattgaagaaggaagaaaagtttatctggtctgctgaatgcaataggagttttgaagaactcaaacgacggttggtgtctgcaccagtcttaatcctgcctgatcagacgaaagatttccaggtctattgtgatgcatctcgccaggggctaggatgtgtgttgatgcaggatggcaaagtggtttcttatgcttcacggcagttgcgtcctcatgaaggcaactacccgacgcatgatctggaattagccgcagttgttcatgctttaaagatttggcggcactatctcatcggtaaccgttgtgaggtatatacagatcacaaaagtctaaagtacatcttcacccaacctgatctgaatctccgacaacgaagatggttggagctaatcaaagattatgatatgggaatacactatcatcccggcaaggccaatgtggtagcagatgccttgagcaggaagagttactgcaacgtcgcatgggtagaggaactatgctgtgaggttcaacatgatttggaacatttgaaccttggtatagttgagcacggattcgtggctgccctagaggcacagcccacactggtggagcaggttcgcatagctcaagcaagtgatcctgaaatagcagagctcaaaaagaacatgagggtcggaaaagcccgaggttttgttgaggatgaacaaggaacaatctggatgggagaaagattgtgtgtacccgaaaacaaggaattaaaagacctgatactaaccgaggctcatcaaactcaatattccattcatcccggtagtactaagatgtaccaagacctcaaagagaagttttggtgggtcagcatgagaagggaaatagctgaattcgtagcactctgtgacgtctgtcaacgagtaaaggcagaacaccaaaggccagcaggtttgctacagccacttcagattccagaatggaagtgggaagaaatcggaatggatttcatcaccggtttgcccaggacgtcatcggggcatgattctatttgggtagtcattgaccgactcaccaaagtggcccacttcattccggtgcacactacctactcagggaagaaattagcagaactctatctggcaagaattatgtgtttacatggtgtacctaagaagatcgtgtctgatcgaggaagccaattcacttcaaagttctggcagaaattacaagaagaattgggaacccggttgaatttcagcaccgcttaccatccacaaacagatggccagaccgagcgagtcaatcaaatactagaggatatgttgagagcctgtgcgcttgattttggtggggcatgggacaaaagcttgccgtatgctgagttctcgtacaacaacagttaccaagctagtctgcagatggcaccatttgaagcactgtatggacggaggtgtcgtactccgctcttctggtatcagacaggggaacgccagttgtttggtacagaagttttaaatgaggcagaagagaaagtcagagctgttagggaaagattgagaatcgcgcagtctcggcagaaaagctatgcagacaaccgccgaagggagctcgctttcgaaacaggggattatgtgtatctccgtgtcactccgctcaggggagtacatcgcttccaaaccaaaggaaagttggcaccacgctttgtgggaccatatcgggttttggaacgtagaggtgaagttgcttaccagctcgagcttccctccaacatgcttggcatccataatgtgttccacgtctcccagttgaagaaatgtttgagagttcctgaggaacaggcaagtccggatcaaatcgaaatccaggaagacttgacgtatgtggagaagccaactcgtatcctcgaaaccagcgagagaaagaccagaaacaaagtaataagattctgcaaggttcagtggagccaccactcagaggaagaggccacttgggaaagagaagatgagttgaaggccacccacccgcacctcttcgccagctcttccgaatctcggggtcgagattccgtttaa

SEQ ID NO: 14626 - DNA, 4518 bp, Oryza sativa
  Clone ID: TFbOSC17627j.C1.o1.fg
atggagacaaggaatggttcacgcgactccaacaacgccagtggcagcgaagagccgatcaatggagcacgtgccaacggtgcatctgacaacagtccgtccccaccgcccgagaacccaacgatcgctcaggtgttggacaatcagactcagatgatgacaatgatgatgcaacagatgcagcaacagtaccatcaggtgttgcagcaggtgcagcagcaagcacagctgcagcagcagaacctgcagtttggtcctccacctcctcagtccaaattgttagaatttcttcgtgtcaagccgcccactttctcaagcaccaccaacccaatcgaggcccacgactggcttcatgccgttgagaagaagctgaatcttttgcaatgcaacgagcaggagaaggttgcttttgctacacaccagctacaaggtcccgcttctatttggtgggacaactacatggtgacccgtccagctggggcagaggttacttggacagagttttgtcatagtttcaataaagcccaggttcccgagggaatcgtggcacaaaagaagagagagttccgttccctgcaacaaggaaccagaacagttatagagtatttgcatgagttcaaccgcctcgcgcgctatgcccctgaggacgtgcgtaccgatgccgagaggcaggagaagtttttgtctggtcttgatgatgaattgactaaccagttgatctctagagattatgaggactttgagaagctggtggataaggctatccgtcaggaggagcactgtaacaaaataaaccgtaagaggaaggcagctcagttcaggactccccaggggaagagtcagaagcctcgtttcacgatgggacatcacggtggaccttccaccatgattatccggcagcaccgtccctaccacccgggtaacttcaacaagaaccaccatagtgacagtcacaacaatagtgagcagcacagcctcaaccctactccgagttcactaaagattccagctcaatcagttcagccagctctgacagaacagcccaagaggttgggagaaaaacccgaactctgcttcaattgtaacaaacccggacacacggttggaaagtgcccgaagccaagacgtgccggacccaagttcgttcaggcccgtgttaatcatgcatctgcagaggaggcgcagtcagcaccagaggttatattgggcacattccccgtcaactcgacaccggcagtaatattgtttgattctgtgaagcttaagataccaatgcgagttcatactcctggaggtggcatgaccacaactcactactgcccatctgtgacagttgaaattcaagggttgatttttccagccaacctcattcttctcgaatccaaggacctagatgtcatacttggaatggattggttggcaaggcacagaggagtgattgattgcgccagccgcaccatcaagttgaccaatgcaaaaggagaggtggtaatcttccagtctccagtgccgcagaagccagggattagtttaaaccaggctgctggtgaagaacaagaggtagcagtggagaaaaccactaagaagctggaggatattcccatagtcagagagtatccagaggtttttccggatgatctgacaacaatgccaccaaaaagggatatcgagttccggattgacttggtacctggaactgcaccgatccacaagaggccttacagaatgggagccaacgagttggcggaagtcaagaagcaagttgatgaacagttacagaagggatacatccgcccgagcacgtcgccttggggtgctccggttatctttgtggagaagaaagacaaaaccaagaggatgtgcgttgactaccgcgcactcaatgaggtcaccatcaagaacaagtatcctttgccaaggattgatgacctgtttgatcagttgaaaggagctactgtgttctctaagatagacctgcgatcaggctatcaccagttgaggatccgcgaagaggatattccaaagacagcattcatcactcggtacgggttgttcgaatgcacagttatgtctttcggactcactaacgcacctgccttcttcatgaatttgatgaacaaggtgtttatggaatttctagacaagtttgtcgtggttttcatcgatgacatacttatctactccaagtccgaggaagaacatgagcagcatcttcggctggtacttgaaaagttaaaagagcaccagctatatgccaagttcagcaagtgcgacttctggcttaaggaagttcagtttctcggtcacatcgtgaatgctcaaggagtagctgtggatccagcaaatgtggagtcagttaccaaatggaccccaccaaggacagtcactcaggttcggagtttcttaggacttgcgggttattaccgccggttcattgagaacttctctaaaattgctaagccaatgacacagctattgaagaaggaagaaaagtttatctggtctgctgaatgcaataggagttttgaagaactcaaacgacggttggtgtctgcaccagtcttaatcctgcctgatcagacgaaagatttccaggtctattgtgatgcatctcgccaggggctaggatgtgtgttgatgcaggatggcaaagtggtttcttatgcttcacggcagttgcgtcctcatgaaggcaactacccgacgcatgatctggaattagccgcagttgttcatgctttaaagatttggcggcactatctcatcggtaaccgttgtgaggtatatacagatcacaaaagtctaaagtacatcttcacccaacctgatctgaatctccgacaacgaagatggttggagctaatcaaagattatgatatgggaatacactatcatcccggcaaggccaatgtggtagcagatgccttgagcaggaagagttactgcaacgtcgcatgggtagaggaactatgctgtgaggttcaacatgatttggaacatttgaaccttggtatagttgagcacggattcgtggctgccctagaggcacagcccacactggtggagcaggttcgcatagctcaagcaagtgatcctgaaatagcagagctcaaaaagaacatgagggtcggaaaagcccgaggttttgttgaggatgaacaaggaacaatctggatgggagaaagattgtgtgtacccgaaaacaaggaattaaaagacctgatactaaccgaggctcatcaaactcaatattccattcatcccggtagtactaagatgtaccaagacctcaaagagaagttttggtgggtcagcatgagaagggaaatagctgaattcgtagcactctgtgacgtctgtcaacgagtaaaggcagaacaccaaaggccagcaggtttgctacagccacttcagattccagaatggaagtgggaagaaatcggaatggatttcatcaccggtttgcccaggacgtcatcggggcatgattctatttgggtagtcattgaccgactcaccaaagtggcccacttcattccggtgcacactacctactcagggaagaaattagcagaactctatctggcaagaattatgtgtttacatggtgtacctaagaagatcgtgtctgatcgaggaagccaattcacttcaaagttctggcagaaattacaagaagaattgggaacccggttgaatttcagcaccgcttaccatccacaaacagatggccagaccgagcgagtcaatcaaatactagaggatatgttgagagcctgtgcgcttgattttggtggggcatgggacaaaagcttgccgtatgctgagttctcgtacaacaacagttaccaagctagtctgcagatggcaccatttgaagcactgtatggacggaggtgtcgtactccgctcttctggtatcagacaggggaacgccagttgtttggtacagaagttttaaatgaggcagaagagaaagtcagagctgttagggaaagattgagaatcgcgcagtctcggcagaaaagctatgcagacaaccgccgaagggagctcgctttcgaaacaggggattatgtgtatctccgtgtcactccgctcaggggagtacatcgcttccaaaccaaaggaaagttggcaccacgctttgtgggaccatatcgggttttggaacgtagaggtgaagttgcttaccagctcgagcttccctccaacatgcttggcatccataatgtgttccacgtctcccagttgaagaaatgtttgagagttcctgaggaacaggcaagtccggatcaaatcgaaatccaggaagacttgacgtatgtggagaagccaactcgtatcctcgaaaccagcgagagaaagaccagaaacaaagtaataagattctgcaaggttcagtggagccaccactcagaggaagaggccacttgggaaagagaagatgagttgaaggccacccacccgcacctcttcgccagctcttccgaatctcggggtcgagattccgtttaa

SEQ ID NO: 14627 - DNA, 1978 bp, Oryza sativa
  Clone ID: TFbOSC2469j.C1.o1.gm
atgccgccgccctccgcacgtgcatcgccgcgcttcggccatgcgccgccacctttcggccgtcgccgccgcttcccgcgacaccggtccccgccgtcggtggtcgtgcctcgccgccgcctcgccccggtcggccttgaggccgagctgagcccggccgatgcctccctccccctcccttttctcccctccacgcgtgcgccgccgcctttggccgtgccgccgctccggccgtccgccgccgccttccgcgccgtccgccgccgtctccccgcaccgccggcggtcgtgcgccgtcgtcgcctcgccatggccggccggccggttttgaagccgagccgagtcgtgcctagtcgccgccgtgccgtccgatcggtctcccggccgatctggaccgtcggtcccgtggaccggcggtggaccacccgcgtggtcccggtccacggtggaccgaccccctttgagccgctgcctagcaccggtggcgagggtgggcgtgatggagttgggtcggccggggtgtccggttgtccagctgccggattcaccgcggcgcaagaggggaccgcccactgccttttgaggggtggggagctgaagatcttcctagttggagctgttttgtcaaagttggtttcgtcgctgccgtcaaggattgcctgtggagtggagtcgctcgctgctgaaatggagataaggaatggttcacgcgactcgaacaacgccagtggcagtgaagagccgatcaatggagcacgtgccaacggtgcatctgacaacagtccgtccccaccacccgagaacccaacaattgctcaggtgttggacaatcagactcagatgatgacaatgatgatgcaacagatgcagcaacagtaccatcaggtgttgcagcaggtgcagcagcaagcacagctgcagcagcagaacctgcagtttggtcctccacctcctcagtccaaactgttagaatttcttcgtgtcaagccgcccaccttctcaagcaccaccaacccaatcgaggcccacgactggcttcatgccattgagaagaagctgaatcttttgcaatgcaacgagcaagagaaggttgcttttgctacacaccagctgcaaggtcccgcttctgtttggtgggacaactacatggtgacccgtccagctggggcagaagttacttggacagagttttgtcatagtttcaataaagcacaggttcccgagggaattgtggcacaaaagaagagagagttccgttccctgcaacaaggaaccagaacagttatagagtatttgcatgagttcaaccgcctcgcgcgctacacccctgaggacgtgcgtaccgatgccgagaggcaggagaagtttttgtcgggtcttgatgatgaattgactaaccagttgatctctagagattatgaggacattgagaagctggtggataaggctatccgtcaggaggagcactgtaacaaaataaaccgtaagaggaaggcagctcagttcaggactccccaggggaagagtcagaagcctcgtttcacgatgggacgtcacggtggaccttccaccatgattatccgacagcaccgtccctaccacccgggtagcttcaacaagaaccaccatagtggcagtcacaacaacagtgagcagcacagtctcaaccctactccgagttcactaaagattccagctcaatcagttcaaccagctctgccagaacagcccaagaggttgggagaaaaacccgaactctgcttcaattgtaacaaacccggacacacggttggaaagtgcccgaagccaagacgtgctggacccaagttcgttcaggcccgtgttaatcatgcatctgcagaggaggcgcagtcagcaccagaagttatattgggcacattccccgtcaactcgacaccggcagtaatattgtttgattctggtgcaacccattccttcatttccaagcgttttgctg

SEQ ID NO: 14628 - DNA, 1161 bp, Oryza sativa
  Clone ID: TFbOSC2478j.C1.o1.fg
taccacccgggtagcttcacaaagaaccaccatagtggcagtcacaacaacagtgagcagcacagtctcaaccctactccgagttcactaaagattccagctcaatcagttcaaccagctctgccagaacagcccaagaggttgggagaaaaacccgaactctgcttcaattgtaacaaacccggacacacggttggaaagtgcccgaagccaagacgtgctggacccaagttcgttcaggcccgtgttaatcatgcatctgcagaggaggcgcagtcagcaccagaagttatattgggcacattccccgtcaactcgacaccggcagtaatattgtttgattctggtgcaacccattccttcatttccaagcgttttgctggtgcacatgggttatctttagtgaagcttaagataccaatgcgagtgcatactcctggaggtggcatgaccacaactcactactgcccatctgtgacagttgaaattcaagggtcgatttttccagccaacctcattcttctcgaatccaaggacctagatgtcatacttggaatggattggttgacaaggcacagaggagtgattgattgcgccagccgcaccatcaagttgaccaatgcaaaaggagaggtggtaactttccagtctccagtaccgcggaagccagggattagtttaaaccaggctgctggtgaagaacaagaggtagcagtggagaaaaccactaagaagctggaggatattcccatagtcagagagtatcgagaggtttttccggacgatctgacaacaatgccaccaaaaagggatatcgagttccggattgacttggtacctggaactgcaccgatccacaagaggccttacagaatgggagccaacgagttggcggaagtcaagaaacaaaagaaagacaaaaccaagaggatgtgcgttgactaccgcgcactcaatgaggtcaccatcaagaacaagtatcctttgccaaggattgatgacctgtttgatcagttgaaaggagctattgtgttctctaagatagacctgcgatcaggctatcaccagttgaggatccgcgaagaggatattccaaagacagcattcatcggggatcctctagagtcgacctgcaggcatgcaagcttgagtattctatag

SEQ ID NO: 14629 - DNA, 765 bp, Oryza sativa
  Clone ID: TFbOSC2964j.C1.o1.fg
atgggacgtcacggtggaccttccaccatgattatccgacagcaccgtccctaccacccgggtagcttcaataagacccaccatagtgatagtcacaacaacagtgagcagcacagcctcaaccctactccgagttcactaaagattccagctcaatcagttcagccagctctgccagaacagcccaagaggttgggagaaaaacccgaactctgcttcaattgtaacaaacccggacacacggttggaaagtgcccgaagccaagacgtgctggacccaagttcgttcaggcccgtgttaatcatgcatctgcagaggaggcgcagtcagcaccagaggttatattgggcacattccccgtcaactcgacaccggcagtaatattgtttgattctggtgcaacccattccttcatttccaagcgttttgctggtgcacatgggttatctttagtgaagcttaagataccaatgcgagttcatactcctggaggtggcatgaccacaactcactactgcccatctgtgacagttgaaattcaagggttgatttttccagccaacctcattcttctcgaatccaaggacctagatgtcatacttggaatggattggttggcaaggcacagaggagtgattgattgcgccagccgcaccatcaagttgaccatgcaaaaggagaggtggtatcttccagtctccagtgccgcagaaggggatcctctagagtcgacctgcaggcatgcaagcttgagtattctatag

SEQ ID NO: 14630 - DNA, 3420 bp, Oryza sativa
  Clone ID: TFbOSC32576j.C1.o1.fg
atggtgaagacaaggaatggttcacgtgactccagcaacgtcagtggcagcgaagagcagattagtggagcacgtgccaacagtgcatctgacaacagtccatctccaccgcccgagaacccaacgatcactcaggtgttggacaatcagactcagatgatgtcaatgattatgcaacagatgcaacaacagtaccatcagccgcccactttctcaagtaccaccaacccaatcgaggccaacgactggcttcgtgctattgagaagaagctgaaccttttgcaatgcaacgaccaagagaaggttgcttttgctatacaccagctgcaaggtcccgcttctgtttggtgggacaactacgtggtgacccgtccagctgggacaaaggttacctgggcagagttttgtcagagtttcaataaagcacaggttcccgagggaattatggcacaaaagaagagagagttccgttctctgcaacaaggaaccaaaacagttatagagtatttgcacgagttcaaccgcctcgcgcactacgctcctgaggaccatcgtccctaccacccgggtagcttcggcaggatctaccatagtggcagtcacggcaacagcgagaagcacagcctcaacctgactccaagtccactaatgtttctagctcagtcagttcagccagctctgcctgctcagtcaaaacagcccaaggagttcgaaggaaagcccgaactctgcttcaattgtaacaaaccgggacacacggttggaaagtgcccaaagccaagacatgctggacccaagtttgtgcaggcccatgtcaatcatgcgtctgcagaggaggcacagtcagcaccagaggtcatattgggcacatttcctgtcaactcgacaccggcagtaatattgtttgattctggtgcaactcattccttcatttccaagcgttttgctggtgcgcatgggttatctttagtgaagctcaagataccaatgcgagttcatactcctggaggtggcatgaccacaactcactactgcccatcagtgactgttgaaatccaagggttgatttttccagccaacctcattcttctcgaatccaaggacctagatgtcatacttagaatggattggttgacaaggcatagaggagtgattgattgcactagccacaccatcaagttgaccaatgcaaaaggagaagtggctgctggtgaagaacaagaagtagcagtggagaaaaccactaagaagttggaggatattcctatcgacagagagtatccagaggtttttccagatgacctgacaacaatgccacctaaaagggatatcgagttccggatcgacttggcacctggaactgcaccgatccacaagaggccttacagaatgggagccaacgagctggcggaagtcaagaagcaagttgatgaacagttacagaagggatacattcgcccgagcacgttgccttggggtgctccggtcatctttgtggaaaagaaagacaaaaccaagaggatgtgcgttgactaccgcgcactcaatgtggttactgttaagaacaagtaccctttgccaaggattgatgatctgttcgatcagctgaaaggagctactgtgttctctaagatagacctgcgatcaggctatcaccagttgaggatccgcgaagaggatattccaaagacagcattcatcactcggtacgacaagtttgtcgtggttttcatcgatgacatacttatctactccaagtccgaggaagaacataagcagcatctccggctagtacttgaaaagttaaaagagcaccagctatatgccaagttcagcaagtgtgacttctggcttaaggaagttcagtttctcggtcacatcgtgaatgctcaaggagtagctgtggatccagcaaatgtggagtcagttacgaaatggaccccaccaaggacagtcactcaggttcggagtttcttaagacttgcgggctattaccgccggttcattgagaacttctctaaaattgctaagccaatgacacagctattgaagaaggaagaaaagtttatctggtctgctgaatgcaataggagttttgaagaactcaaaggacggttggtgtctgcaccagtcttaatcctgcctaatcagacgaaagatttccaggatggcaaagtggtttcttatgcttcacggcagttgcgtcctcatgaaggcagctacccgacgcatgatctggaattggccgcagttgttcatgctttaaagatttggcggcactatctcatcggtaaccgttgtgagcgaagatggttggagctgatcaaggattacgatatgggaatacactaccatcctggcaaggctaatgtggttgcagatgccctgagcaggaagagttactgcaacgtcacatgggtagagcaactatgctgtgaggttcaacgtgatttggaacatctgaaccttggtatagttgagcacggatttgtggttgccctagaggcacagcccacactagtggagcagcgagtaaaggcagaacaccaaaggccagcaggtttgctacagccacttcagattccagaatggaagtgggaagaaatcggaatggatttcattatgggtttgcccaggacgttatcggggcatgattctatttgggtagtcattgatagactcactaaagtggctcacttcattccggtgcatactatctactcagggaagaagttagcagagctttatttggcaagaatcatgtgtctacatggtgtacctaagaagatcgtgtctgatcgaggaagccaattcacctcaaagttctggcagaaattgcaagaagaattgggaacccgtctgaaattcagcacagcgtaccatccacaaactgatggccagactgagcgagtcaatcaaatactagaggatatgttaagagcttgtgcgcttgactttggtggagcatgggacaaaagcttgccgtatgctgagttctcctacaacaacagttaccaggctagtctgcagatggaaccatttgaagcactgtatggacggaagtgtcgtactctgctcttctgggatcagacagaggaacgccagttgtttggtacagaagttttaaatgaagcagaagagaaagttagagctgtcagggaaagtttgagaatcgcgcaatctcgacagaaaagctatgtagacaaccgccgaagagagctcgtttttgaaacaggggattatgtgtatctccgtgtcactccgctcagggagtacatcgcttccaaaccaaaggaaaattggaaccacgctttgtgggaccatacaggatcttggaacgtagaggtgaagttgcttaccagcttgagcttccctccaacatgcttggcatccacaatgtgttccacgtctctcagttga

SEQ ID NO: 14631 - DNA, 4068 bp, Oryza sativa
  Clone ID: TFbOSC32846j.C1.o1.fg
atggagacaaggaatggttcacgcgactcgaacaacgccagtggcagcgaagagccgatcaatggagcacgtgccaacggtgcatctgacaacagtccgtccccaccgcccgagaacccaacaattgctcaggtgttggacaatcagactcagatgatgacaatgatgatgcaacagatgcagcaacagtaccatcaggtgttgcagcaggtgcagcagcaagcacagctgcagcagcagaacctgcagtttggtcctccacctcctcagtccaaactgttagaatttcttcgtgtcaagccgcccaccttctcaagcaccaccaacccaatcgaggcccacgactggcttcatgccattgagaagaagctgaatcttttgcaatgcaacgagcaggagaaggttgcttttgctacacaccagctacaaggtcccgcttctatttggtgggacaactacatggtgacccgtccagctggggcagaggttacttggacagagtttcgtcatagtttcaataaagcacaggttcccgagggaattgtgggacaaaagaagagagagttccgttccctgcaacaaggaaccagaacagttatagagtatttgcatgagttcaaccgcctcgcgcgctacgcccctgaggacgtgcgtaccgatgccgagaagcaggagaagtttatgtctggtcttgatgacgaattgaccaaccagttgatctctagagactatgaggactttgagaagcttgtggacaaggctattcgtcaagaggagcagtgtaacaaaatgacccgtaagaggaaggcagcccagttcaggactccccaggggaagtgtcaaaagcctcgttacacgatgggacgtcacggtggaccttccaccatgattatccgacagcaccgtccctaccacccgggtagcttcaataagacccaccatagtgatagtcacaacaacagtggcagtcacagcagcctcaacccgactccaagtccattaatgattccagctcagtcagatcagccagctctgccagaacagcccaagaggttggtagaaaaacccgaactctgcttcaattgtaacaaacccggacacacggttggaaagtgcccgaagccaagacgtgccggacccaagttcgttcaggcccgtgttaatcatgcatctgcagaggaggcgcagtcagcaccagaggttatattgggcacattccccgtcaactcgacaccggcagtaatattgtttgattctggtgcaacccattcctttatttccaagcgttttgctggtgcacatgggttatctttagtgaagcttaagatacctatgcgagtgcatactcctggaggtggcatgaccacaactcactactgcccatctgtgacagttgaaattcaagggtcgatttttccagccaacctcattcttctcgaatccaaggacctagacaaagacaaaaccaagaggatgtgcgttgactaccgcgcactcaatgaggtcaccatcaagaacaagtatcctttgccaaggattgatgatctgtttgatcagttgaaaggagctacggtgttctctaagatagacctgcgatcaggttatcaccagttgaggatccgcgaagaggatattccaaagacagcattcatcactcggtacgggttgttcgaatgcacagttatgtctttcggactcactaatgcacctgccttcttcatgaatttgatgaacaagtccgaggaagaacataagcagcatcttcggttggtacttgaaaagttaaaagagccccagctatatgccgagttcagcaagtgcgacttctggcttaaggaagttcagtttctcggtcacatcgtgaatgctcaaggagtagctgtggatccagccaatgtgcagtcagttaccaagtggaccccaccaaggacagtcactcaggttcggagtttcttaggacttgcgggctattaccgccggttcattgagaacttctctaaaattgctaagccaatgacacagctattgaagaaggaagaaaagtttatctggtctgctgaatgcaataggagttttgaagaactcaaacgacggttggtgtctgcaccagtcttaatcctgcctgatcagacgaaagatttccaggtctattgtgatgcatctcgccaggggctaggatgtgtgttgatgcaggatggcaaagtggtttcttatgcttcacggcagatgcgtcctcatgaaggcaactacccgacgcatgatctggaattagccgcagttgttcatgctttaaagatttggcggcactatctcatcagtaaccgttgtgaggtatatacagatcacaaaagtctaaagtacatcttcactcaagctgatttgaatctcagacagcgaagatggttggagctgatcaaggattatgatatgggaatacattatcatcccggcaaggctaatgtggttgcagatgccttgagcaggaagagctactgcaatgttgcatgggtagagcaactatgttgcgaggttcaacgcgatctggaacatctgaaccttggtatagttgagcacggattcgtggctgccctagaggcacagcccacactggtggagcaggttcgcatagctcaagcaagtgatcctgaaatagcagagctcaaaaagaacatgagggtcggaaaagcccgaggttttgttgaggacgaacaaggaacaatctggatgggagaaagattgtgtgtacccgaaaacaaggaattaaaagacctgatactaaccgaggctcatcaaactcagtattccattcatcccggtagtactaagatgtaccaagacctcaaagagaagttctggtgggtcagcatgagaagggaaatagctgaattcgtagcactctgtgacgtctgtcaacgagtaaaggcagaacaccaaaggccagcaggtttgctacagccacttcagattccagaatggaagtgggaagaaatcggaatggatttcgtcaccggtttgcccaggacgtcatcggggcatgattctatttgggtagtccgtgaccgactcaccaaagtggctcactttcattcggtgcacactacctactcagggaagaaattagcagaactctatctggcaagaattatgtgtttacatggagtacctaagaagatcgtgtctgatcgaggaagccaattcacttcaaagttctggcagaaattacaagaagaattgggaacccggttgaatttcagcaccgcttaccatccacaaacagatggccagaccgagcgagtcaatcaaatactagaggatatgttgagagcctgtgcgcttgactttggtggggcatgggacaaaagcttgccgtatgctgagttctcgtacaacaacagttaccaagctagtctgcagatggcaccatttgaagcactgtatggacggaggtgtcgtactccgctcttctgggatcagacaggggaacgccagttgtttggtacagaagttttaaatgaggcagaagagaaagtcagagctgttagggaaagattgagaatcgcgcagtctcgggagaaaagctatgcagacaaccgccgaagggagctcgttttccaagtaggggattatgtgtatctccgtgtcactccgctcaggggagtacatcgctttcaaaccaaaggaaagttggcaccacgctttgtgggaccatatcggattttggaacgtagaggtgaagttgcttaccagctcgagcttccctccaacatgcttggcatccataatgtgttccacgtctcccagttgaagaaatgtttgagagttcctgaggaacaggcaagtccggatcaaatcgaaatccaggaagacttgacgtatgtggagaagccaactcgtatcctcgaaaccagcgagagaaagaccagaaacaaagtaataagattctgcaaggttcagtggagccaccactcagaggaagaggccacttgggaaagagaagatgagttgaaggccacccacccgcacctcttcgccagctcttccgaatctcggggtcgagattccgtttaa

SEQ ID NO: 14632 - DNA, 4023 bp, Oryza sativa
  unsure (1)..(4023): unsure at all n locations
  Clone ID: TFbOSC400061j.C1.o1.fg
atggcagcgaagagccgatcaatggagcacgtgccaacggtgcatttgacaacagtccgtctcccaccgcccgagaacccaacaatttgctcaggtgttggacaatcagactcagatgatgacaatgatgatgcaacagatgcagcaacagttccatcaggtgttgacagcagagattatgaggactttgagaagttggtggataaggctatccgtcaggaggagcactgtaacaaaataaaccgtaagagaaaggcagctcagttcaggactccccagngnaagagtcaaaagcctcggttcacgatgggacatcacggtggaccttccaccatgattatccgncagcaccgtccctaccacccgggtaggttcttcaagaaccaccatagtggcagccacaacaacagtgagcagcacagtctcaaccctactccgagttcactaaagattccagctcaatcagttcagccagctctgccagaacagcccaagaggttggtagaaaaacccgaactctgcttcaattgtaacaaacccggacacacggttggaaagtgcccgaagccaagacgtgctggacccaagttcgttcaggcccgtgttaatcatgcatctgcagaggaggcgcagtcagcaccagaggttatattgggcacattccccgtcaactcgacaccggcagtaatattgtttgattctggtgcaacccattccttcatttccaagcgttttgctggtgcacatgggttatctttagtgaagcttaagataccaatgcgagttcatactcctggaggtggcatgaccacaactcactactgcccatctgtgacagttgaaattcaagggtcgatttttccagccaacctcattcttctcgaatccaaggacctagatgtcatacttggaatggattggttgacaaggcacagaggagtgattgattgcgccagccgcaccatcaagttgaccaatgcaaaaggagaggtggtaaccttccagtccccagtgccgcagaagccaaggatcagtttaaaccaggctgctggtgaagaacaagaggtagcagtggagaaaaccactaagaagctggaggatattcccatagtcagagagtatccagaggtttttccggacgatctgaccacaatgccaccaaaaagggatatcgagttccggattgacttggtacctggaactgcaccgatccacaagaggccttacagaatgggagccaacgagttggcggaagtcaagaagcaagttgatgaacagttacagaagggatacatccgcccgagcacgtcgccttggggtgctccggttatctttgtggagaagaaagacaaaaccaagaggatgtgtgttgactaccgcgcactcaatgaggtcaccatcaagaacaagtatcctttgccaaggattgatgatctgttcgatcagctgaaaggagctactgtgttctctaagatagaccttcggtcaggctatcaccagttgaggatccgcgaagaggatattccaaagacagcattcatcactcggtacgggttgttcgaatgcacagttatgtctttcggactcactaatgcacctgccttcttcatgaatttgatgaacaaggtgtttatggaatttctagacaagtttgtcgtggtttttatcgatgacatacttatctactccaagtccgaggaagaacatgagcagcatcttcggctggtacttgaaaagttaaaagagcaccaactatatgccaagttcagcaagtgcgacttctggcttaaggaagttcagtttctcggtcacatcgtgaatgctcaaggagtagctgtggatccagcaaatgtggagtcagttaccaaatggaccccaccaaggacagtcactcaggttcggagtttcttaggacttgcgggctattaccgccggttcattgagaacttctctaaaattgctaagccaatgacacagctattgaagaaggaagaaaagtttatctggtctgctgaatgcaataggagttttgaagaactcaaacgacggttggtgtctgcaccagtcttaatcctgcctgatcagacgaaagatttccaggtctattgtgatgcatctcgccaggggctaggatgtgtgttgatgcaggatggcaaagtggtttcttatgcttcacggcagttgcgtcctcatgaaggcaactacccgacgcatgatctggaattagccgcagttgttcatgctttaaagatttggcggcactatctcatcggtaaccgttgtgaggtatatacagatcacaaaagtctaaagtacatctttactcaacctgatttgaatcttagacagcgaagatggttggagctgatcaaggattatgatatgggaatacattatcatcccggcaaggctaatgtggttgcagatgccttgagcaggaagagtcactgcaacgtcgcatgggtagaggaactatgctgtgaggttcaacgtgatttgggacatttgaaccttggtatagttgagcacggattcgtggctgccctagaggcacagcccacactggtggagcaggttcgcatagctcaagcaagtgatcctgaaatagcagagctcaaaaagaacatgagggttggaaaagcccgaggttttgttgaggacgaacaaggaacaatctggatgggagaaagattgtgtgtacccgaaaacaaggaattaaaagacctaatactaaccgaggctcatcaaactcaatattccattcatcccggcagtaccaaaatgtaccaagacctcaaagaaaagttctggtgggtcagcatgagaagggaaatagctgaattcgtagcactctgcgacgtctgtcaacgagtaaaggcagaacaccaaaggccagcaggtttgctacagccacttcagattccagaatggaagtgggaagaaatcggaatggatttcatcaccggtttgcccaggacgtcatcggggcatgattctatttgggtagtcgttgaccgactcaccaaaatggctcacttcattccggtgcacactacctactcagggaagaaattagcagaactctatctggcaagaatcatgtgtttacatggtgtacctaagaagatcgtgtctgatcgaggaagtcaattcacttcaaagttctggcagaaattgcaagaagaattgggaacccgtctaaacttcagcactgcttaccatccacaaacagatggccagaccgagcgagtcaatcaaatactagaggatatgttgagagcctgtgcgcttgactttggtggagcatgggacaaaagcttaccgtatgctgagttctcgtacaacaacagttaccaagctagtctgcagatggcaccgtttgaagcactgtatggacgaaggtgtcgtactccgctcttctgggatcagacaggggaacgccagttgtttggtacagaagttttaaatgaggcagaagagaaagtcagagctgtcagggaaagattgagaatcgcgcaatctcggcagaaaagctatgcagacaaccgccgaagggagctcgctttcgaaacaggggattatgtgtatctccgtgtcactccgctcaggggagtacatcgcttccaaaccaaaggaaagttggcaccacgctttgtgggaccatacaggatcttggaacgtagaggtgaagttgcttaccagctcgaacttccctccaacatgcttggcatccacaatgtgttccacgtctctcagttgaaaaaatgtttgagagttcctgaggaacaggcaagtccggatcacatcgaaattcaggaagacttgacgtatgtggagaagccaactcgtatcctcgaaaccagcgagagaaagaccagaaacaaagtaataagattctgcaaggttcagtggagccaccactcagaggaagaggccacttgggaaagagaagatgagttgaaggccacccacccgcacctcttcgccagcccttccgaatctcggggtcgagattccgtttaa

SEQ ID NO: 14633 - DNA, 1812 bp, Oryza sativa
  Clone ID: TFbOSC400219j.C1.o1.fg
atggagataaggaatggttcacgcgactcgaacaacgccagtggcagcgaagagccgatcaatggagcacgtgccaacggtgcatctgacaacagtccgtccccaccgcccgagaacccaacaattgctcaggtgttggacaatcagactcagatgatgacaatgatgatgcaacagatgcagcaacagtaccatcaggtgttgcaacaggtgcagcagcaagcacagcagcagcaacagaacctgcagtttggtcctccacctcctcagtccaaactgttagaattccttcgtgtcaagccgcccactttctcaagcaccaccaacccaatcgaggcctatgactggcttcatgccattgagaagaagctgaatcttttgcaatgcaacgagcaggagaaggttgcttttgctacacaccagctacaaggtcccgcttctatttggtgggacaactacatggtgacccgtccagctggggcagaggttacttggacagagtttcgtcatagtttcaataaagcacaggttcccgagggaattgtggcacaaaagaagagagagttccgctccctgcaacaaggaaccagaacagttatagagtatttgcatgagttcaaccgcctcgcgcgctacgcccctgaggacgtgcgtaccgatgccgagaggcaggagaagtttttgtctggtcttgatgatgaattgactaaccagttgatctctagagattatgaggactttgagaagcaggtccacaaggccatccgtcaagaggagcagtgtagcaaaatgaaccgtaagaggaaggcagcccagttcaggactccccaggggaagtgtcagaagcctcgtttcacgatgggacgtcagggtggaccttccaccatgattatccgacagcaccgtccctaccacccgggtaatttcaacaagaacaacaacagtggcagtcacagcagcctcaacccgactccaagtctattaatgattccagctcagtcagatcagccagctcagccagctctgccagaacagcccaagaggttgggagaaaaacccgaactctgcttcaattgtaaccaacccggacacacggttggaaagtgcccgaagccaagacgtgctggacccaagttcgttcaggcccgtgttaatcatgcatctgcagaggaggcgcagtcagcaccagaggttatattgggcacattccccgtcaactcgacaccggcagtaatattgtttgattctggtgcaactcattccttcatttctaagcgttttgctggtgcacatgggttatctttagtgaagcttaagataccaatgcgagttcatactcctggaggtggcatgaccacaactcactactgcccagctgtgacagttgaaattcaagggttgatttttccagccaacctcattcttctcgaatccaaggacctagatgtcatacttggaatggattggttgacaaggcatagaggagtgattgattgcgccagccgcaccatcaagttgaccaatgcaaaaggagaggtggtaaccttccagtctccagtgctgcagaagccaaggatcagtttaaaccaggctgctggtgaagaacaagaggtagcagtggagaaaaccactaagaagctggaggatattcccatagtcagagagtatccagaggtttttccggacgatctgacaacaatgccaccaaaaagggatatcgagttccggattgacttggtacctggaactgcaccgatccacaagaggccttacagaatgggagccagcgagttggcggaagtcaagaagcaa

SEQ ID NO: 14634 - DNA, 4569 bp, Oryza sativa
  Clone ID: TFbOSC400221j.C1.o7.fg
atggagataaggaatggttcacgcgactcgaacaacgccagtggcagcgaagagccgatcaatggagcacgtgccaacggtgcatctgacaacagtccgtccccaccgcccgagaacccaacaattgctcaggtgttggacaatcagactcagatgatgacaatgatgatgcaacagatgcagcaacagtaccatcaggtgttgcaacaggtgcagcagcaagcacagcagcagcaacagaacctgcagtttggtcctccacctcctcagtccaaactgttagaattccttcgtgtcaagccgcccactttctcaagcaccaccaacccaatcgaggcctatgactggcttcatgccattgagaagaagctgaatcttttgcaatgcaacgagcaggagaaggttgcttttgctacacaccagctacaaggtcccgcttctatttggtgggacaactacatggtgacccgtccagctggggcagaggttacttggacagagtttcgtcatagtttcaataaagcacaggttcccgagggaattgtggcacaaaagaagagagagttccgctccctgcaacaaggaaccagaacagttatagagtatttgcatgagttcaaccgcctcgcgcgctacgcccctgaggacgtgcgtaccgatgccgagaggcaggagaagtttttgtctggtcttgatgatgaattgactaaccagttgatctctagagattatgaggactttgagaagcaggtccacaaggccatccgtcaagaggagcagtgtagcaaaatgaaccgtaagaggaaggcagcccagttcaggactccccaggggaagtgtcagaagcctcgtttcacgatgggacgtcagggtggaccttccaccatgattatccgacagcaccgtccctaccacccgggtaatttcaacaagaacaacaacagtggcagtcacagcagcctcaacccgactccaagtctattaatgattccagctcagtcagatcagccagctcagccagctctgccagaacagcccaagaggttgggagaaaaacccgaactctgcttcaattgtaaccaacccggacacacggttggaaagtgcccgaagccaagacgtgctggacccaagttcgttcaggcccgtgttaatcatgcatctgcagaggaggcgcagtcagcaccagaggttatattgggcacattccccgtcaactcgacaccggcagtaatattgtttgattctggtgcaactcattccttcatttctaagcgttttgctggtgcacatgggttatctttagtgaagcttaagataccaatgcgagttcatactcctggaggtggcatgaccacaactcactactgcccagctgtgacagttgaaattcaagggttgatttttccagccaacctcattcttctcgaatccaaggacctagatgtcatacttggaatggattggttgacaaggcatagaggagtgattgattgcgccagccgcaccatcaagttgaccaatgcaaaaggagaggtggtaaccttccagtctccagtgctgcagaagccaaggatcagtttaaaccaggctgctggtgaagaacaagaggtagcagtggagaaaaccactaagaagctggaggatattcccatagtcagagagtatccagaggtttttccggacgatctgacaacaatgccaccaaaaagggatatcgagttccggattgacttggtacctggaactgcaccgatccacaagaggccttacagaatgggagccagcgagttggcggaagtcaagaagcaagtcgatgaacagttacagaagggatacatccgcccgagcacgtcgccttggggtgctccggttatctttgtggagaagaaagacaaaaccaagaggatgtgcgttgactaccgcgcactcaatgaggtcaccatcaagaacaagtatcctttgccaaggattgatgatctgtttgatcagttgaaaggagctactgtgttctctaagatagacctgcgatcaggctatcaccagttgaggatccgcgaagaggatattccaaagacagcattcatcactcggtacgggtcgttcgaatgcacagttatgtctttcggactcactaatgcacctgccttcttcatgaatttgatgaacaaggtgtttatggaatttctagacaagtttgtcgtggttttcatcgatgacatacttatctactccaagtccgaggaagaacatgagcagcatcttcggctggtacttgaaaagttaaaagagcaccagctatatgccaagttcagcaagtgcgacttctggcttaaggaagttcagtttctcggtcacatcgtgaatgctcaaggagtagccgtggatccagcaaatgtggagtcagttaccgagtggaccccaccaaggacagtcactcaggttcggagtttcttaggacttgcgggctattaccgccggttcattgagaacttctctaaaattgctaagccaatgacacagctattgaagaaggaagaaaagtttatctggtctgctgaatgcaataggagttttgaagaactcaaacgacggttggtgtctgcaccagtcttaaccctgcctgatcagacgaaagatttccaggtctattgtgatgcatctcgccagggggtaggatgtgtgttgatgcaggatggcaaactggtttcttatgcttcacggcagttgcgtcctcatgaaggcaactacccgacgcatgatctggaattggccgcagttgttcatgctttaaagatttggcggcactatctcatcggtaaccgttgtgaggtatatacagatcacaaaagtctaaagtacatcttcactcaacctgatttgaatctcagacagcgaagatggttggagctgatcaaggattatgatatgggaatacattatcatcccggcaaggctaatgtggttgcagatgccttgagcaggaagagctactgcaatgttgcatgggtagagcaactatgctgtgaggttcaacgtgatttggaacatctgaaccttgggatagttgagcacggattcgtggctgccctagaggcacagcccacactggtggagcaggttcgcatagctcaagcaagtgatcctgaaatagcagagctcaaaaagaacatgagagttggaaaagcccgaggttttgttgaggatgaacaaggaacaatctggatgggagaaagattgtgtgtacccgaaaacaaggaattaaaagacctgatactaaccgaggctcatcaaactcaatattccattcatcccggcagtaccaaaatgtaccaagacctcaaagaaaagttctggtgggtcagcatgagaagggaaatagctgaattcgtagcactctgtgacgtctgtcaacgagtaaaggcagaacaccaaaggccagcaggtttgctacagccacttcagattccagaatggaagtgggaagaaatcggaatggatttcatcaccggtttgcccaggacgtcatcggggcatgattctatttgggtagtcgttgaccgactcaccaaagtggctcacttcattccggtgcacactacctactcagggaagaaattagcagaactctatctggcaagaattatgtgtttacatggtgtacctaagaagatagtgtctgatcgagggagccaattcacctcaaagttctggcagaaattacaagaagaattgggaacccggttgaatttcagcactgcttaccatccacaaacagatggccagaccgagcgagtcaatcaaattctagaggatatgttgagagcctgtgcgcttgactttggtggagcatgggacaaaagcttgccgtatgctgagttctcttacaacaacagttaccaagctagtctgcagatggcaccgtttgaagcactgtatggacgaaggtgtcgtactccgctcttctgggatcagacaggggaacgccagttgtttggtacagaagttttaaatgaggcagaagagaaagtcagagctgttagggaaagattgagaatcgcgcagtctcggcagaaaagctatgcagacaaccgccgaagagagctcgctttcgaaacaggggattatgtgtatctccgtgtcactccgctcaggggagtacatcgcttccaaaccaaaggaaagttggcaccacgctttgtgggaccatacaggatcttggaacgtagaggtgaagttgcttaccagctcgagcttccctccaacatgcttggcatccacaacgtgttccacgtctctcagttgaagaaatgtttgagagttcctgaggaacaggcaagtccggatcacatcgaaattcaggaagatctgacgtatgtggagaagccgattcgtatcctcgaaaccagcgagagaaggaccagaaacaaagtaataagattctgcaaggttcagtggagccaccactcagaggaagaggccacttgggaaagagaagatgagttgaaggccacccacccgcacctcttcgccagctcttccgaatctcggggtcgagattccgtttaa

SEQ ID NO: 14635 - DNA, 3786 bp, Oryza sativa
  Clone ID: TFbOSC400271j.C1.o5.fg
atggcagttaagtactggttcacgggaaaccctgggagacttaccgtgcttaccacaagcgggactgttttaccgttttcaactactggttttaaatgcctgctttatgcaaatgaacctttagccttttttggttataccctgcatcatacctcctcttccgagctgaagatcttcctagttggagctgtcttgttgaggtttgttgcttgtgggttagtcggcggtcgatatcatgtgtcagtgatggtgaagacaaggaatggttcccatgactccaacaacgctagtggcagcgaagagcggatcagtggaccatgtgccagcgatacattcgacaacagctcatctccatcgcccgagaacccaacgattgctcaggtgttggaaaatcagactcagatgatgacaatgatgatgcaacagatgcagcaacagtaccatcaggtgttgcagcaggtgcagcagcaagcagcagcagaacttgcagcgtggtcttccgcctccctgctgggacagaagttacttggtcagagttttgccagagttttaataaggcacaggttcccgagggaatcatggcacaaaagaagagagagttctgttccctgcaacaagaaaccagaacagttagagtatttgcatgagttcaaccgcctcgcgcgctacgcccctaaggacgtgcgtaccgatgccgagaggcaggagaagtttctgtctggtcttgatgatgaattgaccaaccagttgatccctagagattatgaggactttgagaagctggtggataaggctatccgtcaggaggagttgtgtaacaaaatgaaccgtaagaggaaggcagctcagttcaggactccccaaggggagagtcagaagccttgtttcacgatgggacatcagggtggaccttccaccatgattatccggcagcaccgtccctaccacccgggtagcttcaacaagaaccaccataatggcagtcacaacaacagtgagcagcacagcctcaaccctactccgagttcactaatgattctagctcaatcagttcagccagctctgccagaacagcccaagaggttgggagaaaagcccgaactctgcttcaattgtaacaaacccggacacacggttggaaagtgcccgaagccaagacatgctggacccaagtttgtgcaggcccgtgtcaatcatgcgtctgcagaggaggcacagtcagcaccagaggttatattgggcacatttcccatcaactcgacaccggcagtaatattgtttgattctggtgcaactcattccttcatttccaagcgttttgctggtgcacatgggttatcttttgtgaagcttaagataccaatgcgagttcatactcctggaggtggcatgaccacaactcactactgcccatccgtgacagttgaaatccaagggttgatttttccagccaacctcattcttctcgaatccaaggacctagatgttatacttgggatggattggttgacacggcacaaaggagtgattgattgcgctagccgcatcatcaagttgaccaatgcgaaaggagaagtggtaaccttccagtctccagtgccgcagaagccagggatcagtttgaaccaggctgttggtgaaggacaagaggtagcagtggagaaaaccactaagaagttggaggatattcccatagtcagagagtatccagaggtttttctggatgatctgacaacaatgccaccaaaaagggatatcgagttccggattgacttggcacctggaactgcaccgatccacaagaggccttacataatgggagccaacgagttggcggaagacaagtttgtcgtggttttcatcgatgacatactgatctactccaagtcccaggaagaacatgagcagcatcttcggttggaactcgaaaagttaaaagagcaccagctatatgccaagttcggcaagtgtgacttctggcttaaggaagttcagtttctcggtcacatcgtgaatgctcaaggagtggctgtggatccagcaaatgtggagtcagttaccaaatggacctcaccaaagacagttactcagattcggagtttcttaggactcgcgggctattaccgccggttcattgagaacttctctaaaattgccaagccaatgacacagctcttgaagaaggaggaaaagtttatctggtctgctgaatggaataggagttttgaagaactcaaacgacggttggggctaggatgtgtgttgatgcaagatggcaaagtggtttcttatgcttcacgacagttgcgtcctcatgaaggcaactacccgacccatgatctggaattggccgcagttgttcatgctttaaagatttggcggcactatcttatcggtaaccgttgtgaggttcgcatagctcaagcaagtgatcctgagatagccgagctcaaaaagaacatgagagttggaaaagcccgaggttttgttgaggatgaacaaggaacaatctggatgggagaaagattgtgtgtacctaaaaacaaggagttaaaggacttgatactgacagaagctcatcaaactcggtattcaattcatcccggcagtactaagatgtaccaagacctcaaggaaaaattctggtgggtaagcatgagaagggaaatagctgaatttgtcgcactctgtgacgtctgccagcgagtaaaggcagaacacgaaaggccagcaggtctgctacagccccttcagattccagaatggaagtgggaagaaattggaatggactttatcaccggcttgcccaggacatcatctggacatgattccatttgggtagtcgttgatcgactcactaaagtggctcacttcattccggtgcatactacctactcagggaagaaaagccaattcacctcaaagttctggcagaaattgcaagaagaattgggaacccgtctgaacttcagcacagcctaccatccgcagactgatggccagaccgagcgagttaaccaaatattggaggatatgttgagagcttgtgcgcttgattttggtggagcatgggacaaaagcttgccatatgctgagttctcctacaacaacagttaccaggctagtctgcaaatggcaacgtttgaagcattgtatggacggaggtgtcgcactccgctcttctggaatcagacaggggaacgccagttgtttggtacagaagttttaaatgaggcagaagagaaagtcagagctgtcatggaaagattgagaatcgcgcaatctcgacagaaaagctatgcagacaatcgtcaaagggagctcactttcgaagcaggggactatgtgtaccttcgtgtcactccgctcagaggagtacaccgcttccaaaccaaaggaaagttggcaccacgctttgtgggaccatatcgggttttggaacgtagaggtgaagttgcttaccagcttgagcttccctccaacatgtttggcattcataatgtgttccacgtctcacagttgaagaaatgtttgagagttcctgaggaacaggcaagtccggatcaaatcgaaattcaggaagatctgacgtatgtggagaagccgactcgtatcctcgaaatcagtgagagaaggaccaggaacaaagtaatcagattctgcaaggttcagtggagccatcactcagagaaagaggccacttggaaaagagaagatgagttgaaggccacccatccgcaccttttcgccagctcttccgaatctcggggccgagattccgtttaa

SEQ ID NO: 14636 - DNA, 4326 bp, Oryza sativa
  Clone ID: TFbOSC400535j.C1.o1.fg
atggagacaaggaatggttcacgcgactcgaacaacgccagtggcagcgaaaagccgatcaatggagcacgtgccaacagtgcatctgacaacagtccgtccccaccgcccgagaacccaacaattgctcaggtgttggacaatcagactcagatgatgacaatgatgatgcaacagatgcagcaacagtaccatcaggtgttgcaacaggtgcagcagcaagcacagctgcagcagcagaacctgcagtttggtcctccacctcctcagtccaaactgttagaatttcttcgtgtcaagccgcccaccttctcaagcaccaccaacccaatcgaggcccacgactggcttcatgccattgagaagaagctgaatcttttgcaatgcaacgagcaggagaaggttgcttttgctacacaccagctacaaggtcccgcttctatttggtgggacaactacatggtgacccgtccagctggggcagaggttacttggacagagtttcgtcatagtttcaataaagcgcaggttcccgagggaattgtggcacaaaagaagagagagttccgttccctgcaacaaggaaccagaacagttatagagtatttgcatgagttcaaccgcctcgcgcgctacgcccctgaggacgtgcgtaccgatgccgagaggcaggagaagtttctgtcgggtcttgatgatgaattgaccaaccagttgatctctagagattatgaggactttgagaagcttgtggacaaggctatccgtcaagaggagcagtgtaacaaaatgaaccgtaagaggaaggcagcccagttcaggactccccaggggaagtgtcagaagcctcgtttcacgatgggacatcagggtggaccttccaccatgattatccggcagcaccgtccctaccacccgggtaatttcaacaagaacaacaacagtggcagtcacagcagcctcaacccgactccaagtccattaatgattccagctcagtcagatcagtcagatcagctagctcagccagctctgccagaacagcccaagaggttgggagaaaagcccgaactctgcttcaattgtaacaaacccggacacacggttggaaagtgcccgaagccaagacgtgctggacccaagtttgttcaggcccgtgtcaatcatgcgtctgcagaggaggcgcagtcagcaccagaggttatattgggcacattccccgtcaactcgacaccggcagtaatattgtttgattctggtgcaacccattccttcatttccaagcgttttgctggtgcacatgggttatccttagtgaagcttaagataccaatgcgagtgcatactcctggaggtggcatgaccacaactcactactgcccatctgtgacagttgaaattcaagggttgatttttccagccaacctcattcttctcgaatccaaggacctagatgtcatacttggaatggattggttaacaaggcacagaggagtgattgattgcgccagccgcaccatcaagttaaccaatgcaaaaggagaggtggtaaccttccagtctctagtgccgcggaagccagggatcagtttaaaccaggttgctggtgaagaacaagaggtagcagtggagaaaaccactaagaagctggaggatattcccatagtcagagagtatccagaggtttttccggacgatctgacaacaatgccaccaaaaagggatatcgagttccggattgacttggtacctggaactgcaccgatccacaagaggccttacagaatgggagccagcgagttggcggaagtcaagaagcaagtcgatgaacagttacagaagggatacatccgcccgagcacgtcgccttggggtgctccggttatctttgtggagaagaaagacaaaaccaagaggatgtgcgttgactaccgcgcactcaatgaggtcaccatcaagaacaagtatcctttgccaaggattgatgacctgtttgatcaattgaaaggagctactgtgttctctaagatagacctgcgatcaggctatcaccagttgaggatccgcgaagaggatattccaaagacagcattcatcactcggtacgggttgttcgaatgcacagttatgtctttcggactcactaatgcacctgccttcttcatgaatttgatgaacaaggtgtttatggaatttctagacaagtttgtcgtggttttcatcgatgacatacttatctactccaagtccgaggaagaacatgagcagcatcttcggctggtacttgaaaagttaaaagagcaccagctatatgccaagttcagcaagtgcgacttctggcttaaggaagttcagtttctcggtcacatcgtgaatgctcaaggagtagctgtggatccagcaaatgtggagtcagttaccaaatggaccccaccaaggacagtcactcaggatggcaaagtggtttcttatgcttcacggcagttgcgtcctcatgaaggcaactacccgacgcatgatctggaattagccgcagttgttcatgctttaaagatttggcggcactatctcatcggtaaccgttgtgaggtatatacagatcacaaaagtctaaagtacatctttactcaacctgatttgaatctcagacagcgaagatggttggagctaatcaaagattatgatatgggaatacactatcatcccggcaaggctaatgtggttgcagatgccttgagcaggaagagctactgcaatgttgcatgggtagagcaactatgttgtgaggttcaacgcgatttggaacatctgaaccttggtatagttgagcacggattcgtggctgccctagaggcacagcccacactggtggagcaggttcgcatagctcaagcaagtgatcctgaaatagcagagctcaaaaagaacatgagggttggaaaagcccgaggttttgttgaggacgaacaagggacaatctggatgggagaaagattgtgtgtacccgaaaacaaggaattaaaagacctgatactaaccgaggctcatcaaactcagtattccattcatcccggtagtactaaaatgtaccaagacctcaaagaaaagttctggtgggtcagcatgagaagggaaatagctgaattcgtagcactatgtgacgtctgtcaacgagtaaaggcagaacaccaaaggccagcaggtttgctacagccacttcagattccagaatggaagtgggaagaaatcggaatggatttcatcaccggtttgcccaggacgtcatcggggcatgattctatttgggtagtcgttgaccgactcaccaaagtggctcacttcattccggtgcacactacctactcagggaagaaattagcagaactctatctatcaagaatcatgtgtttacatggtgtacctaagaagatcgtgtctgatcgaggaagccaattcacttcaaagttctggcagaaattacaagaagaattgggaacccgtctaaacttcagcactgcttaccatccacaaacagatggccagaccgagcgagtcaatcaaatactagaggatatgttgagagcctgtgcgcttgactttggtggagcatgggacaaaagcttgccgtatgctgagttctcttacaacaacagttaccaagctagtctgcagatggcaccgtttgaagcactgtatggacggaggtgtcgtactccgctcttctgggatcagacaggggaacgccagttgtttggtacagaagttttaaatgaggcagaagagaaagtcagagctgttagggaaagattgagaatcgcgcaatctcggcagaaaagctatgcagacaaccgccgaagggagctcgttttccaagtaggggattatgtgtatctccgtgtcactccgctcaggggagtacaccgcttccaaaccaaaggaaagttggcaccacgctttgtgggaccatatcggattttggaacgcaggggtgaagttgcttaccagcttgagcttccctccaacatgcttggcatccataatgtgttccacgtctcccagttgaagaaatgtttgagagttcctgaggaacaggcaagtccggatcaaatcgaaatccaggaagacttgacgtatgtggagaagccaactcgtatcctcgaaaccagcgagagaaagaccagaaacaaagtaataagattctgcaaggttcagtggagtcaccactcagaggaagaggccacttgggaaagagaagatgagttgaaggccacccacccgcacctcttcgccagctcttccgaatctcggggtcgagattccgtttaa

SEQ ID NO: 14637 - DNA, 4575 bp, Oryza sativa
  Clone ID: TFbOSC400563j.C1.o6.fg
atggagataaggaatggttcacgcgactcgaacaacgccagtggcagcgaagagccgatcaatggagcacgtgccaacggtgcatctgacaacagtccgtccccaccgcccgagaacccaacaattgctcaggtgttggacaatcagactcagataatgacaatgatgatgcaacagatgcagcaacagtaccatcaggtgatgcagcaggtgcagcagcaagcacagctgcagcagcagaacctgcagtttggtcctccacctcctcagtccaaactgttagaatttcttcgtgtcaagccgcccactttctcaagcaccaccaacccaatcgaggcccacgactggcttcatgccattgagaagaagctgaatcttttgcaatgcaacgagcaggagaaggttgcttttgctacacaccagctacaaggtcccgcttctatttggtgggacaactacatggtgacccgtccggctggggcagaggttacttggacagagtttcgtcatagtttcaataaagcacaggttcccgagggaattgtgggacaaaagaagagagagttccgttccctgcaacaaggaaccagaacagttatagagtatttgcatgagttcaaccgcctcgcgcgctacgcccctgaggacgtgcgtaccgatgccgagaagcaggagaagtttatgtctggtcttgatgatgaattgaccaaccagttgatctctagagactatgaggactttgagaagcttgtggacaaggctattcgtcaagaggagcagtgtaacaaaatgaaccgtaagaggaaggcagcccagttcaggactccccaggggaagtgtcagaagcctcgttacacgatgggacgtcacggtggaccttccaccatgattatccgacagcaccgtccctaccacccgggtagcttcaataagacccaccatagtgatagtcacaacaacagtgagcagcacagcctcaaccctactccgagttcactaaagattccagctcaatcagttcagccagctctgccagaacagcccaagaggttgggagaaaaacccgaactctgcttcaattgtaacaaacccggacacacggttggaaagtgcccaaagccaagacgtgctggacccaagttcgttcaggcccgtgttaatcatgcatctgcagaggaggcgcagtcagcaccagaggttatattgggcacattccccgtcaactcgacaccggcagtaatattgtttgattctggtgcaacccattccttcatttccaagcgttttgctggtgcacatgggttatctttagtgaagcttaagataccaatgcgagttcatactcctggaggtggcatgaccacaactcactactgcccatctgtgacagttgaaattcaagggttgatttttccagccaacctcattcttctcgaatccaaggacctagatgtcatacttggaatggattggttggcaaggcacagaggagtgattgattgcgccagccgcaccatcaagttgaccaatgcaaaaggagaggtggtaatcttccagtctccagtgccgcagaagccagggattagtttaaaccaggctgctggtgaagaacaagaggtagcagtggagaaaaccactaagaaactagaggatattcctatagtcagagagtatccagaggtttttccggatgatctgacaacaatgccaccaaaaagggatatcgagttccggatagacttggtaactggaactgcaccgatccacaagaggccttacagaatgggagccagcgagttggcggaagtcaagaagcaagtcgatgaacagttacagaagggatacatccgtccgagcacgtcgccttggggtgctccggttatctttgtggagaagaaagacaaaaccaagaggatgtgcgttgactaccgcgcactcaatgaggtcactattaagaacaagtaccctttgccaaggattgatgatctgttcgatcagctgaaaggagctactgtgttctctaagatagacctgcgatcaggttatcaccagttgaggatccgcgaagaggatattccaaagacagcattcatcactcggtacgggttgttcgaatgcacagttatgtctttcggactcactaatgcacctgccttcttcatgaatttgatgaacaaggtgtttatggaatttctagacaagtttgttgtggttttcatcgatgacatacttatctactccaagtccgaggaagaacatgagcagcatcttcggctggtacttgaaaagttaaaagagcaccagctatatgccaagttcagcaagtgcgacttctggcttaaggaagttcagtttctcggtcacatcgtgaatgctcaaggagtagctgtggatccagcaaatgtggagtcagttaccaaatggaccccaccaaggacagtcactcaggttcggagtttcttaggacttgcgggttattaccgccggttcattgagaacttctctaaaattgctaagccaatgacacagctattgaagaaggaagaaaagtttatctggtctgctgaatgcaataggagttttgaagaactcaaacgacggttggtgtctgcaccagtcttaatcctgcctgatcagacgaaagatttccaggtctattgtgatgcatctcgccaggggctaggatgtgtgttgatgcaggatggcaaagtggtttcttatgcttcacggcagttgcgtccccatgaaggcaactacccgacgcacgatctggaattggccgcagtcgttcatgctttaaagatttggcggcactatctcatcagtaaccgttgtgaggtatatacagatcacaaaagtctaaagtacatcttcacccaacctgatctgaatccccgacagcgaagatggttggagctaattaaagattatgatatgggaatacactatcatcccggcaaggctaatgtggtagcagatgccttgagcaggaagagttactgcaacgtcgcatgggtagaggaactatgctgtgaggtacaacgtgatttggaacatttgaaccttggtatagttgagcacggattcgtggctgccctagaggcacagcccacactggtggagcaggttcgcatagctcaagcaagtgatcctgaaatagcagagctcaaaaagaacatgagagttggaaaagcccgaggttttgttgaggatgaacaaggaacaatctggatgggagaaagattgtgtgtacccgaaaacaaggaattaaaagacctgatactaaccgaggctcatcaaactcaatattccattcatcccggcagtaccaaaatgtaccaagaactcaaagaaaagttctggtgggtcagcatgagaagggaaatagctgaattcgtagcactctgtgacgtctgtcaacgagtaaaggcagaacaccaaaggccagcaggattgctacagccacttcagattccagaatggaagtgggaagaaatcggaatggatttcatcaccggtttgcccaggacgtcatcggggcatgattctatttgggtagtcgttgaccgactcaccaaagtggctcacttcattccggtgcacactacctactcagggaagaaattagcagaactctatctggcaagaattatgtgtttacatggtgtacctaagaagatcgtgtctgatcgaggaagccaattcacttcaaagttctggcagaaattacaagaagaattaggaacccggttgaatttcagcactgcttaccatccacaaacagatggccagactgagcgagtcaatcaaatactagaggatatgttgagagcatgtgcgcttgactttggtggagcatgggacaaaagcttaccgtatgctgagttctcgtacaacaacagttaccaagctagtctgcagatggcaccatttgaagcactgtatggacgaaggtgtcgtactccgctcttctgggatcagacaggggaacgccagttgtttggtacagaagttttaaatgaggcagaagagaaagtcagagctgtcagggaaagattgagaatcgcgcagtctcggcagaaaagctatgcagacaaccgccgaagggagctcgctttcgaaacaggggattatgtgtatcttcgtgtcactccgctcagaggagtacaccgtttccaaaccaaagggaagttggcaccacgctttgtgggaccatacaggatcttggaacgtagaggtgaagttgcttaccagctcgagcttccctccaacatgcttggcatccacaacgtgttccacgtctctcagttgaagaaatgtttgagagttcctgaggaacaggcaagtccggatcaaatcaaaatccaggaagacttgacgtatatggagaagccgactcgtatcctcgaaaccagcgagagaaggaccagaaacaaagtaataagattctgcaaggttcagtggagccaccactcagaggaagaggccacttgggaaagagaagatgagttgaaggccacccacccgcacctcttcgccagctcttccgaatctcggggtcgagattccgtttaa

SEQ ID NO: 14638 - DNA, 1485 bp, Oryza sativa
  Clone ID: TFbOSC400719j.C1.o30.fg
atggcagttaaggaccggttcacgggaaaccctgggagacttaccgtgcttaccacaagcgggagtggagttgaagttcttctcagttggagccgtctcagagaggttggtttcgtcgctgccgtcaagatggagataaggaatggttcacgcgactccaacaacgccagtggcagcgaagagctgatcaatggagcacgtgccaacagtgcatctgacaacagtccgtccccaccgcccgagaacccaacaattgctcaggtgttggacaatcagactcagatgatgacaatgatgatgcaacagatgcagcaacagtaccatcaagtgttgcaacaggtgcagcagcaagcacagcagcagcagcagaacctgcagtttggtcctccacctcctcagtccaaactgttagaatttcttcgtgtcaagccgcccactttctcatgcaccaccaacccaatcgaggcccacgactggcttcatgccattgagaagaagctgaatcttttgcaatgcaacgagcaagagaaggttgcttttgctacacaccagctgcaaggtcccgcttctgtttggtgggacaactacatggtgacccgtctagctggggcagaggttacttggacagagttttgtcatagtttcaataaagcacaggttcccgagggaattgtggcacaaaagaagagagagttccgttccctgcaacaaggaaccagaacagttatagagtatttgcatgagttcaaccgcctcgcgcgctacgcccctgaggacgtgcgtacagatgacgggaggcaggagaagtttctgtctggtcttgatgatgaattgactaaccagttgatctctagagattatgaggactttgagaagttggtggataaggctatccgtcaggaggagcactgtaacaaaataaaccgtaagaggaaggcagctcagttcaggactccccaagggaagagtcagaagcctcgtttcacgatgggacgtcacggtggaccttccaccatgattatccggcagcaccgtccctaccacccgggtagcttcaacaagaaccaccatagtggcagtcacaacaacagtgagcagcacagcctcaaccctactccgagttcactaaagattccaacccaatcagttcagccagctctgccagaacagccaaagaggttgggagaaaaacccgaactctgcttcaattgtaacaaacccggacacacggttggaaagtgcccgaagccaagacgtgctggacccaagttcgttcaggcccgtgttaatcatgcatctgcagaggaggcgcagtcagcaccaaaggttatattgggcacattccccgtcaactcgacaccggcagtaatattgtttgattctggtgcaacccattccttcatttccaagcgttttgctggtgcacatgggttatctttagtgaagcttaagataccaatgcgagttcatactcctgaagcttaa

SEQ ID NO: 14639 - DNA, 4578 bp, Oryza sativa
  Clone ID: TFbOSC400746j.C1.o1.fg
atggagataaggaatggttcacgcgactcgaacaacgccagtggcagcgaagagccgatcaatggagcacgtgccaacggtgcatctgacaacagtccgtccccaccacccgagaacccaacaattgctcaggtgttggacaatcagactcagatgatgacaatgatgatgcaacagatgcagcaacagtaccatcaggtgttgcagcaggtgcagcagcaagcacagctgcagcagcagaacctgcagtttggtcctccacctcctcagtccaaactgttagaatttcttcgtgtcaagccgcccactttctcaagcaccaccaacccaatcgaggcccacgactggcttcatgccattgagaagaagctgaatcttttgcaatgcaacgagcaggagaaggttgcttttgctacacaccagctacaaggtcccgcttctatttggtgggacaactacatggtgacccgtccagctggggcagaggttacttggacagagtttcgtcatagtttcaataaagcacaggttcccgagggaattgtggcacaaaagaagagagagttccgttccctgcaacaaggaaccagaacagttatagagtatttgcatgagttcaaccgcctcgcgcgctacgcccctgaggacgtgcgtaccgatgctgagaggcaggagaagtttctgtcgggtcttgatgatgaattgaccaaccagttgatctctagagattatgaggactttgagaagcttgtggacaaggctatccgtcaagaggagcagtgtaacaaaatgaaccgtaagaggaaggcagcccagttcaggactccccaggggaagtgtcagaagcctcgtttcacgatgggacatcagggtggaccttccaccatgattatccggcagcaccgtccctaccacccgggtaatttcaacaagaacaacaacagtggcagtcacagcagcctcaacccgactccaagtccattaatgattccagctcagtcagatcagtcagatcagctagctcagccagctctgccagaacagcccaagaggttgggagaaaaacccgaactctgcttcaattgtaacaaacccggacacacggttggaaagtgcccgaagccaagacatgctggacccaagttcgttcaggcccgtgttaatcatgcatctgcagaggaggcgcagtcagcaccagaggttatattgggcacattccccgtcaactcgacaccggcagtaatattgtttgattctggtgcaacccattccttcatttccaagcgttttgctggtgcacatgggttatccttagtgaagcttaagataccaatgcgagtgcatactcctggaggtggcatgaccacaactcactactgcccatctgtgacagttgaaattcaagggttgatttttccagccaacctcattcttctcgaatccaaggacctagatgtcatacttggaatggattggttaacaaggcacagaggagtgattgattgcgccagccgcaccatcaagttaaccaatgcaaaaggagaggtggtaaccttccagtctctagtgccgcggaagccagggatcagtttaaaccaggctgctggtgaagaacaagaggtagcagtggagaaaaccactaagaagctggaggatattcccatagtcagagagtatccagaggtttttccggatgatctgacaacaatgccaccaaaaagggatatcgagttccggattgacttggtacctggaactgcaccgatccacaagaggccttacagaatgggagccaacgagttggcggaagtcaagaagcaagttgatgaacagttacagaagggatacatccgcccgagcacgtcgccttggggtgctccggttatctttgtggaaaagaaagacaaaaccaagaggatgtgcgtggactaccgcgcactcaatgaggtcactattaagaacaagtaccctttgccaaggattgatgatctgttcgatcagctgaaaggagctactgtgttctctaagatagaccttcggtcaggctatcaccagttgaggatccgcgaagaggatattccaaagacagcattcatcactcggtacgggttgttcgaatgcacagttatgtctttcggactcactaacgcacctgccttcttcatgaatttgatgaacaaggtgtttatggaatttctagacaagtttgtcgtggttttcatcgatgacatacttatctactccaagtccgaggaagaacatgagcagcatcttcggctggtacttgaaaagttaaaagagcaccagctatatgccaagttcagcaagtgcgacttctggcttaaggaagttcagtttctcggtcacatcgtgaatgctcaaggagtagctgtggatccagcaaatgtggagtcagttaccaagtggaccccaccaaggacagtcactcaggttcggagtttcttaggacttgcgggttattaccgccggttcattgagaacttctctaaaattgctaagccaatgacacagctattgaagaaggaagaaaagtttatctggtctgctgaatgcaataggagttttgaagaactcaaacgacggttggtgtctgcaccagtcctaatcctgcctgatcagacgaaagattttcaggtctattgtgatgcatctcgccaggggctaggatgtgtgttgatgcaggatggcaaagtggtttcttatgcttcacggcagttgcgtcctcatgaaggcaactacccgacgcatgatctggaattagccgcagttgttcatgctttaaagatttggcggcactatctcatcggtaaccgttgtgaggtatatacagatcacaaaagtctaaagtacatcttcacccaacctgatctgaatctccgacaacgaagatggttggagctaatcaaagattatgatatgggaatacactatcatcccggcaaggctaatgtggtagcagatgccttgagcaggaagagttactgcaacgtcgcatgggtagaggaactatgctgtgaggttcaacgtgatttggaacatttgaaccttggtatagttgagcacggattcgtggctgccctagaggcacagcccacactggtggagcaggttcgcatagctcaggcaagtgatcctgaaatagccgagctcaaaaagaacatgagggtcggaaaagcccgaggttttgttgaggatgaacaaggaacaatctggatgggagaaagattgtgtgtacccgaaaacaaggaattaaaagacctgatactaaccgaggctcatcaaactcaatattccattcatcccggtagtactaagatgtaccaagacctcaaagaaaaattctggtgggtcagcatgagaagggaaatagctgagttcgtagcactctgtgacgtctgtcaacgagtaaaggcagaacaccaaaggccagcaggtctgctacagccacttcagattccagaatggaagtgggaagaaatcggaatggatttcatcaccggtttgcccaggacgtcatcggggcatgattctatttgggtagtcgttgaccgactcaccaaagtggctcacttcattccggtgcacactacctactcagggaagaaattagcagaactctatctggcaagaattatgtgtttacatggtgtacctaagaagatcgtgtctgatcgaggaagccaattcacttcaaagttctggcagaaattacaagaagaattgggaacccggttgaatttcagcaccgcttaccatccacaaacagatggccagaccgagcgagtcaatcaaatactagaggatatgttgagagcctgtgcgcttgactttggtggagcatgggacaaaagcttgccgtatgctgagttctcttacaacaacagttaccaagctagtctgcagatggcaccgtttgaagcactgtatggacgaaggtgtcgtactccgctcttctgggatcagacaggggaacgccagttgtttggtacagaagttttaaatgaggcagaagagaaagtcagagctgttagggaaagattgagaatcgcgcaatctcggcagaaaagctatgcagacaaccgccgaagggagctcgttttccaagtaggggattatgtgtatctccgtgtcactccgctcaggggagtacaccgcttccaaaccaaaggaaagttggcaccacgctttgtgggaccatatcggattttggaacgcaggggtgaagttgcttaccagcttgagcttccctccaacatgcttggcatccataatgtgttccacgtctcccagttgaagaaatgtttgagagttcctgaggaacaggcaagtccggatcaaatcgaaattcaggaagatctgacgtatgtggagaagccgactcgtatcctcgaaaccagcgagagaaggaccagaaacaaagtaataagattctgcaaggttcagtggagccaccactcagaggaagaggccacttgggaaagagaagatgagttgaaggccacccacccgcacctcttcaccagctcttccgaatctcggggtcgagattccgtttaa

SEQ ID NO: 14640 - DNA, 6047 bp, Oryza sativa
  Clone ID: TFbOSC400770j.C1.o18.np
atggcggccggacctcccgcgcctattccttccccaccggccgctctctcccccttccaaccctatataaaccctccccgcacctcctccgtccgtttccgcctctcgccgcccttcctcctcgccggaatcgagctcgcgccgtcgctctctctctccgccgtcgccgccgagctccggtccgccgtcgtcgtcgccccggaccacctcccacctcggcgccgcctccttcggcttcgccgcatcctcgccgacctcgtccacccctccgtttcgctcgtcgaccgccggagcgccgccgtccccgtcgacccgaaccgcgccgccgccttcctccgctccggccgccttttcgtcgtcgccgtcgacctagggtgagccgtggaccgccgcctcatttccccctttccctcccttctctcggccgccgctccgccatgcctatggccgccgccggcgaccataggggcgcggacgcgccgcctcccgctggccgtgccgccgtggccgccttcgggcgcaccgagctgctgccgcgtggggcccggccgtcagccgctcgcgccctcgggtgcggctgacgcgtggggcccacggcgccggccggtgtgagcccgggtgcacccggtccaccgtggacccacctcggccatataaggaccggtcttcgggcctctgttgcaaagcgctaccgtacttccacatgtctagtgggacaaatgaaggctacacgagctacggcctggtagccaagatgtcatggcacagggccggtgtcctgctgctaggggctcagtcctgcctacctgtcccgggggttccggccgtaggtggggttgggtcgatgtacacctctgatcagagtataatctattcgaatagccgcgccctcggttatgggcaagccgagcaatgtacccaaatggccggcagcatcaaccgtcgtggtctggacctgactggattcgttttggaactgcggggcatgtgcgttgttctggggtatccgcatggagtggactaccagggcaagcagctcccggagcaggagggtgacgatgcagagccccacgctgcttgggaggttactgcagtgatcctcactggctcacccgagaggacttcgttggcggtcaccgcgggtggagattccttctccgctgcttgccagaacgccgcactcctcgccatcggcactcttcaccagcgctacccggacgagttgcagcacttgccctaccgctaccaccctcgtcgcggaggagcccgcgactacgccaccttccgggatgctagctcggaggatgacgctaccatcatgcacctggcgcacatggtggaggcatacgacgcggcccgtatcgacttccatcagatggtgcgtcgcgggttggtcaagaacaacatgaagatcctggagctgcgtcaggagaatctgcagttgaagaaggacttagacgcagtggaggcgcagctgcgtcagctcaagatcgcccagggagaggtctgtcgccccaagcgtcgccgcgtctgccgcagcctgaagatcaccgcccgcaagagtacctccaggcccgagcttgttcgtcagtccctggcgtggacctgcttcgtcgagacccctcgtgccgagcccgcgcccgtggttcctcaggaggatggagcctccggcgttggcagtacggaggatgcgctgttgctcaccttccatggtgacaaccaggagaagtgctgctaccggtgaaggcagtcaccccgaaggcagcaaccacaacaaccatgtcagcccacctccacctccttctccgcctccaccaccaccaccagacaccaacgccatcctcacccaaatcgtcgcccagtaggccaacatgatggctgctttcctccaccacatccaaaatccgccacaacataatgctccaccaccacccccacaacactctaaactcgccgagttcctccgcatctgtccgcctaccttctctagctctaataaccccgtggatgcattggattggttgcatgccgtggagaaaaagttagacaccgtgcagtgcagtgatgaggagaaagtcatcttcgccgcccaccaactgcaggggcccgcatctctatggtggaaccatttccaggctacgcagctagaggggcaacctattacttgggcccgcttcaccgccgctttccagagaacccatgtgcccgccggagtcatggcccttaagaaaagggaattccgagagttgaagcaaggcaaccgctccgtgatggagtatttgcatgagtttaacaacctggcctggtacgccccggaggatgttcgtgaagatgaggagaagtaagagaagttcttggcaggaatggatcctgagctgtccgtgcgtctggtctccggggactactcggatttccaacgtctggtggacaagagcatccgcttggaagccaagcacaaggaactggagtcgcacaagcgtcgcttggcgaatttccgcaatcaacagggggctaaccaaagggtccgctacaccaatccctatccagggggatcatcctcgcagcagcaacagcagcagcaacctcgctccgcgccccgacctcaattcgtggtgcgcatcccacagccgcagcaacagcagagtcagcaagggactcgtgcgccccgtccccctacgccagccgtgcagcctggtcaaggccgcagggacgttcaaggtcagcagcgtctgtgcttcaactgcttcgagcatgggcactttgcggataaatgcccaaagccgaggcgccagcaaggccaagcgcctccccgctccaacaacggtggtaaggatgtcattcggggacgtgtgaaccacgtgacggccgaggacgtgctgacaactccagacatcatcgttggtacgttcctcattcattccatccctgctaccattttgttcgactctggagcttcccactcgtttatatctgtgccattcgtggggagaaatcggttggggatagaaaggcttaggaaccctctgctcatcaccacccctggaggggttatgacagcaaagtattatagccctgccattcctatagaaatccagggaattccttttccctcggatctgattcttctagacaccaagaacttggatgtgatccttgggatgaattggttggctcaattccaaggagtagtggattgcgcaagacgcactgtcactctgtaccgagggccggaacaaccggttgttttctttgcacccccaacttctgtcggtagttcagaacttcatcagataggactgtcagaaatccccatcgtcagagagttcggagacgtgtttccagaaaaactacccggtatgctgccgaagcgagagattgagttccggatagatcttgctccaggaaccactcccctgtacaagcgaccctaccgtatggcagcaaatgaactggccgaagtcaagaaacagttggaagagttgaaagaaaaggggtatatacggccgagtacttccccctggggtgctcctgtgatttttgtggagaagaaagacaagacaaagaggatgtgcgttgactacagagctctcaatgaagttactatcaaaaacaagtaccctcttccccggatcgatgatctgttcgatcagcttaaaggtgccactgtattctccaagattgatcttcgttccggatatcaccaattacgtattcgtgaagaagatatcccgaagaccgcattcaccacgcgatacggactgtatgaattcacggtgatgtcgttcggtttaaccaatgctcctgccttcttcatgaacttagtgaacaaagtgttcatggaatacctggataagtttgttgtggttttcattaacgacattctggtgtactcacaatcagaggaagaccatcagcaccatctccgtctggtgttgggaaagttgcgggaacatcaattgtatgccaaacttagcaagtgtgagttttggttgtccgaagtcaaattcttagggcacgtgatatctgctaaaggagtcgctgtggaccccgaaacagtgaccgccgtcattgattggaagcaacccaagacagtcactcaaattcgcagcttcttgggtttggcaggatactaccggaggttcatcgagaacttctccaaaatcgctcgacccatgacacagttgttgaagaaagaagagaaatttgtgtggagcccgcaatgcgagaaggcattccaaactctcaaggaaaggttggtttcctcgccagttttagtctgaccggatactcgcaaggacttcatggtgtactgtgacgcttcgcgccaaggattggggtgcgtgctcatgcaggaaggtcatgtggtggcctatgcctcaaggcagctacggcctcatgaaggcaactaccctacccatgatttggagttagccgcggtagttcatgctctaaaaatctggcggcactatctcattgggaatcgctgtgaaatatatactgatcataagagtttgaaatacatcttcacccagtcggatctgaatcttcggtagaggagatggttagaactcatcaaggattatgatgtgggaattcactatcatcctggtaaggccaacgtggtcgccgacgctctaagtcgaaaaagccattgcaacactcttgacgtccgtggcattccacccgaacttaatcaacagatggaagccttgaacctaagcatagttggtcgtggattcttggctacgctggaagccaagcccaccttgctcgatcaaatccgcgaggctcagaagaatgatccggatatgcatggactcctcaagaatatgaaacagggtaaagccgctggtttcacagaggatgaacacggaaccctatggaacggaaatcggcgtgtcaaggcagagcaccaacgaccggccggacttctccaacctctccaagtaccagaatggaaatgggatgaaattgggatggatttcatcaccggacttccaaaaacccaaggcggatatgattctatatgggtagttgtggaccgactaaccaaggtagctcggtttattcctgtgaagaccacctatggagggaacaaactagccgagctctacttcgctagaatcgtgagtctccatggcgttcctaagaaaattgtatctgataggggaagccaattcacctctcacttttggaagaagctccaagaagagctgggtaccagattaaatttcagcaccgcgtatcacccgcagacagatggacagaccgagcgtctaaatcagatcctagaagatatgcttcgctcatgtgtcctagatttcgggaagacctgggataagagtctcccctatgccgagttctcctacaataacagctaccaagccagcttataaatggcaccctatgaagcgttgtatggacgcaaatgccggacaccgctattgtgggaccaagttggggaaagccaagtgttcgggactgatatcctgagagaggctgaagctaaagtcagaaccattcgggataatctaaaggtggcacagtcccggcagaagagttatgcagataaccgacgccgtaacctggaattcgcagtggacgattttgtgtaccttcgggtcacgccattgcgaggtgtacacatgtttcagacgaaagggaagctcgcacctcggtttgtgggtcctttccgtatcattgctcgacgcggggaagtcgcttaccagttggagctgcccgcctccttgggcaacgtgcatgatgtgttccatgtgtcgcaactcaagaaatgtcttcgagtgccatccgagcaggccgattcagagcaaattgaagttcgcgaagacttgacctacgtggagaggcccgtgaaaatcctggacaccatggagcgcaggaccaggaactgggtaatccgtttttgcaaggtccaatggagcaaccacgccgaggaagaagctacatgggagcgtgaagacgagctgaaggcagcccatcccaatctcttcggcagttcttccgaatctcggggtcgagattccgtt

SEQ ID NO: 14641 - DNA, 4575 bp, Oryza sativa
  Clone ID: TFbOSC400903j.C1.o71.fg
atggagataaggaatggttcacgcgactcgaacaacgccagtggcagcgaagagccgatcaatggagcacgtgccaacggtgcatctgacaacagtccgtccccaccgcccgagaacccaacaattgctcaggtgttggacaatcagactcagatgatgacaatgatgatgcaacagatgcagcaacagtaccatcaggtgttgcagcaggtgcagcggcaagcacagcagcaacaacagaacctgcagtttggtcctccacctcctcagtccaaactgttagaatttcttcgtgtcaagccgcccaccttctcaagcaccaccaacccaatcgaggcccacgactggcttcatgccattgagaagaagctgaatcttttgcaatgcaacgagcaagagaaggttgcttttgctacacaccagctgcaaggtcccgcttctgtttggtgggacaactacatggtgacccgtccagctggggcagaggttacttggacagagtttcgtcatagtttcaataaagcacaggttcccgagggaattgtggcacaaaagaagagagagttccgttccctgcaacaaggaaccagaacagttatagagtatttgcatgagttcaacctcctcgcgcgctacgcccctgaggacgtgcgtaccgatgccgagaagcaggagaagtttatgtctggtcttgatgacgaattgaccaaccagttgatctctagagactatgaggactttgagaagcttgtggacaaggctattcgtcaggaggagcactgtaacaaaataaaccgtaagaggaaggcagctcagttccggactccccaggggaagagtcagaagcctcgtttcacgatgggacatcacggtggaccttccaccatgattatccggcagcaccgtccctaccacccgggtaacttcaacaagaaccaccataatggcagtcacaacaacagtgagcagcacagtctcaaccctactccgagttcactaaagattccagctcaatcagttcagccagctctgccagaacagcccaagaggttgggagaaaaacccgaactctgcttcaattgtaacaaacccggacacacggttggaaagtgcccgaagccaagacgtgccggacccaagttcgttcaggcccgtgttaatcatgcatctgcagaggaggcgcagtcagcaccagaggttatattgggcacattccccgtcaactcgacaccagcagtaatattgtttgattctggtgcaacccattccttcatttccaagcgttttgctggtgcacatgggttatccttagtgaagcttaagataccaatgcgagtgcatactcctggaggtggcatgaccacaactcactactgcccatctgtgacagttgaaattcaagggttgatttttccagccaacctcattcttctcgaatccaaggacctagatgtcatacttggaatggattggttaacaaggcacagaggagtgattgattgcgccagccgcaccatcaagttaaccaatgcaaaaggagaggaggtaaccttccagtctctagtgccgcggaagccaggggttagtttaaaccaggctgctggtgaagaacaagaggtagcagtggagaaaaccactaagaagctggaggatattcccatagtcagagagtatccagaggtttttccggatgatctgacaacaatgccaccaaaaagggatatcgagttccggattgacttggtacctggaactgcaccgatccacaagaggccttacagaatgggagccaacgagttggcggaagtcaagaagcaagttgatgaacagttacagaagggatacatccgcccgagcacgtcgccttggggtgctccggttatctttgtggaaaagaaagacaaaaccaagaggatgtgcgtggactaccgcgcactcaatgaggtcactattaagaacaagtaccctttgccaaggattgatgacctgtttgatcagttgaaaggagctactgtgttctctaagatagaccttcggtcaggctatcaccagttgaggatccgcgaagaggatattccaaagacagcattcatcactcggtacgggttgttcgaatgcacagttatgtctttcggactcactaacgcacctgccttcttcatgaatttgatgaacaaggtgtttatggaatttctagacaagtttgtcgtggttttcatcgatgacatacttatctactccaagtccgaggaagaacatgagcagcatcttcggctggtacttgaaaagttaaaagagcaccagctatatgccaagttcagcaagtgcgacttctggcttaaggaagttcagtttctcggtcacatcgtgaatgctcaaggagtagctgtggatccagcaaatgtggagtcagttaccaaatggaccccaccaaggacagtcactcaggttcggagtttcttaggacttgcgggttattaccgccggttcattgagaacttctctaaaattgctaagccaatgacacagctattgaagaaggaagaaaagtttatctggtctgctgaatgcaataggagttttgtagaactcaaacgacggttggtgtctgcaccagtcttaatcctgcctgatcagacgaaagatttccaggtctattgtgatgcatctcgccaggggctaggatgtgtgttgatgcaggatggcaaagtggtttcttatgcttcacggcagttgcgtcctcatgaaggcaactacccgacgcatgatctggaattagccgcagttgttcatgctttaaagatttggcggcactatctcatcggtaaccgttgtgaggtatatacagatcacaaaagtctaaagtacatctttactcaacctgatttgaatctcagacagcgaagatggttggagctgatcaaggattatgatatgggaatacattatcatcccggcaaggctaatgtggttgcagatgccttgagcaggaagagctactgcaatgttgcatgggtagagcaactatgttgtgaggttcaacgcgatttggaacatctgaaccttggtatagttgagcacggattcgtggctgccctagaggcacagcccacactggtggagcaggttcgcatagctcaagcaagtgatcctgaaatagcagagctcaaaaagaacatgagggtcggaaaagcccgaggttttgttgaggatgaacaaggaacaatctggatgggagaaagattgtgtgtacccgaaaacaaggaattaaaagacctgatactaaccgaggctcatcaaactcaatattccattcatcccggtagtactaagatgtaccaagacctcaaagagaagttttggtgggtcagcatgagaagggaaatagctgagttcgtagcactctgtgacgtctgtcaacgagtaaaggcagaacaccaaaggccagcaggtttgctacagccacttcagattccagaatggaagtgggaagaaatcggaatggatttcatcaccggtttgcccaggacatcatcggggcatgattctatttgggtagtcgttgaccgactcaccaaagtggcccacttcattccggtgcacactacctactcagggaagaaattagcagaactctatctggcaagaattatgtgtttacatggtgtacctaagaagatcgtgtctgatcgaggaagccaattcacttcaaagttctggcagaaattacaagaagaattgggaacccggttgaatttcagcaccgcttaccatccacaaacagatggccagaccgagcgagtcaatcaaatactagaggatatgttgagagcctgtgcgcttgactttggtggggcatgggacaaaagcttgccgtatgctgagttctcgtacaacaacagttaccaagctagtctgcagatggcaccgtttgaagcactgtatggacgaaggtgtcgtactccactcttctgggatcagacaggggaacgccagttgtttggtacagaagttttaaatgaggcagaagagaaagtcagagctgttagggaaagattgagaatcgcgcagtctcggcagaaaagctatgcagacaaccgccgaagggagctcgctttcgaaacaggggattatgtgtatctccgtgtcactccgctcaggggagtacatcgcttccaaaccaaaggaaagttggcaccacgctttgtgggaccatatcggattttggaacgtagaggtgaagttgcttaccagctcgagcttccctccaacatgcttggcatccataatgtgttccacgtctcccagttgaagaaatgtttgagagttcctgaggaacaggcaagtccggatcaaatcgaaatccaggaagacttgacgtatgtggagaagccaactcgtatcctcgaaaccagcgagagaaagaccagaaacaaagtaataagattctgcaaggttcagtggagccaccactcagaggaagaggccacttgggaaagagaagatgagttgaaggccacccacccgcacctcttcgccagctcttccgaatctcggggtcgagattccgtttaa

SEQ ID NO: 14642 - DNA, 4689 bp, Oryza sativa
  Clone ID: TFbOSC401058j.C1.o66.fg
atggcagttaaggaccggttcacgggaaaccctgggagacttaccgtgcttaccacaagcgggagtgggtttgttgcttgtgggctagtcggcggccgatatcatgtgtcagtgatggagataaggaatggttcacgcgactcgaacaacgccagtggcagcgaagagccgatcaatggagcacgtgccaacggtgcatcttacaacagtccgtccccaccgcccgagaacccaacaattgctcaggtgttggacaatcagactcagatgatgacaatgatgatgcaacagatgcagcaacagtaccatcaggtgttgcaacaggtgcaacagcaagcacagccgcagcagcagaacctgcagtttggtcctccacctcctcagtccaaattgttagaatttcttcgtgtcaagccgcccactttctcaagcaccaccaccccaatcgaggcccacgactggcttcatgccattgagaagaagctgaatcttttgcaatgcaacgagcaggagaaggttgcttttgctacacaccagctacaaggtcccgcttctatttggtgggacaactacatggtgacccgtccagctggggcagaggttacttggacagagttttgtcatagtttcaataaagcccaggttcccgagggaatcgtggcacaaaagaagagagagttccgttccctgcaacaaggaaccagaacagttatagagtatttgcatgagttcaaccgcctcgcgcgctacgcccctgaggacgtgcgtaccgatgccgagaggcaggagaagtttatgtctggtcttgatgatgaattgaccaaccagctgatctctagagactatgaggactttgagaagcttgtggacaaggccatccgtcaagaggagcagtgtaacaaaatgaaccgtaagaggaaggcagcccagttcaggactccccaggggaagtgtcggaagcctcgtttcacgatgggacgtcacggtggaccttccaccatgattatccgacagcaccgtccctaccacccgggtagcttcaacaagaaccaccatagtggcagttacaacaacagtgagcagcacagcctcaaccctactccgagttcactaaagattccagctcaatcagttcagccagctctgccagaacagcccaagaggttgggagaaaaacccgaactctgcttcaattgtaacaaacccggacacacggttggaaagtgcccgaagccaagacgtgccggacccaagttcgttcaggcccgtgttaatcatgcatctgcagaggaggcgcagtcagcaccagaggttatattgggcacattccccgtcaactcgacaccggcagtaatattgtttgattctggtgcaacccattccttcatttccaagcgttttgctggtgcacatgggttatctttagtgaagcttaagataccaatgcgagttcatactcctggaggtggcatgaccacaactcactactgcccatctgtgacagttgaaattcaagggttgatttttccagccaacctcattcttctcgaatccaaggacctagatgtcatacttggaatggattggttggcaaggcacagaggagtgattgattgcgccagccgcaccatcaagttgaccaatgcaaaaggagaggtggtaatcttccagtctccagtgccgcagaagccagggattagtttaaaccaggctgctggtgaagaacaagaggtagcagtggagaaaaccactaagaagctggaggatattcccatagtcagagagtatccagaggtttttccggatgatctgacaacaatgccaccaaaaagggatatcgagttccggattgacttggtacctggaactgcaccgatccacaagaggccttacagaatgggagccaacgagttggcggaagtcaagaagcaagttgatgaacagttacagaagggatacatccgcccgagcacgtcgccttggggtgctccggttatctttgtggagaagaaagacaaaaccaagaggatgtgcgttgactaccgcgcactcaatgaggtcaccatcaagaacaagtatcctttgccaaggattgatgatctgtttgatcagttgaaaggagctactgtgttctctaagatagacctgcgatcaggctatcaccagttgaggatccgcgaagaggatattccaaagacagcattcatcactcggtacgggttgttcgaatgcacagttatgtctttcggactcactaatgcacctgccttcttcatgaatttgatgaacaaggtgtttatggaatttctagacaagtttgtcgtggttttcatcgatgacatactaatctactccaagtccgaggaagaacatgagcagcatcttcgactggtacttgagaagttaaaagagcaccagctatatgccaagttcagcaagtgcgacttctggcttaaggaagttcagtttctcggtcacatcgtgaatgctcaaggagtagctgtggatccagcaaatgtggagtcagttaccaagtggaccccaccaaggacagtcactcaggttcggagtttcttaggacttgcgggctattaccgccggttcattgagaacttctctaaaattgctaagccaatgacacagctattgaagaaggaagaaaagtttatctggtctgctgaatgcaataggagttttgaagaactcaaacgacggttggtgtctgcaccagtcttaatcctgcctgatcagacgaaagattttcaggtctattgtgatgcatctcgccaggggctaggatgtgtgttgatgcaggatggcaaagtggtttcttatgcttcacggcagttgcgtcctcatgaaggcaactacccgacgcatgatctggaattagccgcagttgttcatgctttaaagatttggcggcactatctcatcggtaaccgttgtgaggtatatacagatcacaaaagtctaaagtacatctttactcaacctgatttgaatctcagacagcgaagatggttggagctggtcaaggattatgatatgggaatacattatcatcccggcaaggctaatgtggttgcagatgccttgagcaggaagagctactgcaatgttgcatgggtagagcaactatgttgtgaggttcaacgcgatttggaacatctgaaccttggtatagttgagcacggattcgtggctgccctagaggcacagcccacactggtggagcaggttcgcatagctcaagcaagtgaccctgaaatagcagagctcaaaaagaacatgagagttggaaaagcccgaggttttgttgaggatgaacaaggaacaatctggatgggagaaagattgtgtgtacccgaaaacaaggaattaaaagacctgatactaaccgaggctcatcaaactcaatattccattcatcccggtagtactaagatgtaccaagacctcaaagaaaagttctggtgggtcagcatgagaagggaaatagctgagttcgtagcactctgtgacgtctgtcaacgagtaaaggcagaacaccaaaggccagcaggtttgctacagccacttcagattccagaatggaagtgggaagaaatcggaatggatttcatcaccggtttgcccaggacgtcatcggggcatgattctatttgggtagtcgttgaccgactcaccaaagtggctcacttcattccggtgcacactacctactcagggaagaaattagcagaactctatctggcaagaattatgtgtttacatggtgtacctaagaagatcgtgtctgatcgaggaagccaattcacttcaaagttctggcagaaattacaagaagaattgggaacccggttgaatttcagcaccgcttaccatccacaaacagatggccagaccgagcgagtcaatcaaatactagaggatatgttgagagcatgtgcgcttgactttggtggagcatgggacaaaagcttaccgtatgctgagttctcgtacaacaacagttaccaagctagtctgcagatggcaccatttgaagcactgtatggacgaaggtgtcgtactccgctcttctgggatcagacaggggaacgccagttgtttggtacagaagttttaaatgaggcagaagagaaagtcagagctgttagggaaagattgagaatcgcgcagtctcggcagaaaagctatgcagacaaccgccgaagggagctcgttttccaagtaggggattatgtgtatctccgtgtcactccgctccggggagtacatcgcttccaaaccaaaggaaagttggcaccacgctttgtgggaccatatcggattttggaacgtagaggtgaagttgcttaccagctcgagcttccctccaacatgcttggcatccataatgtgttccacgtctcccagttgaagaaatgtttgagagttcctgaggaacaggcaagtccggatcaaatcgaaatccaggaagacttgacgtatgtggagaagccaactcgtatcctcgaaaccagcgagagaaagaccagaaacaaagtaataagattctgcaaggttcagtggagccaccactcagaggaagaggccacttgggaaagagaagatgagttgaaggccacccacccgcacctcttcgccagctcttccgaatctcggggtcgagattccgtttaa

SEQ ID NO: 14643 - DNA, 4704 bp, Oryza sativa
  Clone ID: TFbOSC401064j.C1.o47.fg
atggcaattaaggaccggttcacgggaaaccctgggagacttaccgtgcttaccacaagcgggagtggagttgaagttcttctcagttggagccgtcttagagaggttggtttcgttgctgccgtcaagatggagataaggaatggttcacgcgactcgaacaacgccagtggtagcgaagagccgatcaatggagcacgtgccaacggtgcatctgacaacagtccgtccccaccgcccgagaacccaacaattgctcaggtgttggacaatcagactcagatgatgacaatgatgatgcaacagatgcagcaacagtaccatcaggtgttgcagcaggtgcagcagcaagcacagctgcagcagcagaacctgcagtttggtcctccacctcctcagtccaaactgttagaatttcttcgtgtcaagccgcccaccttctcaagcaccaccaacccaatcgaggcccacgactggcttcatgccattgagaagaagctgaatcttttgcaatgcaacgagcaggagaaggttgcttttgctacacaccagctacaaggtcccgcttctatttggtgggacaactacatggtgacccgtccagctggggcagaggttacttggacagagtttcgtcatagtttcaataaagcacaggttcccgagggaattgtggcacaaaagaagagagagttccgttccctgcaacaaggaaccagaacagttatagagtatttgcgtgagttcaacctcctcgcgcgctacgcccctgaggacgtgcgtaccgatgccgagaggcaggagaagtttctgtctggtcttgatgatgaattgactaaccagttgatctctagagattatgaggactttgagaagctggtggataaggctatccgtcaggaggagcactgtaacaaaataaaccgtaagaggaaggcagctcagttcaggactccccaggggaagagtcagaagcctcgtttcacgatgggacatcacggtggaccttccaccatgattatccggcagcaccgtccctaccacccgggtaacttcaacaagaaccaccatagtgacagtcacaacaatagtgagcagcacagcctcaaccctactccgagttcactaaagattccagcccaatcagttcagccagctctgccagaacaacccaagaggttgggagaaaaacccgaactctgcttcaattgtaacaaacccggacacacggttggaaagtgcccgaagccaagacgtgccggacccaagttcgttcaggcccgtgttaatcatgcatctgcagaggaggcgcagtcagcaccagaggttatattgggcacattccccgtcaactcgacaccggcagtaatattgtttgattctggtgcaacccattccttcatttccaagcgttttgctggtgcacatgggttatctttagtgaagcttaagataccaatgcgagtgcatactcctggaggtggcatgaccacaactcactactgcccatctgtgacagttgaaattcaagggttgatttttccagccaacctcattcttctcgaatccaaggacctagatgtcatacttggaatggattggttggcaaggcacagaggagtgattgattgcgccagccgcaccatcaagttgaccaatgcaaaaggagaggtggtaatcttccagtctccagtgccgcagaagccagggattagtttaaaccaggctgctggtgaagaacaagaggtagcagtggagaaaaccactaagaagctggaggatattcccatggtcagagagtatccagaggtttttccggatgatctgacaacaatgccaccaaaaagggatatcgagttccggattgacttggtacctggaactgcaccgatccacaagaggccttacagaatgggagccaacgagttggcggaagtcaagaagcaagttgatgaacagttacagaagggatacatccgcccgagcacgtcgccttggggtgctccggttatctttgtggaaaagaaagacaaaaccaagaggatgtgcgtggactaccgcgcactcaatgaggtcactattaagaacaagtaccctttgccaaggattgatgatctgttcgatcagctgaaaggagctactgtgttctctaagatagaccttcggtcaggctatcaccagttgaggatccgcgaagaggatattccaaagacagcattcatcactcggtacgggttgttcgaatgcacagttatgtctttcggactcactaacgcacctgccttcttcatgaatttgatgaacaaggtgtttatggaatttctagacaagtttgtcgtggttttcatcgatgacatacttatctactccaagtccgaggaagaacatgagcagcatcttcggctggtacttgaaaagttaaaagagcaccagctatatgccaagttcagcaagtgcgacttctggcttaaggaagttcagtttctcggtcacatcgtgaatgctcaaggagtagctgtggatccagcaaatgtggagtcagttaccaaatggaccccaccaaggacagtcactcaggttcggagtttcttaggacttgcgggttattaccgccggttcattgagaacttctctaaaattgctaagccaatgacacagctattgaagaaggaagaaaagtttatctggtctgctgaatgcaataggagttttgaagaactcaaacgacggttggtgtctgcaccagtcttaatcctgcctgatcagacgaaagatttccaggtctattgtgatgcatctcgccaggggctaggatgtgtgttgatgcaggatggcaaagtggtttcttatgcttcacggcagttgcgtcctcatgaaggcaactacccgacgcatgatctggaattggccgcagtcgttcatgctttaaagatctggcggcactatctcatcggtaaccgttgtgaggtatatacagatcacaaaagtctaaagtacatcttcacccaacctgatctgaatctccgacaacgacgatggttggagctaatcaaagattatgatatgggaatacactatcatcccggcaaggctaatgtggtagcagatgccttgagcaggaagagttactgcaacgtcgcatgggtagaggaactatgctgtgaggttcaacatgatttggaacgtttgaaccttggtatagttgagcacggattcgtggctgccctagaggcacagcccacactggtggagcaggttcgcatagctcaagcaagtgatcctgaaatagcagagctcaaaaagaacatgagggtcggaaaagcccgaggttttgttgaggatgaacaaggaacaatctggatgggagaaagattgtgtgtacccgaaaacaaggaattaaaagacctgatactaaccgaggctcatcaaactcaatattccattcatcccggtagtactaagatgtaccaagaccttaaagaaaagttctggtgggtcagcatgagaagggaaatagctgagttcgtagcactctgtgacgtctgtcaacgagtaaaggcagaacaccaaaggccagcaggtttgctacagccacttcagattccagaatggaagtgggaagaaatcggaatggatttcatcaccggtttgcccagaacgtcatcggggcatgattctatttgggtagtcgttgaccgactcaccaaagtggctcacttcattccggtgcacactacctactcagggaagaaattagcagaactctatctggcaagaattatgtgtttacatggtgtacctaagaagatcgtgtctgatcgaggaagccaattcacttcaaagttctggcagaaattacaagaagaattgggaacccggttgaatttcagcaccgcttaccatccacaaacagatggccagaccgagcgagtcaatcaaatactagaggatatgttgagagcctgtgcgcttgactttggtggagcatgggacaaaagcttgccgtatgctgagttttcttacaacaacagttaccaagctagtctacagatggcaccgtttgaagcactgtatggacggaggtgtcatactccgctcttctgggatcagacaggggaacgccagttgtttggtatagaagttttaaatgaggcagaagagaaagtcagagctgttagggaaagattgagaatcgcgcaatctcggcagaaaagctatgcagacaaccgccgaagggagctcgttttccaagtaggggattatgtgtatctccgtgtcactccgctcaggggagtacaccgcttccaaaccaaaggaaagttggcaccacgctttgtgggaccatatcggattttggaacgcaggggtgaagttgcttaccagcttgagcttccctccaacatgcttggcatccataatgtgttccacgtctcccagttgaagaaatgtttgagagttcctgaggaacaggcaagtccggatcaaatcgaaatccaggaagacttgacgtatgtggagaagccaactcgtatcctcgaaaccagcgagagaaagaccagaaacaaagtaataagattctgcaaggttcagtggagccaccactcagaggaagaggccacttgggaaagagaagatgagttgaaggccacccacccgcacctcttcgccagcccttccgaatctcggggtcgagattccgtttaa

SEQ ID NO: 14644 - DNA, 5490 bp, Oryza sativa
  Clone ID: TFbOSC401065j.C1.o27.gm
atggagacaaggaatggttcacgcgactcgaacaacgccagtggcagcgaagagccgatcaatggagcacgtgccaacggtgcatctgacaacagtccgtccccaccacctgagaacccaacaattgctcaggtgttggacaatcagactcagatgatgacaatgatgatgcaacagatgcagcgacagtaccatcaggtgttgcagcaggtgcaacagcaagcacagcagcagcagcagaacccgcaatttggtcctccgcctcctcagtccaaactgttagaatttcttcgtgtcaagccgcccaccttctcaagcaccaccaacccaatcgaggcccacgactggcttcatgccattgagaagaagctgaatcttttgcaatgcaacgagcaggagaaggttgcttttgctacacaccagctacaaggtcccgcttctatttggtgggacaactacatggtgacccgtccaactggggcagaggttacttggacagagtttcgtcatagtttcaataaagcacaggttcccgagggaattgtgggacaaaagaagagagagttccgttccctgcaacaaggaaccaaaacagttatagagtatttgcatgagttcaaccgcctcgcgcgctacgcccctgaggacgtgcgtaccgatgccgagaagcaggagaagtttatgtctggtcttgatgatgaattgaccaaccagttgatctctagagactatgaggactttgagaagcttgtggacaaggctattcgtcaagaggagcagtgtaacaaaatgaaccgtaagaggaaggcagcccagttcaggactccccaggggaagtgtcagaagcctcgttacacgatgggacgtcacggtggaccttccaccatgattatccgacagcaccgtccctaccacccggctcaatcagttcagccagctctgccagaacagcccaagaggttgggagaaaaacccgaactctgcttcaattgtaacaaacccggacacacggttggaaagtgcccgaagccaagacgtgctggacccaagttcgttcaggcccgtgtcaatcatgcatctgcagaggaggcgcagtcagcaccagaggttatattgggcacattccccgtcaactcgacaccggcagtaatattgtttgattctggtgcaacccattccttcatttccaagcgttttgctggtgcacatgggttatctttagtgaagcttaagataccaatgcgagtgcatactcctggaggtggcatgaccacaactcactactgcccatctgtgacagttgaaattcaagggttgatttttccagccaacctcattcttctcgaatccaaggacctagatgtcatacttggaatggattggttgacaaggcacagaggagtgattgattgcgccagccgcaccatcaagttgaccaatgcaaaaggagaggtggtaatcttccagtctccagtgccgcagaagccagggattagtttaaaccaggctgctggtgaaggacaagaggtagcagtggagaaaaccactaagaagctggaggatattcccatagtcagagagtatccagaggtttttccggacgatctgacaacaatgccaccaaaaagggatatcgagttccggatagacttggtacctggaactgcatcgatccacaagaggccttacagaatgggagccagcgagttggcggaagtcaagaagcaagtcgatgaacagttacagaagggatacatccgtccgagcacgtcgccttggggtgctccgattatctttgtggagaagaaagacaaaaccaagaggatgtgcgttgactaccgcgcactcaatgaggtcaccatcaagaacaagtatcctttgccaaggattgatgatctgtttgatcagttgaaaggagctactgtgttctctaagatagacctgcgatcaggttatcaccagttgaggatccgcgaagaggatattccaaagacagcattcatcactcggtacgggttgttcgaatgcacagttatgtctttcggactcactaatgcacctgccttcttcatgaatttgatgaacaaggtgtttatggaatttctagacaagtttgtcgtggttttcattgatgacatacttatctactccaagtccgaggaagaacatgagcagcatcttcgactggtacttgaaaagttaaaggagcatcagctatatgccaagttcagcaagtgtgacttctggcttaaggaagttcagtttctcggtcacatcgtgaatgctcaaggagtagcggtggatccagcaaatgtggagtcggttaccaagtggaccccaccaaggacagtcactcaggttcggagtttcttagggcttgcgggctattaccgccggttcattgagaacttctctaaaattgctaagccgatgacacagctattgaagaaggaagaaaagttcatctggtctgctgaatgcaataggagttttgaagaactcaaacgacggttggtgtctgcaccagtcttaatcctgcctgatcagacgaaagattttcaggtctattgtgatgcatctcgccaggggctaggatgtgtgttgatgcaggatggcaaagtggtttcttatgcttcacggcagttgcgtcctcatgaaggcaactacccgacgcatgatctggaattagccgcagttgttcatgctttaaagatttggcggcactatctcatcggtaaccgttgtgaggattatgatatgggaatacattatcatcccggcaaggctaatgtggttgcggatgccttgagcaggaagagctactgcaatgttgcatgggtagagcaactatgttgtgaggttcaacgtgatttggaacatttgaaccttggtatagttgagcacggattcgtggctgccctagaggcacagcccacactggtggagcagatggcaccatttgaagcactgtatggacgaaggtgtcgtactccgctcttctgggatcagacaggggaacgccaattgtttggtacagaagttttaaatgaggcagaagagaaagtcagagctgttagggaaagattgagaatcgcgcagtctcggcagaaaagctatgcagacaaccgccgaagggagctcgctttcgaaacaggggattatgtgtatctccgtgtcactccgctcaggggagtacatcacttccaaaccaaaggaaagttggcaccacgctttgtgggaccatacaggatcttggaacgtagaggtgaagttgcttaccagctcgagcttccctccaacatgcttggcatccacaacgtgttccacgtctctcagttgaagaaatgtttgagagttcctgaggaacaggcaagtccggatcacatcgaaattcaggaagatctgacgtatgtggagaagccgactcgtatcctcgaaaccagcgagagaaggacaagaaacaaagtaataagattctgcaaggttcagtggagccaccactcagaggaagaggccacttgggaaagagaagatgagttgaaggccacccacccgcacctcttcgccagctcttccgaatctcgggcgccgccgcttgccgccgcctttggccgcgagccgccgccgctagagtcgccgccgcgccaaaccgccgccgctgttagcttcgccgccgcaagagctttcccggccgccgcctcgcgtcgccggaatcccaccggagcacctctcccctcgcgagccgggtgtcgccgccgcccgtccgtgcctccgcgtcgccggtcatcgccgctcgtctcttcccacgccggtcgccgccatcgcctcggtgaggaatcccctttcctccttcctttcctctcccccgtgagcgccgccgccctccgcgcgtgcgccgtcgtcttcggctgccgccgccgccttcgcgccggccgccgccgtctccccgcgccgccggtcaccgccggcggcaccggtggcgagggtgggcgtgatggagttgggtcggccggggtgtccggttgtccagctgccggattcaccgcggcgcaagaggggaccgcccactgccttttgaggggtggggagctggagatcttcctagttggagctgttttgtcaaagttggtttcgtcgctgccgtcaaggattgcctgtggagtggagtcgcccgctgctgaagtcaagcttcccgggcagacttctaagtctgctaatgtgaccattggcaacactggaaatggaagcgggtatggtaatttacctactgtcgcacggcgttccaccgtcctaatagggaatgggtcacatgcttctgttcatggtgttggcacggtagatctgaagtttaattcgggaaagatcgtgcagctgaagaacgggcagcatgtcccttctatcgacatgaatcttgttagtggctcccgtctgactagagacggatttaagttggtttttgagtctaataaagtagtcgtgtctaaacatggatattttattggtaaaggttatgagtgcggaggcctgttccacttttccctttctgatttctgcaataatgaagctcctcgaaggagtaagagacaaaggacggctaagtcctttggtgatgatttcactgtgtacctcatggatgacactcctaagtcaatttcagaagcatatgcatctcctgatgcagactactggaaggaggctgtccgtagtgaaatggattccattatcactaacgggacttgggaggtgacagagcgaccctgtgggtgtaaacctgtggggtgcaagtgggtgttcaagaagaagcttaggcctgacgcctcacatggtcttctcgttcatcaaatggacgttaagacagcttttcttaatggagagctggatgaggagatctatatggatcaacctaatgggtttgtagttgaaggctttgcagtcaatgaggcagataaatgtgtgtactatcgccatggtgggggtgagggagttattctgtgcttgtatgttgatgacgtactgatatttgggacaaaccttgaggtgataaatgagtcccattatgtggagaagattttgaatcgttttggctacattgatagtaagccctctccaacaccttatgatcctagcttgttgcttcgcaagaacaagagaattgctaggaatcaactggaatactcacaaatcattggctcgctgatgtacctggctagtgcaactaggcttgatatctcctttgctggtttgcctcctactctgtaccgcgcgtcgctcgtagactactccatcccgctcgccggcatgcaccggcgatcgggagagcaggtctccggaacctctgccttcgacgtcctgcaccgggagaaggcggcaataaggtttttgggaagcgcttcgctcgactgctccctgttcgttcgtgacggctcggcttcctctccgctcgcgtgcttcgcgccttcgtcgacgctcgcaaccgcgagtagttcctag

SEQ ID NO: 14645 - DNA, 4575 bp, Oryza sativa
  Clone ID: TFbOSC401242j.C1.o1.fg
atggagacaaggaatggttcacgcgactcgaacaacgccagtggcagcgaagagccgatcaatggagcacgtgccaacggtgcatctgacaacagtccgtccccaccgcccgagaacccaacaattgctcaggtgttggacaatcagactcagatgatgacaatgatgatgcaacagatgcagcaacagtaccatcaggtgttgcagcaggtgcagcagcaagcacagctgcagcagcagaacctgcagtttggttctccacctcctcagtccaaactgctagaatttcttcgtgtcaagccgcccaccttctcaagcaccaccaacccaatcgaggcccacgactggcttcatgccattgagaagaagctgaatcttttgcaatgcaacgagcaggagaaggttgcttttgctacacaccagctacaaggtcccgcttctatttggtgggacaactacatggtgacccgtccaactggggcagaggttacttggacagagtttcgtcatagtttcaataaagcacaggttcccgagggaattgtgggacaaaagaagagagagttccgttccctgcaacaaggaaccagaacagttatagagtatttgcatgagttcaaccgcctcgcgcgctacgcccctgaggacgtgcgtaccgatgccgagaggcaggagaagtttttgtctggtcttgatgatgaattgactaaccagttgatctctagagattatgaggactttgagaagctggtggataaggctatccgtcaggaggagcactgtaacaaaataaaccgtaagaggaaggcagcccagttcaggactccccaggggaagagtcagaagcctcgtttcacgatgggacatcacggtggaccttccaccatgattatccggcagcaccgtccctaccacccgggtaacttcaacaagaaccaccatagtgacagtcacaacaatagtgagcagcacagcctcaaccctactccgagttcactaaagattccagctcaatcagttcagccagctctgccagaacagcccaagaggtggggagaaaaacccgaactctgcttcaattgtaacaaacccggacacacggttggaaagtgcccgaagccaagacgtgccggacccaagttcgttcaggcccgtgttaatcatgcatctgcagaggaggcgcagtcagcaccagaggttatattgggcacattccccgtcaactcgacaccggcagtaatattgtttgattctggtgcaacccattcctttatttccaagcgttttgctggtgcacatgggttatctttagtgaagcttaagataccaatgcgagttcatactcctggaggtggcatgaccacaactcactactgcccatctgtgacagttgaaattcaagggttgatttttccagccaacctcattcttctcgaatccaaggacctagatgtcatacttggaatggattggttggcaaggcacagaggagtgattgattgcgccagccgcaccatcaagttgaccaatgcaaaaggagaggtggtaatcttccagtctccagtgccgcagaagccagggattagtttaaaccaggctgctggtgaagaacaagaggtagcagtggagaaaaccactaagaagctggaggatattcccatagtcagagagtatccagaggtttttccggatgatctgacaacaatgccaccaaaaagggatatcgagttccggattgacttggtacctggaactgcaccgatccacaagaggccttacagaatgggagccaacgagttggcggaagtcaagaagcaagttgatgaacagttacagaagggatacatccgcccgagcacgtcgccttggggtgctccggttatctttgtggaaaagaaagacaaaaccaagaggatgtgcgtggactaccgcgcactcaatgaggtcactattaagaacaagtaccctttgccaaggattgatgatctgtttgatcagttgaaaggagctactgtgttctctaagatagacctgcgatcaggctatcaccagttgaggatccgcgaagaggatattccaaagacagcattcatcactcggtacgggttgttcgaatgcacagttatgtctttcggactcactaatgcacctgccttcttcatgaatttgatgaacaaggtgtttatggaatttctagacaagtttgtcgtggttttcatcgatgacatacttatctactccaagtccgaggaagaacatgagcagcatcttcggctggtacttgaaaagttaaaagagcaccagctatatgccaagttcagcaagtgcgacttctggcttaaggaagttcagtttctcggtcacatcgtgaatgctcaaggagtagctgtggatccagcaaatgtggagtcagttaccaaatggaccccaccaaggacagtcactcaggttcggagtttcttaggacttgcgggttattaccgccggttcattgagaacttctctaaaattgctaagccaatgacacagctattgaagaaggaagaaaagtttatctggtctgctgaatgcaataggagttttgaagaactcaaacgacggttggtgtctgcaccagtcttaatcctgcctgatcagacgaaagatttccaggtctattgtgatgcatctcgccaggggctaggatgtgtgttgatgcaggatggcaaagtggtttcttatgcttcacggcagttgcgtcctcatgaaggcaactacccgacgcacgatctggaattggccgcagtcgttcatgctttaaagatttggcggcactatctcatcggtaaccgttgtgaggtatatacagatcacaaaagtctaaagtacatcttcacccaacctgatctgaatctccgacaacgaagatggttggagctaatcaaagattatgatatgggaatacactatcatcccggcaaggctaatgtggtagcagatgccttgagcaggaagagttactgcaacgtcgcatgggtagaggaactatgctgtgaggttcaacatgatttggaacatttgaaccttggtatagttgagcacggattcgtggctgccctagaggcacagcccacactggtggagcaggttcgcatagctcaagcaagtgatcctgaaatagcagagctcaaaaagaacatgagggtcggaaaagcccgaggttttgttgaggatgaacaaggaacaatctggatgggagaaagattgtgtgtacccgaaaacaaggaattaaaagacctgatactaaccgaggctcatcaaactcaatattccattcatcccggtagtactaagatgtaccaagacctcaaagagaagttttggtgggtcagcatgagaagggaaatagctgaattcgtagcactctgtgacgtctgtcaacgagtaaaggcagaacaccaaaggccagcaggtttgctacagccacttcagattccagaatggaagtgggaagaaatcggaatggatttcatcaccggtttgcccaggacgtcatcggggcatgattctatttgggtagtcgttgaccgactcaccaaagtggctcatttcattccggtgcacactacctactcagggaagaaattagcagaactctatctggcaagaattatgtgtttacatggtgtacctaagaagattgtgtctgatcgaggaagccaattcacttcaaagttctggcagaaattacaagaagaattgggaacccgattgaatttcagcactgcttaccatccacaaacagatggccagaccgagcgagtcaatcaaatactagaggatatgttgagagcctgtgcgcttgactttggtggggcatgggacaaaagcttgccgtatgctgagttctcgtacaacaacagttaccaagctagtctgcagatggcaccgtttgaagcactgtatggacggaggtgtcgtactccgctcttctgggatcagacaggggaacgccagttgtttggtacagaagttttaaatgaggcagaagagaaagtcagagctgttagggaaagattgagaatcgcgcagtctcggcagaaaagctatgcagacaaccgccgaagggagctcgctttcgaaacaggggattatgtgtatctccgtgtcactccgctcagtggagtgcatcgcttccaaaccaaaggaaagttggcaccacgctttgtgggaccatatcggattttggaacgtagaggtgaagttgcttaccagctcgagcttccctccaacatgcttggcatccataatgtgttccacgtctcccagttgaagaaatgtttgagagttcctgaggaacaggcaagtccggatcaaatcgaaatccaggaagacttgacgtatgtggagaagccaactcgtatcctcgaaaccagcgagagaaagaccagaaacaaagtaataagattctgcaaggttcagtggagccaccactcagaggaagaggccacttgggaaagagaagatgagttgaaggccacccacccgcacctcttcgccagctcttccgaatctcggggtcgagattccgtttaa

SEQ ID NO: 14646 - DNA, 3690 bp, Oryza sativa
  Clone ID: TFbOSC401246j.C1.o16.fg
atgattatccggcagcaccgtccctaccacccgggtaacttcaacaagaaccaccatagtgacagtcacaacaatagtgagcagcacagcctcaaccctactccgagttcactaaagattccagctcaatcagttcagccagctctgccagaacagcccaagaggttgggagaaaaacccgaactctgcttcaattgtaacaaacccggacacacggttggaaagtgcccgaagccaagacgtgccggacccaagttcgttcaggcccgtgttaatcatgcatctgcagaggaggcgcagtcagcaccagaggttatattgggcacattccccgtcaactcgacaccggcagtaatattgtttgattctggtgcaacccattcctttatttccaagcgttttgctggtgcacatgggttatctttagtgaagcttaagataccaatgcgagttcatactcctggaggtggcatgaccacaactcactactgcccatctgtgacagttgaaattcaagggttgatttttccagccaacctcattcttctcgaatccaaggacctagatgtcatacttggaatggattggttggcaaggcacagaggagtgattgattgcgccagccgcaccatcaagttgaccaatgcaaaaggagaggtggtaatcttccagtctccagtgccgcagaagccagggattagtttaaaccaggctgctggtgaagaacaagaggtagcagtggagaaaaccactaagaagctggaggatattcccatagtcagagagtatccagaggtttttccggatgatctgacaacaatgccaccaaaaagggatatcgagttccggattgacttggtacctggaactgcaccgatccacaagaggccttacagaatgggagccaacgagttggcggaagtcaagaagcaagttgatgaacagttacagaagggatacatccgcccgagcacgtcgccttggggtgctccggttatctttgtggagaagaaagacaaaaccaagaggatgtgcgttgactaccgcgcactcaatgaggtcaccatcaagaacaagtatcctttgccaaggattgatgatctgtttgatcagttgaaaggagctactgtgttctctaagatagacctgcgatcaggctatcaccagttgaggatccgcgaagaggatattccaaagacagcattcatcactcggtacgggttgttcgaatgcacagttatgtctttcggactcactaatgcacctgccttcttcatgaatttgatgaacaaggtgtttatggaatttctagacaagtttgtcgtggttttcatcgatgacatactaatctactccaagtccgaggaagaacatgagcagcatcttcgactggtacttgaaaagttaaaagagcaccagctatatgccaagttcagcaagtgcgacttctggcttaaggaagttcagtttctcggtcacatcgtgaatgctcaaggagtagctgtggatccagcaaatgtggagtcagttaccaagtggaccccaccaaggacagtcactcaggttcggagtttcttaggacttgcgggttattaccgccggttcattgagaacttctctaaaattgctaagccaatgacacagctattgaagaaggaagaaaagtttatctggtctgctgaatgcaataggagttttgaagaactcaaacgacggttggtgtctgcaccagtcttaatcctgcctgatcagacgaaagatttccaggtctattgtgatgcatctcgccaggggctaggatgtgtgttgatgcaggatggcaaagtggtttcttatgcttcacggcagttgcgtcctcatgaaggcaactacccgacgcatgatctggaattagccgcagttgttcatgctttaaagatttggcggcactatctcatcggtaaccgttgtgaggtatatacagatcacaaaagtctaaagtacatcttcacccaacctgatctgaatctccgacaacgaagatggttggagctaatcaaagattatgatatgggaatacactatcatcccggcaaggccaatgtggtagcagatgccttgagcaggaagagttactgcaacgtcgcatgggtagaggaactatgctgtgaggttcaacatgatttggaacatttgaaccttggtatagttgagcacggattcgtggctgccctagaggcacagcccacactggtggagcaggttcgcatagctcaagcaagtgatcctgaaatagcagagctcaaaaagaacatgagggtcggaaaagcccgaggttttgttgaggatgaacaaggaacaatctggatgggagaaagattgtgtgtacccgaaaacaaggaattaaaagacctgatactaaccgaggctcatcaaactcaatattccattcatcccggtagtactaagatgtaccaagacctcaaagagaagttttggtgggtcagcatgagaagggaaatagctgaattcgtagcactctgtgacgtctgtcaacgagtaaaggcagaacaccaaaggccagcaggtttgctacagccacttcagattccagaatggaagtgggaagaaatcggaatggatttcatcaccggtttgcccaggacgtcatcggggcatgattctatttgggtagtcgttgaccgactcaccaaagtggcccacttcattccggtgcacaccacctactcagggaagaaattagcagaactctatctggcaagaattatgtgtttacatggtgtacctaagaagatcgtgtctgatcggggaagccaattcacttcaaagttctggcagaaattacaagaagaattgggaacccggttgaatttcagcaccgcttaccatccacaaacagatggccagaccgagcgagtcaatcaaatactagaggatatgttgagagcctgtgcgcttgattttggtggggcatgggacaaaagcttgccgtatgctgagttctcgtacaacaacagttaccaagctagtctgcagatggcaccatttgaagcactgtatggacggaggtgtcgtactccgctcttctgggatcagacaggggaacgccagttgtttggtacagaagttttaaatgaggcagaagagaaagtcagagctgttagggaaagattgagaatcgcgcagtctcggcagaaaagctatgcagacaaccgccgaagggagctcgctttcgaaacaggggattatgtgtatctccgtgtcactccgctcaggggagtacatcgcttccaaaccaaaggaaagttggcaccacgctttgtgggaccatatcgggttttggaacgtagaggtgaagttgcttaccagctcgagcttccctccaacatgcttggcatccataatgtgttccacgtctcccagttgaagaaatgtttgagagttcctgaggaacaggcaagtccggatcaaatcgaaatccaggaagacttgacgtatgtggagaagccaactcgtatcctcgaaaccagcgagagaaagaccagaaacaaagtaataagattctgcaaggttcagtggagccaccactcagaggaagaggccacttgggaaagagaagatgagttgaaggccacccacccgcacctcttcgccagctcttccgaatctcggggtcgagattccgtttaa

SEQ ID NO: 14647 - DNA, 5485 bp, Oryza sativa
  Clone ID: TFbOSC401339j.C1.o12.np
atgtcatggcacagggctggtgtcctgctgctaggggctcagtcctgcctacctgtcccggaggttccggccgtaggtagggttgggtcggtactcttgtctatggctaggatgggttggaaactatgtcatgtcttccgttcgtatgccgtggtgatggccgacaccctcaaccgtcgtggtctggacttgactggctttgttttagagctgcggggcttgtgcgttgtcctggggtatccgcatggagtggactaccagtgcaagaagcttccggagcaggatggtgacgatgcagagccccgcgccgcttgggaggtcaccgcggtgatcctcaccggctctcccgagaggacttctttggcaatcaccacggatggagattctttccccgccgcttgccagaacgccgcgctcctcgccatcggcactcttcaccagcgctatccggacgagctgtagcactcgccctaccgctaccaccctcgtcgaggaggagcccgcgattacgccaccttcagggatgctagctcggaggatgacgctaccatcatgtacctggcgcgcatggtggaggagtacgacgcggcccgtatcgacttccatcatatggtgcgccgcgggttggtcgagaacaacatgaagatcctggagctgcgtcaggagaatttgcagctgaagaaggacttggacgcggtggaggcacagttgtgtcagctcaagatcgcccagggagaggtctgtcgccccaagcgtcgccgcgtctgccgcagcctgaagatcactgcccacaagagtacctccaggcctgagctggttcgtcagtccttggcatggacttgcttcgtggagacccctcgcgcggagcccgcgcccttggttcctcaggaggaggaagcctctggcgttggtagcacggaggatctctctctgtttgctagttctgtgtgggattttcagatggtgacaaccaggagaagcgctgctactggtgactggtgagggcagtcatcctgaaggcagcaaccacaacaaccatggcagcccacctccacctcctccccagccaccaccaccgccacaagacaccaaccccatcctcacccaaatcctcgcccagcaagccaacatgatggttgctttcctccaccacatccagaatccgccgcaacacaatgctccacccccaccaccacccccgcagcattctaagcttgccgagttcctccgcatccgcccgcctaccttctctagctcccataaccctgttgatgctttggattggttgcatgccgtagggaaaaacttagacaccgtacagtgcaatgatgaggagaaagtcatcttcgccgctcaccaactgcaggggcccgcatctctatggtgggaccacttccaggctacgcagccagagggacagcctatcatttgggcccgtttcgccgccgccttccggaggacccatgtgcccgccggagtcatggcccttaagaagagggaatttcgggagttgaaacaaggcaactgctccgtgatggagtatttgcacgagttcaataatttggcccggtacgccccagaggatgttcgtgaagatgaggagaagcaggagaaatccctagcagggatggaccctgagctgtctatgcgtctggtctccggggactatcctgatttccagcgcctagtagacaagagcattcgcctggaagccaagcacaaggaattggagtcgcacaagcgtcgcttggcgaatttccgcaaccaacagggggctaaccaaaggatccgctacaccaatccctatccagggggatcctcctcgcagcagcagtagcaacaacctcgctccgcgccccgacctcaattcgtggtgcgcgtcctacagccacagcagcaacagaatcagcaagggacccgtgcaccccaccctcctgcaccagccgtgcagcctggacaaggccgcagggatgctcaaggtcaacagcgtctgtgcttcaactgcttcgagcacgggcactttgcggataaatgcccaaagccgaggcgccaacaaggtcaagcgcctccccgccccaacaacggtggtaaggatgtcactcggggccgtgtgaaccacgtgactgccgaggatatgctgacaactccagacgtcatcgttggtacgttcctcattcattccatccctgctaccattttgttcgactctggagcttcccactcatttatatctgtgccattcgtggggagaaatcagctgggggtagaaaggcttaggaaccctctgctcatcaccacccctggaggggttatgacagcaaagtattatagccctgccgttcctatagaaatccagggaattcctttcccctcggatttgattcttctagacaccaagaacttggatgtgatcctcgggatgaattggttggctcaattccaaggagtagtggattgcgcaaggcgcactgtcactctgtatcggggccctgatcaaccggttgttttctttgcacccccaacttccgccggcagttcagtacttcatcagctaggattgccagaaatacccatcgtcagtgagttcggagatgtgtttccggaagaactacccggtatgccgcccaagcgagagattgagttccggatagatcttgctccaggaaccactcctctgtacaagcgaccctaccatatggcagcaaatgaactggccgaagttaagagacagttggaagagttgaaagaaaaggggtatatacggccgagcacttccccctggggtgctcccgtgatttttgtggagaagaaagacaagacaaagagaatgtgtgttgactacagagctctcaatgaagttactatcaaaaacaagtaccctcttccccggatcgatgatctgttcgatcagcttaaaggtgccactgtattctccaagattgatcttcgttccggatatcaccagttgcgcatccgtgaagaagatatcccgaagaccgcattcaccacgcgatacggactgtatgaattcatggtaatgtcattcggtctaaccaatgctcctgccttcttcatgaacttaatgaacaaagtgttcatggaatacctggataagtttgttgtggtctttattgacgacatactggtgtactcacaatcagaggcagaccatcagcagcatctccgtttagtgttgggaaagctccgggagcaccaattgtatgccaagctcagcaagtgtgagttctgattgtccgaagtcaagttcttagggcacgtgatatctgctaaaggagttgctgtggatcccgaaacggtgaccgccgtcactgattggaagcaacccaagacagtcactcaggttcgcagctttttgggtttggcaggatactaccaaagattcatcgagaatttctccaaaattgccagacccatgacgcagttgctgaagaaggaagaaaaatttgtgtggagccctcaatgcgagaaagcattccaaactctcaaagaaaagctggtttcctcgccagtgttaatcttaccggatactcgcaaggaattcctggtgtactgtgacgcttcacgccaaggattggggtgcgtgttaatgcaggaaggtcatgtggtagcctatgcctcacgccagctacggccccatgaaggcaactaccctacccatgatttggagttggccgctgtggttcatgctctaaaaatctggcggcattatctcattggaaatcgctgcgaaatatataccgatcataagagtttgaaatacatcttcactcagtcggatctgaatcttcggcagagaagatggttagagctcatcaaggattatgatgtgggaatccactatcacccttgtaaggccaacgtggtcgcagacgcgctgagtcgaaaaagccgttgcaacactcttggcgtccgtggcattccacctgagcttaatcaatagttggaagccctgaacctaagcatcgttagccatggattcttggctacactggaagccaagcctaccttgctcgatcaaatccgcgaggctcagaagaatgatccagatatgcatgggatcctcaagaatatgaaacagggtaaagccgttggtttcatagaagatgaacacggaaccctatggaacggaaatcgtgtatgcgttccaaacgacaaggaacttaaacagttgatacttcaggaagctcacgaaagtccttattccatccaccctggcagcacgaagatgtacttagacttgaaagagaaatactggtgggttagtatgaagcgggaaattgcagagttcgtggccctttgtgatgtgtgccagcgtgtcaaagcaaagcaccaacgaccggccggacttctccaacctctccaagtaccagaatggaaatgggatgaaattgggatggatttcatcaccggagttccaaaaagccaagatggatatgattctatatgggtagtcgtggatcgactaaccaaggtggctcggtttattcctgtgaagaccacctatggagggaacaaattaactgaagtctacttcgctaggatcgtgagtctccatggcgtccctaagaaaattgtatctgataggggaagtcaattcacctctcacttctggaagaagctccaagaagagttgggtacccgattaaatttcagcaccgcgtatcacccgcaaaccgatggacagaccgagcgtctaaatcagatcctagaagatatgctccgtgcctgtgttctagattttgggaagacctgggataagagtctcccctatgccgagttctcctacaataacagctaccaatccagcatacaaatggcaccttatgaagcgttgtatggccgcaaatgccggacaccactattgtgggaccaagttggggaaagccaagtgttcgggacggatatcctgagagaagttgaagctaaagtcagaaccattcgggataatctaaaggtggcacagtcccggcagaagagttatgcagataaccgacgccgtaacctggaattcgcagtggatgattttgtgtaccttcgggtcacgccattgcggggtgtacacaggttccagacgaaagggaacctcgcacctaggtttgtgggtcctttccgcatcattgctcgacgcggagaagtcgcttaccagttggagctgcccgcatccttgggcaatgtgcatgatgtgttccatgtgtcgcaactcaagaaatgtcttcgagtgccgtccgagcaggccgattcagagcaaattgaagttcgcgaagacttgacctatgtagagaagccggtgaaggttctggacaccatggagcgcaggactaggaaccgggtaatccgtttttgcaaggtccaatggagcaaccacgccgaggaagaagctacctgggaacgtgaagacaagctgaaggcagcctatcccgatctcttcgccagttcttccgaatctcagggtcgagattccgtt

SEQ ID NO: 14648 - DNA, 4578 bp, Oryza sativa
  Clone ID: TFbOSC401513j.C1.o9.fg
atggagacaaggaatggttcacgcgactcgaacaacgccagtggcagcgaagagccgatcaatggagcacgtgccaacggtgcatctgacaacagtccgtccccaccgcccgagaacccaacaattgctcaggtgttggacaatcagactcagatgatgacaatgatgatgcaacagatgcagcaacagtaccatcaggtgttgcagcaggtgcagcagcaagcacagctgcagcagcagaacctgcagtttggttctccacctcctcagtccaaactgctagaatttcttcgtgtcaagccgcccaccttctcaagcaccaccaacccaatcgaggcccacgactggcttcatgccattgagaagaagctgaatcttttgcaatgcaacgagcaagagaaggttgcttttgctacacaccagctacaaggtcccgcttctatttggtgggacaactacatggtgacccgtccaactggggcagaggttacttggacagagtttcgtcatagtttcaataaagcacaggttcccgagggaattgtggcacaaaagaagagagagttccgttccctgcaacaaggaaccagaacagttatagagtatttgcatgagttcaaccgcctcgcgcgctacgcccctgaggacgtgcgtaccgatgccgagaggcaggagaagtttctgtcgggtcttgatgatgaattgaccaaccagttgatctctagagattatgaggactttgagaagcttgtggacaaggctatccgtcaagaggagcagtgtaacaaaatgaaccgtaagaggaaggcagcccagttcaggactccccaggggaagtgtcagaagcctcgtttcacgatgggacatcagggtggaccttccaccatgattatccggcagcaccgtccctaccacccgggtaatttcaacaagaacaacaacagtggcagtcacagcagcctcaacccgactccaagtccattaatgattccagctcagtcagatcagtcagatcagctagctcagccagctctgccagaacagcccaagaggttgggagaaaaacccgaactctgcttcaattgtaacaaacccggacacacggttggaaagtgcccgaagccaagacgtgccggacccaagttcgttcaggcccgtgttaatcatgcatctgcagaggaggcgcagtcagcaccagaggttatattgggcacattccccgtcaactcgacaccggcagtaatattgtttgattctggtgcaacccattcctttatttccaagcgttttgctggtgcacatgggttatctttagtgaagcttaagataccaatgcgagttcatactcctggaggtggcatgaccacaactcactactgcccatctgtgacagttgaaattcaagggttgatttttccagccaacctcattcttctcgaatccaaggacctagatgtcatacttggaatggattggttgacaaggcacagaggagtgattgattgcgccagccgcaccatcaagttgaccaatgcaaaaggagaggtggtaaccttccagtctcaagtgccgcagaagccagggattagtttaaaccaggctgctggtgaagaacaagaggtagcagtggagaaaaccactaagaaactagaggatattcctatagtcagagagtatccagaggtttttccggacgatctgacaacaatgccaccaaaaagggatatcgagttccggattgacttggtacctggaactgcaccgatccacaagaggccttacagaatgggagccaacgagttggcggaagtcaagaagcaagttgatgaacagttacagaagggatacatccgcccgagcacgtcgccttggggtgctccggttatctttgtggaaaagaaagacaaaaccaagaggatgtgcgtggactaccgcgcactcaatgaggtcactattaagaacaagtaccctttgccaaggattgatgatctgttcgatcagctgaaaggagctactgtgttctctaagatagaccttcggtcaggctatcaccagttgaggatccgcgaagaggatattccaaagacagcattcatcactcggtacgggttgttcgaatgcacagttatgtctttcggactcactaacgcacctgccttcttcatgaatttgatgaacaaggtgtttatggaatttctagacaagtttgtcgtggttttcatcgatgacatacttatctactccaagtccgaggaagaacatgagcagcatcttcggctggtacttgaaaagttaaaagagcaccagctatatgccaagttcagcaagtgcgacttctggcttaaggaagttcagtttctcggtcacatcgtgaatgctcaaggagtagctgtggatccagcaaatgtggagtcagttaccaagtggaccccacaaaggacagtcactcaggttcggagtttcttaggacttgcgggttattaccgccggttcattgagaacttctctaaaattgctaagccaatgacacagctattgaagaaggaagaaaagtttatctggtctgctgaatgcaataggagttttgaagaactcaaacgacggttggtgtctgcaccagtcttaatcctgcctgatcagacgaaagattttcaggtctattgtgatgcatctcgccaggggctaggatgtgtgttgatgcaggatggcaaagtggtttcttatgcttcacggcagttgcgtcctcatgaaggcaactacccgacgcatgatctggaattagccgcagttgttcatgctttaaagatttggcggcactatctcatcggtaaccgttgtgaggtatatacagatcacaaaagtctaaagtacatcttcacccaacctgatctgaatctccgacagcgaagatggttggagctaattaaagattatgatatgggaatacattatcatcccggcaaggctaatgtggttgcggatgccttgagcaggaagagctactgcaatgttgcatgggtagagcaactatgttgtgaggttcaacgcgatttggaacatctgaaccttggtatagttgagcacggattcgtggctgccctagaggcacaacccacactggtggagcaggttcgcatagctcaggcaagtgatcctgaaatagcagagctcaaaaagaacatgagggttggaaaagcccgaggttttgttgaggatgaacaaggaacaatctggatgggagaaagattgtgtgtacccgaaaacaaggaattaaaagacctgatactaaccgaggctcatcaaactcaatattccattcatcccggtagtactaagatgtaccaagacctcaaagagaagttttggtgggtcagcatgagaagggaaatagctgaattcgtagcactctgtgacgtctgtcaacgagtaaaggcagaacaccaaaggccagcaggtttgctacagccacttcagattccagaatggaagtgggaagaaatcggaatggatttcatcaccggtttgcccaggacatcatcggggcatgattctatttgggtagtcgttgaccgactcaccaaagtggctcacttcattccggtgcacactacctactcagggaagaaattagcagaactctatctggcaagaattatgtgtttacatggtgtacctaagaagatcgtgtctgatcgaggaagccaattcacttcaaagttctggcagaaattacaagaagaattaggaacccggttgaatttcagcaccgcttaccatccacaaacagatggccagaccgagcgagtcaatcaaatactagatgatatgttgagagcctgtgcgcttgactttggtggggcatgggacaaaagcttgccgtatgctgagttctcgtacaacaacagttaccaagctagtctgcagatggcaccgtttgaagcactgtatggacggaggtgtcgtactccgctcttctgggatcagacaggggaacgccagttgtttggtacagaagttttaaatgaggcagaagagaaagtcagagctgttagggaaagattgagaatcgcgcagtctcggcagaaaagctatgcagacaaccgccgaagggagctcgctttcgaaacaggggattatgtgtatctccgtgtcactccgctcaggggagtacatcgcttccaaaccaaaggaaagttggcaccacgctttgtgggaccatatcggattttggaacgtagaggtgaagttgcttaccagctcgagcttccctccaacatgcttggcatccataatgtgttccacgtctcccagttgaagaaatgtttgagagttcctgaggaacgggcaagtccggatcaaatcgaaatccaggaagacttgacgtatgtggagaagccaactcgtatcctcgaaaccagcgagagaaagaccagaaacaaagtaataagattctgcaaggttcagtggagccaccactcagaggaagaggccacttgggaaagagaagatgagttgaaggccacccacccgcacctcttcgccagctcttccgaatctcggggtcgagattccgtttaa

SEQ ID NO: 14649 - DNA, 4662 bp, Oryza sativa
  Clone ID: TFbOSC401564j.C1.o13.fg
atggcagttaaggaccggttcacgggaaaccctgggagacttaccgtgcttaccacaagcgggagtggctgttttactgctttcaactactgctttgaaatgcctgctttatgcaaaagaacccctagcttcctttggttatatcctgcatcatacctcctcttccggtttgttgcttgtgggttagtcagcggtcgatatcatgtgtcagtgatggggacaaggaatggttcacgcaactccaacaacgccagtggcagcgaagagccgatcaatggagcacgtgccaacggtgcatctgacaacagtccgtccccaccgcccgagaacccaacaattgctcaggtgttggacaatcagactcagatgatgacaatgatgatgcaacagatgcagcaacagtacaatcaggtgttgcaacaggtgcagcagcaagcacagcagcagcaacagaacctgcagtttggtcctccacctcctcagtccaaactgttagaatttcttcgtgtcaagccacccactttctcaagcaccaccaacccaatcgaggcccacgactggcttcatgccattgagaagaagctgaatcttttgcaatgcaacgagcaagagaaggttcccgagggaattgtggcacaaaagaagagagagttccgttccctgcaacaaggaaccagaacagttatagagtatttgcatgagttcaaccgcctcgcacgctacgcccctgaggacgtgcgtaccgatgacaggaggcaggagaagtttctgtccggtcttgatgatgaattgactaaccagttgatctctagagattatgaggactttgagaagctggtgaataaggctatccgtcaggaggagcactgtaacaaaataaaccgtaagaggaaggcagctcagttcaggactccccaggggaagagtcagaagcctcgtttcacgatgggacatcacggtggaccttccaccatgattatccgacagcaccgtccctaccacccgggtagcttcaacaagaaccaccatagtggcagtcacaacaacagtgagcagcacagcctcaaccctactccgagttcactaaagattccagcccaatcagttcagccagctctgccagaacagcccaagaggttgggagaaaaacccgaactctgcttcaattgtaacaaacccggacacacggttggaaagtgcccgaagccaagacgtgctggacccaagttcgttcaggcccgtgttaatcatgcatctgcagaggaggcgcagtcagcaccagaggttatattgggcacattccccgtcaactcgacaccggcagtaatattgtttgattctggtgcaacccattccttcatttccaagtgttttgctggtgcacatgggttatctttagtgaagcttaagataccaatgcgagttcatactcctggaggtggcatgaccacaactcactactgcccatctgtgacagttgaaattcaagggttgatttttccagcccacctcattcttctcgaatccaaggatctagatgtcatacttggaatggattggttgacaaggcacagaggagtgattgattgcgccagccgcaccatcaagttgaccaatgcaaaaggagaggtggtaaccttccagtctccagtgccgcagaagccagggatcagtttaaaccaggctgctggtgaagaacaagaggtagcagtggagaaaaccactaagaagctggaggatattcccatagtcagagagtatccagaggtttttccggacgatctgacaacaatgccaccaaaaagggatatcgagttccggattgacttggtacctggaactgcaccgatccacaagaggccttacagaatgggagccaacgagttggcggaagtcaagaagcaagtcgatgaacagttacagaagggatacatccgcccgagcacgtcgccttggggtgctccagttatctttgtggagaagaaagacaaaaccaagagaatgtgcgttgactaccgcgcactcaatgaggtcaccatcaaaaacaagtatcctttgccaaggattgatgatctgtttgatcagttgaaaggagctactgtgttctctaagatagacctgcgatcaggctatcaccagttgaggatccgcgaagaggatattccaaagacagcattcatcactcggtacgggttgttcgaatgcacagttatgtctttcggactcactaatgcacctgccttcttcatgaatttgatgaacaaggtgtttatggaatttctagataagtttgtcgtggttttcatcgatgacatacttatctactctaagtccgaggaagaacatgagcagcatctccggctggtacttgaaaagttaaaagagcaccagctatatgccaagttcagcaagtgcgacttctggcttaaggaagttcagtttctcgggcacatcgtgaatgctcaaggagtagctgtggatccagcaaatgtggagtcagttaccaaatggaccccaccaaggacagtcactcaggttcggagtttcttaggacttgcgggctattaccgccggttcattgagaacttctctaaaattgctaagccaatgacacagctattgaagaaggaagaaaagtttatctggtctgctgaatgcaataggagttttgaagaactcaaacgacggttggtgtctgcaccagtcttaatcctgcctgatcagacgaaagatttccaggtctattgtgatgcatctcgccaggggctaggatgtgtgttgatgcaggatggcaaagtggtttcttatgcttcacggcagttgcgtcctcatgaaggcaactacccaacgcatgatctggaattggccgcagttgttcatgctttaaagatttggcggcactatctcatcggtaaccattgtgaggtatatacagatcacaaaagtctaaagtacatcttcactcaacctgatttgaatctcagacagcgaagatggttggagctgatcaaggattatgatatgggaatacattatcatcctggcaaggctaatgtggttgcagatgcctcgagcaggaagagctactgcaatgttgcatgggtagagcaactatgttgtgaggttcaacgcaatttggaacatctgaaccttggtatagttgagcacggattcgtggttgccctagaggcacagcccacactggtggagcaggttcgcatagctcaagcaagtgatcctgaaatagcagagctcaaaaagaacatgagagttggaaaagcccgaggttttgttgaggatgaacaaggaacaatctggatgggagaaagattgtgtgtacccgaaaacaaggaattaaaagacctgatactaaccgaggctcatcaaactcaatattccattcatcccggtagtactaagatgtaccaagacctcaaagagaagttttggtggatcagcatgagaagggaaatagctgaattcgtagcactctgtgacgtctgtcaacgagtaaaggcagaacaccaaaggccagcaggtttgctacagccacttcagattctagaatggaagtgggaagaaatcggaatggatttcatcaccggtttgcccaggacgtcattggggcatgattctatttgggtagtcgttgaccgactcaccaaagtggctcacttcattccggtgcacactacctactcagggaagaaattagcagaactctatctggcaagaattatgtgtttacatggtgtacctaagaagatcgtgtctgatcgaggaagccaattcacttcaaagttctggcagaaattacaagaagaattgggaacccggttgaatttcagcactgcttaccatccacaaacagatggccagaccgagcgagtcaatcaaatactagaggatatgttgagagcctgtgcgcttgactttggtggagcatgggacaaaagcttgccgtatgctgagttctcgtacaacaacagttaccaagctagtctgcagatggcaccgtttgaagcactgtatggacgaaggtgtcgtactccgctcttctgggatcagacaggggaacgccaattgtttggtacagaagttttaaatgaggcagaagagaaagtcagagctgtcagggaaagattgagaattgcgcaatctcggcagaaaagctatgcagacaaccgccgaagggagctcgctttcgaaacaagggattatgtgtatctccgtgtcactccgctcaggggagtacatcgcttccaaaccaaaggaaagttggcaccacgctttgtgggaccatacaggatcttggaacgtagaggtgaagttgcttaccagcttgagcttccctccaacatgcttggcatccacaacgtgttccacgtctctcagttgaagaaatgtttgagagttcctgaggaacaggcaagtccggatcacatcgaaattcaggaagatctgacgtatgtggagaagccgactcgtatcctcgaaaccagcgagagaaagaccagaaacaaagtaatcagattctgcaaagttcagtggagtcatcactcagaagaagaggccacttgggaaagagaagatgagttgaaggccacccacccgcacctcttcgccagctcttccgaatctcgaggtcgagattccgtttaa

SEQ ID NO: 14650 - DNA, 6120 bp, Oryza sativa
  Clone ID: TFbOSC401577j.C1.o9.gm
atggagacaaggaatggttcacgcgactccaacaacgccagtggcagcgaagagccgatcaatggagcacgtgccaacagtgcatctgacaacagtccgtccccaccgcccgagaacccaacaattgctcaggtgttggacaatcagactcagatgatgacaatgatgatgcaacagatgcagcaacagtaccatcaagtgttgcagcaggtgcagcagcaagcacagcagcagcagcagaacctgcagtttggtcctccacctcctcagtccaaactgttagaatttcttcgtgtcaagccgcccactttctcaagcaccaccaacccaatcgaggcccacgactggcttcatgccattgagaagaagctgaatcttttgcaatgcaacgagcaagagaaggttcccgagggaattgtggcacaaaagaagagagagttccgttccctgcaacaaggaactagaacagttatagagtatttgcatgagttcaaccgcctcgcgcgctacgcccctgaggacgtgcgtaccgatgacgggaggcaggagaagtttctgtctggtcttgatgatgaattgactaaccagttgatctctaaagattatgaggactttgagaagctggtggataaggctatccgtcaggaggagcactgtaacaaaataaaccgtaagaggaaggcagctcagttcaggactccccaggggaagagtcagaagcctcgtttcacgatgggacgtcacggtggaccttccaccatgattatccggcagcaccgtccctaccacccgggtagcttcaacgagaaccaccatagtggcagtcacaacaacagtgagcagcatagcctcaaccctactccgagttcactaaagattccagctcaatcagttcagctagctctgccagaacagcccaagaggttgggagaaaaacccgaactctgcttcaattgtaacaaacccggacacacggttggaaagtgcccaaagccaagatgtgctggacccaagttcgttcaggcctgtgtcaatcatgcatctgcagaggaggcgcagtcagcaccagaggttatattgggcacattccccgtcaactcgacaccggcagtaatattgtttgattctggtgcaacccattccttcatttccaagcgttttgctggtgcacatgggttatctttagtgaagcttaagataccaatgcgagttcatactcctggaggtggcatgaccacaactcactactgcccatctgtgacagttgaaattcaagggttgatttttccaaccaacctcattcttctcgaatccaaggacctggatgtcatacttggaatggattggttgacaaggcacagaggagtgattgattgcgccagccgcaccatcaagttaaccaatgcaaaaggagaggtggtaaccttccagtctccagtgccgcagaagccagggatcagtttaaaccaggctgctggtgaagaacaagaggtagcagtggagaaaaccactaagaagctggaggatattcccatagtcagagagtatccagaggtttttccggacgatctgacaacaatgccaccaaaaagggataccgagttccggattgacttggtacctggaactgcaccgatccacaagaggccttacagaatgggagccaacgagttggcggaagtcaagaagcaagtcgatgaacagttacagaagggatacattcgcccgagcacgtcgccttggggtgctccggttatctttgtggagaagaaagacaaaaccaagaggatgtgcgttgactaccgcgcactcaatgaggtcaccatcaagaacaagtatcctttgccaaggattgatgatctgtttgatcagttgaaaggagctactgtgttctctaagatagacctgcgatcaggctatcaccagttgaggatccgcgaagaggatattccaaagacaacattcatcactcggtacgggttgttcgaatgcacagttatgtctttcggactcactaatgcacctgtcttcttcatgaatttgatgaacaaggtgtttatggaatttctagacaagtttgtcgtggtttttatcgatgacatacttatctactccaagtccgaggaagaacatgagcagcatctctggctggtacttgaaaagttaaaagagcaccagctatatgccaagttcagcaagtgcgacttctggcttaaggaagttcagtttctcggtcacatcgtgaatgctcaaggagtagctgtggatccagcaaatatggagtcagttaccaaatggaccccaccaaggacagtcactcaggttcggagtttcttaggacttgcgggctattaccgccggttcattgagaacttctctaaaattgctaagccaatgacagctattgaagaaggaagaaaagtttatctggatggcaaagtggtctcttatgcttcacggcagttgcgtcctcatgaaggcaactacccgacgcatgatctggaattggccgcagttgttcatgctttaaagatttggcggcactatctcatcggtaaccgttgtgaggtatatacatatcacaaaagtctaaagtacatcttcactcaacctgatttgaatctcagacagcgaagatggttggagctgatcaaggattatgatatgagaatacattatcatcccggcaaggctaacgtggttgcagatgccttgagcaggaagagctactgcaatgttgcatgggtagagcaactatgttgtgaggttcaacgcgatttggaacatctgaaccttggtatagttgagcacggattcgtggttgccctagaggcacagcccacactggtggagcaggttcgcatagctcaagcaagtaatcctgaaatagcagagctcaaaaagaacatgagagttggaaaagcccgaggttttgttgaggatgaacaaggaacaatctggatgggagaaagattgtgtgtacccgaaaacaaggaattaaaagacctgatactaaccgaggctcatcaaactcagtattccattcatcccggtagtactaagatgtaccaagacctcaaagagaagttctggtgggtcagcatgagaagggaaatagctgaattcgtagcactctgtgacgtctgtcaacgagtaaaggcagaacaccaaaggccagcagaagttttaaatgaggcagaagagaaagtcagagctatcagggaaagattgagaatcgcgcaatctcggcagaaaagctatgcagacaaccgccgaagggagctcgctttcgaaacaggggattatgtgatcttggaacgtagaggtgaagttgcttaccagcttgagcttccctccaacatgcttggcatccacaacgtgttccatgtctctcagttaaagaaatgtttgagagttcctgaggaacaggcaagtccggatcacatcgaaattcaggaagatctgacgcagcctgtagtgaattgtgatgtgtatgcaatttgtggacctttcacaatctgcaatgacaataaggatccgttctgcgactgtatgaaaggctactccataagatcaccgaaggactgggagcttgatgatcgaacaggagggtgcatgaggaatactcctttaagttgtggtgctggtaaggacaggacaggtctcacagataagttctaccctgtgcaaagcattaggttgcctcacaatgcagaaaatttgcaggctcctaccagtcgagaagaatgctcacagcaattatctgatgcttctccaaatggggatgagggggttctttacattcgacttgctgcaaaagagttgcaaaattcacaaaggaagatgagtggaaaaataattggtgttgccattgattttggaatggcgaagatgttggggagagaatttagtcgtgctatgactacaatgagaggaacaattggatacatagctcctgaatggattagtggaacagttgttacatccaaagtagatgtttatagctacgggatggttttgtttgaaatcatatcaggaaggaggaaccgaagtcatgaacatttcatggatggtgattattccttctactttcccatgcaagttgcacgcaagcttctcaaaggagagattggatgtcttgtggatgccaatttggaaggtgatgttaacctcatggaggttgaaagagcttgcaaaattgcatgttggtgcattcaagatcacgaatttgatcggccaacaatggccgaggtggtacagtcccttgaagacagggataagccaattgatgatcccacagcagtggagctaacaatctccaggatgaacgtgcgagtgatacacagagctgagtggggaggattgagagataggttagctaatcacaacacggggcacgttttccttctccaccactcttcccccgtgttcatcttctgcttccccatgcttctcccttgtcatgtccttcttggcctcctgctcctctccctgcacactccggcgagctccgccgccgccacggataccgtgtcacccggccattcacttgccggcagtgacaggcttgtctccaataacagtaagttcgccctcggcttcttcaagccaggtaatgagtcctcctacaccaaccacaactcctaccttggcatatggttcaacaaggtctccaagctaaccccgttgtggaccgccaatggcgagaatccagtggtggaccccacttcaccggagctcgcaatctccggtgatggaaacctggccatcctggatcatgccaccaaatccatcatatggtctacccgtgccaacatcacaaccaatgacaccattgccgtgcttctgaacaatggcaaccttgtcctacgaagctcctcaaactcatccaacattttctggcagagcttcgactacccaacagatacacttttcgctggtgcaaagattggctgggacaaggtcaccggcatgaaccgccgtcttgtttccaggaaaagttcggttgatcaggctcctggtatattttccttggagttagggctcaatggggagggtcatctgctatggaactcaactgtggcgtattggtccagtggggactggaacggtcgatacttcggcctagcgccagagatgataggcgatgtcatgccaaatttcacatttgtccacaatgacaaagaggcctacttcacatacaccttgtatgatgacacggctatcgtgcacgctggactagatgtctttgggataggttttgtgggtatgtggttggaaggaaaccaagaatggttcaagaattacaggcagcctgtagttcactgtgatgtgtatgcagtttgtggacctttcacaatctgtgacgacaataaggatctgttctgtgactgtatgaagggcttctccgtaagatcaccgaaggattgggagcttgacgatcaaacaggaggttgcatcaggaatactccattaagttgtggaagtagcaaggacaggacaagcctcacagataagttctaccctatgcaaaattttggaatggcaaagattttggggagggaatttagccgtgcaatgacaacaatgagaggaactattggatatatggctcctgaatggattagtggaacagttgttacatcaaaagtagatgtttacagctatggaatggttttgtttgagatcatatcaggaaggaggaactcaagtcatgaatgtttcagggatggtgattattcattcttttttcccatgcaagttgcacgcaaacttctcaatggagacatcggaagtcttgtggatgccagtttgaaaggtgacatgaacctagtggaggttgaaagagcttgcaaaattgcatgttggtgcattcaagacaacgaatttgatcgaccaacaatggctgaggtggtacaggcccttgagggtctacttgaactcgacatgcctccattgccaagactactaagtgctatcacaggagactcacattcagtgacaccacaatattttgattcagtgcccatcgtcttcatcaccgtggccgaagaagcccaccacagcccacctaacttacggacaacgggacaatgccgcgacaggtccagcgatacataa

SEQ ID NO: 14651 - DNA, 4545 bp, Oryza sativa
  Clone ID: TFbOSC401766j.C1.o14.fg
atggagataaggaatggttcacgcgactcgaacaacgccagtggcagcgaagagctgatcaatggagcatgtgccaacagtgcatctgacaacagtccgtccccaccgcccgagaacccaacaattgctcaggtgttggacaatcagactcagatgatgacagtgatgatgcaacagatgcagcaacagtaccatcaggtgttgcaacaggtgcagcagcaagcacagcagcagcagcagaacctgcagtttggtcctccacctcctcagtccaaactgttagaatttcttcgtgtcaagccgcccactttctcaagcaccaccaacccaatcgaggcccacgactggcttcatgccattgagaagaagctgaatcttttgcaatgcaacgagcaagagaaggttgcttttgctacacaccagctgcaaggtcccgcttctgtttggtgggacaactacatggtgacccgtccaactggggcagaagttacttggacagagttttgtcatagtttcaataaagcacaggttcccgagggaattgtggcacaaaagaagagagagttccgttccctgcaacaaggaaccagaacagttatagagtatttgcatgagttcaaccgcctcgcacgctacgcccctgaggacgtgcgtaccgatgacgggaggcgtgagaagtttctgtctggtcttgatgatgaattgactaaccagttgatctctagagattatgaggactttgagaagctggtggataaggctatccgtcaggaggagcactgtaacaaaataaaccgtaagaggaagacagctcagttcaggactccccaggggaagagtcagaagcctcgtttcacgatgggacatcacggtggaccttccaccatgattatccggcagcaccgtccctaccacccgggtagcttcaacaagaaccaccatagtggcagtcacaacaacagtgagcagcacagcctcaaccctactccgagttcactaaagattccagcccaatcagttcagccagctctgccagaacagcccaagaggttgggagaaaaacccgaactctgcttcaattgtaacaaacccggacacacggttggaaagtgcccgaagccaagacgtgctggacccaagttcgttcaggcccgtgttactcatgcatctgcagaggaggcgcagtcagccccagaggttatattgggcacattccccgtcaactcgacaccggcagtaatattgtttgattctggtgcaacccattccttcatttccaagcgttttgctggtgcacatgggttatctttagtgaagcttaagataccaatgcgagttcatactcctggaggtggcatgaccacaactcactactgcccatctgtgacagttgaaattcaagggttgatttttccagccaacctcattcttctcgaatccaaggacctagatgtcatacttggaatggattggttgacaaggcacagaggagtgattgattgcgccagccgcaccatcaagttgaccaatgcaaaaggagaggtggtaaccttccagtctctagtgccgcagaagccagggatcagtttaaaccaggctgctggtgaagaacaagaggtagcagtggagaaaaccactaagaagctggaggatattcccatagttagagagtatccaaaggtttttccggacgatctgacaacaatgccaccaaaaagggatatcgagttccggattgacttggtacctggaactgcaccgatccacaagaggccttacagaatgggagccaacgagttggcggaagtcaagaagcaagtcgatgaacagttacagaagggatacatccacccgagcacgtcgccttggggtgctccggttatctttgtggagaagaaagacaaaaccaagaggatgtgcgttgactaccgcgcattcaatgaggtcaccatcaagaacaagtatcctttgccaaggattgatgatctgtttgatcagttgaaaggagctactgtgttctctaagatagacctgcgatcaggctatcaccagttgaggatccacgaagaggatattccaaagacagcattcatcactcggtacgggttgttcgaatgcacagttatgtctttcggactcactaatacacctgccttcttcatgaatttgatgaacaaggtgtttatgaaatttctagacaagtttgtcgtggttttcatcgatgacatacttatctactccaagtccgaggaagaacatgagcagcatcttcggctggtacttgaaaagttaaaagagcaccagctatatgccaagttcagcaagtgcgacttctggcttaaggaagttcagtttctcggtcacatcgtgaatgctcaaggagtagctatggatccagcaaatgtggagtcagttaccaaatggaccccaccaaggacagtcactcaggttcggagtttcttaggacttgcgggctattaccgccggttcattgagaacttctctaaaattgctaagccaatgacacagctattgaagaaggaagaaaagtttatctggtctgctaaatgcaataggagttttgaagaactcaaacgacggttggtgtctgcaccagtcttaatcctgcctgatcagacgaaagatttccaggtctattgtgatgcatctcgccaggggctaggatgtgtgttgatgcaggatggcaaagtggtttcttatgcttcacggcagttgcgtcctcatgaaggcaactacccgacgcatgatctggaattggccgcagttgttcatgctttaaagatttggcggcactatctcatcggtaaccgttgtgaggtatatacagatcacaaaagtctaaaatacatcttcactcaacctgatttgaatctcagacagcgaagatggttggagctgatcaaggattatgatatgggaatacattatcatcccggcaaggctaatgtggttgcagatgccttgagcaggaagagctactgcaatgttgcatgggtagagcaactatgttgtgaggttcaacgcgatttggaacatctgaaccttggtatagttgagcacggattcgtggttgccctagaggcacagcccacactggtggagcaggttcgcatagctcaagcaagtgatcctgaagtagcagagctcaaaaagaacatgagagttggaaaagcccgaggttttgttgaggatgaacaaggaacaatctggatgggagaaagattgtgtgtacccgaaaacaaggaattaaaagacctgatactaaccgaggctcatcaaactcagtattccattctttccggtagtactaagatgtaccaagacctcaaagagaagttctggtgggttagcatgagaagggaaatagctgaattcgtagcactctgtgacgtctgtcaacgagtaaaggcagaacaccaaaggccagcaggtttgctacagccacttcagattccagaatggaagtgggaagaaatcggaatggatttcatcaccggtttgcccaggacgtcatcggggcatgattctatttgggtagtcgttgaccgactcaccaaagtggctcacttcattccagtgcacactacctactcagggaagaaattagcagaactctatctggcaagaattatgtgtttacatggtgtacctaagaagatcgtgtctgatcgaggaagccaattcacttcaaagttctggcagaaattacaagaagaattgggaacccggttgaatttcagtactgcttaccatccacaaacagatggccagaccgagcgagtcaatcaaatactagaggatatgttgagagcctgtgcgcttgactttggtggagcatgggacaaaagcttgccgtatgctgagttctcttacaacaacagttaccaagctagtctgcagatggcaccgtttgaagcactgtatggacgaaggtgtcgtactccgctcttctgggatcagacaggggaacgccaattgtttggtacagaagttttaaatgaggcagaagaaaaagtcagagctgttagggaaagattgagaattgcgcaatctcggcagaaaagctatgcagacaaccgccgaagggagctcgctttcgaaacaggggattatgtgtatctccgtgtcactccgctcaggggagtacatcgcttccaaaccaaaggaaagttggcaccacgctttgtgggaccatacaggatcttggaacgtagaggtgaagttgcttaccagcttgagcttccctccaacatgcttggcatccacaacgtgttccacgtctctcagttgaagaaatgtttgagagttcctgaggaacaggcaagtccggatcacatcgaaattcaggaagatctgacgtatgtggagaagccgactcgtatcctcgaaaccagtgagagaaggaccagaaacaaagtaatcagattctgcaaagttcagtggagtcatcactcagaagaagaggccacccacccgcacctcttcgccagctcttccgaatctcgaggtcgagattccgtttaa

SEQ ID NO: 14652 - DNA, 3717 bp, Oryza sativa
  Clone ID: TFbOSC401774j.C1.o5.fg
atgggacgtcacggtggaccttccaccatgattatccggcagcaccgtccctaccacccgggtagcttcaacaagaaccaccatagtggcagtcacaacaacagtgagcagcacagcctcaaccctactccgagttcactaaagattccagctcaatcagttcagccagctctgccagaacagcccaagaggttgggagaaaaacccgaactctgcttcaattgtaacaaacccggacacacggttggaaagtgcccgaagccaagatgtgctggacccaagttcgttcaggcccgtgtcaatcatgcatctgcagaggaggcgcagtcagcaccagaggttatattgggcacattccccgtcaactcgacaccggcagtaatattgtttgattctggtgcaacacattccttcatttccaagcgttttgctggtgcacatgggttatctttagtgaagcttaagataccaatgcgagttcatactcctggaggtggcatgaccacaactcactactgcccatctgtgacagttgaaattcaagggttgatttttccagccaacctcattcttctcgaatccaaggacctagatgtcatacttggaatggattggttgacaaggcacagaggagtgattgattgcgctagccgtaccatcaagttaaccaatgcaaaaggagaggtggtaaccttccagtctccagtgccgcagaagccagggatcagtttaaaccaggctgctggtgaagaacaagaggtagcagtggagaaaaccactaagaagctggaggatattcccatagtcagagagtatccaaaggtttttccagacgatctgacaacaatgccaccaaaaagggatatcgagttccggattgacttggtacctggaactgcaccgatccacaagaggccttacagaatgggagccaacgagttggcggaagtcaagaagcaagtcgatgaacagttacagaagggatacatccgcctgagcacgtcgccttggggtgctccggttatctttgtggagaagaaagacaaaaccaagaggatgtgcgttgactaccgcacactcaatgaggtcaccatcaagaacgagtatcctttaccaaggattgatgatctgtttgatcagttgaaaggagctactgtgttctctaagatagacctacaatcaggctatcaccagttgaggatccgcgaagaggatattccaaagacagcattcatcactcggtacgggttgtttgaatgcacagttatgtctttcggactcactaatgcacctgacttcttcatgaatttgatgaacaaggtgtttatggaatttctagacaagtttgtcgtggttttcatcgatgacatacttatctactccaagtccgaggaagaacatgagcagcatctccggttggtacttgaaaagttaaaagagcaccagctatatgccaagtttagcaagtgcgacttctggcttaaggaagttcagtttctcggtcacatcgtgaatgctcaaggagtagctgtggatccagcaaatgtggagtcagttaccaaatggaccccaccaaggacagtcactcaggttcggagtttcttaggacttgcgggctattaccgccggttcattcagaacttctctaaaattgctaagccaatgacacagctattgaagaaggaagaaaagtttatctggtctgctgaatgcaataggagttttgaagaactcaaacgatggttggtgtctgcaccagtcttaatcctgcctgatcagacaaaagatttccaggtctattgtgatgcatctcgccaggggctaggatgtgtgttgatgcaggatggcaaagtggtctcttatgcttcacggcagttgcgttctcatgaaggcaactacccgacgcatgatctggaattggccgcagttgttcatgctttaaagatttggcggcactatctcatcggtaaccgttgtgaggtatatacagatcacaaaagtctaaagtacatcttcactcaacctgatttgaatctcagacagcaaagatggttggagctgatcaaggattatgatatgggaatacattatcatcccggcaaggctaatgtggttgcagatgccttgagcaggaagagctactgcaatgttgcatgggtagagcaactatgttgtgaggttcaacgcgatttggaacatctgaaccttggtatagttgagcacggattcgtggttgccctagaggcacagcccacactggtggagcaggttcgcatagctcaagcaagtgatcctgaaatagcagagctcaaaaagaacatgagagttggaaaagcccgaggttttgttgaggatgaacaaggaacaatctggatgggagaaagattgtgtgtacccgaaaacaaggaattaaaagacctgatactaaccgaggctcatcaaactcagtattccattcatcccggtagtactaagatgtaccaagacctcaaagagaagttctggtgggtcagcatgagaagggaaatagctgaattcgtagcactctgtaacgtctatcaacgagtaaaggcagaacaccaaaggccagcaggtttgctacagccacttcagattccagaatggaagtgggaagaaatcggaatggatttcatcaccggtttgcccaggacgtcatcggggcatgattctatttgggtagtcgttgaccgactcaccaaagtggctcacttcattccggtgcacactacctactcagggaagaaattagcagaactctatctggcaagaattatgtgtttacatggtgtacctaagaagatcgtgtctgatcgaggaagccaatttacttcaaagttctggcagaaattacaagaagaattgggaacccggttgaatttcagcactacttaccatccacaaacagatggccagaccgagcgagtcaatcaaatactagaggatatgttgagagcctgtgcgcttgactttggtggagcatgggacaaaagcttgccgtatgctgagttctcttacaacaacagttaccaagctagtctgcagatggcaccgtttgaagcactgtatggacgaaggtgtcctactccactcttctgggatcagacaggggaacgccagttgtttggtacagaagttttaaatgaggcagaagagaaagtcagagctgttagggaaagattgagaatcgcgcaatctcggcagaaaagctatgcagacaaccgccgaagggagctcgctttcgaaacaggggattatgtgtatctccgtgtcactccactcaggggagtacatcgcttccaaaccaaaggaaagttggcaccacgctttgtgggaccatacaggatcttggaacgtagaggtgaagttgcttaccagcttgagcttccctccaacatgcttggcatccacaacgtgttccacgtctctcaattgaagaaatgtttgagaggacctgaggaacaggcaagtccggatcacatcaaaattcaggaagatctgacatatctggagaagccgactcgtatcctcgaaaccagcgagagaaggaccagaaacaaagtaatcagattctgcaaggttcagtggagtcatcactcagaagaagaggccacttgggaaagagaagatgagttgaaggccacccacccgcacctcttcgccagcacttccgaatctcgaggtcgagattccgtttaa

SEQ ID NO: 14653 - DNA, 2244 bp, Oryza sativa
  Clone ID: TFbOSC401854j.C1.o6.fg
atggagataaggaatggttcacgcgactcgaacaacgccagtggcagcgaagagccgatcaatggagcacgtgccaacggtgcatctgacaacagtccgtccccaccgcccgagaacccaacaattgctcaggtgttggacaatcagactcagataatgacaatgatgatgcaacagatgcagcaacagtaccatcaggtgatgcagcaggtgcagcagcaagcacagctgcagcagcagaacctgcagtttggtcctccacctcctcagtccaaactgttagaatttcttcgtgtcaagccgcccactttctcaagcaccaccaacccaatcgaggcccacgactggcttcatgccattgagaagaagctgaatcttttgcaatgcaacgagcaggagaaggttgcttttgctacacaccagctacaaggtcccgcttctatttggtgggacaactacatggtgacccgtccggctggggcagaggttacttggacagagtttcgtcatagtttcaataaagcacaggttcccgagggaattgtgggacaaaagaagagagagttccgttccctgcaacaaggaaccagaacagttatagagtatttgcatgagttcaaccgcctcgcgcgctacgcccctgaggacgtgcgtaccgatgccgagaagcaggagaagtttatgtctggtcttgatgatgaattgaccaaccagttgatctctagagactatgaggactttgagaagcttgtggacaaggctattcgtcaagaggagcagtgtaacaaaatgaaccgtaagaggaaggcagcccagttcaggactccccaggggaagtgtcagaagcctcgttacacgatgggacgtcacggtggaccttccaccatgattatccgacagcaccgtccctaccacccgggtagcttcaataagacccaccatagtgatagtcacaacaacagtgagcagcacagcctcaaccctactccgagttcactaaagattccagctcaatcagttcagccagctctgccagaacagcccaagaggttgggagaaaaacccgaactctgcttcaattgtaacaaacccggacacacggttggaaagtgcccgaagccaagacgtgctggacccaagttcgttcaggcccgtgttaatcatgcatctgcagaggaggcgcagtcagcaccagaggttatattgggcacattccccgtcaactcgacaccggcagtaatattgtttgattctggtgcaacccattccttcatttccaagcgttttgctggtgcacatgggttatctttagtgaagcttaagataccaatgcgagttcatactcctggaggtggcatgaccacaactcactactgcccatctgtgacagttgaaattcaagggttgatttttccagccaacctcattcttctcgaatccaaggacctagatgtcatacttggaatggattggttggcaaggcacagaggagtgattgattgcgccagccgcaccatcaagttgaccaatgcaaaaggagaggtggtaatcttccagtctccagtgccgcagaagccagggattagtttaaaccaggctgctggtgaagaacaagaggtagcagtggagaaaaccactaagaaactagaggatattcctatagtcagagagtatccagaggtttttccggacgatctgacaacaatgccaccaaaaagggatatcgagttccggatagacttggtaactggaactgcaccgatccacaagaggccttacagaatgggagccagcgagttggcggaagtcaagaagcaagtcgatgaacagttacagaagggatacatccgtccgagcacgtcgccttggggtgctccggttatctttgtggagaagaaagacaaaaccaagaggatgtgcgttgactaccgcgcactcaatgaggtcactattaagaacaagtaccctttgccaaggattgatgatctgttcgatcagctgaaaggagctactgtgttctctaagatagacctgcgatcaggttatcaccagttgaggatccgcgaagaggatattccaaagacagcattcacccaacctgatcacaaaagtctaaagtgcctaacatcaattgttgtctctttgggaaggacgaaaagcagtgcaaaccttggtgctgtcactggtggagaaatcatctttggtcggtcgaccaaattcgacaatagtccaggttccatttaa

SEQ ID NO: 14654 - DNA, 4689 bp, Oryza sativa
  Clone ID: TFbOSC401858j.C1.o23.fg
atggcagttaaggaccggttcacgggaaaccctgggagacttaccgtgctttccacaagcgggagtgggtttgatgcttgtgggctagtcggcggtcgatatcatgtgtcagtgatggagacaaggaatggttcacgcgactcgaacaacgctagtggcagcgaaaagccgatcaatggagcacgtgccaacagtgcatctgacaacagtccgtccccaccgcccgagaacccaacaattgctcaggtgttggacaatcagactcagatgatgacaatgatgatgcaacagatgcagcaacagtaccatcaggtgttgcaacaggtgcagcagcaagcacagctgcagcagcagaacctgcagtttggttctccacctcctcagtccaaactgctagaatttcttcgtgtcaagccgcccaccttctcaagcaccaccaacccaatcgaggcccacgactggcttcatgccattgagaagaagctgaatcttttgcaatgcaacgagcaagagaaggttgcttttgctacacaccagctgcaaggtcccgcttctatttggtgggacaactacatggtgacccgtccagctggggcagaggttacttggacagagtttcgtcatagtttcaataaagcacaggttcccgagggaattgtggcacaaaagaagagagagttccgttccctacaacaaggaaccagaacagttatagagtatttgcatgagttcaacctcctcgcgcgctacgcccctgaggacgtgcgtaccgatgccgagaggcaggagaagtttttgtctggtcttgatgatgaattgactaaccagttgatctctagagattatgaggactttgagaagctggtggataaggctatccgtcaggaggagcactgtaacaaaataaaccgtaagaggaaggcagctcagttcaggactccccaggggaagagtcagaagcctcgtttcacgatgggacgtcacggtggaccttccaccatgattatccgacagcaccgtccctaccacccgggtagcttcaacaagaaccaccataatggcagtcacaacaacagtgagcagcacagtctcaaccctactccgagttcactaaagattccagctcaatcagttcagccagctctgccagaacagcccaagaggttgggagaaaaacccgaactctgcttcaattgtaacaaacccggacacacggttggaaagtgcccgaagccaagacgtgctggacccaagttcgttcaggcccgtgttaatcatgcatctgcagaggaggcgcagtcagcaccagaggttatattgggcacattccccgtcaactcgacaccggcagtaatattgtttgattctggtgcaacccattccttcatttccaagcgttttgctggtgcacatgggttatccttagtgaagcttaagataccaatgcgagtgcatactcctggaggtggcatgaccacaactcactactgcccatctgtgacagttgaaattcaagggttgatttttccagccaacctcattcttctcgaatccaaggacctagatgtcatacttggaatggattggttaacaaggcacagaggagtgattgattgcgccagccgcaccatcaagttaaccaatgcaaaaggagaggtggtaaccttccagtctctagtgccgcggaagccagggatcagtttaaaccaggctgctggtgaagaacaagaggtagcagtggagaaaaccactaagaagctggaggatattcccatagtcagagagtatccagaggtttttccggacgatctgacaacaatgccaccaaaaagggatatcgagttccggattgacttggtacctggaactgcaccgatccacaagaggccttacagaatgggagccagcgagttggcggaagtcaagaagcaagtcgatgagcagttacagaagggatacatccgcccgagcacgtcgccttggggtgctccggttatctttgtggagaagaaagacaaaaccaagaggatgtgcgttgactaccgcgcactcaatgaggtcaccatcaagaacaagtatcctttgccaaggattgatgacctgtttgatcagttgaaaggagctactgtgttctctaagatagacctgcgatcaggctatcaccagttgaggatccgcgaagaggatattccaaagacagcattcatcactcggtacgggttgttcgaatgcacagttatgtctttcggactcactaatgcacctgccttcttcatgaatttgatgaacaaggtgtttatggaatttctagacaagtttgtcgtggttttcatcgatgacatacttatctactccaagtccgaggaagaacatgagcagcatcttcggctggtacttgaaaagttaaaagagcaccagctatatgccaagttcagcaagtgcgacttctggcttaaggaagttcagtttctcggtcacatcgtgaatgctcaaggagtagctgtggatccagcaaatgtggagtcagttaccaaatggaccccaccaaggacagtcactcaggttcggagtttcttaggacttgcgggctattaccgccggttcattgagaacttctctaaaattgctaagccaatgacacagctattgaagaaggaagaaaagtttatctggtctgctgaatgcaataggagttttgaagaactcaaacgacggttggtgtctgcaccagtcttaatcctgcctgatcagacgaaagatttccaggtctattgtgatgcatctcgccaggggctaggatgtgtgttgatgcaggatggcaaagtggtttcttatgcttcacggcagttgcgtcctcatgaaggcaactacccgacgcatgatctggaattagccgcagttgttcatgctttaaagatttggcggcactatctcatcggtaaccgttgtgaggtatatacagatcacaaaagtctaaagtacatcttcacccaacctgatctgaatctccgacagcgaagatggttggagctaattaaagattatgatatgggaatacattatcatcccggcaaggctaatgtggttgcggatgccttgagcaggaagagctactgcaatgttgcatgggtagagcaactatgtggtgaggttcaacgcgatttggaacatctgaaccttggtatagttgagcacggattcgtggctgccctagaggcacagcccacgctggtggagcaggttcgcatagctcaggcaagtgatcctgaaatagcagagctcaaaaagaacatgagggttggaaaagcccgaggttttgttgaggatgaacaaggaacaatctggatgggagaaagattgtgtgtacccgaaaacaaggaattaaaagacctgatactaaccgaggctcatcaaactcaatattccattcatcccggtagtactaagatgtaccaagacctcaaagaaaagttctggtgggtcagcatgagaagggaaatagctgagttcgtagcactctgtgacgtctgtcaacgagtaaaggcagaacaccaaaggccagcaggtttgctacagccacttcagattccagaatggaagtgggaagaaatcggaatggatttcatcaccggtttgcccaggacgtcatcggggcatgattctatttgggtagtcgttgaccgactcaccaaagtggctcacttcattccggtgcacactacctactcagggaagaaattagcagaactctatctatcaagaatcatgtgtttacatggtgtacctaagaagatcgtgtctgatcgaggaagccaattcacttcaaagttctggcagaaattacaagaagaattgggaacccggttgaatttcagcaccgcttaccatccacaaacagatggccagaccgagcgagtcaatcaaatactagaggatatgttgagagcttgtgcgcttgactttggtggggcatgggacaaaagcttgccgtatgctgagttctcgtacaacaacagttaccaagctagtctgcagatggcaccatttgaagcactgtatggacggaggtgtcgtactccgctcttctgggatcagacaggggaacgccagttgtttggtacagaagttttaaatgaggcagaagagaaagtcagagctgttagggaaagattgagaatcgcgcaatctcggcagaaaagctatgcagacaaccgccgaagggagctcgttttccaagtaggggattatgtgtatctccgtgtcactccgctcaggggagtacaccgcttccaaaccaaaggaaagttggcaccacgctttgtgggaccatatcggattttggaacgcaggggtgaagttgcttaccagcttgagcttccctccaacatgcttggcatccataatgtgttccacgtctctcagttgaagaaatgtttgagagttcctgaggaacaggcaagtccggatcaaatcgaaatccaggaagacttgacgtatgtggagaagccaactcgtatcctcgaaaccagcgagagaaagaccagaaacaaagtaataagattctgcaaggttcagtggagccaccactcagaggaagaggccacttgggaaagagaagatgagttgaaggccacccacccgcacctcttcgccagctcttccgaatctcggggtcgagattccgtttaa

SEQ ID NO: 14655 - DNA, 4242 bp, Oryza sativa
  Clone ID: TFbOSC403689j.C1.o1.fg
atggagataaggaatggttcacgcgactcgaacaacgccagtggcagcgaagagccgatcaatggagcacgtgccaacggtgcatctgacaacagtccgtccccaccgcccgagaacccaacaattgctcaggtgttggacaatcagactcagatgatgacaatgatgatgcaacagatgcagcaacagtaccatcaggtgatgcagcaggtgcagcagcaagcacagctgcagcagcagaacctgcaatttggtcctccgcctcctcagtccaaattgttagaatttcttcgtgtcaagccgcccaccttctcaagcaccaccaacccaatcgaggcccacgactggcttcatgccattgagaagaagctgaatcttttgcaatgcaacgagcaggagaaggttgcttttgctacacaccagctacaaggtcccgcttctatttggttcccgagggaattgtggcacaaaagaagagagttccgttccctgcaacaaggaaccagaacagttatagagtatttgcatgagttcaaccgcctcgcgcgctacgcccctgaggacgtgcgtaccgatgccgagaggcaggagaagtttttgtctggtcttgatgatgaattgactaaccagttgatctctagagattatgaggactttgagaagctggtggataaggctatccgtcaggaggagcacggtaacaaaataaaccgtaagaggaaggcagctcagttcaggactccccaggggaagagtcagaagcctcgtttcacgatgggacgtcacggtggaccttccaccatgattatccgacagcactgtccctaccacccgggtagcttcaacaagaaccaccatagtggcagtcacaacaacagtgagcagcacagtctcaaccctactccgagttcactaaagattccagctcaatcagttcagccagctctgccagaacagcccaagaggttgggagaaaaacccgaactctgcttcaattgtaacaaacccggacacacggttggaaagtgcccgaagccaagacgtgctggacccaagttcgttcaggcccgtgttaatcatgcatctgcagaggaggcgcagtcagcaccagaggttatattgggcacattccccgtcaactcgacaccggcagtaatattgtttgattctggtgcaacccattcctttatttccaagcgttttgctggtgcacatgggttatctttagtgaagcttaagataccaatgcgagttcatactcctggaggtggcatgaccacaactcactactgcccatctgtgacagttgaaattcaagggttgatttttccagccaacctcattcttctcgaatccaaggacctagatgtcatacttggaatggattggttggcaaggcacagaggagtgattgattgcgccagccgcaccatcaagttaaccaatgcaaaaggagaggtggtaacctcccagtctctagtgccgcggaagccagggattagtttaaaccaggctgctggtgaagaacaagaggtagcagtggagaaaatcactaagaagctggaggatattcccatagtcagagagtatccagaggtttttccggacgatctgacaacaatgccaccaaagagggatatcgagttccggattgacttggtacctggaactgcaccgatccacaagaggccttacagaatgggagccaacgagttggcggaagtcaagaagcaagtcgatgaacagttacagaagggatacatccgcccgagcacgtcgccttggggtgctccggttatctttgtggagaagaaagacaaaaccaagagaatgtgcattgactaccgcgcactcaatgaggtcaccatcaagaacaagtatcctttgccaaggattgatgatctgtttgatcagttgaaaggagctactgtgttctctaagatagacctgcgatcaggctatcaccagttgaggatccgcgaagaggatattccaaagacagcattcatcactcggtacgggttgttcgaatgcacagttatgtctttcggactcactaatgcacctgccttcttcatgaatttgatgaacaaggtgtttatggaatttctagacaagtttgtcgtggtttttatcgatgacatacttatctactccaagtccgaggaagaacatgagcagcatcttcggctggtacttgaaaagttaaaagagcaccaactatatgccaagttcagcaagtgcgacttctggcttaaggaagttcagtttctcggtcacatcgtgaatgctcaaggagtagctgtggatccagcaaatgtggagtcagttaccaaatggaccccaccaaggacagtcactcaggttcggagtttcttaggacttgcgggctattaccgccggttcattgagaacttctctaaaattgctaagccaatgacacagctattgaagaaggaagaaaagtttatctggtctgctgaatgcaataggagttttgaagaactcaaacgacggttggtgtctgcaccagtcttaatcctgcctgatcagacgaaagatttccagcgaagatggttggagctaattaaagattatgatatgggaatacactatcatcccggcaaggctaatgtggtagcagatgccttgagcaggaagagttactgcaacgtcgcatgggtagaggaactatgctgtgaggttcaacgtgatttggaacatttgaaccttggaatagttgagcgcggattcgtggctgccctagaggcacagcccacactgatggagcaggttcgcatagctcaagcaagtgatcctgaaatagcagagctcaaaaagaacatgagggttggaaaagcccgaggttttgttgaggacgaacaaggaacaatctggatgggagaaagattgtgtgtacccgaaaacaaggaattaaaagacctgatactaaccgaggctcatcaaactcaatattccattcatcccggcagtaccagaatgtaccaagacctcaaagaaaagttctggtgggtcagcatgagaagggaaatagctgagttcgtagcactctgtgacgtctgtcaacgagtaaaggcagaacaccaaaggccagcaggtttgctacagccacttcagattccagaatggaagtgggaagaaatcggaatggatttcatcaccggtttgcccaggacgtcatcggggcatgattctatttgggtagtcgttgaccgactcaccaaagtggcttacttcattccggtgcacactacctactcagggaagaaattagcagaactctatctggcaagaattatgtgtttacatggtgtacctaagaagattgtgtctgatcgaggaagccaattcacttcaaagttctggcagaaattacaagaagaattgggaacccggttgaatttcagcactgcttaccatccacaaacagatggccagactgagcgagtcaatcaaatactagaggatatgttgagagcatgtgcgcttgactttggtggagcatgggacaaaagcttaccgtatgctgagttctcgtacaacaacagttaccaagctagtctgcagatggcaccgtttgaagcactgtatggacgaaggtgtcgtactccgctcttctgggatcagacaggggaacgccaattgtttggtacagaagttttaaatgaggcagaagagaaagtcagagctgttagggaaagattgagaatcgcgcagtctcggcagaaaagctatgcagacaaccgccgaagggagctcgctttcgaaacaggggattatgtgtatctccgtgtcactccgcttaggggagtacatcgtttccaaaccaaaggaaagttggcaccacgctttgtgggaccatacaggatcttggaacgtagaggtgaagttgcttaccagcttgagcttccctccaacatgcttggcatccacaacgtgttccacgtctctcagttgaagaaatgtttgagagttcctgaggaacaggcaagtccggatcacatcgaaattcaggaagatctgacgtatgtggagaagccgactcgtatcctcgaaaccagcgagagaaggaccagaaacaaagtaataagattctgcaaggttcagtgtagccaccactcagaggaagaggccacttgggaaagagaagatgagttgaaggccacccacccgcacctcttcgccagctcttccgaatctcggggtcgagattccgtttaa

SEQ ID NO: 14656 - DNA, 4575 bp, Oryza sativa
  Clone ID: TFbOSC404799j.C1.o1.fg
atggagataaggaatggttcacgcgactcgaacaacgccagtggcagcgaagagccgaccaatggagcacgtgccaacggtgcatctgacaacagtccgtccccaccgcccgagaacccaacaattgctcaggtgttggacaatcagactcagatgatgacaatgatgatgcaacagatgcagcaacagtaccatcaggtgttgcagcaggtgcagcagcaagcacagctgcagcagcagaacctgcagtttggttctccacctcctcagtccaaactgctagaatttcttcgtgtcaagccgcccaccttctcaagcaccaccaacccaatcgaggcccacgactggcttcatgccattgagaagaagctgaatcttttgcaatgcaacgagcaggagaaggttgcttttgctacacaccagctacaaggtcccgcttctatttggtgggacaactacatggtgacccgtccagctggggcagagtttacttggacagagtttcgtcatagtttcaataaagcacaggttcccgagggaattgtggcacaaaagaagagagagttccgttccctgcaacaaggaaccagaacagttatagagtatttgcatgagttcaacctcctcgcgcgctacgcccctgaggacgtgcgtaccgatgccgagaagcaggagaagtttctgtctggtcttgatgatgaattgactaaccagttgatctctagagattatgaggactttgagaagctggtggataaggctatccgtcaggaggagcactgtaacaaaataaaccgtaagaggaaggcagctcagttccggactccccaggggaagagtcagaagcctcgtttcacgatgggacatcacggtggaccttccaccatgattatccggcagcaccgtccctaccacccgggtaacttcaacaagaaccaccatagtgacagtcacaacaatagtgagcagcacagcctcaaccctactccgagttcactaaagattccagctcaatcagttcagccagctctgccagaacagcccaagaggttgggagaaaaacccgaactctgcttcaattgtaacaaacccggacacacggttggaaagtgcccgaagccaagacgtgccggacccaagttcgttcaggcccgtgttaatcatgcatctgcagaggaggcgcagtcagcaccagaggttatattgggcacattccccgtcaactcgacaccggcagtaatattgtttgattctggtgcaacccattcctttatttccaagcgttttgctggtgcacatgggttatctttagtgaagcttaagataccaatgcgagttcatactcctggaggtggcatgaccacaactcactactgcccatctgtgacagttgaaattcaagggttgatttttccagccaacctcattcttctcgaatccaaggacctagatgtcatacttggaatggattggttggcaaggcacagaggagtgattgattgcgccagccgcaccatcaagttgaccaatgcaaaaggagaggtggtaatcttccagtctccagtgccgcagaagccagggattagtttaaaccaggctgctggtgaagaacaagaggtagcagtggagaaaaccactaagaagctggaggatattcccatagtcagagagtatccagaggtttttccggatgatctgacaacaatgccaccaaaaagggatatcgagttccggattgacttggtacctggaactgcaccgatccacaagaggccttacagaatgggagccaacgagttggcggaagtcaagaagcaagttgatgaacagttacagaagggatacatccgcccgagcacgtcgccttggggtgctccggttatctttgtggaaaagaaagacaaaaccaagaggatgtgcgtggactaccgcgcactcaatgaggtcactattaagaacaagtaccctttgccaaggattgatgatctgttcgatcagctgaaaggagctactgtgttctctaagatagacctttggtcaggctatcaccagttgaggatccgcgaagaggatattccaaagacagcattcatcactcggtacgggttgttcgaatgcacagttatgtctttcggactcactaacgcacctgccttcttcatgaatttgatgaacaaggtgtttatggaatttctagacaagtttgtcatggttttcatcgatgacatacttatctactccaagtccgaggaagaacatgagcagcatcttcggctggtacttgaaaagttaaaagagcaccagctatatgccaagttcagcaagtgcgacttctggcttaaggaagttcagtttcttggtcacatcgtgaatgctcaaggagtagctgtggatccagcaaatgtggagtcagttaccaaatggaccccaccaaggacagtcactcaggttcggagtttcttaggacttgcgggttattaccgccggttcattgagaacttctctaaaattgctaagccaatgacacagctattgaagaaggaagaaaagtttatctggtctgctgaatgcaataggagttttgaagaactcaaacgacggttggtgtctgcaccagtcttaatcctgcctgatcagacgaaagatttccaggtctattgtgatgcatctcgccaggggctaggatgtgtgttgatgcaggatggcaaagtggtttcttatgcttcacggcagttgcgtcctcatgaaggcaactacccgacgcacgacctggaattggccgcagtcgttcatgctttaaagatttggcggcactatctcatcagtaaccgttgtgaggtatatacagatcacaaaagtctaaagtacatctttactcaacctgatttgaatctcagacagcgaagatggttggagctgatcaaagattatgatatgggaatacattatcatcccggcaaggctaatgtggttgcggatgccttgagcaggaagagctactgcaatgttgcatgggtaaagcaactatgttgtgaggttcaacgcgatttggaacatctgaaccttggtatagttgagcacggattcgtggctgccctagaggcacagcccacactggtggagcaggttcgcatagctcaagcaagtgatcctgaaatagcagagctcaaaaagaacatgagagttggaaaagcccgaggttttgttgaggatgaacaaggaacaatctggatgggagaaagattgtgtgtacccgaaaacaaggaattaaaagacctgatactaaccgaggctcatcaaactcaatattccattcatcccggtagtactaagatgtaccaagacctcaaagaaaagttctggtgggtcagcatgagaagggaaatagctgagttcgtagcactctgtgacgtctgtcaacgagtaaaggcagaacaccaaaggccagcaggtttgctacagccacttcagattccagaatggaagtgggaagaaatcggaatggatttcatcaccggtttgcccaggacgtcatcggggcatgattctatttgggtagtcgttgaccgactcaccaaagtggctcacttcattccggtgcacactacctactcagggaagaaattagcagaactctacctggcaagaattatgtgtttacatggtgtacctaagaagatcgtgtctgatcgaggaagccaattcacttcaaagttctggcagaaattacaagaagaattgggaacccggttgaatttcagcaccgcttaccatccacaaacagatggccagaccgagcgagtcaatcaaatactagaggatatgttgagagcatgtgcgcttgactttggtggagcatgggacaaaagcttgccgtatgctgagttctcgtacaacaacagttaccaagctagtctgcagatggcaccgtttgaagcactgtatggacggaggtgtcgtactccgctcttctgggatcagacaggggaacgccagttgtttggtacagaagttttaaatgaggcagaagagaaagtcagagctgttagggaaagattgagaatcgcgcagtctcggcagaaaagctatgcagacaaccgccgaagggagctcgctttcgaaacaggggattatgtgtatctccgtgtcactccgctcaggggagtacatcgcttccaaaccaaaggaaagttggcaccacgctttgtgggaccatatcggattttggaacgtagaggtgaagttgcttaccagctcgagcttccctccaacatgcttggcatccataatgtgttccacgtctcccagttgaagaaatgtttgagagttcctgaggaacaggcaagtccggatcaaatcgaaatccaggaagacttgacgtatgtggagaagccaactcgtatcctcgaaaccagcgagagaaagaccagaaacaaagtaataagattctgcaaggttcagtggagccaccactcagaggaagaggccacttgggaaagagaagatgagttgaaggccacccacccgcacctcttcgccagctcttccgaatctcggggtcgagattccgtttaa

SEQ ID NO: 14657 - DNA, 4575 bp, Oryza sativa
  Clone ID: TFbOSC404802j.C1.o1.fg
atggagataaggaatggttcacgcgactcgaacaacgccagtggcagcgaagagccgatcaatggagcacgtgccaacggtgcatctgacaacagtccgtccccaccgcccgagaacccaacaattgctcaggtgttggacaatcagactcagatgatgacaatgatgatgcaacagatgcagcaacagtaccatcaggtgttgcagcaggtgcagcagcaagcacagctgcagcagcagaacctgcagtttggtcctccacctcctcagtccaaactgttagaatttcttcgtgtcaagccgcccaccttctcaagcaccaccaacccaatcgaggcccacgactggcttcatgccattgagaagaagctgaatcttttgcaatgcaacgagcaggagaaggttacttttgctacacaccagctacaaggtcccgcttctatttggtgggacaactacatggtgacccgtccagctggggcagaggttacttggacagagtttcgtcatagtttcaataaagcacaggttcccgagggaattgtggcacaaaagaagagagagttccgttccctgcaacaaggaaccagaacagttatagagtatttgcatgagttcaaccgcctcgcgcgctacgcccctgaggacgtgcgtaccgatgccgagaggcaggagaagtttttgtctggtcttgatgatgaattgactaaccagttgatctctagagattatgaggactttgagaagctggtggataaggctatccgtcaggaggagcactgtaacaaaataaaccgtaagaggaaggcagctcagttcaggactccccaggggaagagtcagaagcctcgtttcacgatgggacatcacggtggaccttccaccatgattatccggcagcaccgtccctaccacccgggtaacttcaacaagaaccaccatagtgacagtcacaacaatagtgagcagcacagcctcaaccctactccgagttcactaaagattccagctcaatcagttcagccagctctgccagaacagcccaagaggttgggagaaaaacccgaactctgcttcaattgtaacaaacccggacacacggttggaaagtgcccgaagccaagacgtgccggacccaagttcgttcaggcccgtgttaatcatgcatctgcagaggaggcgcagtcagcaccagaggttatattgggcacattccccgtcaactcgacaccggcagtaatattgtttgattctggtgcaacccattccttcatctccaagcgttttgctggtgcacatgggttatctttagtgaagcttaagataccaatgcgagttcatactcctggaggtggcatgaccacaactcactactgtccatctgtgacagttgaaattcaagggttgatttttccagccaacctcattcttctcgaatccaaggacctagatgtcatacttggaatggattggttggcaaggcacagaggagtgattgattgcgccagccgcaccatcaagttgaccaatgcaaaaggagaggtggtaatcttccagtctccagtgccgcagaagccagggattagtttaaaccaggctgctggtgaagaacaagaggtagcagtggagaaaaccactaagaagctggaggatattcccatagtcagagagtatccagaggtttttccggatgatctgacaacaatgccaccaaaaagggatatcgagttccggattgacttggtacctggaactgcaccgatccacaagaggccttacagaatgggagccaacgagttggcgaaagtcaagaagcaagttgatgaacagttacagaagggatacatccgcccgagcacgtcgccttggggtgctccggttatctttgtggaaaagaaagacaaaaccaagaggatgtgcgtggactaccgcgcactcaatgaggtcactattaagaacaagtatccgttgccaagaattgatgatctgtttgatcagttgaaaggagctacggtgttctctaagatagacctgcgatcaggttatcaccagttgaggatccgcgaagaggatattccaaagacagcattcatcactcggtacgggttgttcgaatgcacagttatgtctttcggactcactaacgcacctgccttcttcatgaatttgatgaacaaggtgtttatggaatttctagacaagtttgtcgtggttttcatcgatgacatacttatctactccaagtccgaggaagaacatgagcagcatcttcggctggtacttgaaaagttaaaagagcaccagctatatgccaagttcagcaagtgcgacttctggcttaaggaagttcagtttcttggtcacatcgtgaatgctcaaggagtagctgtggatccagcaaatgtggagtcagttaccaaatggaccccaccaaggacagtcactcaggttcggagtttcttaggacttgcgggttattaccgccggttcattgagaacttctctaaaattgctaagccaatgacacagctattgaagaaggaagaaaagtttatctggtctgctgaatgcaataggagttttgaagaactcaaacgacggttggtgtctgcaccagtcttaatcctgcctgatcagacgaaagatttccaggtctattgtgatgcatctcgccaggggctaggatgtgtgttgatgcaggatggcaaagtggtttcttatgcttcacggcagttgcgtcctcatgaaggcaactacccgacgcacgatctggaattggccgcagtcgttcatgctttaaagatttggcggcactatctcatcagtaaccgttgtgaggtatatacagatcacaaaagtctaaagtacatcttcacccaacctgatctgaatctccgacagcgaagatggttggagctaattaaagattatgatatgggaatacactatcatcccggcaaggctaatgtggttgcggatgccttgagcaggaagagctactgcaatgttgcatgggtaaagcaactatgttgtgaggttcaacgcgatttggaacatctgaaccttggtatagttgagcacggattcgtggctgccctagaggcacagcccacacttgtggagcaggttcgcatagctcaagcaagtgatcctgaaatagcagagctcaaaaagaacatgagagttggaaaagcccgaggttttgttgaggatgaacaaggaacaatctggatgggagaaagattgtgtgtacccgaaaacaaggaattaaaagacctgatactaaccgaggctcatcaaactcagtattccattcatcccggtagtactaagatgtaccaagacctcaaagagaagttctggtgggtcagcatgagaagggaaatagctgagttcgtagcactctgtgacgtctgtcaacgagtaaaggcagaacaccaaaggccagcaggtttgctacagccacttcagattccagaatggaagtgggaagaaatcggaatggatttcatcaccggtttgcccaggacgtcatcggggcatgattctatttgggtagtcgttgaccgactcaccaaagtggctcacttcattccggtgcacactacctactcagggaagaaattagcagaactctatctggcaagaattatgtgtttacatggtgtacctaagaagatcgtgtctgatcgaggaagccaattcacttcaaagttctggcagaaattacaagaagaattgggaacccggttgaatttcagcaccgcttaccatccacaaacagatggccagaccgagcgagtcaatcaaatactagaggatatgttgagagcctgtgcgcttgactttggtggagcatgggacaaaagcttgccgtatgctgagttctcttacaacaacagttaccaagctagtctgcagatggcaccatttgaagcactgtatggacgaaggtgtcgtactccgctcttctgggatcagacaggggaacgccaattgtttggtacagaagttttaaatgaggcagaagaaaaagtcagagctgtcagggaaagattgagaatcgcgcaatctcggcagaaaagctatgcagacaaccgccgaagggagctcgttttccaagtaggggattatgtgtatctccgtgtcactccgctcaggggagtacatcgcttccaaaccaaaggaaagttggcaccacgctttgtgggaccatatcgaattttggaacgtagaggtgaagttgcttaccagctcgagcttccctccaacatgcttggcatccataatgtgttccacgtctcccagttgaagaaatgtttgagagttcctgaggaacaggcaagtccggatcaaatcgaaatccaggaagacttgacgtatgtggagaagccaactcgtatcctcgaaaccagcgagagaaagaccagaaacaaagtaataagattctgcaaggttcagtggagccaccactcagaggaagaggccacttgggaaagagaagacgagttgaaggccacccacccgcacctcttcgccagctcttccgaatctcggggtcgagattccgtttaa

SEQ ID NO: 14658 - DNA, 4686 bp, Oryza sativa
  Clone ID: TFbOSC405598j.C1.o1.fg
atggcgggctgtgagtgcatggttttgctggtcgcacccatagcagttaaggaccggttcacgggaaaccctgggagacttaccgtgcttaccacaagcgggagtggcagttttactgctttcaactactgctttgaaatgcctgctttatgcaaaagaacccctagcttcctttggttatatcctgcatcatacctcctcttccgagttgaagttcttctcagttggagctgtctcagagaggttggtttcctcgctgccgtcaagatggagataaggaatggttcacgcgactcgaacaacgccagtggcagcgaagagctgatcaatggagcatgtgccaacagtgcatctgacaacagtccgtccccaccgcccgagaacccaacaattgctcaggtgttggacaatcagactcagatgatgacagtgatgatgcaacagatgcagcaacagtaccatcaggtgttgcaacaggtgcagcagcaagcacagcagcagcagcagaacctgcagtttggtcctccacctcctcagtccaaactgttagaatttcttcgtgtcaagccgcccactttctcaagcaccaccaacccaatcgaggcccacgactggcttcatgccattgagaagaagctgaatcttttgcaatgcaacgagcaagagaaggttgcttttgctacacaccagctgcaaggtcccgcttctgtttggtgggacaactacatggtgacccgtccaactggggcagaagttacttggacagagttttgtcatagtttcaataaagcacaggttcccgagggaattgtggcacaaaagaagagagagttccgttccctgcaacaaggaaccagaacagttatagagtatttgcatgagttcaaccgcctcgcacgctacgcccctgaggacgtgcgtaccgatgacgggaggcgtgagaagtttctgtctggtcttgatgatgaattgactaaccagttgatctctagagattatgaggactttgagaagctggtggataaggctatccgtcaggaggagcactgtaacaaaataaaccgtaagaggaagacagctcagttcaggactccccagggaagacaccgtccctaccacccgggtagcttcaacaagaaccaccatagtggcagtcacaacaacagtgagcagcacagcctcaaccctactccgagttcactaaagattccagcccaatcagttcagccagctctgccagaacagcccaagaggttgggagaaaaacccgaactctgcttcaattgtaacaaacccggacacacggttggaaagtgcccgaagccaagacgtgctggacccaagttcgttcaggcccgtgttactcatgcatctgcagaggaggcgcagtcagccccagaggttatattgggcacattccccgtcaactcgacaccggcagtaatattgtttgattctggtgcaacccattccttcatttccaagcgttttgctggtgcacatgggttatctttagtgaagcttaagataccaatgcgagttcatactcctggaggtggcatgaccacaactcactactgcccatctgtgacagttgaaattcaagggttgatttttccagccaacctcattcttctcgaatccaaggacctagatgtcatacttggaatggattggttgacaaggcacagaggagtgattgattgcgccagccgcaccatcaagttgaccaatgcaaaaggagaggtggtaaccttccagtctctagtgccgcagaagccagggatcagtttaaaccaggctgctggtgaagaacaagaggtagcagtggagaaaaccactaagaagctggaggatattcccatagttagagagtatccaaaggtttttccggacgatctgacaacaatgccaccaaaaagggatatcgagttccggattgacttggtacctggaactgcaccgatccacaagaggccttacagaatgggagccaacgagttggcggaagtcaagaagcaagtcgatgaacagttacagaagggatacatccacccgagcacgtcgccttggggtgctccggttatctttgtggagaagaaagacaaaaccaagaggatgtgcgttgactaccgcgcattcaatgaggtcaccatcaagaacaagtatcctttgccaaggattgatgatctgtttgatcagttgaaaggagctactgtgttctctaagatagacctgcgatcaggctatcaccagttgaggatccacgaagaggatattccaaagacagcattcatcactcggtacgggttgttcgaatgcacagttatgtctttcggactcactaatacacctgccttcttcatgaatttgatgaacaaggtgtttatgaaatttctagacaagtttgtcgtggttttcatcgatgacatacttatctactccaagtccgaggaagaacatgagcagcatcttcggctggtacttgaaaagttaaaagagcaccagctatatgccaagttcagcaagtgcgacttctggcttaaggaagttcagtttctcggtcacatcgtgaatgctcaaggagtagctatggatccagcaaatgtggagtcagttaccaaatggaccccaccaaggacagtcactcaggttcggagtttcttaggacttgcgggctattaccgccggttcattgagaacttctctaaaattgctaagccaatgacacagctattgaagaaggaagaaaagtttatctggtctgctaaatgcaataggagttttgaagaactcaaacgacggttggtgtctgcaccagtcttaatcctgcctgatcagacgaaagatttccaggtctattgtgatgcatctcgccaggggctaggatgtgtgttgatgcaggatggcaaagtggtttcttatgcttcacggcagttgcgtcctcatgaaggcaactacccgacgcatgatctggaattggccgcagttgttcatgctttaaagatttggcggcactatctcatcggttaccgttgtgagcgaagatggttggagctgatcaaggattatgatatgggaatacattatcatcccggcaaggctaatgtggttgcagatgccttgagcaggaagagctactgcaatgttgcatgggtagagcaactatgttgtgaggttcaacgcgatttggaacatctgaaccttggtatagttgagcacggattcgtggttgccctagaggcacagcccacactggtggagcaggttcgcatagctcaagcaagtgatcctgaagtagcagagctcaaaaagaacatgagagttggaaaagcccgaggttttgttgaggatgaacaaggaacaatctggatgggagaaagattgtgtgtacccgaaaacaaggaattaaaagacctgatactaaccgaggctcatcaaactcagtattccattctttccggtagtactaagatgtaccaagacctcaaagagaagttctggtgggttagcatgagaagggaaatagctgaattcgtagcactctgtgacgtctgtcaacgagtaaaggcagaacaccaaaggccagcaggtttgctacagccacttcagattccagaatggaagtgggaagaaatcggaatggatttcatcaccggtttgcccaggacgtcatcggggcatgattctatttgggtagtcgttgaccgactcaccaaagtggctcacttcattccagtgcacactacctactcagggaagaaattagcagaactctatctggcaagaattatgtgtttacatggtgtacctaagaagatcgtgtctgatcgaggaagccaattcacttcaaagttctggcagaaattacaagaagaattgggaacccggttgaatttcagtactgcttaccatccacaaacagatggccagaccgagcgagtcaatcaaatactagaggatatgttgagagcctgtgcgcttgactttggtggagcatgggacaaaagcttgccgtatgctgagttctcttacaacaacagttaccaagctagtctgcagatggcaccgtttgaagcactgtatggacgaaggtgtcgtactccgctcttctgggatcagacaggggaacgccaattgtttggtacagaagttttaaatgaggcagaagaaaaagtcagagctgttagggaaagattgagaattgcgcaatctcggcagaaaagctatgcagacaaccgccgaagggagctcgctttcgaaacaggggattatgtgtatctccgtgtcactccgctcaggggagtacatcgcttccaaaccaaaggaaagttggcaccacgctttgtgggaccatacaggatcttggaacgtagaggtgaagttgcttaccagcttgagcttccctccaacatgcttggcatccacaacgtgttccacgtctctcagttgaagaaatgtttgagagttcctgaggaacaggcaagtccggatcacatcgaaattcaggaagatctgacgtatgtggagaagccgactcgtatcctcgaaaccagtgagagaaggaccagaaacaaagtaatcagattctgcaaagttcagtggagtcatcactcagaagaagaggccacccacccgcacctcttcgccagctcttccgaatctcgaggtcgagattccgtttaa

SEQ ID NO: 14659 - DNA, 4377 bp, Oryza sativa
  Clone ID: TFbOSC406439j.C1.o14.fg
atggagacaaggaatggttcacgcgactccaacaacgccagtggcagcgaagagccgatcaatggagcacgtgccaacggtgcatctgacaacagtccgtccccaccgcccgagaacccaacaattgctcaggtgttggacaatcagactcggatgatgacaatgatgatgcaacagatgcagcaacagtaccatcaggtgttgcagcaggtgcagcagcaagcacagctgcagcagcagaacctgcagtttggtcctccacctcctcagtccaaactgttagaatttcttcgtgtcaagccgcccaccttctcaagcaccaccaacccaatcgaggcccacgactggcttcatgccattgagaagaagctgaatcttttgcaatacaacgagcaggagaaggttgcttttgctacacaccagctacaaggtcccgcttctatttggtgggacaactacatggtgacccgtccaactggggcagaagttacttggacagagttttgtcatagtttcaataaagcacaggttcccgagggaattgtggcacaaaagaagagagagttccgttccctgcaacaaggaaccagaacagttatagagtatttgcatgagttcaaccgcctcgcgcactacgcccctgaggacgtgcgtaccgatgccgagaggcaggagaagtttctgtctggtcttgatgatgaattgaccaaccagttggtctctagagattatgaggactttgagaagcttgtggacaaggctatccgtcaagaggagcagtgtaacaaaatgaaccgtaagaggaaggcagcccagttcaggactccccaggggaagtgtcagaagcctcgtttcacgatgggacatcacggtggaccttccaccatgattatccggcagcaccgtccctaccacccgggtaacttcaacaagaaccaccatagtgacagtcacaacaatagtaagcagcacagcctcaaccctactccgagttcactaaagattccagctcaatcagttcagccagctctgccagaacagcccaagaggttgggagaaaaacccgaactctgcttcaattgtaacaaacccggacacacggttggaaagtgcccgaagccaagacgtgccggacccaagttcgttcaggcccgtgttaatcatgcatctgcagaggaggcgcagtcagcaccagaggttatattgggcacattccccgttaactcgacaccggcagtaatattgtttgattctggtgcaacccattccttcatttccaagcgttttgctggtgcacatgggttatctttagtgaagcttaagataccaatgcgagttcatactcctggaggtggcatgaccacaactcactactgcccatctgtgacagttgaaattcaagggttgatttttccagccaacctcattcttctcgaatccaaggacctagatgtcatacttggaatggattggttggcaaggcacagaggagtgattgattgcgccagccgcaccatcaagttgaccaatgcaaaaggagaggtggtaatcttccagtctccagtgccgcagaagccagggattagtttaaaccaggctgctggtgaagaacaagaggtagcagtggagaaaaccactaagaagctggaggatattcccatagtcagagagtatccagaggtttttccggacgatctgacaacaatgccaccaaaaagggatatcgagttccggattgacttggtacctggaactgcaccgatccacaagaggccttacagaatgggagccaacgagttggcggaagtcaagaagcaagttgatgaacagttacagaagggatacatccgcccgagcacgtcgccttggggtgctccggttatctttgtggagaagaaagacaaaaccaagaggatgtgcgttgactaccgcgcactcaatgaggtcaccatcaagaacaagtatcctttgccaaggattgatgatctgtttgatcagttgaaaggagctactgtgttctctaagatagacctgcgatcaggctatcaccagttgaggatccgcgaagaggatattccaaagacagcattcatcactcggtacgggttgttcgaatgcacagttatgtctttcggactcactaatgcacctgccttcttcatgaatttgatgaacaaggtgtttatggaatttctagacaagtttgtcgtggttttcatcgatgacatacttatctactccaagtccgaggaagaacatgagcagcatcttcggctggtacttgaaaagttaaaagagcaccagctatatgccaagttcagcaagtgcgacttctggcttaaggaagttcagtttctcggtcacatcgtgaatgctcaaggagtagctgtggatccagcaaatgtggagtcagttaccaagtggaccccaccaaggacagtcactcaggttcggagtttcttaggacttgcgggctattaccgccggttcattgagaacttctctaaaattgctaagccaatgacacagctattgaagaaggaagaaaagtttatctggtctgctgaatgcaataggagttttgaagaactcaaacgacggttggtgtctgcaccagtcctaatcctgcctgatcagacgaaagattttcaggtctattgtgatgcatctcgccaggggctaggatgtgtgttgatgcaggatggcaaagtggtttcttatgcttcacggcagttgcgtcctcatgaaggcaactacccgacgcatgatctggaattagccgcagttgttcatgctttaaagatttggcggcactatctcatcggtaaccgttgtgaggttcaacgcgacttggaacatctgaaccttggtatagttgagcacggattcgtggctgccctagaggcacagcccacactggtggagcaggttcgcatagctcaagcaagtgatcctgaaatagcagagcttaaaaagaacatgagagttggaaaagcccgaggttttgttgaggatgaacaaggaacaatctggatgggagaaagattgtgtgtacccgaaaacaaggaattaaaagacctgatactaaccgaggctcatcaaactcaatattccattcatcccggtagtactaagatgtaccaagacctcaaagaaaagttctggtgggtcagcatgagaagggaaatagctgagttcgtagcactctgtgacgtctgtcaacgagtaaaggcagaacaccaaaggccagcaggtttgctacagccacttcagattccagaatggaagtgggaagaaatcggaatggatttcatcaccggtttgcccaggacgtcatcggggcatgattctatttgggtagtcgttgaccgactcaccaaagtggctcacttcattccggtgcacactacctactcagggaagaaattagcagaactctatctggcaagaattatgtgtttacatggtgtacctaagaagatcgtgtctgatcgaggaagccaatttacttcaaagttctggcaggaattacaagaagaattgggaacccggttgaatttcagcaccgcttaccatccacaaacagatggccagaccgagcgagtcaatcaaatactagaggatatgttgagagcatgtgcgcttgactttggtggagcatgggacaaaagcttaccgtatgctgagttctcgtacaacaacagttaccaagctagtttgcagatggcaccgtttgaagcactgtatggacggaggtgtcgtactccgctcttctgggatcagacaggggaacgccagttgtttggtacagaagttttaaatgaggcagaagagaaagtcagagctgttagggaaagattgagaatcgcgcagtctcggcagaaaagctatgcagacaaccgccgaagggagctcgttttccaagtaggggattatgtgtatctccgtgtcactccgctcaggggagtacatcgcttccaaaccaaaggaaagttggcaccacgctttgtgggaccatatcggattttggaacgtagaggtgaagttgcttaccagctcgagcttccctccaacatgcttggcatccataatgtgttccacgtctcccagttgaagaaatgtttgagagttcctgaggaacaggcaagtccggatcaaatcgaaatccaggaagacttgacgtatgtggagaagccaactcgtatcctcgaaaccagcgagagaaagaccagaaacaaagtaataagattctgcaaggttcagtggagccaccactcagaggaagaggccacttgggaaagagaagatgagttgaaggccacccacccgcacctcttcgccagctcttccgaatctcggggtcgagattccgtttaa

SEQ ID NO: 14660 - DNA, 4554 bp, Oryza sativa
  Clone ID: TFbOSC411372j.C1.o3.fg
atggcgggctgtgagtgcatggttttgctggtcgcacccatagcagttaaggaccggttcacgggaaaccctgggagacttaccgtgcttaccacaagcgggagtggctgttttactgctttcaactactgctttgaaatgcctgctttatgcaaaagaacccctagcttcctttggttatatcctgcatcatacctcctcttccgagttgaagttcttctcagttggagccgtctcagagaggttggtttcgttgctgccgtcaagatggagacaaggaatggttcacgcgactccaacaacgccagtggcagcgaagagccgatcaatggagcacgtgccaacggtgcatctgacaacagtccgtccccaccgcccaagaacccaacaattgctcaggtgttggacaatcagactcagatgatgacaatgatgatgcaacagatgcagcaacagtaccatcaggtgttgcaacaggtgcagcagcaagcacagcagcagcagcagaacctgcagtttggtcctccacctcctcagtccaaactgttagaatttcttcgtgtcaagccgcccactttctcaagcaccaccaacccaatcgaggcccacgactggcttcatgccattgagaagaagctgaatcttttgcaatgcaacgagcaggagaaggttgcttttgctacacaccagctacaaggtcccgcttctatttggtgggacaactacatggtgacctgtccaactggggcagaagttacttggacagagtttcgtcatagtttcaataaagcacagattcccgagggaattgtggcacaaaagaagagagagttccgttccctgcaacaaggaaccagaacagttatagagtatttgcatgagttcaaccgcctcgcacgctacgcccctgaggacgtgcgtaccgatgacgggaggcaggagaagtttctgtctggtcttgatgatgaattgactaaccagttgatctctagagattatgaggactttgagaagcttgtggacaaggctattcgtcaagaggagcagtgtaacaaaatgaaccgtaagaggaaggcagctcagttcaggactccccaggggaagagtcagaagcctcgtttcacgatgggacgtcacggtggaccttccaccatgattatccggcagcaccgtccctaccacccgggtagcttcaacaagaaccaccatagtgatagtcacaacaacagtgagcagcacagcctcaaccctactccgagttcactaaagattccagctcaatcagttcagccagctctgccagaacagcccaagaggttgggagaaaaacccgaactctgcttcaattgtaacaaacccggacacacggttggaaagtgcccgaagccaagacgtgctggacccaagttcgttcaggcccgtgttaatcatacatctgcagaggaggcgcaatcagcaccagaggttatattgggcacattccccgtcaactcgacaccggcagtaatattgtttgattctggtgcaacccattccttcgtttccaagcgttttgctggtgcacatgggttatctttagtgaagcttaagataccaatgcgagttcatactcctggaggtggcatgaccacaactcactactgcccatctgtgacagttgaaattcaagggttgatttttccagccaacctcattcttctcgaatccaaggacctagatgtcatacttggaatggattggttgacaaggcacagaggagtgattgattgcgccagccgcaccatcaagttgaccaatgcaaaaggagaggtggtaatcttccagtctccagtgccgcagaagccagggatcagtttaaaccaggctgctggtgaagaacaagaggtagcagtggagaaaaccactaagaagctggaggatattcccatagtcagagagtatccagaggtttttccggacgatctgacaacaatgccaccaaaaagggacatcgagttccggattgacttggtacctggaactgcaccgatccacaagaggccttacagaatgggagccaacgagttggtggaagtcaagaagcaagtcgatgaacagttacagaagggatacatccgcccgagcacgtcgccttggggtgctccggttatctttgtggagaagaaagacaaaaccaagaggatgtgcgttgactaccgcgcactcaatgaggtcaccatcaagaacaagtatcctttgccaaggattgatgatctgtttgatcagttgaaaggagctactgtgttctctaagatagacctgcgatcaggctatcaccagttgaggatccgcgaagaggatattccaaagacagcattcatcactcggtacgggttgttcgaatgcacagttatgtctttcggactcactaatgcacctgccttcttcatgaatttgatgaacaaggtgtttatggaatttctagacaagtttgtcgtggttttcatcgatgacatacttatctactccaagtccgaggaagaacatgagcagcatctccggctggtacatgaaaagttaaaagcgcaccaactatatgccaagttcagcaagtgcgtcttctggcttaaggaagttcagtttctcggtcacatcgtgaatgctcaaggagtagctgtggatccagcaaatgtggagtcagttaccaaatggaccccaccaaggacagtcactcaggttcggagtttcttaggacttgcgggctattaccgccggttcattgagaacttctctaaaattgctaagccaatgacacagctattgaagaaggaagaaaagtttatctggtctgccgaatgcaataggagttttgaagaactcaaacgacggttggtgtctgcaccagtcttaatcctgcctgatcagacgaaagatttccaggtctattgtgatgcatctcgccaggggctaggatgtgtgttgatgcaggatggcaaagtggtttcttatgcttcacggcagttgcgtcctcatgaaggcaactacccaacgcatgatctggaattggccgcaattgttcatgctttaaagatttggcggcactatctcatcggtaaccgttgtgaggtatatatagatcacaaaagtctaaagtacatcttcactcaacctgatttgaatctcagacagcgaagatggttggagctgatcaaggattatgatatgggaatacattatcatcccggcaaggctaatgtggttgcagatgccttgagcaggaagagctactgcaatgttgcatgggtagagcaactatgttgtgaggttcaacgcgatttggaacatctgaaccttggtatagttgagcacggattcgtggttgccctagaggcacagcccacactggtggagcaggttcgcatagctcaagcaagtgatcctgaaatagcagagctcaaaaagaacatgagagttggaaaagcccgaggttttgttgaggatgaacaaggaacaatctggaggggagaaagatttactaagatgtaccaagacctcaaagagaagttctggtgggtcagcatgagaagggaaatagctgaattcgtagcactctgtgacgtctgtcaacgagtaaaggcagaacaccaaaggccagcaggtttgctacagccacttcaaattccagaatggaagtgggaagaaatcggaatggatttcatcaccggtttgcccaggacgtcatcggggcatgattctatttgggtagtcgttgaccgactcaccaaagtggctcacttcattccggtgcacactacctactcagggaagaaattagcagaactctatctggcaagaattatgtgtttacatggtgtacctaagaagatcgtgtctgatcgaggaagccaattcacttcaaagttctggcagaaattacaagaagaattgggaacccggttgaatttcagcactgcttaccatccacaaacagatggccagaccgagcgagtcaatcaaatactagaggatatgttgagagcctgtgcgcttgactttggtggagcatgggacaaaagcttgccgtatgctgagttctcttacaacaacagttaccaagctagtctgcagatggcaccgtttgaagcactgtatggacgaaggtgtcgtactccgctcttttgggatcagacaggggaacgccaattgtttggtacagaagttttaaatgaggcagaagagaaagtcagagctgtcagggaaagattgagaatcgcgcaatctcggcagaaaagctatgcagacaaccgccgaagagagctcgctttcgaaacaggggattatgtgtatctccgtgtcactccgctcaggggagtacatcgcttccaaaccaaaggaaagttggcaccacgctttgtgggaccatacaggatcttggaacgtagaggtgaagttgcttaccagcttgagcttccctccaacatgcttggcatccacaacgtgttccacgtctctcagttgaagaaatgtttgagagttcctgaggaacaggcaagtccggatcacatcgaaatttag

SEQ ID NO: 14661 - DNA, 4575 bp, Oryza sativa
  Clone ID: TFbOSC412783j.C1.o1.fg
atggagataaggaatggttcacgcgactcgaacaacgccaatggcagcgaagagccgatcaatggagcacgtgccaacggtgcatctgacaacagtccgtccccaccgcccgagaacccaacaattgctcaggtgttggacaatcagactcagatgatgacaatgatgatgcaacagatgcagcaacagtaccatcaggtgttgcagcaggtgcagcagcaagcacagctgcagcagcagaacctgcagtttggtcctccacctcctcagtccaaactgttagaatttcttcgtgtcaagccgcccactttctcaagcaccaccaacccaatcgaggcccacgactggcttcatgccattgagaagaagctgaatcttttgcaatgcaacgagcaggagaaggttgcttttgctacacaccagctacaaggtcccgcttctatttggtgggacaactacatggtgacccgtccaactggggcagaagttacttggacagagttttgtcatagtttcaataaagcacaggttcccgagggaattgtggcacaaaagaagagagagttccgttccctgcaacaaggaaccagaacagttatagagtatttgcatgagttcaaccgcctcgcgcgctacgcccctgaggacgtgcgtaccgatgccgagaggcaggagaagtttctgtctggtcttgatgatgaattgactaaccagttgatctctagagattatgaggactttgagaagctggtggataaggctatccgtcaggaggagcactgtaacaaaataaaccgtaagaggaaggcagctcagttcaggactccccaggggaagagtcagaagcctcggttcacgatgggacatcacggtggaccttccaccatgattatccggcagcaccgtccctaccacccgggtagcttcaacaagaaccaccatagtggcagccacaacaacagtgagcagcacagtctcaaccctactccgagttcactaaagattccagctcaatcagttcagccagctctgccagaacagcccaagaggttggtagaaaaacccgaactctgcttcaattgtaacaaacccggacacacggttggaaagtgcccgaagccaagacgtgctggacccaagttcgttcaggcccgtgttaatcatgcatctgcagaggaggcgcagtcagcaccagaggttatattgggcacattccccgtcaactcgacaccggcagtaatattgtttgattctggtgcaacccattccttcatttccaagcgttttgctggtgcacatgggttatctttagtgaagcttaagataccaatgcgagttcatactcctggaggtggcatgaccacaactcactactgcccatctgtgacagttgaaattcaagggtcgatttttccagccaacctcattcttctcgaatccaaggacctagatgtcatacttggaatggattggttgacaaggcacagaggagtgattgattgcgccagccgcaccatcaagttgaccaatgcaaaaggagaggtggtaaccttccagtccccagtgccgcagaagccaaggatcagtttaaaccaggctgctggtgaagaacaagaggtagcagtggagaaaaccactaagaagctggaggatattcccatagtcagagagtatccagaggtttttccggacgatctgaccacaatgccaccaaaaagggatatcgagttccggattgacttggtacctggaactgcaccgatccacaagaggccttacagaatgggagccaacgagttggcggaagtcaagaagcaagttgatgaacagttacagaagggatacatccgcccgagcacgtcgccttggggtgctccggttatctttgtggagaagaaagacaaaaccaagaggatgtgtgttgactaccgcgcactcaatgaggtcaccatcaagaacaagtatcctttgccaaggattgatgatctgttcgatcagctgaaaggagctactgtgttctctaagatagaccttcggtcaggctatcaccagttgaggatccgcgaagaggatattccaaagacagcattcatcactcggtacgggttgttcgaatgcacagttatgtctttcggactcactaatgcacctgccttcttcatgaatttgatgaacaaggtgtttatggaatttctagacaagtttgtcgtggtttttatcgatgacatacttatctactccaagtccgaggaagaacatgagcagcatcttcggctggtacttgaaaagttaaaagagcaccaactatatgccaagttcagcaagtgcgacttctggcttaaggaagttcagtttctcggtcacatcgtgaatgctcaaggagtagctgtggatccagcaaatgtggagtcagttaccaaatggaccccaccaaggacagtcactcaggttcggagtttcttaggacttgcgggctattaccgccggttcattgagaacttctctaaaattgctaagccaatgacacagctattgaagaaggaagaaaagtttatctggtctgctgaatgcaataggagttttgaagaactcaaacgacggttggtgtctgcaccagtcttaatcctgcctgatcagacgaaagatttccaggtctattgtgatgcatctcgccaggggctaggatgtgtgttgatgcaggatggcaaagtggtttcttatgcttcacggcagttgcgtcctcatgaaggcaactacccgacgcatgatctggaattagccgcagttgttcatgctttaaagatttggcggcactatctcatcggtaaccgttgtgaggtatatacagatcacaaaagtctaaagtacatctttactcaacctgatttgaatcttagacagcgaagatggttggagctgatcaaggattatgatatgggaatacattatcatcccggcaaggctaatgtggttgcagatgccttgagcaggaagagtcactgcaacgtcgcatgggtagaggaactatgctgtgaggttcaacgtgatttgggacatttgaaccttggtatagttgagcacggattcgtggctgccctagaggcacagcccacactggtggagcaggttcgcatagctcaagcaagtgatcctgaaatagcagagctcaaaaagaacatgagggttggaaaagcccgaggttttgttgaggacgaacaaggaacaatctggatgggagaaagattgtgtgtacccgaaaacaaggaattaaaagacctaatactaaccgaggctcatcaaactcaatattccattcatcccggcagtaccaaaatgtaccaagacctcaaagaaaagttctggtgggtcagcatgagaagggaaatagctgaattcgtagcactctgcgacgtctgtcaacgagtaaaggcagaacaccaaaggccagcaggtttgctacagccacttcagattccagaatggaagtgggaagaaatcggaatggatttcatcaccggtttgcccaggacgtcatcggggcatgattctatttgggtagtcgttgaccgactcaccaaaatggctcacttcattccggtgcacactacctactcagggaagaaattagcagaactctatctggcaagaatcatgtgtttacatggtgtacctaagaagatcgtgtctgatcgaggaagtcaattcacttcaaagttctggcagaaattgcaagaagaattgggaacccgtctaaacttcagcactgcttaccatccacaaacagatggccagaccgagcgagtcaatcaaatactagaggatatgttgagagcctgtgcgcttgactttggtggagcatgggacaaaagcttaccgtatgctgagttctcgtacaacaacagttaccaagctagtctgcagatggcaccgtttgaagcactgtatggacgaaggtgtcgtactccgctcttctgggatcagacaggggaacgccagttgtttggtacagaagttttaaatgaggcagaagagaaagtcagagctgtcagggaaagattgagaatcgcgcaatctcggcagaaaagctatgcagacaaccgccgaagggagctcgctttcgaaacaggggattatgtgtatctccgtgtcactccgctcaggggagtacatcgcttccaaaccaaaggaaagttggcaccacgctttgtgggaccatacaggatcttggaacgtagaggtgaagttgcttaccagctcgaacttccctccaacatgcttggcatccacaatgtgttccacgtctctcagttgaaaaaatgtttgagagttcctgaggaacaggcaagtccggatcacatcgaaattcaggaagacttgacgtatgtggagaagccaactcgtatcctcgaaaccagcgagagaaagaccagaaacaaagtaataagattctgcaaggttcagtggagccaccactcagaggaagaggccacttgggaaagagaagatgagttgaaggccacccacccgcacctcttcgccagcccttccgaatctcggggtcgagattccgtttaa

SEQ ID NO: 14662 - DNA, 4581 bp, Oryza sativa
  Clone ID: TFbOSC416334j.C1.o3.fg
atggcagttaaggaccggttcacgggaaaccctgggagacttaccgtgctttccacaagcgggagtgggtttgatgcttgtgggctagtcggcggtcgatatcatgtgtcagtgatggagacaaggaatggttcacgcgactcgaacaacgccagtggcagcgaaaagccgatcaatggagcacgtgccaacagtgcatctgacaacagtccgtccccaccgcccgagaacccaacaattgctcaggtgttggacaatcagactcagatgatgacaatgatgatgcaacagatgcagcaacagtaccatcaggtgttgcaacaggtgcagcagcaagcacagctgcagcagcagaacctgcagtttggttctccacctcctcagtccaaactgctagaatttcttcgtgtcaagccgcccaccttctcaagcaccaccaacccaatcgaggcccacgactggcttcatgccattgagaagaagctgaatcttttgcaatgcaacgagcaagagaaggttgcttttgctacacaccagctgcaaggtcccgcttctatttggtgggacaactacatggtgacccgtccagctggggcagaggttacttggacagagtttcgtcatagtttcaataaagcacaggttcccgagggaattgtggcacaaaagaagagagagttccgttccctgcaacaaggaaccagaacagttatagagtatttgcatgagttcaacctcctcgcgcgctacgcccctgaggacgtgcgtaccgatgccgagaggcaggagaagtttttgtctggtcttgatgatgaattgactaaccagttgatctctagagattatgaggactttgagaagctggtggataaggctatccgtcaggaggagcactgtaacaaaataaaccgtaagaggaaggcagctcagttcaggactccccaggggaagagtcagaagcctcgtttcacgatgggacgtcacggtggaccttccaccatgattatccgacagcaccgtccctaccacccgggtagcttcaacaagaaccaccataatggcagtcacaacaacagtgagcagcacagtctcaaccctactccgagttcactaaagattccagctcaatcagttcagccagctctgccagaacagcccaagaggttgggagaaaaacccgaactctgcttcaattgtaacaaacccggacacacggttggaaagtgcccgaagccaagacgtgctggacccaagttcgttcaggcccgtgttaatcatgcatctgcagaggaggcgcagtcagcaccagaggttatattgggcacattccccgtcaactcgacaccggcagtaatattgtttgattctggtgcaacccattccttcatttccaagcgttttgctggtgcacatgggttatccttagtgaagcttaagataccaatgcgagtgcatactcctggaggtggcatgaccacaactcactactgcccatctgtgacagttgaaattcaagggttgatttttccagccaacctcattcttctcgaatccaaggacctagatgtcatacttggaatggattggttaacaaggcacagaggagtgattgattgcgccagccgcaccatcaagttaaccaatgcaaaaggagaggtggtaaccttccagtctctagtgccgcggaagccagggatcagtttaaaccaggctgctggtgaagaacaagaggtagcagtggagaaaaccactaagaagctggaggatattcccatagtcagagagtatccagaggtttttccggacgatctgacaacaatgccaccaaaaagggatatcgagttccggattgacttggtacctggaactgcaccgatccacaagaggccttacagaatgggagccagcgagttggcggaagtcaagaagcaagtcgatgagcagttacagaagggatacatccgcccgagcacgtcgccttggggtgctccggttatctttgtggagaagaaagacaaaaccaagaggatgtgcgttgactaccgcgcactcaatgaggtcaccatcaagaacaagtatcctttgccaaggattgatgacctgtttgatcagttgaaaggagttactgtgttctctaagatagacctgcgatcaggctatcaccagttgaggatccgcgaagaggatattccaaagacagcattcatcactcggtacgggttgttcgaatgcacagttatgtctttcggactcactaatgcacctgccttcttcatgaatttgatgaacaaggtgtttatggaatttctagacaagtttgtcgtggttttcatcgatgacatacttatctactccaagtccgaggaagaacatgagcagcatcttcggctggtacttgaaaagttaaaagagcaccagctatatgccaagttcagcaagtgcgacttctggcttaaggaagttcagtttctcggtcacatcgtgaatgctcaaggagtagctgtggatccagcaaatgtggagtcagttaccaaatggaccccaccaaggacagtcactcaggttcggagtttcttaggacttgcgggctattaccgccggttcattgagaacttctctaaaattgctaagccaatgacacagctattgaagaaggaagaaaagtttatctggtctgctgaatgcaataggagttttgaagaactcaaacgacggttggtgtctgcaccagtcttaatcctgcctgatcagacgaaagatttccaggtctattgtgatgcatctcgccaggggctaggatgtgtgttgatgcaggatggcaaagtggtttcttatgcttcacggcagttgcgtcctcatgaaggcaactacccgacgcatgatctggaattagccgcagttgttcatgctttaaagatttggcggcactatctcatcggtaaccgttgtgaggtatatacagatcacaaaagtctaaagtacatcttcacccaacctgatctgaatctccgacagcgaagatggttggagctaattaaagattatgatatgggaatacattatcatcccggcaaggctaatgtggttgcggatgccttgagcaggaagagctactgcaatgttgcatgggtagagcaactatgtggtgaggttcaacgcgatttggaacatctgaaccttggtatagttgagcacggattcgtggctgccctagaggcacagcccacgctggtggagcaggttcgcatagctcaggcaagtgatcctgaaatagcagagctcaaaaagaacatgagggttggaaaagcccgaggttttgttgaggatgaacaaggaacaatctggatgggagaaagattgtgtgtacccgaaaacaaggaattaaaagacctgatactaaccgaggctcatcaaactcaatattccattcatcccggtagtactaagatgtaccaagacctcaaagaaaagttctggtgggtcagcatgagaagggaaatagctgagttcgtagcactctgtgacgtctgtcaacgagtaaaggcagaacaccaaaggccagcagtcgttgaccgactcaccaaagtggctcacttcattccggtgcacactacctactcagggaagaaattagcagaactctatctatcaagaatcatgtgtttacatggtgtacctaagaagatcgtgtctgatcgaggaagccaattcacttcaaagttctggcagaaattacaagaagaattgggaacccggttgaatttcagcaccgcttaccatccacaaacagatggccagaccgagcgagtcaatcaaatactagaggatatgttgagagcctgtgcgcttgactttggtggggcatgggacaaaagcttgccgtatgctgagttctcgtacaacaacagttaccaagctagtctgcagatggcaccatttgaagcactgtatggacggaggtgtcgtactccgctcttctgggatcagacaggggaacgccagttgtttggtacagaagttttaaatgaggcagaagagaaagtcagagctgttagggaaagattgagaatcgcgcaatctcggcagaaaagctatgcagacaaccgccgaagggagctcgttttccaagtaggggattatgtgtatctccgtgtcactccgctcaggggagtacaccgcttccaaaccaaaggaaagttggcaccacgctttgtgggaccatatcggattttggaacgcaggggtgaagttgcttaccagcttgagcttccctccaacatgcttggcatccataatgtgttccacgtctctcagttgaagaaatgtttgagagttcctgaggaacaggcaagtccggatcaaatcgaaatccaggaagacttgacgtatgtggagaagccaactcgtatcctcgaaaccagcgagagaaagaccagaaacaaagtaataagattctgcaaggttcagtggagccaccactcagaggaagaggccacttgggaaagagaagatgagttgaaggccacccacccgcacctcttcgccagctcttccgaatctcggggtcgagattccgtttaa

SEQ ID NO: 14663 - DNA, 4578 bp, Oryza sativa
  Clone ID: TFbOSC416668j.C1.o19.fg
atggagataaggaatggttcacgcgactcgaacaacgccagtggcagcgaagagccgatcaatggagcacgtgccaacggtgcatctgacaacagtccgtccccaccacccgagaacccaacaattgctcaggtgttggacaatcagactcagatgatgacaatgatgatgcaacagatgcagcaacagtaccatcaggtgttgcagcaggtgcagcagcaagcacagctgcagcagcagaacctgcagtttggtcctccacctcctcagtccaaactgttagaatttcttcgtgtcaagccgcccactttctcaagcaccaccaacccaatcgaggcccacgactggcttcatgccattgagaagaagctgaatcttttgcaatgcaacgagcaggagaaggttgcttttgctacacaccagctacaaggtcccgcttctatttggtgggacaactacatggtgacccgtccagctggggcagaggttacttggacagagtttcgtcatagtttcaataaagcacaggttcccgagggaattgtggcacaaaagaagagagagttccgttccctgcaacaaggaaccagaacagttatagagtatttgcatgagttcaaccgcctcgcgcgctacgcccctgaggacgtgcgtaccgatgctgagaggcaggagaagtttctgtcgggtcttgatgatgaattgaccaaccagttgatctctagagattatgaggactttgagaagcttgtggacaaggctatccgtcaagaggagcagtgtaacaaaatgaaccgtaagaggaaggcagcccagttcaggactccccaggggaagtgtcagaagcctcgtttcacgatgggacatcagggtggaccttccaccatgattatccggcagcaccgtccctaccacccgggtaatttcaacaagaacaacaacagtggcagtcacagcagcctcaacccgactccaagtccattaatgattccagctcagtcagatcagtcagatcagctagctcagccagctctgccagaacagcccaagaggttgggagaaaaacccgaactctgcttcaattgtaacaaacccggacacacggttggaaagtgcccgaagccaagacatgctggacccaagttcgttcaggcccgtgttaatcatgcatctgcagaggaggcgcagtcagcaccagaggttatattgggcacattccccgtcaactcgacaccggcagtaatattgtttgattctggtgcaacccattccttaatttccaagcgttttgctggtgcacatgggttatccttagtgaagcttaagataccaatgcgagtgcatactcctggaggtggcatgaccacaactcactactgcccatctgtgacagttgaaattcaagggttgatttttccagccaacctcattcttctcgaatccaaggacctagatgtcatacttggaatggattggttaacaaggcacagaggagtgattgattgcgccagccgcaccatcaagttaaccaatgcaaaaggagaggtggtaaccttccagtctctagtgccgcggaagccagggatcagtttaaaccaggctgctggtgaagaacaagaggtagcagtggagaaaaccactaagaagctggaggatattcccatagtcagagagtatccagaggtttttccggatgatctgacaacaatgccaccaaaaagggatatcgagttccggattgacttggtacctggaactgcaccgatccacaagaggccttacagaatgggagccaacgagttggcggaagtcaagaagcaagttgatgaacagttacagaagggatacatccgcccgagcacgtcgccttggggtgctccggttatctttgtggaaaagaaagacaaaaccaagaggatgtgcgtggactaccgcgcactcaatgaggtcactattaagaacaagtaccctttgccaaggattgatgatctgttcgatcagctgaaaggagctactgtgttctctaagatagaccttcggtcaggctatcaccagttgaggatccgcgaagaggatattccaaagacagcattcatcactcggtacgggttgttcgaatgcacagttatgtctttcggactcactaacgcacctgccttcttcatgaatttgatgaacaaggtgtttatggaatttctagacaagtttgtcgtggttttcatcgatgacatacttatctactccaagtccgaggaagaacatgagcagcatcttcggctggtacttgaaaagttaaaagagcaccagctatatgccaagttcagcaagtgcgacttctggcttaaggaagttcagtttctcggtcacatcgtgaatgctcaaggagtagctgtggatccagcaaatgtggagtcagttaccaagtggaccccaccaaggacagtcactcaggttcggagtttcttaggacttgcgggttattaccgccggttcattgagaacttctctaaaattgctaagccaatgacacagctattgaagaaggaagaaaagtttatctggtctgctgaatgcaataggagttttgaagaactcaaacgacggttggtgtctgcaccagtcctaatcctgcctgatcagacgaaagattttcaggtctattgtgatgcatctcgccaggggctaggatgtgtgttgatgcaggatggcaaagtggtttcttatgcttcacggcagttgcgtcctcatgaaggcaactacccgacgcatgatctggaattagccgcagttgttcatgctttaaagatttggcggcactatctcatcggtaaccgttgtgaggtatatacagatcacaaaagtctaaagtacatcttcacccaacctgatctgaatctccgacaacgaagatggttggagctaatcaaagattatgatatgggaatacactatcatcccggcaaggctaatgtggtagcagatgccttgagcaggaagagttactgcaacgtcgcatgggtagaggaactatgctgtgaggttcaacgtgatttggaacatttgaaccttggtatagttgagcacggattcgtggctgccctagaggcacagcccacactggtggagcaggttcgcatagctcaggcaagtgatcctgaaatagccgagctcaaaaagaacatgagggtcggaaaagcccgaggttttgttgaggatgaacaaggaacaatctggatgggagaaagattgtgtgtacccgaaaacaaggaattaaaagacctgatactaaccgaggctcatcaaactcaatattccattcatcccggtagtactaagatgtaccaagacctcaaagaaaaattctggtgggtcagcatgagaagggaaatagctgagttcgtagcactctgtgacgtctgtcaacgagtaaaggcagaacaccaaaggccagcaggtctgctacagccacttcagattccagaatggaagtgggaagaaatcggaatggatttcatcaccggtttgcccaggacgtcatcggggcatgattctatttgggtagtcgttgaccgactcaccaaagtggctcacttcattccggtgcacactacctactcagggaagaaattagcagaactctatctggcaagaattatgtgtttacatggtgtacctaagaagatcgtgtctgatcgaggaagccaattcacttcaaagttctggcagaaattacaagaagaattgggaacccggttgaatttcagcaccgcttaccatccacaaacagatggccagaccgagcgagtcaatcaaatactagaggatatgttgagagcctgtgcgcttgactttggtggagcatgggacaaaagcttgccgtatgctgagttctcttacaacaacagttaccaagctagtctgcagatggcaccgtttgaagcactgtatggacgaaggtgtcgtactccgctcttctgggatcagacaggggaacgccagttgtttggtacagaagttttaaatgaggcagaagagaaagtcagagctgttagggaaagattgagaatcgcgcaatctcggcagaaaagctatgcagacaaccgccgaagggagctcgttttccaagtaggggattatgtgtatctccgtgtcactccgctcaggggagtacaccgcttccaaaccaaaggaaagttggcaccacgctttgtgggaccatatcggattttggaacgcaggggtgaagttgcttaccagcttgagcttccctccaacatgcttggcatccataatgtgttccacgtctcccagttgaagaaatgtttgagagttcctgaggaacaggcaagtccggatcaaatcgaaattcaggaagatctgacgtatgtggagaagccgactcgtatcctcgaaaccagcgagagaaggaccagaaacaaagtaataagattctgcaaggttcagtggagccaccactcagaggaagaggccacttgggaaagagaagatgagttgaaggccacccacccgcacctcttcaccagctcttccgaatctcggggtcgagattccgtttaa

SEQ ID NO: 14664 - DNA, 4689 bp, Oryza sativa
  Clone ID: TFbOSC418722j.C1.o18.fg
atggcggttaaggaccggttcacgggaaaccctgggagacttaccgtgcttaccacaagcgggagtgggtttgttgcttgtgggttagtcggcggtcgatattatgtgtcagtgatggagataaggaatggttcacgcgactcgaacaacgccagtggcagcgaagagccgatcaatggagcacgtgccaacggtgcatctgacaacagtctgtccccaccgcccgagaacccaacaattgctcaggtgttggacaatcagactcagatgatgacaatgatgatgcaacagatgcagcaacagtaccatcaggtgatgcagcaggtgcagcagcaagcacagctgcagcagcagaacctgcagtttggtcctccacctcctcagtccaaactgttagaatttcttcgtgtcaagccgcccactttctcaagcaccaccaacccaatcgaggcccacgactggcttcatgccattgagaagaagctgaaccttttgcaatgcaacgagcaagagaaggttgcttttgctacacaccagctgcaaggtcccgcttctgtttggtgggacaactacatggtgacccgtccagctggggcagaggttacttggacagagtttcgtcatagtttcaataaagcacaggttcccgagggaattgtggcacaaaagaagagagagttccattccctgcaacaaggaaccagaacagttatagagtatttgcatgagttcaaccgcctcgcgcgctacgcccctgaggacgtgcgtaccgatgccgagaggcaggagaagtttctgtctggtcttgatgatgaattgactaaccagttgatctctagagattatgaggactttgagaagctggtggataaggctatccgtcaggaggagcactgtaacaaaataaaccgtaagaggaaggcagctcagttcaggactccccaggggaagagtcagaagcctcgtttcacaatgggacatcacggtggaccttccaccatgattatccggcagcaccgtccctaccacccgggtaacttcaacaagaaccaccatagtgacagtcacaacaatagtgagcagcacagcctcaaccctactccgagttcactaaagattccagcccaatcagttcagccagctctgccagaacagcccaagaggttgggagaaaaacccgaactctgcttcaattgtaacaaacccggacacacggttggaaagtgcccgaagccaagacgtgccggacccaagttcgttcaggtccgtgttaatcatgcatctgcagaggaggcgcagtcagcaccagaggttatattgggcacattccccgtcaactcgacaccggcagtaatattgtttgattctggtgcaacccattccttcatttccaagcgttttgctggtgcacatgggttatctttagtgaagcttaagataccaatgcgagttcatactcctggaggtggcatgaccacaactcactactgcccatctgtgacagttgaaattcaagggttgatttttccagccaacctcattcttctcgaatccaaggacctagatgtcatacttggaatggattggttggcaaggcacagaggagtgattgattgcgccagccgcaccatcaagttgaccaatgcaaaaggagaggtggtaatcttccagtctccagtgccgcagaagccagggattagtttaaaccaggctgctggtgaagaacaagaggtagcagtggagaaaaccactaagaagctggaggatattcccatggtcagagagtatccagaggttttttcggatgatctgacaacaatgccaccaaaaagggatatcgagttccggattgacttggtacctggaactgcaccgatccacaagaggccttacagaatgggagccaacgagttggcggaagtcaagaagcaagttgatgaacagttacagaagggatacatccgcccgagcacgtcgccttggggtgctccggttatctttgtggaaaagaaagacaaaaccaagaggatgtgcgtggactaccgcacactcaatgaggtcactattaagaacaagtaccctttgccaaggattgatgatctgttcgatcagctgaaaggagctactgtgttctctaagatagaccttcggtcaggctatcaccagttgaggatccgcgaagaggatattccaaagacagcattcatcactcggtacgggttgttcgaatgcacagttatgtctttcggactcactaacgcacctgccttcttcatgaatttgatgaacaaggtgtttatggaatttctagacaagtttgtcgtggttttcatcgatgacatacttatctactccaagtccgaggaagaacatgagcagcatcttcggctggtacttgaaaagttaaaagagcaccagctatatgccaagttcagcaagtgcgacttctggcttaaggaagttcagtttctcggtcacatcgtgaatgctcaaggagtagctgtggatccagcaaatgtggagtcagttaccaaatggaccccaccaaggacagtcactcaggttcggagtttcttaggacttgcgggttattaccgccggttcattgagaacttctctaaaattgctaagccaatgacacagctattgaagaaggaagaaaagtttatctggtctgctgaatgcaataggagttttgaagaactcaaacgacggttggtgtctgcaccagtcttaatcctgcctgatcagacgaaagatttccaggtctattgtgatgcatctcgccaggggctaggatgtgtgttgatgcaggatggcaaagtggtttcttatgcttcacggcagttgcgtcctcatgaaggcaactacccgacgcatgatctggaattggccgcagtcgttcatgctttaaagatctggcggcactgtctcatcggtaaccgttgtgaggtatatacagatcacaaaagtctaaagtacatcttcacccaacctgatctgaatctccgacaacgaagatggtttgagctaatcaaagattatgatatgggaatacactatcatcccggcaaggctaatgtggtagcagatgccttgagcaggaagagttactgcaacgtcgcatgggtagaggaactatgctgtgaggttcaacatgatttggaacatttgaaccttggtatagttgagcacggattcgtggctgccctagaggcacagcccacactggtggagcaggttcgcatagctcaagcaagtgatcctgaaatagcagagctcaaaaagaacatgagggtcggaaaagcccgaggttttgttaaggatgaacaaggaacaatctggatgggagaaagattgtgtgtacccgaaaacaaggaattaaaagacctgatactaaccgaggctcatcaaactcaatattccattcatcccggtagtactaagatgtaccaagacctcaaagaaaagttctggtgggtcagcatgagaagggaaatagctgagttcgtagcactctgtgacgtctgtcaacgagtaaaggcagaacaccaaaggccagcaggtttgctacagccacttcagattccagaatggaagtgggaagaaatcggaatggatttcatcaccggtttgcccaggacgtcatcggggcatgattctatttgggtagtcgttgaccgactcaccaaagtggctcacttcattccggtgcacactacctactcagggaagaaattagcagaactctatctggcaagaattatgtgtttacatggtgtacctaagaagatcgtgtctgatcgaggaagccaattcacttcaaagttctggcagaaattacaagaagaattgggaacccggttgaatttcagcaccgcttaccatccacaaacagatggccagaccgagcgagtcaatcaaatactagaggatatgttgagagcctgtgcgcttgactttggtggagcatgggacaaaagcttgccgtatgctgagttttcttacaacaacagttaccaagctagtctacagatggcaccgtttgaagcactgtatggacggaggtgtcgtactccgctcttctgggatcagacaggggaacgccagttgtttggtacagaagttttaaatgaggcagaagagaaagtcagagctgttagggaaagattgagaatcgcgcaatctcggcagaaaagctatgcagacaaccgccgaagggagctcgttttccaagtaggggattatgtgtatctccgtgtcactccgctcaggggagtacaccgcttccaaaccaaaggaaagttggcaccacgctttgtgggaccatatcggattttggaacgcaggggtgaagttgcttaccagcttgagcttccctccaacatgcttggcatccataatgtgttccacgtctcccagttgaagaaatgtttgagagttcctgaggaacaggcaagtccggatcaaatcgaaatccaggaagacttgacgtatgtggagaagccaactcgtatcctcgaaaccagcgagagaaagaccagaaacaaagtaataagattctgcaaggttcagtggagccaccactcagaggaagaggccacttgggaaagagaagatgagttgaaggccacccacccgcacctcttcgccagctcttccgaatctcggggtcgagattccgtttaa

SEQ ID NO: 14665 - DNA, 4674 bp, Oryza sativa
  Clone ID: TFbOSC420229j.C1.o1.fg
atggcaattaaggaccggttcacgggaaaccctgggacacttaccgtgcttaccacaagcgcgagtggctgttttactgctttcaactactgctttgaaatgcctgctttatgcaaaagaacccctagcttcctttggttatatcctgcatcatacctcctcttccggtttgttgcttgtgggttagtcggcggtcgatatcatgtgtcagtgatggagataaggaatggttcacgcgactcgaacaacgccagtggcagcgaagagccgatcaatggagcacgtgccaacggtgcatctgacaacagtccgtccccaccgcccgagaacccaacaattgctcaggtgttggacaatcagactcagatgatgacaatgatgatgcaacagatgcagcaacagtaccatcaggtgttgcagcaggtgcagcagcaagcacagctgcagcagcagaacctgcagtttggttctccacctcatcagtccaaactgctagaatttcttcgtgtcaagccgcccaccttctcaagcaccaccaacccaatcgaggcccacgactggcttcatgccattgagaagaagctgaatcttttgcaatgcaacgagcaagagaaggttgcttttgctacacaccagctgcaaggtcccgcttctgtttggtgggacaactacatggtgacccgtccaactggggcagaggttacttggacagagtttcgtcatagtttcaataaagcacaggttcccgagggaattgtggcacaaaagaagagagagttccgttccctgcaacaaggaaccagaacagttatagagtatttgcatgagttcaaccgcctcgcgcgctacgcccctgaggacgtgcgtaccgatgccgagaggcaggagaagtttttgtctggtcttgatgatgaattgactaaccagttgatctctagagattatgaggactttgagaagctggtggataaggctatccgtcaggaggagcactgtaacaaaataaaccgtaagaggaaggcagctcagttcaggactccccaggggaagagtcagaagcctcgtttcacgatgggacatcacggtggaccttccaccatgattatccggcagcaccgtccctaccacccgggtaacttcaacaagaaccaccatagtgacagtcacaacaatagtgagcagcacagcctcaaccctactccgagttcactaaagattccagctcaatcagttcagccagctctgccagaacagcccaagaggttgggagaaaaacccgaactctgcttcaattgtaacaaacccggacacacggttggaaagtgcccgaagccaagacgtgccggacccaagttcgttcaggcccgtgttaatcatgcatctgcagaggaggcgcagtcagcaccagaggttatattgggcacattccccgtcaactcgacaccggcagtaatattgtttgattctggtgcaacccattccttcatttccaagcgttttgctggtgcacatgggttatctttagtgaagcttaagataccaatgcgagttcatactcctggaggtggcatgaccacaactcactactgcccatctgtgacagttgaaattcaagggttgatttttccagccaacctcattcttctcgaatccaaggacctagatgtcatacttggaatggattggttgacaaggcacagaggagtgattgattgcgccagccgcaccatcaagttaacccatgcaaaaggagaggtggctgttggtgaagaacaagaggtagcagtggagaaaaccactaagaagctggaggatattcccatagtcagagagtatccaggggtttttccggatgatctgacaacaatgccaccaaaaagggatatcgagttccggattgacttggtacctggaactgcaccgatccacaagaggccttacagaatgggagccaacgagttggcggaagtcaagaagcaagtcgatgaacagttacagaagggatacatccgcccgagcacgtcgccttggggtgctccggttatctttgtggagaagaaagacaaaaccaagagaatgtgcgttgactaccgcgcacacaatgaggtcaccatcaagaacaagtatcctttgccaaggattgatgatctgtttgatcagttgaaaggagctactgtgttctctaagatagacctgcgatcaggctatcaccagttgaggatccgtgaagaggatattccaaagacagcattcatcactcggtacgggttgttcgaatgcacagttatgtctttcggactcactaacgcacctgccttcttcatgaatttgatgaacaaggtgtttatggaatttctagacaagtttgtcgtggttttcatcgatgacatacttatctactccaagtccgaggaagaacatgagcagcatcttcggctggtacttgaaaagttaaaagagcaccagctatatgccaagttcagcaagtgcgacttctggcttaaggaagttcagtttctcggtcacatcgtgaatgctcaaggagtagctgtggatccagcaaatgtggagtcagttaccaaatggaccccaccaaggacagtcactcaggttcggagtttcttaggacttgcgggttattaccgccggttcattgagaacttctctaaaattgctaagccaatgacacagctattgaagaaggaagaaaagtttatctgctctgctgaatgcaataggagttttgaagaactcaaacgacggttggtgtctgcaccagtcttaatcctgcctgatcagacgaaagatttccaggtctattgtgatgcatctcgccaggggctaggatgtgtgttgatgcaggatggcaaagtggtttcttatgcttcacggcagttgcgtcctcatgaaggcaactacccgacgcatgatctggaattggccgcagttgttcatgctttaaagatttggcggcactatctcatcggtaaccgttgtgaggtatatacagatcacaaaagtctaaagtacatctttactcaacctgatttgaatctcagacagcgaagatggttggagctgatcaaggattatgatatgggaatacattatcatcccggcaaggctaatgtggttgcagatgccttgagcaggaagagctactgcaatgttgcatgggtagagcaactatgttgtgaggttcaacgcgatttggaacatctgaaccttggtatagttgagcacggattcgtggctgccctagaggcacagcccacactggtggagcaggttcgcatagctcaagcaagtgatcctgaaatagcagagctcaaaaagaacatgagggtcggaaaagcccgaggttttgttgaggatgaacaaggaacaatctggatgggagaaagattgtgtgtacccgaaaacaaggaattaaaagacctgatactaaccgaggctcatcaaactcaatattccattcatcctggtagtactaagatgtaccaagacctcaaagagaagttttggtgggcagaacaccaaaggccagcaggtttgctacagccacttcagattccagaatggaagtgggaagaaatcggaatggatttcatcaccggtttgcccaggacgtcatcggggcatgattctatttgggtagtcgttgaccgactcaccaaagtggctcacttcattccggtgcacactacctactcagggaagaaattagcagaactctatctagcaagaatcatgtgtttacatggtgtacctaagaagatcgtgtctgatcgaggaagccaattcacttcaaagttctggcagaaattacaagaagaattgggaacccgtctaaacttcagcactgcttaccatccacaaacagatggccagaccgagcgagtcaaccaaatactagaggatatgttgagagcctgtgcgcttgacttgggtggagcatgggacaaaagcttgccgtatgctgagttctcttacaacaacagttaccaagctagtctgcagatggcaccatttgaagcactgtatggacggaggtgtcgtactccgctcttctgggatcagacaggggaacgccagttgtttggtacagaagttttaaatgaggcagaagagaaagtcagagctgttagggaaagattgagaatcgcgcagtctcggcagaaaagctatgcagacaaccgccgaagggagctcgttttccaagtaggggattatgtgtatctccgtgtcactccgctcaggggagtacatcgcttccaaaccaaaggaaagttggcaccacgctttgtgggaccatatcggattttggaacgtagaggtgaagttgcttaccagctcgagcttccctccaacatgcttggcatccataatgtgttccacgtctcccagttgaagaaatgtttgagagttcctgaggaacaggcaagtccggatcaaatcgaaatccaggaagacttgacgtatgtggagaagccaactcgtatcctcgaaaccagcgagagaaagaccagaaacaaagtaataagattctgcaaggttcagtggagccaccactcagaggaagaggccacttgggaaagagaagatgagttgaaggccacccacccgcacctcttcgccagctcttccgaatctcggggtcgagattccgtttaa

SEQ ID NO: 14666 - DNA, 4221 bp, Oryza sativa
  Clone ID: TFbOSC420231j.C1.o1.fg
atggcagttaaggaccggttcacgggaaaccctgggagacttaccgtgcttaccacaagcgggagtggggatttaatgcacattcagcttagaaattctggttcgagaatttctgggcgtgacaagttggtatcagagccgactttgaccatggagataaggaatggttcacgcgactcgaacaacgccagtggcagcgaagagccgaacaatggagcacgtgccaacggtgcatctgacaacagtccgtccccaccgcccgagaacccaacaattgctcaggtgttggacaatcagactcagatgatgacaatgatgatgcaacagatgcagcaacagtaccatcaggtgttgcagcaggtgcagcagcaagcacagctgcagcagcagaacctgcagtttggtcctccacctcctcagtccaaactgttagaatttcttcgtgtcaagccgcccaccttctcaagcaccaccaacccaatcgaagcccacgactggcttcatgccattgagaagaagctgaatcttttgcaatgcaacgagcaggagaaggttgcttttgctacacaccagctacaaggtcccgcttctatttggtgggacaactacatggtgacccgtccagctggggcagaggttacttggacagagtttcgtcatagtttcaataaagcacaggttcccgagggaattgtggcacaaaagaagagagagttccgttccctgcaacaaggaaccagaacagttatagagtatttgcatgagttcaaccgcctcgcgcgctacgcccctgaggacgtgcgtaccgatgccgagaagcaggagaagtttctgtctggtcttgatgatgaattgactaaccagttgatctctagagattatgaggactttgagaagctggtggataaggctatccgtcaggaggagcacggtaacaaaataaaccgtaagaggaaggcagctcagttcaggactccccaggggaagagtcagaagcctcgtttcacgatgggacgtcacggtggaccttccaccatgattatccgacagcaccgtccctaccacccgggtagcttcaacaagaaccaccataatggcagtcacaacaacagtgagcagcacagtctcaaccctactccgagttcactaaagattccagctcaatcagttcagccagctctgccagaacagcccaagaggttgggagaaaaacccgaactctgcttcaattgtaacaaacccggacacacggttggaaagtgcccgaagccaagacgtgctggacccaagttcgttcaggcccgtgttaatcatgcatctgcagaggaggcgcagtcagcaccagaggttatattgggcacattccccgtcaactcgacaccggcagtaatattgtttgattctggtgcaacccattcctttatttccaagcgttttgctggtgcacatgggttatctttagtgaagcttaagataccaatgcgagttcatactcctggaggtggcatgaccacaactcactactgcccatctgtgacagttgaaattcaagggttgatttttccagccaacctcattcttctcgaatccaaggacctagatgtcatacttggaatggattggttgacaaggcacagaggagtgattgattgcgccagccgcaccatcaagttaacccatgcaaaaggagaggtggtaaccttccagtctctagtgccgcggaagccagggatcagtttaaaccaggctgctggtgaagaacaagaggtagcagtggagaaaaccactaagaagctggaggatattcctatagtcagagagtatccagaggtttttccggacgatctgacaacaatgccaccaaaaagggatatcgagttccggattgacttggtacctggaactgcaccgatccacaagaggccttacagaatgggagccaacgagttggcggaagtcaagaagcaagtcgatgaacagttacagaagggatacatccgtccgagcacgtcgccttggggtgctccggttatctttgtggagaagaaagacaaaaccaagagaatgtgcgttgactaccgcgcactcaatgaggtcaccatcaagaacaagtatcctttgccaaggattgatgatctgtttgatcagttgaaaggagctactgtgttctctaagatagacctgcgatcaggctatcaccagttgaggatccgcgaagaggatattccaaagacagcattcatcactcggtacgggttgttcgaatgcacagttatgtctttcggactcactaatgcacctgccttcttcatgaatttgatgaataaggtgtttatggaatttctagacaagtttgtcgtggttttcatcgatgacatacttatctattccaagtccgaggaagaacatgagcagcatcttcgactggtacttgaaaagttaaaggagcaccagctatatgccaagttcagcaagtgcgacttctggcttaaggaagttcagtttctcggtcacatcgtgaatgctcaaggagtagcggtggatccagcaaatgtggagtcggttaccaaatggaccccaccaaggacagtcactcaggttcggagtttcttaggacttgcgggttattaccgccggttcattgagaacttctctaaaattgctaagccaatgacacagctattgaagaaggaagaaaagtttatctggtctgctgaatgcaataggagttttgaagaactcaaacgacggttggtgtctgcaccagtcttaatcctgcctgatcagacgaaagatttccaggtctattgtgatgcatctcgccaggggctaggatgtgtgttgatgcaggatggcaaagtggtttcttatgcttcacggcagttgcgtcctcatgaaggcaactacccgacgcacgatctggaattggccgcagtcgttcatgctttaaagatttggcggcactatctcatcagtaaccgttgtgaggtatatacagatcacaaaagtctaaagtacatcttcactcaagctgatttgaatctcagacagcgaagatggttggagctgatcaaggattatgatatgggaatacattatcatcccggcaaggctaatgtggttgcagatgccttgagcaggaagagctactgcaatgttgcatgggtagagcaactatgttgtgaggttcaacgcgatttggaacatctgaaccttggtatagttgagcacggattcgtggctgccctagaggcacagcccacactggtggagcaggttcgcatagctcaagcaagtgatcctgaaatagcagagctcaaaaagaacatgagagttggaaaagcccgaggttttgttgaggatgaacaaggaacaatctggatgggagaaagattgtgtgtacccgaaaacaaggaattaaaagacctgatactaaccgaggctcatcaaactcagtattccattcatcccggtagtactaagatgtaccaagacctcaaagagaagttttggtgggtcagcatgagaagggaaatagctgaattcgtagcactctgtgacgtctgtcaacgagtaaaggcagaacaccaaaggccagcaggtttgctacagccacttcagattccagaatggaagtgggaagaaatcggaatggatttcatcaccggtttgcccaggacgtcatcggggcatgattctatttgggtagtcgttgaccgactcaccaaagtggctcacttcattccggtgcacactacctactcagggaagaaattagcagaactctatctagcaagaatcatgtgtttacatggtgtacctaagaagatcgtgtctgatcgaggaagccaattcacttcaaagttctggcagaaattacaagaagaattgggaacccgtctaaacttcagcactgcttaccatccacaaacagatggccagaccgagcgagtcaaccaaatactagaggatatgttgagagcatgtgcgcttgactttggtggagcatgggacaaaagcttgccgtatgctgagttctcttacaacaacagttaccaagctagtttgcagatggcaccgtttgaagcactatatggacgaaggtgtcgtactccgctcttctgggatcagacaggggaacgccaattgtttggtacagaagttttaaatgaggcagaagagaaagtcagagctgttagggaaagattgagaatcgcgtag

SEQ ID NO: 14667 - DNA, 6047 bp, Oryza sativa
  Clone ID: TFbOSC420276j.C1.o1.np
atggcggccggacctcccgcacctattccttccccgccggccgctctctcccccttccaaccctatataaaccctccctgcacctcctccgtccgtttccgcctctcgccgcccttcctcctcgccggaatcgagctcgcgccgtcgctctctctctccgccgtcgccgccgagctccggtccaccgtcgttgtcgccccggaccacctcccacctcggcaccgcctccttcggcttcgccgcatcctcgccgacctcgtccacccctccgtttcgctcgtcgaccgccggagcgccgccgtccccgtcgacccgaaccgcgccgccgccttcctccgctccggccgccttttcgtcgtcgccgtcgacctagggtgagccgtggaccgccgcctcatttccccctttccctcccttctctcggccgccgctccgccgtgcctatggccgccgccggcgaccataggggcgcgggcgcgccgcctcccgccggccgcgccgccgtggccgccttcgggcgcaccgagcggcttccgcgtggggcccggccgtcagccgctcgcgccctcgggtgtggctgacgcgtggggcccacggcgccggccggtgtgagcccgggtgcacccggtccaccgtggacccacctcggccatataaggaccggtcttcgggcctctgttgcaaagcgctaccgtacttccacatgtctagtgggacaaatgaaggctacacgagctacggcctggtagccaagatgtcatggcacagggccggtgtcctgctgctaggggctcagtcctgcctacctgtcccgggggttccggccgtaggtggggttgggtcgatgtacacctctgatcagagtataatctattcgaatagccgcgccctcggttatgggcaagccgagcaatgtacccaaatggccggcagcatcaaccgtcgtggtctggacctgactggattcgttttggaactgcggggcatgtgcgttgttctggggtatccgcatggagtggactaccagggcaagcagctcccggagcaggagggtgacgatgcagagccccacgctgcttgggaggttactgcagtgatcctcactggctcacccgagaggacttcgttggcggtcaccgcgggtggagattccttctccgctgcttgccagaacgccgcactcctcgccatcggcactcttcaccagcgctacccggacgagttgcagcacttgccctaccgctaccaccctcgtcgcggaggagcccgcgactacgccaccttccgggatgctagctcggaggatgacgctaccatcatgcacctggcgcacatggtggaggcatacgacgcggcccgtatcgacttccatcagatggtgcgtcgcgggttggtcaagaacaacatgaagatcctggagctgcgtcaggagaatctgcagttgaagaaggacttagacgcagtggaggcgcagctgcgtcagctcaagatcgcccagggagaggtctgtcgccccaagcgtcgccgcgtctgccgcagcctgaagatcaccgcccgcaagagtacctccaggcccgagcttgttcgtcagtccctggcgtggacctgcttcgtcgagacccctcgtgccgagcccgcgcccgtggttcctcaggaggatggagcctccggcgttggcagtacggaggatgcgctgttgctcaccttccatggtgacaaccaggagaagtgctgctaccggtgaaggcagtcaccccgaaggcagcaaccacaacaaccatgtcagcccacctccacctccttctccgcctccaccaccaccaccagacaccaacgccatcctcacccaaatcgtcgcccagtaggccaacatgatggctgctttcctccaccacatccaaaatccgccacaacataatgctccaccaccacccccacaacactctaaactcgccgagttcctccgcatctgtccgcctaccttctctagctctaataaccccgtggatgcattggattggttgcatgccgtggagaaaaagttagacaccgtgcagtgcagtgatgaggagaaagtcatcttcgccgcccaccaactgcaggggcccgcatctctatggtggaaccatttccaggctacgcagctagaggggcaacctattacttgggcccgcttcaccgccgctttccagagaacccatgtgcccgccggagtcatggcccttaagaaaagggaattccgagagttgaagcaaggcaaccgctccgtgatggagtatttgcatgagtttaacaacctggcctggtacgccccggaggatgttcgtgaagatgaggagaagtaagagaagttcttggcaggaatggatcctgagctgtccgtgcgtctggtctccggggactactcggatttccaacgtctggtggacaagagcatccgcttggaagccaagcacaaggaactggagtcgcacaagcgtcgcttggcgaatttccgcaatcaacagggggctaaccaaagggtccgctacaccaatccctatccagggggatcatcctcgcagcagcaacagcagcagcaacctcgctccgcgccccgacctcaattcgtggtgcgcatcccacagccgcagcaacagcagagtcagcaagggactcgtgcgccccgtccccctacgccagccgtgcagcctggtcaaggccgcagggacgttcaaggtcagcagcgtctgtgcttcaactgcttcgagcatgggcactttgcggataaatgcccaaagccgaggcgccagcaaggccaagcgcctccccgctccaacaacggtggtaaggatgtcattcggggacgtgtgaaccacgtgacggccgaggacgtgctgacaactccagacatcatcgttggtacgttcctcattcattccatccctgctaccattttgttcgactctggagcttcccactcgtttatatctgtgccattcgtggggagaaatcggttggggatagaaaggcttaggaaccctctgctcatcaccacccctggaggggttatgacagcaaagtattatagccctgccattcctatagaaatccagggaattccttttccctcggatctgattcttctagacaccaagaacttggatgtgatccttgggatgaattggttggctcaattccaaggagtagtggattgcgcaagacgcactgtcactctgtaccgagggccggaacaaccggttgttttctttgcacccccaacttctgtcggtagttcagaacttcatcagataggactgtcagaaatccccatcgtcagagagttcggagacgtgtttccagaaaaactacccggtatgctgccgaagcgagagattgagttccggatagatcttgctccaggaaccactcccctgtacaagcgaccctaccgtatggcagcaaatgaactggccgaagtcaagaaacagttggaagagttgaaagaaaaggggtatatacggccgagtacttccccctggggtgctcctgtgatttttgtggagaagaaagacaagacaaagaggatgtgcgttgactacagagctctcaatgaagttactatcaaaaacaagtaccctcttccccggatcgatgatctgttcgatcagcttaaaggtgccactgtattctccaagattgatcttcgttccggatatcaccaattacgtattcgtgaagaagatatcccgaagaccgcattcaccacgcgatacggactgtatgaattcacggtgatgtcgttcggtttaaccaatgctcctgccttcttcatgaacttagtgaacaaagtgttcatggaatacctggataagtttgttgtggttttcattaacgacattctggtgtactcacaatcagaggaagaccatcagcaccatctccgtctggtgttgggaaagttgcgggaacatcaattgtatgccaaacttagcaagtgtgagttttggttgtccgaagtcaaattcttagggcacgtgatatctgctaaaggagtcgctgtggaccccgaaacagtgaccgccgtcattgattggaagcaacccaagacagtcactcaaattcgcagcttcttgggtttggcaggatactaccggaggttcatcgagaacttctccaaaatcgctcgacccatgacacagttgttgaagaaagaagagaaatttgtgtggagcccgcaatgcgagaaggcattccaaactctcaaggaaaggttggtttcctcgccagttttagtctgaccggatactcgcaaggacttcatggtgtactgtgacgcttcgcgccaaggattggggtgcgtgctcatgcaggaaggtcatgtggtggcctatgcctcaaggcagctacggcctcatgaaggcaactaccctacccatgatttggagttagccgcggtagttcatgctctaaaaatctggcggcactatctcattgggaatcgctgtgaaatatatactgatcataagagtttgaaatacatcttcacccagtcggatctgaatcttcggtagaggagatggttagaactcatcaaggattatgatgtgggaattcactatcatcctggtaaggccaacgtggtcgccgacgctctaagtcgaaaaagccattgcaacactcttgacgtccgtggcattccacccgaacttaatcaacagatggaagccttgaacctaagcatagttggtcgtggattcttggctacgctggaagccaagcccaccttgctcgatcaaatccgcgaggctcagaagaatgatccggatatgcatggactcctcaagaatatgaaacagggtaaagccgctggtttcacagaggatgaacacggaaccctatggaacggaaatcggcgtgtcaaggcagagcaccaacgaccggccggacttctccaacctctccaagtaccagaatggaaatgggatgaaattgggatggatttcatcaccggacttccaaaaacccaaggcggatatgattctatatgggtagttgtggaccgactaaccaaggtagctcggtttattcctgtgaagaccacctatggagggaacaaactagccgagctctacttcgctagaatcgtgagtctccatggcgttcctaagaaaattgtatctgataggggaagccaattcacctctcacttttggaagaagctccaagaagagctgggtaccagattaaatttcagcaccgcgtatcacccgcagacagatggacagaccgagcgtctaaatcagatcctagaagatatgcttcgctcatgtgtcctagatttcgggaagacctgggataagagtctcccctatgccgagttctcctacaataacagctaccaagccagcttataaatggcaccctatgaagcgttgtatggacgcaaatgccggacaccgctattgtgggaccaagttggggaaagccaagtgttcgggactgatatcctgagagaggctgaagctaaagtcagaaccattcgggataatctaaaggtggcacagtcccggcagaagagttatgcagataaccgacgccgtaacctggaattcgcagtggacgattttgtgtaccttcgggtcacgccattgcgaggtgtacacatgtttcagacgaaagggaagctcgcacctcggtttgtgggtcctttccgtatcattgctcgacgcggggaagtcgcttaccagttggagctgcccgcctccttgggcaacgtgcatgatgtgttccatgtgtcgcaactcaagaaatgtcttcgagtgccatccgagcaggccgattcagagcaaattgaagttcgcgaagacttgacctacgtggagaggcccgtgaaaatcctggacaccatggagcgcaggaccaggaactgggtaatccgtttttgcaaggtccaatggagcaaccacgccgaggaagaagctacatgggagcgtgaagacgagctgaaggcagcccatcccaatctcttcggcagttcttccgaatctcggggtcgagattccgtt

SEQ ID NO: 14668 - DNA, 4422 bp, Oryza sativa
  Clone ID: TFbOSC421431j.C1.o24.fg
atggagacaaggaatggttcacgcgactcgaacaacgctagtggcagcgaagagccgatcaatggagcacgtgccaacggtgcatctgacaacagtccgtccccaccgcccgagaacccaacaattgctcaggtgttggacaatcagactcagatgatgacaatgatgatgcaacagatgcagcaacagtaccatcagtccaaactgttagaatttcttcgtgtcaagccgcccaccttctcaagcaccaccaacccaatcgaagcccacgactggcttcatgccattgagaagaagctgaatcttttgcaatgcaacgagcaggagaaggttgcttttgctacacaccagctgcaaggccccgcttctgtttggtgggacaactacatggtgacccgtccaactggggcagaggttacttggacagagtttcgtcatagtttcaataaagcacaggttcccgagggaattgtggcacaaaagaagagagagttccgttctctgcaacaaggaaccagaacagttatagagtatttgcatgagttcaaccgcctcgcgcgctacgcccctgaggacgtgcgtaccgatgccgagaagcaggagaagtttctgtctggtcttgatgatgaattgactaaccagttgatctctagagattatgaggactttgagaagctggggaagagtcagaagcctcgtttcacaatgggacatcacggtggaccttccaccatggttatccgaccgcaccgtccctaccacccgggtagcttcaacaagaaccaccatagtggcagtcacaacaacagtgagcagcacagtctcaaccctactccgagttcactaaagattccagctcaatcagttcggccagctctgccagaacagcccaagaggttgggagaaaaacccgaactctgcttcaattgtaacaaacccggacacacggttggaaagtgcccgaagccaagacgtactggacccaagttcgttcaggcccgtgttaatcatgcatctgcagaggaggcgcggtcagcaccagaggttatattgggcacatttcccgtcaactcgacaccggcagtaatattgtttgattctggtgcaacccattccttcatttccaagcgttttgctggtgcacatgggttatctttagtgaagcttaagataccaatgcgagttcatactcctggaggtggcatgaccacaactcactactgcccatctgtgacagttgaaatccaagggttgatttttccagccaacctcattcttctcgaatccaaggacctagatgtcatacttggaatggattggttgacaaggcacagaggagtgattgattgcgccagccgcaccatcaagttgaccaatgcaaaaggagaggtggtaaccttccagtctccagtgccgcggaagccagggatcagtttaaaccaggctgctggtgaagaacaagaggtagcagtggagaaaaccactaagaagctggaggatattcccatagtcagagagtatccagaggtttttccggatgatctgacaacaatgccaccaaaaagggatatcgagttccggattgacttggtacctggaactgcaccgatccacaagaggccttacagaatgggagccaacgagttggcggaagtcaagaagcaagttgatgaacagttacagaagggatacatccgcccgagcacgtcgccttggggtgctccggttatctttgtggagaagaaagacaaaaccaagaggatgtgcgttgactaccgcgcactcaatgaggtcaccatcaagaacaagtatcctttgccaaggattgatgacctgtttgatcagttgaaaggagctactgtgttctctaagatagacctgcgatcaggctatcaccagttgaggatccgcgaagaggatattccaaagacagcattcatcactcggtacgggttgttcgaatgcacagttatgtctttcggacttactaatgcacctgccttcttcatgaatttgatgaacaaggtgtttatggaatttctagacaagtttgtcgtggttttcatcgatgacatacttatctactccaagtccgaggaagaacatgagcagcatcttcggctggtacttgaaaagttaaaagagcaccagctatatgccaagttcagcaagtgcgacttctggcttaaggaagttcagtttctcggtcacatcgtgaatgctcaaggagtagctgtggatccagcaaatgtggagtcagttaccaagtggaccccaccaaggacagtcactcaggttcggagtttcttaggacttgcgggttattaccgccggttcattgagaacttctctaaaattgctaagccaatgacacagctattgaagaaggaagaaaagtttatctggtctgctgaatgcaatcggagttttgaagaactcaaacgacggttggtgtctgcaccagtcttaatcctgcctgatcagacgaaagattttcaggtctattgtgatgcatctcgccaggggctaggatgtgtgttgatgcaggatggcaaagtggtttcttatgcttcacggcagttgcgtcctcatgaaggcaactacccgacgcacgatctggaattggccgcagtcgttcatgctttaaagatttggcggcactatctcatcggtaaccgttgtgaggtatatacagatcacaaaagtctaaagtacatctttactcaacctgatttgaatctcagacagcgaagatggttggagctgatcaaggattatgatatgggaatacattatcatcccggcaaggctaatgtggttgcagatgccttgagcaggaagagctactgcaatgttgcatgggtagagcaactatgttgtgaggttcaacgcgatttggaacatctgaaccttggtatagttgagcacggattcgtggctgccctagaggcacagcccacactggtggagcaggttcgcatagctcaagcaagtgatcctgaaatagcagagctcaaaaagaacatgagagttggaaaagcccgaggttttgttgaggatgaacaaggaacaatctggatgggagaaagattgtgtgtacccgaaaacaaggaattaaaagacctgatactaaccgaggctcatcaaactcagtattccattcatcccggtagtactaagatgtaccaagacctcaaagagaagttttggtggatcagcatgagaagggaaatagctgaattcgtagcactctgtgacgtctgtcaacgagtaaaggcagaacaccaaaggccagcaggtttgctacagccacttcagattccagaatggaagtgggaagaaatcggaatggatttcatcaccggtttgcccaggacatcatcggggcatgattctatttgggtagtcgttgaccgactcaccaaagtggctcacttcattccggtgcacactacctactcagggaagaaattagcagaactctatctggcaagaattatgtgtttacatggtgtacctaagaagatcgtgtctgatcgaggaagccaatttacttcaaagttctggcagaaattacaagaagaattgggaacccggttgaatttcagcaccgcttaccatccacaaacagatggccagaccgagcgagtcaatcaaatactagaggatatgttgagagcctgtgcgcttgactttggtggggcatgggacaaaagcttgccgtatgctgagttctcgtacaacaacagctaccaagctagtctgcagatggcaccgtttgaagcactgtatggacggaggtgtcgtaccccgctcttctgggatcagacaggggaacgccagttgtttggtacagaagttttaaatgaggcagaagagaaagtcagagctgtcagggaaagattgagaatcgtgcaatctcggcagaaaagctatgcagacaaccgacgaagggagctcgctttcgaaacaggggattatgtgtatctccgtgtcactccgctcaggggagtacatcgcttccaaaccaaaggaaagttggcaccacgctttgtgggaccatacaggatcttggaacgtagaggtgaagttgcttaccagcttgagcttccctccaacatgcttggcatccataatgtgttccacgtctctcagttgaagaaatgtttgagagttcctgaggaacaggcaagtccggatcacatcgaaattcaggaagatctgacatatgtggagaagccgactcgtatcctcgaaaccagcgagagaaggaccagaaacaaagtaataagattctgcaaggttcagtggagccaccactcagaggaagaggccacttgggaaagagaagatgagttgaaggccacccacccgcacctcttcgccagctcttccgaatctcggggtcgagattccgtttaa

SEQ ID NO: 14669 - DNA, 4698 bp, Oryza sativa
  Clone ID: TFbOSC422389j.C1.o1.fg
atggcggttaaggaccggttcacgggaaaccctgggagacttaccgtgcttaccacaagcgggagtgggcaaaagaaccccgagcttcctttggttatatcctgcatcatacctcctcttccgatggagacaaggaatggttcacgcgactcgaacaacgccagtggcagcgaaaagccgatcaatggagcacgtgccaacagtgcatctgacaacagtccgtccccaccgcccgagaacccaacaattgctcaggtgttggacaatcagactcagatgatgacaatgatgatgcaacagatgcagcaacagtaccatcaggtgttgcaacaggtgcagcagcaagcacagcagcagcagcagaacctgcaatttggtcctccgcctcctcagtccaaattgttagaatttcttcgtgtcaagccgcccactttctcaagcaccaccaacccaatcgaggcccacgactggcttcatgccattgagaagaagctgaatcttttgcaatgcaacgagcaagagaaggttgcttttgctacacaccagctgcaaggtcccgcttctgtttggtgggacaactacatggtgacccgtccaactggggcagaggttacttggacagagttttgtcatagtttcaataaagcacaggttcccgagggaattgtggcacaaaagaagagagagttccgttccctgcaacaaggaaccagaacagttatagagtatttgcatgagttcaaccgcctcgcgcgctacgcccctgaggacgtgcgtaccgatgacgggaggcaggagaagtttctgtctggtcttgatgatgaattgactaaccagttgatctctagagattatgaggactttgagaagctggtggataaggctatccgtcaggaggagcactgtaacaaaataaaccgtaagaggaaggcagctcagttcaggactccccaggggaagagtcagaagcctcgtttcacgatgggacatcacggtggaccttccaccatgattatccggcagcaccgtccctaccacccgggtaacttcaacaagaaccaccatagtgacagtcacaacaacagtgagcagcacagcctcaaccctactctgagttcactaaagattccagctcaatcagttcagccagctctgccagaacagcccaagaggttgggagaaaaacccgaactctgcttcaattgtaacaaacccggacacacggttggaaagtgcccgaagccaagacgtgccggacccaagttcgttcaggcccgtgttaatcatgcatctgcagaggaggcgcagtcagcaccagaggttatattgggcacattccccgtcaactcgacaccggcagtaatattgtttgattctggtgcaactcattccttcatttccaagcgttttgctggtgcacatgggttatctttagtgaagcttaagataccaatgcgagttcatactcctggaggtggcatgaccacaactcactactgcccatctgtgacagttgaaattcaagggttgatttttccagccaacctcattcttctcgaatccaaggacctagatgtcatacttggaatggattggttgacaaggcacagaggagtgattgattgcgccagccgcaccatcaagttaaccaatgcaaaaggagaggtggtaactttccagtctccagtaccgcggaagccagggattagtttaaaccaggctgctggtgaagaacaagaggtagcagtggagaaaaccactaagaagctggaggatattcccatagtcagagagtatccagaggtttttccggatgatctgacaacaatgccaccaaaaagggatatcgagttccggattgacttggtacctggaactgcaccgatccacaagaggccttacagaatgggagccaacgagttggcggaagtcaagaagcaagttgatgaacagttacagaagggatacatccgcccgagcacgtcgccttggggtgctccggttatctttgtggagaagaaagacaaacccaagagaatgtgcgttgactaccgcgcactcaatgaggtcaccatcaagaacaagtatcctttgccaaggattgatgacctatttgatcagttgaaaggagctactgtgttctctaagatagacctgcgatcaggctatcaccagttgaggatccgcgaagaggatattccaaagacagcattcatcactcggtacgggttgttcgaatgcacagttatgtctttcggactcactaatgcacctgccttcttcatgaatttgatgaacaaggtgtttatggaatttctagacaagattgtcgtggtttttatcgatgacatacttatctactccaagtccgaggaagaacatgagcagcatctccggctggtacttgaaaagttaaaagagcaccagctatatgccaagttcagcaagtgcgacttctggcttaaggaagttcagtttctcggtcacatagtgaatgctcaaggagtagctgtggatccagcaaatgtggagtcagttaccaaatggaccccaccaaggacagtcactcaggttcggagtttcttaggacttgcgggttattaccgccggttcattgagaacttctctaaaattgctaagccaatgacacagctattgaagaaggaagaaaagtttatctggtctgctgaatgcaataggagttttgaagaactcaaacgacggttggtgtctgcaccagtcttaatcctgcctgatcagacgaaagatttccaggtctattgtgatgcatctcgccaggggctaggatgtgtgttgatgcaggatggcaaagtggtttcttatgcttcacggcagttgcgtcctcatgaaggcaactacccgacgcatgatctggaattggccgcagttgttcatgctttaaagatttggcggcactatctcatcagtaaccgttgtgaggtatatacagatcacaaaagtctaaagtacatctttactcaacctgatttgaatctcagacagcgaagatggttggagctgatcaaggattatgatatgggaatacattatcatcccggcaaggctaatgtggttgcagatgccttgagcaggaagagctactgcaatgttgcatgggtagagcaactatgttgtgaggttcaacgcgatttggaacatctgaaccttggtatagttgagcacggattcgtggctgccctagaggcacagcccacactggtggagcaggttcgcatagctcaagcaagtgatcctgaaatagcagagctcaaaaagaacatgagagttggaaaagcccgaggttttgttgaggatgaacaaggaacaatctggatgggagaaagattgtgtgtacccgaaaacaaggaattaaaagacctgatactaaccgaggctcatcaaactcagtattccattcatcccggtagtactaaaatgtaccaagacctcaaagaaaagttctggtgggtcagcatgagaagggaaatagctgaattcgtagcactatgtgacgtctgtcaacgagtaaaggcagaacaccaaaggccagcaggtttgctacagccacttcagattccagaatggaagtgggaagaaatcggaatggatttcatcaccggtttgcccaggacatcatcggggcatgattctatttgggtagtcgttgaccgactcaccaaagtggctcacttcattccggtgcacactacctactcagggaagaaattagcagaactctatctagcaagaatcatgtgtttacatggtgtacctaagaagatcgtgtctgatcgaggaagccaattcacttcaaagttctggcagaaattacaagaagaattgggaacccgtctaaacttcagcactgcttaccatccacaaacagatggccagaccgagcgagtcaaccaaatactagaggatatgttgagagcctgtgcgcttaactttggtggagcatgggacaaaagcttgccgtatgctgagttctcttacaacaacagttaccaagctagtctgcagatggcaccgtttgaagcactgtatggacggaggtgtcgtactccgctcttctgggatcagacagaggaacgccagttgtttggtacagaagttttaaatgaggcagaagagaaagtcagagctgttagggaaagattgagaatcgcgcaatctcggcagaaaagctatgcagacaaccgccgaagggagctcgttttccaagtaggggattatgtgtatctccgtgtcactccgctcaggggagtacaccgcttccaaaccaaaggaaagttggcaccacgctttgtgggaccatatcggattttggaacgcaggggtgaagttgcttaccagcttgagctttcctccaacatgcttggcatccataatgtgttccacgtctcccagttgaagaaatgtttgagagttccggaggaacaggcaagtccggatcaaatcgaaatccaggaagacttgacgtatgtggagaagccaactcgtatcctcgaaaccagcgagagaaagaccagaaacaaagtaataagattctgcaaggttcagtggagccaccactcagaggaagaggccacttgggaaagagaagatgagttgaaggccacccacccgcacctcttcgccagctcttccgaatctcggggtcgagattccgtttaa

SEQ ID NO: 14670 - DNA, 3510 bp, Oryza sativa
  Clone ID: TFbOSC5662j.C1.o1.fg
atggcagttaaggaccggttcacgggaaaccctgggagacttactgtgcttaccacaagcgggagtggctgttttactgctttcaactactgctttgaaatgcctgctttatgcaaaagaatccctagcttcctttggttatatcctgcatcatacctcctcttccggtatgacttgttgagtacagtgggtagtactcagtcttgctctcttttcccccacaccagagttgaagttcttctcagtggagccgtctcagagaggttggcttcgttgctgccgtcaagatggagacaaggaatggttcacgcgactccaacaacgccagtggcagcgaagagccgatcaatggagcacgtgccaacagtgcatctgacaacagtccgtccccaccgcccaggtgttggacaatcagactcagatgatgacaatgatgatgtaacagatgcagcaacagtaccatcaggtgttgcagcaggtgcagcagcaagcacagcagcagcagcagaacctgcagtttggtcctccacctcctcagtccaaactcttcatgccattgagaagaagctgaatcttttgcaatgcaacgagcaagagaaggttgcttttgctacacaccagctgcaaggtcctgcttctgtttggtgggacaactacatggtgacccgtccaactggggcagaggttacttggacagagttttgtcatagtttcaataaagcacaggttcccgagggaattgtggcacaaaagaagagagagttccgttccctgcaacaaggaaccagaacagttatagagtatttgcatgagttcaaccgcctcgcacgctacgcccctgaggacgtgcgtaccgatgacgggaggcaggagaagtttctgtctggtcttgatgatgaattgactaaccagttgatctctagagattatgaggactttgagaagctggtggataaggctatccgtcaggaggagcactgtaacaaaataaaccgtaagaggaaggcagctcagttcaggactccccaggggaagagtcagaagcctcgtttcacgatgggacgtcacggtggaccttccaccatgattatccggcagcaccgtccctaccacccgggaagcttcaacaagaaccaccatagtggcagtcacaacaacagtgagcagcacagcctcaaccctactccgagttcactaaagattccagctcaatcagttcagccagctctgccagaacagcccaagaggttgggagaaaaacccgaactctgcttcaattgtaacaaacccggacacacggttggaaagtgcccgaagccaagacgtgctggacccaagttcgttcaggcccgtgtcaatcatgcatctgcagaggaggcgcagtcagcaacagaggttatattgggcacattccccgtcaactcgacaccggcagtaatattgtttgattctggtgcaacccattccttcatttccaagcgttttgctggtgcacatgggttatctttagtgaagcttaagataccaatgcgagttcatactcctggaggtggcatgaccacaactcactactgcccatctgtgacagttgaaattcaagggttgatttttccagccaacctcattcttctcgaatccaaggacctagatgtcatacttggaatggattggttgacaaggcacagaggagtgattgattgcgccagccgcaccatcaagttgaccaatgcaaaagaagaggtggtaaccttccagtctccagtgccgcagaagccagggattagtttaaaccaggctgctggtgaagaacaagaggtagcagtggagaaaaccactaagaagctggaggatattcccatagtcagagagtatccagaggtttttccggacgatctgacaacaatgccaccaaaaagggatatcgagttccggattgacttggtacctggaactgctccaatccacaagaggccttacagaatgggagccaacgagttggcggaagtcaagaagcaagtcgatgaacagttacagaagggatacatccgcccgagcacgtcgccttggggtgctccggttatctttgtggagaagaaagacaaaaccaagaggatgtgcgttgactaccgcgcactcaatgaggtgtttatggaatttctagacaagtttgtcatggttttcatcgatgacatacttatctactccaagtccgaggaagaacatgagcagcatctccggctggtacttgaaaagttaaaaaagcaccagctatatgccaagttcagcaagtgcgacttctggcttaaggaagttcagtttctcggtcacatcgtgaatgctcaaggagtagctgtggatccagcaaatgtggagtcagttaccaaatggaccccaccaaggacagtcactcaggatggcaaagtggtttcttatgcttcacggcagttgcgtcctcatgaaggcaactacccgacgcatgatctggaattggccgcagttgttcatgctttaaagatttggcggcactatctgatcggtaaccgttgtgagcgaagatggttggagctgatcaaggattatgatatgggaatacattatcatcccggcaaggctaatgtggttgcagatgccttgagcaggaagagctactgcaatgttgtatgggtagagcaactatgttgtgaggttcaacgcgatttggaacatctgaaccttggtatagttgagcacggattcgtggttgccctagaggcacagcccacactggtggagcagtattccattcatcccggtagtactaagatgtaccaagacctcaaagaaaagttctggtgggtcaacatgagaagggagatagctgaattcgtagcactctgtgacgtctgtcaacgagtaagggcagaacaccaaaggccagcaggggaacgccagttgtttggtacagaagttttaaatgaggcagaagagaaagtcagagctgtcagggaaagattgagaatcgcgcaatctcggcagaaaagctatgcagacaaccgccgaagggagctcgctttcgaaacaggggattatgtgtatctccgtgtcactccgctcaggggagtacatcacttccaaaccaaaggaaagttggcaccacgctttgtgggaccatacaggatcttggaacgtagaggtgaagctgcttaccagcttgagcttccctccaacatgcttggcatccacaacgtgttccacgtctctaagttgaagaaatgtttgagagttcctgaggaacaggcaagtccagatcacatcgaaattcaggaagatctgacgtatgtggagaagccgactcgtatcctcgaaaccagcgagagaaggaccagaaacaaagtaatcagattctgcaaggttcagtggagtcatcactcagaagaagtggccacttgggaaagagaagatgagttgaaggccacccacccgcacctcttcgccagccattccgaatctcgaggtcgagattccgtttaa

SEQ ID NO: 14671 - DNA, 417 bp, Oryza sativa
  Clone ID: TFbOSC5662j.C1.o5.gm
atgggtcagcggctcaaaggggagaggaagggggcgccggcatgtgggccccacgggcagtggctcaaggtggccggtctaccgtggaccgagaccacgcgggtggtccaccgccggtccacaggaccgacggtccggatcggctgggaggccgatcggacggcacggcggcggctaggcatggctcggctcagcttcaaaaccggccgaccggccatggcaaccggcggtgacgcgcacggtcgccggcgacggcaattggcggcgcgggaaacgatggcggacggggtacaggacggcggcgtcgaccgaaggcaacggcgagcgcatggagagaggcggcgcaaacgagagataggggaagagggagaaggggggatcctcaccggcgagtatggcggccagagcggaggatga

SEQ ID NO: 14672 - DNA, 3408 bp, Oryza sativa
  Clone ID: TFbOSC6239j.C1.o4.gm
atggagataaggaatggttcacgcgactcgaacaacgcctgtggcagcgaagagccgatcgatggagcacgtgccaacagtgcatctggcaacagtccgtccccaccgcccgagaacccaacaattgctcaggtgttggacaatcagactcagatgatgacaatgatgatgcaacagatgcagcaacagtaccatcagtccaaactgttagaatttcttcgtgtcaagccgcccactttctcaagcaccaccaacccaatcgaggcccacgactggcttcatgccattgagaagaagctgaatcttttgcaatgcaacgagcaggagaaggttgcttttgctacacaccagctacaaggtcccgcttctatttggtgggacaactacatggtgacccgtccagctggggcagaggttacttggacagagtttcgtcatagtttcaataaagcacaggttcccgagggaattgtggcacaaaagaagagagagttccgttccctgcaacaaggaaccagaacagttatagagtatttgcatgagttcaaccgcctcgcgcgctacgcccctgaggacgtgcgtaccaatgccgagaggcaggagaagtttttgtctggtcttgatgatgaattgactaaccagttgatctctagagattatgaggactttgagaagctggtggataaggctatccgtcaggaggagcacggtaacaaaataaaccgtaagaggaaggcagctcagttcaggactccccaggggaagagtcagaagcctcgtttcacgatgggacgtcacggtggaccttccaccatgattatccgacagcaccgtccctaccacccgggtagcttcaacaagaaccaccataatggcagtcacaacaacagtgagcagcacagtctcaaccctactccgagttcactaaagattccagctcaatcagttcagccagctctgccagaacagcccaagaggttgggagaaaaacccgaactctgcttcaattgtaacaaacccggacacacggttggaaagtgcccgaagccaagacgtgctggacccaagttcgttcaggcccgtgttaatcatgcatctgcagaggaggcgcagtcagcaccagagcgttttgctggtgcacatgggttatctttagtgaagcttaagataccaatgcgagttaatactcctggaggtggcatgaccacaactcactactgcccatctgtgacagttgaaattcaagggttgatttttccagccaacctcattcttctcgaatccaaggacctagatgtcatacttggaatggattggttgacaaggcacagaggagtgattgattgcgccagccgcaccatcaagttaacccatgcaaaaggagaggtggtaaccttccagtctctagtgccgcggaagccagggatcagtttaaaccaggctgctggtgaagaacaagaggtagcagtggagaaaaccactaagaagctggaggatattcccatagtcagagagtatccagaggtttttccggacgatctgacaacaatgccaccaaagagggatatcgagttccggattgacttggtacctggaactgcaccgatccacaagaggccttacagtatgggagccaacgagttggcggaagtcaagaagcaagtcgatgaacagttacagaagggatacatccgcccgagcacgtcgccttggggtgctccggttatctttgtggagaagaaagacaaaaccaagagaatgtgcgttgactaccgcgcactcaatgaggtcaccatcaagaacaagtatcctttgccaaggattgatgatctgtttgatcagttgaaaggagctactgtgttctctaagatagacctgcgatcaggctatcaccagttgaggatccgcgaagaggatattccaaagacagcattcatcactcggtacgggttgttcgaatgcacagttatgtctttcggactcactaatgcacctgccttcttcatgaatttgatgaataaggtgtttatggaatttctagacaagtttgtcgtggttttcatcgatgacatacttatctattccaagtccgaggaagaacatgagcagcatcttcagctggtacttgaaaagttaaaagagcaccaactatatgccaagttcagcaagtgcgacttctggcttaaggaagttcagtttcttggtcacatcgtgaatgctcaaggagtagctgtggatccagcaaatgtggagtcagttaccaaatggaccccaccaaggacagtcactcaggttcggagtttcttaggacttgcgggttattaccgccggttcattgagaacatctctaaaattgctaagccaatgacacagctattgaagaaggaagaaaagtttatctggtctgctgaatgcaataggagttttgaagaactcaaacgacggttggtgtctgcaccagtcttaatcctgcctgatcagacgaaagatttccaggtctattgtgatgcatctcgccaggggctaggatgtgtgttgatgcaggatggcaaagtggtttcttatgcttcacggcagttgcgtcctcatgaaggcaactacccgacgcacgatctggaattggccgcagtcgttcatgctttaaagatttggcagcactatctcatcagtaaccgttgtgaggtatatacagatcacaaaagtctaaagtacatcttcactcaagctgatttgaatctcagacagcgaagatggttggagctgatcaaggattatgatatgggaatacattatcatcccggcaaggctaatgtggttgcagatgctttgagcaggaagagctactgcaatgttgcatgggtagagcaactatgttgtgaggttcaacgcgatttggaacatctgaaccttggtatagttgagcacggattcgtggctgccctagaggcacagcccacactggtggagcaggttcgcatagctcaagcaagtgatcctgaaatagcagagctcaaaaagaacatgagagttggaaaagcccgaggttttgttgaggatgaacaaggaacaatctggatgggagaaagattcactgtatggacgaaggtgtcgtactccgctcttctgggatcagacagggtgacggagctcgtggctcctcaccgggagaccgcgcaggcccccctttgccagtccggccgggggcttagggaggagggcggacacctcaccctcgggcccgacgtccccgaaggtgccaggccacgtgggcgattgcgtctgcctcaagcctctggtcacgatactcccggtcccatatcaccgacagtagcccccggcgttatgccagagcaatttcccttcccaagggaagcggtcaggtgtgacgccacccctaaagcctggtga

SEQ ID NO: 14673 - DNA, 4689 bp, Oryza sativa
  Clone ID: TFbOSC7720j.C1.o1.fg
atggcagttaaggaccggttcacgggaaaccctgggagacttaccgtgcttaccacaagcgggagtgggtttgttgcttgtgggctagtcggcggccgatatcatgtgtcagtgatggagataaggaatggttcacgcgactcgaacaacgccagtggcagcgaagagccgatcaatggagcacgtgccaacggtgcatctgacaacagtccgtccccaccgcccgagaacccaacaattgctcaggtgttggacaatcagactcagatgatgacaatgatgatgcaacagatgcagcaacagtaccatcaggtgttgcaacaggtgcaacagcaagcacagctgcagcagcagaacctgcagtttggtcctccacctcctcagtccaaattgttagaatttcttcgtgtcaagccgcccactttctcaagcacccccaacccaatcgaggcccacgactggcttcatgccattgagaagaagctgaatcttttgcaatgcaacgagcaggagaaggttgcttttgctacacaccagctacaaggtcccgcttctatttggtgggacaactacatggtgacccgtccagctggggcagaggttacttggacagagttttgtcatagtttcaataaagcccaggttcccgagggaatcgtggcacaaaagaagagagagttccgttccctgcaacaaggaaccagaacagttatagagtatttgcatgagttcaaccgcctcgcgcgctacgcccctgaggacgtgcgtaccgatgccgagaggcaggagaagtttatgtctggtcttgatgatgaattgaccaaccagttgatctctagagactatgaggactttgagaagcttgtggacaaggccatccgtcaagaggagcagtgtaacaaaatgaaccgtaagaggaaggcagcccagttcaggactccccaggggaagtgtcagaagcctcgtttcacgatgggacgtcacggtggaccttccaccatgattatccgacagcaccgtccctaccacccgggtagcttcaacaagaaccaccatagtggcagtcacaacaacagtgagcagcacagcctcaaccctactccgagttcactaaagattccagctcaatcagttcagccagctctgccagaacagcccaagaggttgggagaaaaacccgaactctgcttcaattgtaacaaacccggacacacggttggaaagtgcccgaagccaagacgtgccggacccaagttcgttcaggcccgtgttaatcatgcatctgcagaggaggcgcagtcagcaccagaggttatattgggcacattccccgtcaactcgacaccggcagtaatattgtttgattctggtgcaacccattccttcatttccaagcgttttgctggtgcacatgggttatctttagtgaagcttaagataccaatgcgagttcatactcctggaggtggcatgaccacaactcactactgcccatctgtgacagttgaaattcaagggttgatttttccagccaacctcattcttctcgaatccaaggacctagatgtcatgcttggaatggattggttggcaaggcacagaggagtgattgattgcgccagccgcaccatcaagttgaccaatgcaaaaggagaggtggtaatcttccagtctccagtgccgcagaagccagggattagtttaaaccaggctgctggtgaagaacaagaggtagcagtggagaaaaccactaagaagctggaggatattcccatagtcagagagtatccagaggtttttccggatgatctgacaacaatgccaccaaaaagggatatcgagttccggattgacttggtacctggaactgcaccgatccacaagaggccttacagaatgggagccaacgagttggcggaagtcaagaagcaagttgatgaacagttacagaagggatacatccgcccgagcacgtcgccttggggtgctccggttatctttgtggagaagaaagacaaaaccaagaggatgtgcgttgactaccgcgcactcaatgaggtcaccatcaagaacaagtatcctttgccaaggattgatgatctgtttgatcagttgaaaggagctactgtgttttctaagatagacctgcaatcaggctatcaccagttgaggatccgcgaagaggatattccaaagacagcattcatcactcggtacgggttgttcgaatgcacagttatgtctttcggactcactaatgcacctgccttcttcatgaatttgatgaacaaggtgtttatggaatttctagacaagtttgtcgtggttttcatcgatgacatactaatctactccaagtccgaggaagaacatgagcagcatcttcgactggtacttgaaaagttaaaagagcaccagctatatgccaagttcagcaagtgcgacttctggcttaaggaagttcagtttctcggtcacatcgtgaatgctcaaggagtagctgtggatccagcaaatgtggagtcagttaccaagtggaccccaccaaggacagtcactcaggttcggagtttcttaggacttgcgggctattaccgccggttcattgagaacttctctaaaattgctaagccaatgacacagctattgaagaaggaagaaaagtttatctggtctgctgaatgcaataggagttttgaagaactcaaacgacggttggtgtctgcaccagtcttaatcctgcctgatcagacgaaagattttcaggtctattgtgatgcatctcgccaggggctaggatgtgtgttgatgcaggatggcaaagtggtttcttatgcttcacggcagttgcgtcctcatgaaggcaactacccgacgcatgatctggaattagccgcagttgttcatgctttaaagatttggcggcactatctcatcggtaaccgttgtgaggtatatacagatcacaaaagtctaaagtacatctttactcaacctgatttgaatctcagacagcgaagatggttggagctgatcaaggattatgatatgggaatacattatcatcccggcaaggctaatgtggttgcagatgccttgagcaggaagagctactgcaatgttgcatgggtagagcaactatgttgtgaggttcaacgcgatttggaacatctgaaccttggtatagttgagcacggattcgtggctgccctagaggcacagcccacactggtggagcaggttcgcatagctcaagcaagtgatcctgaaatagcagagctcaaaaagaacatgagagttggaaaagcccgaggttttgttgaggatgaacaaggaacaatctggatgggagaaagattgtgtgtacccgaaaacaaggaattaaaagacctgatactaaccgaggctcatcaaactcaatattccattcatcccggtagtactaagatgtaccaagacctcaaagaaaagttctggtgggtcagcatgagaagggaaatagctgagttcgtagcactctgtgacgtctgtcaacgagtaaaggcagaacaccaaaggccagcaggtttgctacagccacttcagattccagaatggaagtgggaagaaatcggaatggatttcatcaccggtttgcccaggacgtcatcggggcatgattctatttgggtagtcgttgaccgactcaccaaagtggctcacttcattccggtgcacactacctactcagggaagaaattagcagaactctatctggcaagaattatgtgtttacatggtgtacctaagaagatcgtgtctgatcgaggaagccaattcacttcaaagttctggcagaaattacaagaagaattgggaacccggttgaatttcagcaccgcttaccatccacaaacagatggccagaccgagcgagtcaatcaaatactagaggatatgttgagagcatgtgcgcttgactttggtggagcatgggacaaaagcttaccgtatgctgagttctcgtacaacaacagttaccaagctagtctgcagatggcaccatttgaagcactgtatggacgaaggtgtcgtactccgctcttctgggatcagacaggggaacgccagttgtttggtacagaagttttaaatgaggcagaagagaaagtcagagctgttagggaaagattgagaatcgcgcagtctcggcagaaaagctatgcagacaaccgccgaagggagctcgttttccaagtaggggattatgtgtatctccgtgtcactccgctcaggggagtacatcgcttccaaaccaaaggaaagttggcaccacgctttgtgggaccatatcggattttggaacgtagaggtgaagttgcttaccagctcgagcttccctccaacatgcttggcatccataatgtgttccacgtctcccagttgaagaaatgtttgagagttcctgaggaacaggcaagtccggatcaaatcgaaatccaggaagacttgacgtatgtggagaagccaactcgtatcctcgaaaccagcgagagaaagaccagaaacaaagtaataagattctgcaaggttcagtggagccaccactcagaggaagaggccacttgggaaagagaagatgagttgaaggccacccacccgcacctcttcgccagctcttccgaatctcggggtcgagattccgtttaa

SEQ ID NO: 14674 - DNA, 1821 bp, Oryza sativa
  Clone ID: TFbOSC900109j.C1.o5.fg
atggctgacaagacccttagcgagtttgctgctccctctactgacaatgtggccattgggccacaaatcaacatgggagacatggatttcgacctgaagtccagcctcatgacgatggcgcaggctagcctattctgcggaaagcctaatgaggatgccaatgctcacctgcaacaattcctggagatctgtagcacgtataccatcaagggcgtcagtccagacgccatcaggctaaggctgtttccgttctccctcctcggaagagtgaagcagtggttctacgccaatcgtgctactatcaacacctgggacaaatgctctacggcattcctctcgaaattcttcccgatgggaaacttttacaatggactcaccccggtgtcccgcaatcacctggacgcggcagctggaggaacattcttctctaaaacggttcgaggagccgttgatttaatagagaagatggtctccaatatgggttggagcgaggaacgactccagactcgtcagcgaggcatgcacaccgttaaggagacggagctacttgctgccaagccggacctcctcatgaaacgcttggacgaccacgagaaacggccacaaggcactatcaaggccttggactctcacgtcacgtgtgaagtctgcggtaacacaggtcatactaggaataactgcccggaaacccgtgaggaggcgatgtacatgggcaacaacagcagcgggtaccgtccacaaggaggtcaagggtggaatcagccacacccatattatcagggagggaggattctgaggcaacccgactcctctgttgaaaatgtcaaggcgatcatgatgaggggaggaattaacaggactgcaaaagaagcaccatctagtgactcggctgacaaagaggttcagccagaaaagaccgtgccgccggaatattacgacacacggttgctgccatttcctcaacggagcaggaaaccgtcagtggacgagcaatttgctcattttgttgaagtaatccagaagatccacatcaacgtgcctttgttggatgctatgcaagtggttaagctgacggagcaatgcagcaacatcatactccacaagctcccggaaaagaaaaaggatccggggtatcccacgatcacctgctcgatcggggcacagcagttcgaccaggccttgtgcgatcttggagccagtgtcagcgtcatgccaaaagacgtctttaacaagctcaacttcacggtgttggcaccaacaccgatgcgcctacaactggctgactcgtcagtccgttacccggcagggatagcggaggatgtgctagtcaagatacgggatttcttcatcccggttgacttcatagtgctggacatggacacgggaaaagagacgccgctcatcctggggcgcccgttccttagcaccgtgggagccaacattgacatgggaacggggagtatccgtttccacatcaatgggaaggaagagaagtttgagtttcaaccgaggacggaacaaagctccatggtcagaataaagtacgagccgaacacacagaatattcaagtggtcgaagtggagccaaccaagatggatagcctgttgaagtttatgcaaaatttcctggagaaggaaacaactatgcccaggaaccgttattggaagacgccggtaaaaacaaatacaccggacaagaagctagagcagccggctcagaggaagccattttccgcacctaaacctaagaaggtgtggaaggaaaagccaaagacgcccgctccatcacctcgggagatgggtggaaaatccacgaactga

SEQ ID NO: 14675 - DNA, 4575 bp, Oryza sativa
  Clone ID: TFbOSC900229j.C1.o20.fg
atggagacaaggaatggttcacgcgactccaacaacgccagtggcagcgaagagccgatcaatggagcacgtgccaacggtgcatctgacaacagtccgtccccaccgcccgagaacccaacgatcgctcaggtgttggacaatcagactcagatgatgacaatgatgatgcaacagatgcagcaacagtaccatcaggtgttgcagcaggtgcagcagcaagcacagctgcagcagcagaacctgcagtttggtcctccacctcctcagtccaaattgttagaatttcttcgtgtcaagccgcccactttctcaagcaccaccaacccaatcgaggcccacgactggcttcatgccgttgagaagaagctgaatcttttgcaatgcaacgagcaggagaaggttgcttttgctacacaccagctacaaggtcccgcttctatttggtgggacaactacatggtgacccgtccagctggggcagaggttacttggacagagttttgtcatagtttcaataaagcccaggttcccgagggaatcgtggcacaaaagaagagagagttccgttccctgcaacaaggaaccagaacagttatagagtatttgcatgagttcaaccgcctcgcgcgctatgcccctgaggacgtgcgtaccgatgccgagaggcaggagaagtttttgtctggtcttgatgatgaattgactaaccagttgatctctagagattatgaggactttgagaagctggtggataaggctatccgtcaggaggagcactgtaacaaaataaaccgtaagaggaaggcagctcagttcaggactccccaggggaagagtcagaagcctcgtttcacgatgggacatcacggtggaccttccaccatgattatccggcagcaccgtccctaccacccgggtaacttcaacaagaaccaccatagtgacagtcacaacaatagtgagcagcacagcctcaaccctactccgagttcactaaagattccagctcaatcagttcagccagctctgacagaacagcccaagaggttgggagaaaaacccgaactctgcttcaattgtaacaaacccggacacacggttggaaagtgcccgaagccaagacgtgccggacccaagttcgttcaggcccgtgttaatcatgcatctgcagaggaggcgcagtcagcaccagaggttatattgggcacattccccgtcaactcgacaccggcagtaatattgtttgattctggtgcaacccattcctttatttccaagcgttttgctggtgcacatgggttatctttagtgaagcttaagataccaatgcgagttcatactcctggaggtggcatgaccacaactcactactgcccatctgtgacagttgaaattcaagggttgatttttccagccaacctcattcttctcgaatccaaggacctagatgtcatacttggaatggattggttggcaaggcacagaggagtgattgattgcgccagccgcaccatcaagttgaccaatgcaaaaggagaggtggtaatcttccagtctccagtgccgcagaagccagggattagtttaaaccaggctgctggtgaagaacaagaggtagcagtggagaaaaccactaagaagctggaggatattcccatagtcagagagtatccagaggtttttccggatgatctgacaacaatgccaccaaaaagggatatcgagttccggattgacttggtacctggaactgcaccgatccacaagaggccttacagaatgggagccaacgagttggcggaagtcaagaagcaagttgatgaacagttacagaagggatacatccgcccgagcacgtcgccttggggtgctccggttatctttgtggagaagaaagacaaaaccaagaggatgtgcgttgactaccgcgcactcaatgaggtcaccatcaagaacaagtatcctttgccaaggattgatgacctgtttgatcagttgaaaggagctactgtgttctctaagatagacctgcgatcaggctatcaccagttgaggatccgcgaagaggatattccaaagacagcattcatcactcggtacgggttgttcgaatgcacagttatgtctttcggactcactaacgcacctgccttcttcatgaatttgatgaacaaggtgtttatggaatttctagacaagtttgtcgtggttttcatcgatgacatacttatctactccaagtccgaggaagaacatgagcagcatcttcggctggtacttgaaaagttaaaagagcaccagctatatgccaagttcagcaagtgcgacttctggcttaaggaagttcagtttctcggtcacatcgtgaatgctcaaggagtagctgtggatccagcaaatgtggagtcagttaccaaatggaccccaccaaggacagtcactcaggttcggagtttcttaggacttgcgggttattaccgccggttcattgagaacttctctaaaattgctaagccaatgacacagctattgaagaaggaagaaaagtttatctggtctgctgaatgcaataggagttttgaagaactcaaacgacggttggtgtctgcaccagtcttaatcctgcctgatcagacgaaagatttccaggtctattgtgatgcatctcgccaggggctaggatgtgtgttgatgcaggatggcaaagtggtttcttatgcttcacggcagttgcgtcctcatgaaggcaactacccgacgcatgatctggaattagccgcagttgttcatgctttaaagatttggcggcactatctcatcggtaaccgttgtgaggtatatacagatcacaaaagtctaaagtacatcttcacccaacctgatctgaatctccgacaacgaagatggttggagctaatcaaagattatgatatgggaatacactatcatcccggcaaggccaatgtggtagcagatgccttgagcaggaagagttactgcaacgtcgcatgggtagaggaactatgctgtgaggttcaacatgatttggaacatttgaaccttggtatagttgagcacggattcgtggctgccctagaggcacagcccacactggtggagcaggttcgcatagctcaagcaagtgatcctgaaatagcagagctcaaaaagaacatgagggtcggaaaagcccgaggttttgttgaggatgaacaaggaacaatctggatgggagaaagattgtgtgtacccgaaaacaaggaattaaaagacctgatactaaccgaggctcatcaaactcaatattccattcatcccggtagtactaagatgtaccaagacctcaaagagaagttttggtgggtcagcatgagaagggaaatagctgaattcgtagcactctgtgacgtctgtcaacgagtaaaggcagaacaccaaaggccagcaggtttgctacagccacttcagattccagaatggaagtgggaagaaatcggaatggatttcatcaccggtttgcccaggacgtcatcggggcatgattctatttgggtagtcattgaccgactcaccaaagtggcccacttcattccggtgcacactacctactcagggaagaaattagcagaactctatctggcaagaattatgtgtttacatggtgtacctaagaagatcgtgtctgatcgaggaagccaattcacttcaaagttctggcagaaattacaagaagaattgggaacccggttgaatttcagcaccgcttaccatccacaaacagatggccagaccgagcgagtcaatcaaatactagaggatatgttgagagcctgtgcgcttgattttggtggggcatgggacaaaagcttgccgtatgctgagttctcgtacaacaacagttaccaagctagtctgcagatggcaccatttgaagcactgtatggacggaggtgtcgtactccgctcttctggtatcagacaggggaacgccagttgtttggtacagaagttttaaatgaggcagaagagaaagtcagagctgttagggaaagattgagaatcgcgcagtctcggcagaaaagctatgcagacaaccgccgaagggagctcgctttcgaaacaggggattatgtgtatctccgtgtcactccgctcaggggagtacatcgcttccaaaccaaaggaaagttggcaccacgctttgtgggaccatatcgggttttggaacgtagaggtgaagttgcttaccagctcgagcttccctccaacatgcttggcatccataatgtgttccacgtctcccagttgaagaaatgtttgagagttcctgaggaacaggcaagtccggatcaaatcgaaatccaggaagacttgacgtatgtggagaagccaactcgtatcctcgaaaccagcgagagaaagaccagaaacaaagtaataagattctgcaaggttcagtggagccaccactcagaggaagaggccacttgggaaagagaagatgagttgaaggccacccacccgcacctcttcgccagctcttccgaatctcggggtcgagattccgtttaa

SEQ ID NO: 14676 - DNA, 4689 bp, Oryza sativa
  Clone ID: TFbOSC900288j.C1.o23.fg
atggcagttaaggaccggttcacgggaaaccctgggagacttaccgtgctttccacaagcgggagtgggtttgatgcttgtgggctagtcggcggtcgatatcatgtgtcagtgatggagacaaggaatggttcacgcgactcgaacaacgccagtggcagcgaaaagccgatcaatggagcacgtgccaacagtgcatctgacaacagtccgtccccaccgcccgagaacccaacaattgctcaggtgttggacaatcagactcagatgatgacaatgatgatgcaacagatgcagcaacagtaccatcaggtgttgcaacaggtgcagcagcaagcacagctgcagcagcagaacctgcagtttggttctccacctcctcagtccaaactgctagaatttcttcgtgtcaagccgcccaccttctcaagcaccaccaacccaatcgaggcccacgactggcttcatgccattgagaagaagctgaatcttttgcaatgcaacgagcaagagaaggttgcttttgctacacaccagctgcaaggtcccgcttctatttggtgggacaactacatggtgacccgtccagctggggcagaggttacttggacagagtttcgtcatagtttcaataaagcacaggttcccgagggaattgtggcacaaaagaagagagagttccgttccctgcaacaaggaaccagaacagttatagagtatttgcatgagttcaacctcctcgcgcgctacgcccctgaggacgtgcgtaccgatgccgagaggcaggagaagtttttgtctggtcttgatgatgaattgactaaccagttgatctctagagattatgaggactttgagaagctggtggataaggctatccgtcaggaggagcactgtaacaaaataaaccgtaagaggaaggcagctcagttcaggactccccaggggaagagtcagaagcctcgtttcacgatgggacgtcacggtggaccttccaccatgattatccgacagcaccgtccctaccacccgggtagcttcaacaagaaccaccataatggcagtcacaacaacagtgagcagcacagtctcaaccctactccgagttcactaaagattccagctcaatcagttcagccagctctgccagaacagcccaagaggttgggagaaaaacccgaactctgcttcaattgtaacaaacccggacacacggttggaaagtgcccgaagccaagacgtgctggacccaagttcgttcaggcccgtgttaatcatgcatctgcagaggaggcgcagtcagcaccagaggttatattgggcacattccccgtcaactcgacaccggcagtaatattgtttgattctggtgcaacccattccttcatttccaagcgttttgctggtgcacatgggttatccttagtgaagcttaagataccaatgcgagtgcatactcctggaggtggcatgaccacaactcactactgcccatctgtgacagttgaaattcaagggttgatttttccagccaacctcattcttctcgaatccaaggacctagatgtcatacttggaatggattggttaacaaggcacagaggagtgattgattgcgccagccgcaccatcaagttaaccaatgcaaaaggagaggtggtaaccttccagtctctagtgccgcggaagccagggatcagtttaaaccaggctgctggtgaagaacaagaggtagcagtggagaaaaccactaagaagctggaggatattcccatagtcagagagtatccagaggtttttccggacgatctgacaacaatgccaccaaaaagggatatcgagttccggattgacttggtacctggaactgcaccgatccacaagaggccttacagaatgggagccagcgagttggcggaagtcaagaagcaagtcgatgagcagttacagaagggatacatccgcccgagcacgtcgccttggggtgctccggttatctttgtggagaagaaagacaaaaccaagaggatgtgcgttgactaccgcgcactcaatgaggtcaccatcaagaacaagtatcctttgccaaggattgatgacctgtttgatcagttgaaaggagttactgtgttctctaagatagacctgcgatcaggctatcaccagttgaggatccgcgaagaggatattccaaagacagcattcatcactcggtacgggttgttcgaatgcacagttatgtctttcggactcactaatgcacctgccttcttcatgaatttgatgaacaaggtgtttatggaatttctagacaagtttgtcgtggttttcatcgatgacatacttatctactccaagtccgaggaagaacatgagcagcatcttcggctggtacttgaaaagttaaaagagcaccagctatatgccaagttcagcaagtgcgacttctggcttaaggaagttcagtttctcggtcacatcgtgaatgctcaaggagtagctgtggatccagcaaatgtggagtcagttaccaaatggaccccaccaaggacagtcactcaggttcggagtttcttaggacttgcgggctattaccgccggttcattgagaacttctctaaaattgctaagccaatgacacagctattgaagaaggaagaaaagtttatctggtctgctgaatgcaataggagttttgaagaactcaaacgacggttggtgtctgcaccagtcttaatcctgcctgatcagacgaaagatttccaggtctattgtgatgcatctcgccaggggctaggatgtgtgttgatgcaggatggcaaagtggtttcttatgcttcacggcagttgcgtcctcatgaaggcaactacccgacgcatgatctggaattagccgcagttgttcatgctttaaagatttggcggcactatctcatcggtaaccgttgtgaggtatatacagatcacaaaagtctaaagtacatcttcacccaacctgatctgaatctccgacagcgaagatggttggagctaattaaagattatgatatgggaatacattatcatcccggcaaggctaatgtggttgcggatgccttgagcaggaagagctactgcaatgttgcatgggtagagcaactatgtggtgaggttcaacgcgatttggaacatctgaaccttggtatagttgagcacggattcgtggctgccctagaggcacagcccacgctggtggagcaggttcgcatagctcaggcaagtgatcctgaaatagcagagctcaaaaagaacatgagggttggaaaagcccgaggttttgttgaggatgaacaaggaacaatctggatgggagaaagattgtgtgtacccgaaaacaaggaattaaaagacctgatactaaccgaggctcatcaaactcaatattccattcatcccggtagtactaagatgtaccaagacctcaaagaaaagttctggtgggtcagcatgagaagggaaatagctgagttcgtagcactctgtgacgtctgtcaacgagtaaaggcagaacaccaaaggccagcaggtttgctacagccacttcagattccagaatggaagtgggaagaaatcggaatggatttcatcaccggtttgcccaggacgtcatcggggcatgattctatttgggtagtcgttgaccgactcaccaaagtggctcacttcattccggtgcacactacctactcagggaagaaattagcagaactctatctatcaagaatcatgtgtttacatggtgtacctaagaagatcgtgtctgatcgaggaagccaattcacttcaaagttctggcagaaattacaagaagaattgggaacccggttgaatttcagcaccgcttaccatccacaaacagatggccagaccgagcgagtcaatcaaatactagaggatatgttgagagcctgtgcgcttgactttggtggggcatgggacaaaagcttgccgtatgctgagttctcgtacaacaacagttaccaagctagtctgcagatggcaccatttgaagcactgtatggacggaggtgtcgtactccgctcttctgggatcagacaggggaacgccagttgtttggtacagaagttttaaatgaggcagaagagaaagtcagagctgttagggaaagattgagaatcgcgcaatctcggcagaaaagctatgcagacaaccgccgaagggagctcgttttccaagtaggggattatgtgtatctccgtgtcactccgctcaggggagtacaccgcttccaaaccaaaggaaagttggcaccacgctttgtgggaccatatcggattttggaacgcaggggtgaagttgcttaccagcttgagcttccctccaacatgcttggcatccataatgtgttccacgtctctcagttgaagaaatgtttgagagttcctgaggaacaggcaagtccggatcaaatcgaaatccaggaagacttgacgtatgtggagaagccaactcgtatcctcgaaaccagcgagagaaagaccagaaacaaagtaataagattctgcaaggttcagtggagccaccactcagaggaagaggccacttgggaaagagaagatgagttgaaggccacccacccgcacctcttcgccagctcttccgaatctcggggtcgagattccgtttaa

SEQ ID NO: 14677 - DNA, 4377 bp, Oryza sativa
  Clone ID: TFbOSC900332j.C1.o23.fg
atggtgaagacaaggaatggttcctgtgactccaacaacgccagtggcagcaaagagcagatcagtggagcatgtgccagcgatgcacctaacagcagttcatccccactgcccgagaacctaacgattgctcaggtgttggacaatcaaactcagatgatgacgatgatgatgcaacagatgcaacaacagtaccatcaggtgttgcagcaggtgcagcagcaagcacagcagcagcagcagaacttgcagtttggtcttcaaccaccccagtccaaactgttagaatttctccgtatcaagccacccactttctcaagcaccaccaacccaatcgaggccaacgactggctttatgccattgagaagaagctaaaccttttgcaatgcaacgaacaagagaaggttgcttttgctacacaccagctgcaaggtcccgcttctgtttggtgggacaactacatggtgacccgtccagctgggacagaagtcacttgggaatcatggcacagaagaagagagttccgttctctgcaacaaggaaccagaacagttatagagtatttgcatgagttcaaccgcctcgcgcgctacgcccctgaggacgtgcgtaccgatgacgagaggcaggagaagtttctgtctggtcttgatgatgaattgactaatcagttaatctctagagattatgaggactttgagaagctggtggataaggctatccgtcaggaggagcactgtaacaaaataaaccgtaagaggaaggcagctcagttcaggactccccaggggaagagtcagaagcctcgtttcacgatgggacgtcagggtggaccttccaccatgattatccggcagcaccgtccctaccacccgggtagcttcaacaagaaccaccatagtggcagtcacaacaacagtgagcagcacagcctcaaccctagtccgagttcactaaagattccggctcaatcagttcagccagctctgccaaaacagcccaagaggttgggagaaaaacccgaactctgcttcaattgtaacaaacccggacacacggttggaaagtgcccgaagccaagacgtgctggacccaagtttgttcaggcccgtgtcaatcatgcgtctgcagaggaggcgcagtcagcaccagagcgttttgctggtgcacatgggttatctttagtgaagcttaagatacctatgcgagttcatactcctggaggtggcatgaccacaactcactattgcccatcagtaatagttgaaattcaagggttgatttttccagccaacctcattcttctcgaatccaaggatctagatgttattctgggaatggattggctgacaaggcacagaggagtgatcgattgcgctagccgcaccatcaagttgaccaatgcgaagggagaagtggttaccttccagtctccagtgccacagaagccagggatcagtctgaaccaggctgctggtgaagaacaagaggtagcagtggaggaaaccactaagaagttggaagatattcccatagtcagagagtatccagagctttttccgaacgatctgacaacaatgccaccaaaaagggatatcgagttccggattgacttggtacctggaactgcaccgatccacaagaggccttacagaatgggagccaacgagttggcggaagtcaagaagcaagttgatgaacagttacagaagggatacattcgcccgagcacgtcgccttggggtgctccagttatctttgtggaaaagaaagataaaaccaaaaggatgtgcgtcgactaccgtgcactcaatgaggtcactattaagaacaagtatccgttgccaagaattgatgatctgtttgatcagttgaaaggagctactgtgttctctaagatagacctacgatcaggctatcaccagttgaggatccgcgaagaggatattccaaagacagcattcatcactcggtacgggttgttcgaatgcacagttatgtcttttggactcactaatgcacctgctttcttcatgaatttgatgaacaaggtgtttatggaatttctagacaagtttgccgtggttttcatcgatgacatacttatctactccaagtccgaggaagaacatgagcagcatctccagctagtacttgaaaagttaaaagagcaccagctatatgccaagttcagcaagtgtgacttctggcttaaggaagttcagtttctcggtcacatcgtgaatgctcaaggagtagctgtggatccagcaaatatggagtcagttaccaaatggaccccaccaaggacagtcactcaggttcagagtttcttaggacttgcgggctattaccgctggttcattgagaacttctctaaaattgctaagccaatgacacagctattgaagaaggaagaaaagtttatctggtctgctgaatgtaataggagttttgaagaactcaaacgacggttggtgtctgcaccagtcttaatcctgcctgatcagacgaaaaatttccaggtctattatgatgcatctcgccaggggctaggatgtgtgttgatgcaggatggcaaagtggtttcttatgcttcacggcagttgcgtcctcatgaaggcaactacccgacgcatgatctggaattggccgcagttgttcatgctttaaagatttggcggcactatctcatcggtaaccgttgtgaggtatatacagatcacaaaagtctaaagtacatcttcactcaacctgatttgaatctcagacagcgaagatggttagagctgatcaaggattatgatatgggaatacattatcatcccagcaaggctaatgtggttgcagatgccttgagcaggaagagctactgcaatgttgcatgggcacagcccacactggtggagcaggttcgcatagctcaagcaagtgatcctgaaatagcagagctcaaaaagaacatgagagttggaaaagcccgaggttttgttgaggatgaacaaggaacaatctggatgggagaaagattgtgtgtacccaaaaacaaggaattaaaagacttgatactgatagaagctcatcaaactcagtattctattcatcctggcagtaccaagatgtaccaagacctcaaagaaaaattctggtgggtcagcatgagaagggaaatagctgaattcgtcgcactctgtgacgtttgccagcgagtaaaggcagaacaccaaaggccagcaggtttgctacagccacttcagattccagaatggaagtgggaagaaatcggaatggatttcattacgggtttgcccaggacgtcatcggggcatgattctatttgggtagtcgttgatcgactcactaaagtggctcacttcattccggtgcatactacctactcagggaagaagttagcagagctttatttggcaagaatcatgtgtctacatggtgtacctaagaagatcgtgtctgatcgaagaagccaattcacctcaaagttctggcagaaattgcaagaagaattgggaacccgtctgaacttcagcacagcctaccatccacaaactgatggccaaactgagcgggtcaatcaaatactagaggatatgttaagagcttgtgcgcttgactttggtggagcatgggacaaaagcttgccgtatgctgagttctcctacaacaacagttaccaggctagtctgcagatggcaccatttgaagcactgtatggacggaagtgtcgtactccgctcttttgggatcagacaggggaacgccagttgtttggtacagaagttttaaatgaggcagaagagaaagtcagagctgtcagggaaagattgagaatcgcgcaatctcgacagaaaagctatgcagacaaccgccgaagggagctcgttttccaagcaggggattatgtgtatctctgtgtcactccgctcaggggagtacaccgcttccaaaccaaaggaaagttggcaccacgctttgtgggaccatatcggattttggaacgcaggggtgaagttgcttaccagcttgagcttccctccaacatgcttggcatccataatgtgttccacgtctcccagttgaagaaatgtttgagagttcctgaggaacaggcaagtccggatcaaatcgaaatccaagaagacttgacgtatgtggagaagccgactcgtatcctcgaaaccagcgagagaaggaccagaaacaaagtaatcagattctgcaaggttcagtggagccaccactcagaggaagaggccacttgggaaagagaagatgagttgaaggccacccatccgcacctcttcgccagctctttcgaatctcgaggtcgagattccgtttgtcacaccctgaagtag

SEQ ID NO: 14678 - DNA, 4803 bp, Oryza sativa
  Clone ID: TFbOSC900357j.C1.o5.fg
atggcagttaaggaccggttcacgggaaaccctgggagacttaccgtgcttaccacaagcgggagtggttgttttactgctttcaactactgctttgaaatgcctgctttatgcaaaagaacccctagcttcctttggttatatcctgcatcatacctcctcttccgagctgaagatcttcctagttggagctgttttatcgaagttggtttcgtcgctgccgtcaagatggagataaggaatggttcacgcgactccaacaacgccagtggcagcgaagagccgatcaatggagcacgtgccaacggtgcatctgacaacagtccgtccccaccgcccgagaacccaacaattgctcaggtgttgaacaatcagactcagatgatgacaatgatgatgcaacagatgcagcaacagtaccatcaggtgttgcagcaggtgcagcagcaagcacagccgcagcagcagaacctgcaatttggtcctccgcctcctcagtccaaattgttagaatttcttcgtgtcaagccgcccaccttctcaagcaccaccaacccaatcgaggcccacgactggcttcatgccattgagaagaagctgaatcttttgcaatgcaacgagcaagagaaggttgcttttgctacacaccagctgcaaggtcccgcttctgtttggtgggacaactacatggtgacccgtccaactggggcagaggttacttggacagagtttcgtcatagtttcaataaagcacaggttcccgagggaattgtggcacaaaagaagagagagttccgttccctgcaacaaggaaccagaacagttatagagtatttgcatgagttcaaccgcctcgcgcgctacgcccctgaggacgtgcgtaccgatgccgagaggcaggagaagtttttgtctggtcttgatgatgaattgactaaccagttgatctctagagattatgaggactttgagaagctggtggataaggctatccgtcaggaggagcactgtaacaaaataaaccgtaagaggaaggcagctcagttcaggactccccaggggaagagtcagaagcctcgtttcacgatgggacatcacggtggaccttccaccatgattatccggcagcaccgtccctaccacccgggtaacttcaacaagaaccaccatagtgacagtcacaacaatagtgagcagcacagcctcaaccctactccgagttcactaaagattccagcccaatcagttcagccagctctgccagaacagcccaagaggttgggagaaaaacccgaactctgcttcaattgtaacaaacccggacacacggttggaaagtgcccgaagccaagacgtgccggacccaagttcgttcaggcccgtgttaatcatgcatctgcagaggaggcgcagtcagcaccagaggttatattgggcacattccccgtcaactcgacaccggcagtaatattgtttgattctggtgcaacccattccttcatttccaagcgttttgctggtgcacatgggttatctttagtgaagcttaagataccaatgcgggttcatactcctggaggtggcatgaccacaactcactactgcccatctgtgacagttgaaattcaagggttgatttttccagccaacctcattcttctcgaatccaaggacctagatgtcatacttggaatggattggttggcaaggcacagaggagtgattgattgcgccagccgcaccatcaagttgaccaatgcaaaaggagaggtggtaatcttccagtctccagtgccgcagaagccagggattagtttgaaccaggctgctggtgaagaacaagaggtagcagtggagaaaaccactaagaagctggaggatattcccatagtcagagagtatccagaggtttttccggatgatctgacaacaatgccaccaaaaagggatatcgagttccggattgacttggtacctggaactgcaccaatccacaagaggccttacagaatgggagccaacgagttggcggaagtcaagaagcaagttgatgaacagttacagaagggatacatccgcccgagcacgtcgccttggggtgctccggttatctttgtggagaagaaagacaaaaccaagaggatgtgcgttgactaccgcgcactcaatgaggtcaccatcaagaacaagtatcctttgccaaggattgatgatctgtttgatcagttgaaaggagctacggtgttctctaagatagacctgcgatcaggttatcaccagttgaggatccgcgaagaggatattccaaagacagcattcatcactcggtacgggttgttcgaatgcacagttatgtctttcggactcactaatgcacctgccttcttcatgaatttgatgaacaaggtgtttatggaatttctagacaagtttgtcgtggttttcatcgatgacatactaatctactccaagtccgaggaagaacatgagcagcatcttcggctggtacttgaaaagttaaaagagcaccagctatatgccaagatcagcaagtgcgacttctggcttaaggaagttcagtttctcggtcacatcgtgaatgctcaaggagtagctgtggatccagcaaatgtggagtcagttaccaaatggaccccaccaaggacagtcactcaggttcggagtttcttaggacttgcgggttattaccgccggttcattgagaacttctctaaaattgctaagccaatgacacagctattgaagaaggaagaaaagtttatctggtctgctgaatgcaataggagttttgaagaactcaaacgacggttggtgtctgcaccggtcttaatcctgcctgatcagacgaaagatttccaggtctattgtgatgcatctcgccaggggctaggatgtgtgttgatgcaggatggcaaagtggtttcttatgcttcacggcagttgcgtcctcatgaaggcaactacccgacgcatgatctggaattggccgcagttgttcatgctttaaagatttggcggcactatctcatcggtaaccgttgtgaggtatatacagatcacaaaagtctaaagtacatctttacccaacctgatctgaatctccgacagcgaagatggttggagctaattaaagattatgatatgggaatacactatcatcccggcaaggctaatgtggtagcagatgccttgagcaggaagagttactgcaacgtcgcatgggtagaggaactatgcggtgaggttcaacgtgatttggaacatttgaaccttggtatagttgagcacggattcgtggctgccctagaggcacagcccacactggtggagcaggttcgcatagctcaagcaagtgatcctgaaatagcagagctcaaaaagaacatgagggttggaaaagcccgaggttttgttgaggacgaacaaggaacaatctggatgggagaaagattgtgtgtacccgaaaacaaggaattaaaagacctgatactaaccgaggctcatcaaactcagtattccattcatcccggtagtactaagatgtaccaagacctcaaagagaagttttggtgggtcagcatgagaagggaaatagctgaattcgtagcactctgtgacgtctgtcaacgagtaaaggcagaacaccaaaggccagcaggtttgctacagccacttcagattccagaatggaagtgggaagaaatcggaatggatttcgtcaccggtttgcccaggacgtcatcggggcatgattctatttgggtagtcgttgaccgactcaccaaagtggctcacttcattccggtgcacactacctactcaggaaagaaattagcagaactctatctagcaagaatcatgtgtttacatggtgtacctaagaagatcgtgtctgatcgaggaagccaattcacttcaaagttctggcagaaattacaagaagaattgggaacccggttgaatttcagcactgcttaccatccacaaacagacggccagaccgagcgggtcaaccaaatactagaggatatgttgagagcctgtgcgcttgactttggtggagcatgggacaaaagcttgccgtatgctgagttctcgtacaacaacagttaccaagctagtctgcagatggcaccattcgaagcactgtatggacggaggtgtcgtactccgctcttctgggatcagacaggggaacgccagttgtttggtacagaagttttaaatgaggcagaagagaaagtcagagctgttagggaaagattgagaatcgcgcagtctcggcagaaaagctatgcagacaaccgccgaagggagctcgctttcgaaacaggggattatgtgtatctccgtgtcactccgctcaggggagtacatcgcttccaaaccaaaggaaagttggcaccacgctttgtgggaccatatcgggttttggaacgtagaggtgaagttgcttaccagctcgagcttccctccaacatgcttggcatccataatgtgttccacgtctctcagttgaagaaatgtttgagagttcctgaggaacaggcaagtccggatcacatcgaaattcaggaagatctgacgtatgtggagaagccgactcgtatcctcgaaaccagcgagagaaggaccagaaacaaagtaataagattctgcaaggttcagtggagccaccactcagaggaagaggccacttgggaaagagaagatgagttgaaggccacccacccgcacctcttcgccagctcttccgaatctcggggtcgagattccgtttaa

SEQ ID NO: 14679 - DNA, 2679 bp, Oryza sativa
  Clone ID: TFbOSC14567j.C1.o1.fg
atggcttcagggaacgacatgtgggatgcacttgaggccaagttcggagtttctgacgccagcagcgagctatatgtcatggagaagttctatgactacaagatggtcgatgaccgttctgtagtggaacaagctcatgagattcagatgctggctaaggagcttgagaacaacaattgtgagttgccggacaagtttgtggcgggtggcattattgccaaattgccacctttttggtcggactttgtcacttctctaaagcacaagagacaagagttcagtgtttctgatcttattggctctttgggtgttgaggagaatgcgagggcaaaggacaacttgggcaaaaaggtcgagagaggttctagtgccaatatggtacaaaagaagaaccctcaagcatcccacaacaacaagaaagttaagcctgatgtcaaacccaaggctacaaccaattttaagaagaaaggcaagggaaaggcaaagggagactgctttgtgtctcgcaagtctgggcattgggccaaggactgtcctgaacgcaaagacaggaagtctgctaacatggtcattagcaagggcggaggaacatcggggtacggtaaaattttacctacagttctctctttttttcattcacctaattggtgggttgatattggtgctaatattcatgtcgggagaggtttctccttgttgatgagaaaagggtcacttgcggctgttcatggtgttggttccaagtgccatacttgtgttcaatcgaaacaacctcgcaagcctcacaaggcatctgaggcgagggatttggcacctctagaacttgttcattccgatctgcgtgaaatgaacggcgtgttgactaaagggggaaagaaatattttatgacactgatagatgattgcactagattttgttatgtgtatctattgaaaacaaaggatgaagcattgcattactttaagacctataaagctgaggtagaaacccaagttgaaaggaaaatcaaacggttgagttctgataggagtggcgagtatttttccaatgagtttacatccttttgtgaagagtttggaattattcatgagaggacgcctccctattcaccccaatcaaatggggtagctgaaagaaagaatcatactctaactaagctgcataaggaagtaacaccattcgaggaatgggaaatgaagaaattaaatctctcatacctacgaacctgggactgtttggccaagtccagagatgccacattctttgagaatgaatttcccatgaaaaatacgcctagcacttctagtcaagaaattgtcataccccatcagcactttgcaccgataaaacacaatgatcaaacgcctgagggaaatcctgaggaggataagattgtagatactcgtaagagatgcaaatgggtttttaagaaaaagcttaggcctgatggtacaattgaaaagtacaaggcaaggcttgtggccaagggttatacccaaaaagaaggcgaggaattttttgacacctactcaccagttgcccgtttgaccacgattcgagtactacttgcattggcagcctctcatggtcttctcgtccatcagatggacgttaagacagctttcctaaacagagagctggaggaggagatctatatggatcaactagacgaatatgtactagaaggtcaggagggaatagtgtgtaaactgttgaaatccttgtgtggccttaagcaagcatctaagcaatggcatgagaagtttgacaccacacttatatctgctggttttgtcgtgaatgaagctgacaaatgtgtgtactatcgctatggtgggggagaagaagtgatcttgtgtttatatgtcgatgacatattgatctttgggaccagcctcaatgtgattgaggaggtcaaggactttttatccaagagctttgaaatgaaggatttgggagaggctgatgttattcttaacattaagctactaagaggagatgagggtatgattacacttgtgaaatcctactatatggacaagattttaagtcgctttggctacagtgactgcaagccagctgctactccttatgatcctagcgctctggaaagagtaatgcgctatctaaatgacactataagctatggaattcacactaccgggtacccaaaagtactggaagggtatagtgactcaaactggatatatgatgctgatgagataaaggccacaagtggatatgtgttcacacttggaggtggtgctgtttcttggaagtcttgcaagcagatcatcttaacgaggtcaacaatggaagcagaacttacagcactagatactgcgacagttgaggccgagtggcttcgtgaactcctgatggatttgccggtggttgaaaaaccagtgccagctatcctaatgaactgtgataatcaaacagtgattattaaagtgatcagttcaaaggacaacatgaagtcatctaggcatatcaaaagaagactgaaatatgtcagaaagcagaaaaactccggagtgatagcattggactatgtccagacggctaaaaatctggatggcttatgccttaatgtggttcaagtggcttttctaagcagagatattgacctgcaaaacatctcagaaggaacacacctatatgagttcgactgctag

SEQ ID NO: 14680 - DNA, 699 bp, Oryza sativa
  Clone ID: TFbOSC17650j.C1.o1.fg
atgtcagttacagagtacctgcacgagttcaaccgccttgcgcgctacgctcctgacgacgtgcgcaccgatgctgagaagcaggagaagtttttgtttgggctcgacgatgaattgaccaaccagctaatctccggagtctatgaggactttgagaagcttgtggacaaggctatccgccaggaagagcaacgcaacaaaatagaccgaaaaagaaagacagctcagatcagctttcctcaggggaacaatcagaagcctcgtttcatgacgggacagctaggtgggccttccaccctgatcgtctgtcagcaccatccctatcacccgagtaacttcgacaacgactacaacggtggcagtcacaacaacagtaagcagcacaaccacaactcgactccacccccactaatggcaccagctcagtcagatccgccagctgtgtcagctcagtcagaacaacccaagaagggggctgtaggaaagccaggacactgcttcaactgtggcaagcacggccactttgctggcaagtgtccgaagctgaatcgcactggacccaggctcatccaggcccgcgccaatcatgtgtctgcagaggaagcacaggcagcaccagaggtcgtgttgggcacgtttccagtgaactcatatccagcaacagttctctttgattcaggttcatacccctggaaatga

SEQ ID NO: 14681 - DNA, 625 bp, Oryza sativa
  Clone ID: TFbOSC400321j.C1.o36.np
atgtctcctctcgcccttcggcatttccttgtgaaatggtttttaaaattctcctccctgtccctctaattcttttagctgtcaaacctgaaggacaagccatcagctttgtgcatgtttggaagtcaagtcaagctaagcctcaagcttcgtgcaaagagcgagacagatggtcagcatgagggacaatttcatcgaatcaggaccctgtcagtttcatggggcaactcagtgcaattctaatagtattccacatcagcctcttgaagatcagcctcaaccccaagtcatggctaatcaaactcaaacagtggaagagttgttacaacagatgcgacgtcggtaccaaatataccagatgcaacggcaatgtcaggagtcgcgtcaatgtcaccaaccgcaggtgcaagtccagatgccagcccagaacccgaatcagagtcagagtcaggagttcccaatattggcaccgaagacccctgtcaaaatgctgtccagatccccgaagataacgacagccaagtcatcgtcagaccaaaggaaagtaagtgctacctgttatgactgtggtgagcaaggtcattatgtaaggaactgtccatggaaggtgttcgccaggtcgcct

SEQ ID NO: 14682 - DNA, 3912 bp, Oryza sativa
  Clone ID: TFbOSC401128j.C1.o12.fg
atggcgcagtctatggttcctgtatttgcaggagaaaattatgatatatggagcatcaagatgcggacgctgctgctatctcaaggattgtgggatattgttgagaatggctatcaagagtattccgctggagaaactcttacggcggaacagaaaaagtctttggcagaggatcggatgtcggacgccaaggccttgttcttgatccaacaaggagttgcggaaagtctatttccgcgtattattggcgccaagaaatccaaggaagcatgggacaagttgaaggaggagtttcaaggatctcagaaggtacttgcggtgaagcttcaaaccttgagaagacaatttcagaatttgctaatgaaggagtcagagaaggtaaaagactatttctcaagagttattgagatcgttaatcagatgcgcctctatggtgaagatataaacgaccagaaggttgtggagaaaattttaatcagtctgcctgaaaaatacgagtacattgttgctgctattgaggagtcgaaagacttgtcgactctcacaattcagcaactaatgagctcgttggaatctcacgaagaaagaaagcttcagcgcgaagggagctctattgaaaatgcatttcagtcaaagttgagcttcaggcctcaaaactcaaggtttcgcggaaattttcaaaaaaatggatttccaatgcgagaccgtggttattttcagaaaaatggcttttccaggcagaaggaagatggtcaagagagaagagaaaaaggtacgtccagttcaaatttgtggtgtgacatttgccaaaaatctagtcatactacagatatgtgttggaagaaaatgacctgcaacaagtgcaaaagaaagggccatattgcaaaatattgcagaactcgagaaattaatcgggctaatttttcacaagaaaaggaaaaatctgaagaaatggttttctcttgccatactgctcaagaagaaaaagatgatgtttgggttattgacagtggttgtacaaaccatatggccgctgatccaaatttatttcgagaaatggattcatcgtatcatgcaaagatccacatgggaaatggctctatagcccaaagtgaaggcaaaggtacggttgctgttcaaacagcagacggtccaaaatttataaaagatgttttgttggtacccgatttaaagcaaaatttgctaagtattgggcagcttctagaacacgggtacgcggtttattttgaagatttttcttgcaaaatattggaccgtaaaaataatcgtctggtcgctaaaataaatatggagaagaatagaaattttctattaaggatgaatcatacaactcaaatggctctcagaagtgaagttgatatttccgatttatggcacaaaagaatgggtcatcttaattacagagcattgaagctactcaggacaaaaggtatggttcaaggccttccatttattactctcaagtctgacccatgtgaaggttgtgtatttggaaaacaaatccgggcttctttcccacacagtggagcttggagagcaagtgcaccattcgaactagtgcacactgatatagttggtaaagtgccaacaatgtcagaaggaggaaattggtactttatcacatttattgatgattatacaagaatgatctgggtatattttctaaaagaaaaatctgcagccctggagacattcaaaaaattcaaggtcatggtggaaaatcagagtaatcgaaaaattaaagtattgcgcagtgatcaaggaggagaatatatctcaaaagaatttgagaaatattgtgaaaatgctggcatccgaagacagctgacgacaggctatagtgcgcaacaaaatggagttgcagaacggaaaaatcggacgatcaatgatatggccaattctatgctccaagacaaaggtatgcctaaatctttctgggctgaagcagttaatactgcagtttatattttaaatagaagtcctaccaaggcagtaccaaaccgtacaccttttgaagcttggtatggtaaaaagcctgtcattggtcatatgagagtatttggttgcatttgctatgctcaagtgccagcacaaaagagagtaaaatttgataataaaagtgatcggtgcatatttgttggctatgctgatggtatcaaaggctatagactttataatttggagaaaaagaaaattatcattagcagagatgtgatttttgatgagagtgctacatggaactggaagtctccagaagcctctagtactccattattgccaaccactaccatcacactaggccaaccacatatgcatggcactcatgaagtggaagatcatactccaagtccacagccatcaagtccaatgtcaagctcaagtgctagttcagattcaagcccgagcagtgaagagcaaatttctacaccggaatcagctccaagacgggtaagaagtatggttgaattattagaatctacttctcaacaaagagggtcagaacaacatgaattttgcaattattcagttgttgagccacaaagtttccaagaagcagaaaaacatgataattggataaaggccatggaagatgagattcatatgattgagaaaaataatacatgggagttggttgatcgtcctagggacagagaagttattggagttaagtgggtttataagacaaaattaaatccagatggctcagttcagaaatacaaggcaagacttgtggcaaaaggctttaagcaaaagcctgggattgattattatgagacatatgctcctgttgccaggctagagacaattcgtaccataattgctctagcagctcaaaagaggtggaagatatatcaacttgatgttaaatcggctttcttaaatggttatcttgatgaagaaatctatgttgaacaacctgaagggttttcagtccaagggggagaaaataaggtattcagactcaagaaggctttatatggattaaagcaagcgcctagagcgtggtatagtcaaattgacaagtactttattcagaaaggatttgccaagagcataagtgagcctactctatatgtcaacaaaacaggtacggatatcctaatcgtctcactctatgttgacgatttgatatatactggcaatagtgagaagatgatgcaagactttaaaaaagatatgatgcatacatatgaaatgagtgatctgggcttgctccactattttctcggtatggaagtgcatcaaagtgatgaaggaatatttatatcacaaaggaaatatgctgaaaatattctgaagaaatttaagatggataactgcaagtcagttacaacccccttgttgtcaaatgaaaagcaaaaggctagagatggagctgataaggcagatccaacaatttacagaagcttagttggaagtttattatatttgaccgcaacacgaccggatattatgtttgcggcaagtttattatcaagatatatgtctagcccaagtcaattaaattttaccgctgcaaagagagttttgcggtatatcaaagggaccgcagattatggtatatggtataagccagttaaagaatcaaaattaattggctacacggacagtgactgggctggatgtcttgacgatatgaagagcacatcaggctacgctttctcacttggttcagccgaagcagaatatgtagcagcatcaaaagctgtttcacaagttgtttggttgaggagaattatggaagatctgggcgagaagcaatatcaacctactacaatttattgcgacagtaagtctgcaattgcgatcagcgaaaatccagtcagtcatgacaggacaaaacatattgctatcaagtatcattatatccgggaagcagttgatcgctag

SEQ ID NO: 14683 - DNA, 3168 bp, Oryza sativa
  Clone ID: TFbOSC412754j.C1.o1.fg
atggcgcagtctatggttcctgtatttgcaagagaaaattatgatatatggagcatcaagatgcggacgctgctgctatctcaaggattgtgggatattgttgagaatggctatcaagagtattccgctggagaaactcttacggcggaacagaagaagtctttggtagaggatcggatgtcggacgccaaggccttgttcttgatccaacaaggagttgcggaaagtctatttccacgtattattggcgccaagaaatccaaggaagcatgggacaagttgaaggaggagtttcaagcatctcagaaggtacttgcggtgaagcttcaaactttgagaaggcaatttcagaatttgcaaatgaaggagtcagagaaggtaaaagactatttctcaagagttattgagatcgttaatcagatgcgcctctatggtgaagatataaatgaccagaaggtcgtgaagaaaattttaatcagtctgcctgaaaaatacgagtatattgttgctgcaattgaggagtccaaggatctgtcaactctcacaattcagcaacttatgagctcgttggaatctcacgaagaaagaaagcttcaacgtgaagggagctctgttgagaatgcatttcagtcaaagttgagcttcaggcctcaaaactcaaggtttcgtgggaattttcagaaaaatggatttccaatgcgagaccgtggttttcagaaaaatggtttttccaggcagaacgaatatggtcaagagagaagagaaaaaggtacgtccagttcaaatttgtggtgtgacatttgccaaaaatctagtcatactacatatatgtgctggaagaaaatgacctgcaacaagtgcaaaagaaagggtcatattgcaaaatattgcagaactcgggaaattaaccgggctaatttttcacaagagaaggaaaaatctgaagaaatggttttctcttgccatactgctcaagaagaaaaagatgatgtttgggttattgacagtggttgtacaaaccatatggccgctgatccaaatttatttcgagaaatggattcatcgtatcatgcaaagatccacatgggaaatggctctatagcccaaagtaaaggcaaagccttggagatattcaaaaaattcaaggccatggtggaaaatcagagtaatcgaaaaattaaagtattgcgcagcgatcaaggaggagaatatatctcaaaagaatttgagaaatattgtgaaaatgctggcatccgaagacagctgacggcaggctatagtgcgcaacaaaatggagttgcagaacggaaaaatcggacgatcaatgatatggccaattctatgctccaagacaaagaagtcctaccaaggcagtaccaaaccgtacaccttttgaagcttggtatggccaaccacatatgcaaggtactcatgaagtggaatatcatcctccaagtccacagtcatcaagtccaaggtcaagctcaagtgctagttcagattcaagcccaagcagtgaagagcaaatttcttacaccggaatcagctccaagacgggtaagaagtatggttgaattattagaatctacttctcaacaaagagggtcagaacaacatgaattttgcaattattctgttgttgagccacaaagtttccaagaagcagaaaaacatgataattggataaaggccatggaagatgagattcatatgattgagaaaaataatacatgggagttggttgatcgtcctagagacagagaagttattggagttaagtgggtttataagacaaaattaaatccagatggctcagttcagaaatacaaggcaagacttgtggcaaaaggctttaagcaaaagcctgggattgattattatgagacatatgctcatgttgccaggctagagacaattcataccataattgctctagcagctcaaaagaggtggaagatatatcaacttgatgttaaatcggctttcttgaatggttatcttgatgaagaaatctatgttgaacaacctgaaaggttttcagtccaagggggagaaaataaggtattcagactcaagaaggctttatatggattaaagcaagcgcctagagcgtggtatagtcaaattgacaagtactttattcagaaaggatttgccaagagcataagtgagcctattctatatgtcaagaaaacaggtacggatatcctaatcgtctcactctatgttgatgatttgatatatactggcaatagtgagaagttgatgcaagactttaaaaaagatatgatgcatacatatgaaatgagtgatctgggcttgctccactattttctcggtatggaagtgcatcaaagtgatgaaggaatatttatatcacaaaggaaatatgctgaaaatattctgaagaaatttaagatggataactgcaagtcagttacaacccccttgttgccaaatgaaaagcaaaaggctagagatggagctgataaggcagatccaacaatttacagaagcttagttggaagtttattatatttgaccgcaacacgaccggatattatgtttgcggcaagtttattatcaagatatatgtctagcccaagtcaattaaattttaccgctgcaaagagagttttgcggtatatcaaagggaccgcatattatggtatatggtataagccagttaaagaatcaaaattaattggctacacggacagcgactgggctggatgtcttgacgatatgaagagcacatcaggctacgctttctcacttggttcaggtatgtggtcctggtctacaaagaaacaaaatattgtcgctttatcttcagccgaagcagaatatgtagcagcatcaaaagctgtttcacaagttgtttggttgaggagaattatggaagatctgggtgagaagcaatatcagcctactacaatttattgcgacagtaagtctgcaattgcgatcaacgaaaatccagtcagtcatgacaggacgaaacatattgctatcaagtatcattatatccgggaagcagttgatcgccaggaagttaaattggaattttgccgaactgatgagcagttggcagatatatttacgaaggctttatccaaagaaaaattcatctgtgacagagagctcatcggagtttgcaagaaataa

SEQ ID NO: 14684 - DNA, 4245 bp, Oryza sativa
  Clone ID: TFbOSC416742j.C1.o2.np
tcctccgccacgtcctcctgcaccatctcctccggctcctccgccacctactcctgcaccatccggagccggaactggcgcaccgggagctggtgcaccgatcgacaacaccaacggaggcagttctgcctcacaatccagcggagggactttcacagggtataactctctactgttacttcggtttttgttatttcggttagtcacaatgctattgcgttctatgtatgatgatggtgcttattatatctgaagcatgctcctgtttatgtttgattttatcactagatcaactcatattgttcatgccatgattattgtcttaatattttggattaaaatatgctgatatatgactatatctccaacaatccaaaaacctgataggtcattttcggtagttggctttgccgctgcactgaaaccacatgcttttgatggttctaattataagagatggaaagcacggatactactgtggttgacagcgatgcaatgtttctatgtttcacggggtaaacgaagtgaaccacctctctctcctaaggaagaggttatgttcgaggcttcggattgcctgttccgtggagcattgatcaatgtactcgctgacaatatagtggacatgtatatgcacatgcctttagggaaggacatgtgggatgcacttgaggccaagttcggagtttccgacgccagcagtgagctgtatgtcatggagcagttctttgactacaagatggtcgatgaccgttctgtagtggaacaagctcatgagattcagatgctggctaaggaacttgagaacaataactgtgagttgccggacaagtttgtggcgagaggcattattgccaaattgccaccttcttggtcggactttgccacttctctaaagcgcaagagacaagagtttagtgtttctgatctcattggctctttgggtgttgaagagaaggcgagggcaaaggacaaccggggcaaaaaggttgagggaggttctagtgccaatatggtacagaagaagaatcctcatgcatcccacaacaacaagaaagtcaagcctgatgtcaaacctaaggctacaaccaattttaagaagaaaggcaagggaaaggcaaagggagactgctttatgtgtggcaagtctgggtattgggctaaggactgtcctgagcgcaaagataggaagtctgccaacatggtcattagcgagggcggaggaacatgggggtacgataaaattttacctacagttctctctgtttttcattcacctgattggtggattgatattggtgctaatattcatgtatgtgttgatatttccctgttttcttcttatcaggtcgggagaggttccttcctgttgatgggaaacgggtcacttgcggctgttcatggtgttggtacggtcgatctgaagtttacttcgggaaagaccgtgcagctgaagaacgtgcaacatatcccttcaataaagaagaatctagttagcggctctctactgtgtagagaagattttagacttgtgtttgaatccaataaatgtgttgtatctaaatatggaacttttattggaaaaggttatgacagcggaggcttgttccgcttttctttggatgacatgtgtaataataacaacgttgtgaaccatattagcgagaatgatgagtccaatgtgtggcattcgctactctgtcatgtgaatttcggttgtatgacgcgcttggctaaccatgagtttaattccaaaattcactttggtcaaatgtttcaagtgccatacttgtgttcaatcgaaacaacctcgcaagcctcacaaggcatctgaggcgagggatttggcacctctagaacttgttcattccgatttgtgcgaaatgaacggcgtgttgactaaagggggaaagaaatacttcatgacactgatagacaattgcactagattttgttatgtgtctctattgaaaacaaaggatgaagcattgcattactttaagacctataaagctaaggtagaaaaccaacttgaaaggaaaatcaaacggttgaggtctgataggggtggagagtatttttccaatgagtttacatccttttacgaagagtttggaattattcatgagaggacgtctccctattcaccccaatcaaatgggatagccgaaagaaagaaccgtactctaactgagatggtgaatgccatgttagacactgcgggactttccaaggaatggtggggtgaggcagttttgattgcgtgtcatgtcctgaataaaattccaatgaagcataaggaagtaacaccattcgaggaataggaaaggaagaaattaaatctctcatacctacgaacatggggctgtttggccaaggtaaatgtacctatagccaaaaagcgtaaacttggaccgaatactgttgattgtgtgttccttggttatgctattcacagcgtgggttatatattcttaatagtaaactctggagtacccgatatgcgtgttggtacgattattgagtctagagatgctacattctttgagaatgaatttcccatgaaaaatacacctagcacttctagccaagaaactgtcataccccatgagcactttgcaccgatagaacacaatgatcaaacgcctgagggaaatcctgaggaggataacattgtagatactcgtaagagtaagagacaaagggttgcaaaatcctttggagatgactacatcttatacctcgtggatgacactccaagaaccatagaagaggcatattcatctcctgacgctgactaatggaaggaagcagtacgcagtgagatagactcaattatgtctaatggtacttgagaagtcgttgagcatccatatgggtgcaagcctgtaggatgcaaatgggttttcaagaaaaagcttaggcctgatggtacaattgaaatgtacaaggcaaggctcgtggccaagggttatacccaaaaagaaggcaaggatttttcgacacctactcaccagttgctcgtttgaccacgattcaagtactacttgctctggcagcctctcatggtcttctcgtccatcagatggacgttaagacagctttcctaaacggaaagctggaggaggagatctatatggatcaaccagactggtatgtactagaaggtcaggagggaatggtgtgtaaactgttgaaatctttgtatggccttaagcaagcaccaaagcaatggcatgagaagtttgacaccacacttacatctgctggctttgttgtgaacaaagctgacgaatgtgtgtactatcgctatggtgggggagaaggagtgatcttgtgtttatatgtcgatgacatattgatctttgggaccagcctcaatgtgattgaggagatcaaggactttctatccaagagttttgaaatgaaggatttgagagagtctgatattattcttaccatgaagctactgagaggagatgagggtgggattacacttgtgcaatcccactatgtggacaaggttttaactcttactccttatgatcccagcgtgctattaaggaaaaaccgaagaatagcaagggatcaattgaggtactcccaaatcattggttcattgatgtacttagctagtgcaatgaggcctgacatctcatttgctgcaagtaagctgagccggtttgtctcaaatccgggagatgatcattggcaggctctggaaagagtaatgcgctatcttaagggcactatgagctatggaattcactatacctagtacccaaaagtactagaagggtatagtgactcaaactggatatctgatgctgatgagataaaagccacaagtggatatgtgttcacacttggaggtggcgttgtttcctggaagacttgcaagcagaccattttaacgaggtcaacaatggaagcataacttacagcactagatactacgacagttgaagccgactagcttcgtgaactcctgatggatttgctggtggttgaaaaaccagtgccagctatcctaatgaactgtgataatcaaacagttcaaaggacaacatgaagtcatctaggcatatcaaaagaagactgaaatctgttagaaagcagaaaaactctgcagtgatagcattggactatgtccaaacggctaggaatccaagatggagatcgttgcggaaacagagtaagaatcggctagagtccagatcggctgagtccgagttagatgaggat

SEQ ID NO: 14685 - DNA, 3183 bp, Oryza sativa
  Clone ID: TFbOSC8881j.C1.o1.fg
atgacctgcaacaagtgcaaaagaaagggccatattgcaaaatattgcagaactcgagaaattaatcgggctaatttttcacaagaaaaggaaaaatctgaagaaatggttttctcttgccatactgctcaagaagaaaaagatgatgtttgggttattgacagtggttgtacaaaccatatggccgctgatccaaatttatttcgagaaatggattcatcatatcatgcaaagatccacatgggaaatggctctatagcccaaagtgaaggcaaaggtacggttgctgttcaaacagcagacggtccaaaatttataaaagatgttttgttggtacccgatttaaagcaaaatttgctaagtattgggcagcttctagaacatgggtacgcggtttattttgaagatttttcttgcaaaatattggaccgtaaaaataatcgtctggttgccaaaataaatatggagaagaacagaaattttctattaaggatgaatcatccaactcaaatggctctcaggagtgaaattgatatttccgatttatggcacaaaagaatgggtcatcttaattacagagcattgaagctactcaggacaaaaggtatggttcaaggccttccatttattactctcaagtctgacccatgtgaaggatgtgtatttggaaaacaaattcgggcttcttttccccacagtggagcttggagagcaagtgcaccattggaactagtgcacactgatatagttggtaaagtgccaacaatttcagaaggaggaaattggtactttatcacatttatcgatgattatacaagaatgatctgggtatattttctaaaagaaaaatctgcagccttggagatattcaaaaaattcaaggccatggtggaaaatcagagtaatcgaaaaattaaagtattgcgcagcgatcaaggaggagaatatatctcaaaagaatttgagaaatattgtgaaaatgctggcatccgaagacagctaacggcaggctatagtactcaacaaaatggagttgcagaacggaaaaatcggacgatcaatgatatggccaattctatgctccaagacaaaggtatgcctaaatctttctgggctgaagcagttaatactgcaatttatattttaaatagaagtcctaccaaggcagtaccaaaccgtacaccttttgaagcttggtatggtaaaaagcctgtcattggtcatatgagagtatttggttgcatttgctatgctcaagtgccagcacaaaagagagtaaaatttgataataaaagtgatcggtgcatatttgttggctatgctgatggtatcaaaggctatagactttataatttggagaaaaagaaaattatcattatcagagatgtgatttttgatgagagtgctacatggaactggaagtctccagaagcctctagtactccattattgccaaccactaccatcacactaggccaaccacatatgcatggcactcatgaagtggaagatcatactccaagtccacagccatcaagtccaatgtcaagctcaagtgctagttcagattcaagcccgagcagtgaagagcaaatttctacaccggaatcagctccaagacgggtaagaagtatggttgaattattagaatctacttctcaacaaagagggtcagaacaacatgaattttgcaattattcagttgttgagccacaaagtttccaagaagcagaaaaacatgataattggataaaggccatggaagatgagattcatatgattgagaaaaataatacatgggagttggttgatcgtcctagggacagagaagttattggagttaagtgggtttataagacaaaattaaatctagatggctcagttcagaaatacaaggcaagacttgtggcaaaaggctttaagcaaaagcctgggattgattattatgagacatatgctcctgttgccaggctagagacaattcgtaccataattgctctagcagctcaaaagaggtggaagatttatcaacttgatgttaaatcggctttcttaaatggctatcttgatgaagaaatctatgttgaacaacctgaagggttttcagtccaagggggagaaaataaggtattcagactcaagaaggctttatatggattaaagcaagcgcctagagtgtggtatagtcaaattgacaagtactttattcagaaaggatttgccaagagcataagtgagcctactctatatgtcaacaaaacaggtacggatatcctaatcgtctcactctatgttgacgatttgatatatactggcaatagtgagaagatgatgcaagactttaaaaaagatatgatgcatacatatgaaatgagtgatctgggcttgctctactattttctcggtatggaagtgcatcaaagtgatgaaggaatatttatatcacaaaggaaatatgctgaaaatattctaaagaaatttaagatggataactgcaagtcagttacaacccccttgttgccaaatgaaaagcaaaaggctagagatggagctgataaggtagatccaacaatttacagaagcttagttggaagtttattatatttgaccgcaacacgaccggatattatgtttgcggcaagtttattatcaagatatatgtctagcccaagtcaattaaattttaccgctgcaaagagagttttgcggtatatcaaagggaccgcagattatggtatatggtataagccagttaaagaatcaaaattaattggctatacggacagtgactgggctggatgtcttgacgatatgaagggcacatcaggctacgctttctcacttggttcagccgaagcagaatatgtagcagcatcaaaagctgtttcacaagttgtttggttgaggagaattatggaagatctgggcgagaagcaatatcagcctactacaatttattgcgacagtaagtctgcaattgcgatcagcgaaaatccagtcagtcatgacaggacgaaacatattgctatcaagtatcattatatccgggaagcagttgatcgccaggaagttaaattggaattttgccgaactgatgagcagttggcagatatatttaccaaggctttatccaaagaaaaatttgtccgcgacagagagctcatcggagtttgcaagaaataa

SEQ ID NO: 14686 - DNA, 3597 bp, Oryza sativa
  Clone ID: TFbOSC900080j.C1.o8.fg
atggcgcagtctatggttcctgtatttgcaggagaaaattatgatatatggagcatcaagatgcggacgctgctgctatctcaaggattgtgggatattgttgagaatggctatcaagagtattccgctggagaaactcttacggcggaacagaaaaagtctttggcagaggatcggatgtcggacgccaaggccttgttcttgatccaacaaggagttgcggaaagtctatttccgcgtattattggcgccaagaaatccaaggaagcatgggacaagttgaaggaggagtttcaaggatctcagaagatgcgcctctatggtgaagatataaacgaccagaaggttgtggagaaaattttaatcagtctgcctgaaaaatacgagtacattgttgctgctattgaggagtcgaaagacatgttgactctcacaattcagcaactaatgagctcgttggaatctcacgaagaaagaaagcttcagcgcgaagggagctctattgaaaatgcatttcagtcaaagttgagcttcaggcctcaaaactcaaggtttcgcggaaattttcaaaaaaatgaatttccaatgcgagaccgtggttattttcagaaaaatggcttttcaaggcagaaggaagatggtcaagagagaagagaaaaagatatgtgctggaagaaaatgacctgcaacaagtgcaaaagaaagggccatattgcaaaatattgcagaactcgagaaattaatcgggctaatttttcacaagaaaaggaaaaatctgaagaaatggttttctcttgccatactgctcaagaagaaaaagatgatgtttgggttattgacagtggttgtacaaaccatatggccgctgatccaaatttatttcgagaaatggattcatcgtatcatgcaaagatccacatgggaaatggctctatagcccaaagtgaaggcaaaggtacggttgctgttcaaacagcagacggtccaaaatttataaaagatgttttgttggtacccgatttaaagcaaaatttgctaagtattgggcagcttctagaacacgggtacgcggtttattttgaagatttttcttgcaaaatattggaccgtaaaaataatcgtctggttgccaaaataaatatggagaagaacataaattttctattaaggatgaatcatccaactcaaatggctctcaggagtgaaattgatatttccgatttatggcacaaaagaatgggtcatcttaattacagagcattgaagctactcaggacaaaaggtatggttcaaggccttccatttattactctcaagtctgacccatgtgaaggatgtgtatttggaaaacaaattcgggcttcttttccccacagtggagcttggagagcaagtgcaccattggaactagtgcacactgatatagttggtaaagtgccaacaatttcagaaggaggaaattggtactttatcacatttatcgatgattatacaagaatgatctgggtatattttctaaaagaaaaatctgcagccttggagatattcaaaaaattcaaggccatggtggaaaatcagagtaatcgaaaaattaaagtattgcgcagcgatcaaggaggagaatatatctcaaaagaatttgagaaatattgtgaaaatgctggcatccgaagacagctaacggcaggctatagtgctcaacaaaatggagttgcagaacggaaaaatcggacgatcaatgatatggccaattctatgctccaagacaaaggtatgcctaaatctttctgggctgaagcagttaatactgcaatttatattttaaatagaagtcctaccaaggcagtaccaaaccgtacaccttttgaagcttggtatggtaaaaagcctgtcattggtcatatgagagtatttggttgcatttgctatgctcaagtgccagcacaaaagagagtaaaatttgataataaaagtgatcggtgcatatttgttggctatgctgatggtatcaaaggctatagactttataatttggagaaaaagaaaattatcattagcagagatgtgatttttgatgagagtgctacatggaattggaagtctccagaagcctctattgttgagccacaaagtttccaagaagcagaaaaacatgataattggataaaggccatggaagatgagattcatatgattgagaaaaataatacatgggagttggttgatcgtcctagagacagagaagttattggagttaagtgggtttataagacaaaattaaatccagatggctcagttcagaaatacaaggcaagacttgtggcaaaaggctttaagcaaaagcctgggattgattattatgagacatatgctcctgttgccaggctagagacaattcgtaccataattgctctagcagctcaaaagaggtggaagatttatcaacttgatgttaaatcagctttcttaaatggctatcttgatgaagaaatctatgttgaacaacctgaagggttttcagtccaagggggagaaaataaggtattcagactcaagaaggctttatatggattaaagcaagcgcctagagcgtggtatagtcaaattgacaagtactttattcagaaaggatttgccaagagcataagtgagcctactctatatgtcaacaaaacaggtacggatatcctaatcgtctcactctatgttgacgatttgatatatactggcaatagtgagaagatgatgcaagactttaaaaaagatatgatgcatacatatgaaatgagtgatctgggcttgctccactattttctcggtatggaagtgcatcaaagtgatgaaggaatatttatatcacaaaggaaatatgctaaaaatattctaaagaaatttaagatggataactgcaagtcagttacaacccccttgttgccaaatgaaaagcaaaaggctagatatggagctgataaggcagatccaacaatttacagaagcttagttggaagtttattatatttgaccgcaacacgaccggatattatgtttgcggcaagtttattatcaagatatatgtctagcccaagtcaattaaattttaccgctgcaaagagagttttgcggtatatcaaagggaccgcagattatggtatatggtataagccagttaaagaatcaaaattaattggctatacggacagtgactgggctggatgtcttgacgatatgaagagcacatcaagctacgctttctcacttggttcagccgaagcagaatatgtagcagcatcaaaagctgtttcacaagttgtttggttgaggagaattatggaagatctgggtgagaagcaatatcagcctactacaatttattgcgacagtaagtctgcaattgcgatcagcgaaaatccagtcagtcatgacaggacgaaacatattgctatcaagtatcattatatccgggaagcagttgatcgccaggaagttaaattgaaattttgccgaactgatgagcagttggcagatatatttaccaaggctttatccaaagaaaaatttgtccgcgacagagagctcatcggagtttgcaagaaataa

SEQ ID NO: 14687 - DNA, 4008 bp, Oryza sativa
  Clone ID: TFbOSC900089j.C1.o25.fg
atggcgcagtctatggttcctgtatttgcaggagaaaattatgatatatggagcatcaagatgcggacgctgctgctatctcaaggattgtgggatattgttgagaatggctatcaagagtattccgctggagaaactcttacggcggaacagaaaaagtctttggcagaggatcggatgtcggacgccaaggccttgttcttgatccaacaaggagttgcggaaagtctatttccacgtattattggcgccaagaaatccaaggaagcatgggacaagttgaaggaggagtttcaaggatctcagaaggtacttgcggtgaagcttcaaaccttgagaagacaatttcagaatttgctaatgaaggagtcagagaaggtaaaagactatttctcaagagttattgagatcgttaatcagatgcgcctctatggtgaagatataaacgaccagaaggttgtggagaaaattttaatcagtctgcctgaaaaatacgagtacattgttgctgctactgaggagtcgaaagacttgtcgaaagactcgttggaatctcatgaagaaagaaagcttcagcgcgaagggagctctattgaaaatgcatttcagtcaaagttgagcttcaggcctcaaaactcaaggtttcgcggaaattttcaaaaaaatggatttccaatgcgagaccgtggttattttcagaaaaatggcttttccaggcagaaggaagatggtcaagagagaagagaaaaaggtacgtccagttcaaatttgtggtgtgacatttgccaaaaatctagtcatactacagatatgtgctggaagaaaatgacctgcaacaagtgcaaaagaaagggccatattgcaaaatattgcagaactcgagaaattaatcgggctaatttttcacaagaaaaggaaaaatctgaagaaatggttttctcttgccatactgctcaagaagaaaaagatgatgtttgggttattgacagtggttgtacaaaccatatggccgctgatccaaatttatttcgagaaatggattcatcgtatcatgcaaagatccacatgggaaatggctctatagcccaaagtgaaggcaaaggtacggttgctgttcaaacagcagacggtccaaaatttataaaagatgttttgttggtacccgatttaaagcaaaatttgctaagtattgggcagcttctagaacacgggtacgcggtttattttgaagatttttcttgcaaaatattggaccgtaaaaataatcgtctggtcgctaaaataaatatggagaagaatagaaattttctattaaggatgaatcatacaactcaaatggctctcagaagtgaagttgatatttccgatttatggcacaaaagaatgggtcatcttaattacagagcattgaagctactcaggacaaaaggtatggttcaaggccttccatttattactctcaagtctgacccatgtgaaggttgtgtatttggaaaacaaatccgggcttcttttccccacagtggagcttggagagcaagtgcaccattggaactagtgcacgctgatatagttggtaaagtgccaacaatttcagaaggaggaaattggtactttatcacatttatcgatgattatacaagaatgatctgggtatattttctaaaagaaaaatctgcagccttggagatattcaaaaaattcaaggccatggtggaaaatcagagtaatcgaaaaattaaagtattgcgcagcgatcaaggaagagaatatatctcaaaagaatttgagaaatattgtgaaaatgctggcatccgaagacagctaacggcaggctatagtgctcaacaaaatggagttgcagaacggaaaaatcggacgatcaatgatatggccaattctatgctccaagacaaaggtatgcctaaatctttctgggctgaagcagttaatactgcagtttatattttaaatagaagtcctaccaaggcagtaacaaaccgtacaccttttgaagcttggtatggtaaaaagcctgtcattggtcatatgagagtatttggttgcatttgctatgctcaagtgccagcacaaaagagagtaaaatttgataataaaagtgatcggtgcatatttgttggctatgctgatggtatcaaaggctatagactttataatttggagaaaaagaaaattatcattagcagagatgcgatttttgatgagagtgctacatggaactggaagtctccagaagcctctagtactccattattgccaaccactaccatcacactaggccaaccacatatgcatggcactcatgaagtggaagatcatactccaagtccacagccatcaagtccaatgtcaagctcaagtgctagttcagattcaagcccgagcagtgaagagcaaatttctacaccggaatcagctccaagacgggtaagaagtatggttgaattattagaatctacttctcaacaaagagggtcagaacaacatgaattttgcaattattcagttgttgagccacaaagtttccaagaagcagaaaaacatgataattggataaaggccatggaagatgagattcatatgattgagaaaaataatacatgggagttggttgatcgtcctagggacagagaagttattggagttaagtgggtttataagacaaaattaaatccagatggctcagttcagaaatacaaggcaagacttgtggcaaaaggctttaagcaaaagcctgggattgattattatgagacatatgctcctgttgccaggctagagacaattcgtaccataattgctctagcagctcaaaagaggtggaagatatatcaacttgatgttaaatcggctttcttaaatggttatcttgatgaagaaatctatgttgaacaacctgaagggttttcagtccaagggggagaaaataaggtattcagactcaagaaggctttatatggattaaagcaagcgcctagagcgtggtatagtcaaattgacaagtactttattcagaaaggatttgccaagagcataagtgagcctactctatatgtcaacaaaacaggtacggatatcctaatcgtctcactctatgttgacgatttgatatatactggcaatagtgagaagatgatgcaagactttaaaaaagatatgatgcatacatatgaaatgagtgatctgggcttgctccactattttctcggtatggaagtgcatcaaagtgatgaaggaatatttatatcacaaaggaaatatgctgaaaatattctgaagaaatttaagatggataactgcaagtcagttacaacccccttgttgccaaatgaaaagcaaaaggctagagatggagctgataaggcagatccaacaatttacagaagcttagttggaagtttattatatttgaccgcaacacgaccggatattatgtttgcggcaagtttattatcaagatatatgtctagcccaagtcaattaaattttaccgctgcaaagagagttttgcggtatatcaaagggaccgcagattatggtatatggtataagccagttaaagaatcaaaattaattggctacacggacagtgactgggctggatgtcttgacgatatgaagagcacatcaggctacgctttctcacttggttcagccgaagcagaatatgtagcagcatcaaaagctgtttcacaagttgtttggttgaggagaattatggaagatctgggcgagaagcaatatcagcctactacaatttattgcgacagtaagtctgcaattgcgatcagcgaaaatccagtcagtcatgacaggacgaaacatattgctatcaagtatcattatatccgggaagcagttgatcgccaggaagttaaattggaattttgccgaactgatgagcagttggcagatatatttaccaaggctttatccaaagaaaaatttgtccgcgacagagagctcatcggagtttgcaagaaataa

SEQ ID NO: 14688 - DNA, 4547 bp, Oryza sativa
  Clone ID: TFbOSC900147j.C1.o12.np
atggtgaagacaaggaatgatccccgtgactccaacgacaccagtggtagcgaagagcagatcgatggagcacataccagtggtgcatctggcagcagttcatctccaccgcccgagaacccaacggtcactcagatgatgacaatgatgatgcaacagatgcagcaacattaccatcagatgttgcagcaggcgcagcagaatcagcagtttggtcctccaccatcacgtctgtccagactgttagagtttcttcgtatccagccacccactttctcaagcaccaccaacccaatggaggccaacgactggctccgtgctattgagaagaagctgaaccttctgcaatgcaacgaccaagagaaggttgcctttgctacacaccagctgcaaggttccgcttctgcctggtgggacaactacgtggtaacccgtccagctacaatggaggttacttgggcagagttttgtcaaagcttcaggaaggcacagattcttgaggggattatggcacaaaggaaaagagagttccgtgcattgtaacaaggaaccaggacagttacagagtacttgcacgagttcaaccgccttgcgcgctacgctcctgaggacgtgcgcaccgatgccgagaagcaggaaaagtttttgtttggtcttgatgatgagttgaccaaccagctaatctctggagtctatgaggactttgagaagcttgtggacaaggctatctgtctggaagagcaacgcaacaaaatggactgtaaaagaaaggcagctcagatcaggactcctcaagggaacaatcagaagcctcgcttcatgatgggacaactgggtgggccttccaccctgatcgtccgtcagcaccatccctataatccgggcaacttcaacaacgactacaacggtggcagtcacaacaacagtgaacagcaccaccacaacttgactccacccccattaatggcaccagctgagtcagaactaccagctatgtcagctcagttagaacagctcaagaaggagtctgcaggaaagccaagaccctacttcaactgtggcaagctcggtcactttgctggcaagtgtccgaagcggaagcgcgctggacctaggttcgtccaggcccgcgtcaatcatgcatctgcagaggaagcacaggcagcaccagaggtcgtgctgggcacgtttctagtgaatttatttctggcaacaatactttttgattcgggtgcctcgcattctttcatttccaagagatttgctgggacacatggattatcagtagtggaacttaaaataccgatgcgggttcatacccctggaaatgacatgaacaccgcacactactgcccctggcgactatagagatcaaaagatcacagtttcaatccaacctcatccttctcgaatccaaagacctagatgtcattctcggaatggattggttgaccagacacaagggagtgattgactgcgcaagtcgcactatcaccctaaccaatgacaaaggagagaagatcaccttccgttctccagtgccacagaagtccgtagcaagtctgaatcaggctgctattgaggatcagacagaaatagcagagaaaagtccccaaaaattggaggatattcctatagtacaagagtatcctgaggtgtttcctgaagacctcactacaatgccaccgaagagagagatcgagtttcggattgatttggcaccgggaactgccccgatctacaagaggccctacaggatggcagctaatgagctagcagaagtcaaaaagcaagttgatgaacagctgcagaaagggtacattcgaccgagtacttcaccttggggtgctccggttatctttgtggagaagaaagacaaaaccaagagaatgtgcgttgattatcgcgcccttaatgaggtcacaatcaagaacaaatatccgttgccaagaattgatgacctgtttgatcagctaaaaggagctaaggtgttttccaagatagacctgcgatcaggctatcatcagttgagaattcaggaggaggatattcccaagacagccttcaccactcggtatgggttgtttgagtgcacggttatgtcatttggactcaccaatgcaccggttttcttcatgaacttgatgaacaaagtgtttatggaatttctggacaagtttgtcgtggtgttcattgacgacatacttatttattcaaagtcagaagaggaacatgagcaacatctccgtctggtactcgagaaattgaaggagcaccagttatataccaagtttagcaagtgtgacttctggttgtcggaagtcaaatttctgggtcacgttattactactcaaggtgtggcagtggatccatcgaatgtggagtcagttaccaagtggaccccacctaagacagtttctcagatccggagtttttttggacttgcgggttattatcgtcggttcattgaaaatttctccaagattgccaggcccatgacacagttgcttaagaaagatgaaaaatttaagtggtcagctgagtgcaaccaaagttttgaagaactcaagaagaagttagtctctgcaccagtcctgattctgccggaccagacgaaagacttccaggtctactatgatgcatctcgccaaggactaggatgtcttctgctgtaggaaggccgagtggtcgcatatgcttcgcgacagctgcgtccacacgagaccaattaccctactcatgatctagagttggcaccagtggttcacgctctaaaaatctggcggcactatcttattggcaaccgctgtgaagtctacactgatcacaagagcctgaagtacatcttcactcagtctgacttgaatctccgacagcgaagatggctggagttgataaaagattatgacatggggatacattatcatccaggcaaagcaaatgtggtggcagacgctctgagcagaaagagctattgcaatgcagtatgtaccgaaggcatgtgtgacaaattgcagcaagatcttgagcacataaatttgggcatcgtggaacacgggttcgcagctgccctagaggcacggcctacgcttgtggatcaagtcagagcagctcaggtaaatgatcctgaaatagctgagctgaaaaagaatatgaggtttggaaaagcccgagattttcatgaggatgagcatgacacaatttggttgggagaaagattgtgcgtacctgacgacaaagagctaaaagatctgatactaactgaagctcatcaaactcagtattcaattcatcccggcagtactaaaatgtaccaggacctcaaagagaaattctggtgggccagcatgagaagagagatagccgaatttgtcgcactctgcgatatttgtcagcgagtcaaagcagaacaccagaggcccgtaggattgcttcaacctcttcagatcccggaatggatatgggaagagattggaatggatttcataacaggtttgcccaggacatcatcggggcacgattcaatctgggtagttgtggatcgactcacgaaagttgctcacttcattccagtgaacaccacctatacagggaagagtttggcagagctgtacttagcaaggatcatgtgtttgcatggggtacctaagaagattgtatctgatcgagggagtcagttcacttcaaagttctggcagaagctgcaagaagaattggggactcgtttgaatttcagcacggcttatcatccgcaaactgatggtcagaccgagcgagtcaatcaaatattggatgatatgttgcgagcctgtgcacttgactttggcggagcttgggataaaagtctgccttatgcggaattctcctacaacaacagttatcaggccagtttgcaaatgacaccgtttgaagcattgtacggacggaagtgccgcactctgctcttctgggatcaaaccggagaacgccaactatttgggacagaagtgctaaccgaagcagaggagaaagtcagaaccgtcagagaaaggctaagaattacgcaatctcgacagaagagttatgctgacaaccgccgaagggagcttagttttgaagcaggagattatgtgtaccttcatgtcactccgctcaggggagtacaccggttccaaaccaaagggaagttggcaccacgcttcgtgggaccatacaggatcttggaacgcagaggtgaagttacttaccagcttaagcttccatctaacatggctggaatccatgatgtgttccatgtgtctcagttaaagaagtgcttgagggtaccagaagaacaagccgattcagagcacatcgacatccaggaagatctgacatatgtggtgaagccgattggtatcctcgaaaccagtgagagaaggactagaaataaggtgatcagattttgcaaagtccagcggagccaccactcagaggaagaggccacctaggaaagagaagatgaattgaaggccgctcatccgcacctcttcgccagctctttcgaatctcggggtcgagattccgtt

SEQ ID NO: 14689 - DNA, 4094 bp, Oryza sativa
  Clone ID: TFbOSC900329j.C1.o22.np
acttgggcagagttttgtcaaagcttcaggaaggcacagattcttgaggggattatggcacaaaggaaaagagagttccgtgcattgtaacaaggaaccaggacagttacagagtacttgcacgagttcaaccgccttgcgcgctacgctcctgaggacgtgcgcaccgatgccgagaagcaggaaaagtttttgtttggtcttgatgatgagttgaccaaccagctaatctctggagtctatgaggactttgagaagcttgtggacaaggctatctgtctggaagagcaacgcaacaaaatggactgtaaaagaaaggcagctcagatcaggactcctcaagggaacaatcagaagcctcgcttcatgatgggacaactgggtgggccttccaccctgatcgtccgtcagcaccatccctataatccgggcaacttcaacaacgactacaacggtggcagtcacaacaacagtgaacagcaccaccacaacttgactccacccccattaatggcaccagctgagtcagaactaccagctatgtcagctcagttagaacagctcaagaaggagtctgcaggaaagccaagaccctacttcaactgtggcaagctcggtcactttgctggcaagtgtccgaagcggaagcgcgctggacctaggttcgtccaggcccgcgtcaatcatgcatctgcagaggaagcacaggcagcaccagaggtcgtgctgggcacgtttctagtgaatttatttctggcaacaatactttttgattcgggtgcctcgcattctttcatttccaagagatttgctgggacacatggattatcagtagtggaacttaaaataccgatgcgggttcatacccctggaaatgacatgaacaccgcacactactgcccctggcgactatagagatcaaaagatcacagtttcaatccaacctcatccttctcgaatccaaagacctagatgtcattctcggaatggattggttgaccagacacaagggagtgattgactgcgcaagtcgcactatcaccctaaccaatgacaaaggagagaagatcaccttccgttctccagtgccacagaagtccgtagcaagtctgaatcaggctgctattgaggatcagacagaaatagcagagaaaagtccccaaaaattggaggatattcctatagtacaagagtatcctgaggtgtttcctgaagacctcactacaatgccaccgaagagagagatcgagtttcggattgatttggcaccgggaactgccccgatctacaagaggccctacaggatggcagctaatgagctagcagaagtcaaaaagcaagttgatgaacagctgcagaaagggtacattcgaccgagtacttcaccttggggtgctccggttatctttgtggagaagaaagacaaaaccaagagaatgtgcgttgattatcgcgcccttaatgaggtcacaatcaagaacaaatatccgttgccaagaattgatgacctgtttgatcagctaaaaggagctaaggtgttttccaagatagacctgcgatcaggctatcatcagttgagaattcaggaggaggatattcccaagacagccttcaccactcggtatgggttgtttgagtgcacggttatgtcatttggactcaccaatgcaccggttttcttcatgaacttgatgaacaaagtgtttatggaatttctggacaagtttgtcgtggtgttcattgacgacatacttatttattcaaagtcagaagaggaacatgagcaacatctccgtctggtactcgagaaattgaaggagcaccagttatataccaagtttagcaagtgtgacttctggttgtcggaagtcaaatttctgggtcacgttattactactcaaggtgtggcagtggatccatcgaatgtggagtcagttaccaagtggaccccacctaagacagtttctcagatccggagtttttttggacttgcgggttattatcgtcggttcattgaaaatttctccaagattgccaggcccatgacacagttgcttaagaaagatgaaaaatttaagtggtcagctgagtgcaaccaaagttttgaagaactcaagaagaagttagtctctgcaccagtcctgattctgccggaccagacgaaagacttccaggtctactatgatgcatctcgccaaggactaggatgtcttctgctgtaggaaggccgagtggtcgcatatgcttcgcgacagctgcgtccacacgagaccaattaccctactcatgatctagagttggcaccagtggttcacgctctaaaaatctggcggcactatcttattggcaaccgctgtgaagtctacactgatcacaagagcctgaagtacatcttcactcagtctgacttgaatctccgacagcgaagatggctggagttgataaaagattatgacatggggatacattatcatccaggcaaagcaaatgtggtggcagacgctctgagcagaaagagctattgcaatgcagtatgtaccgaaggcatgtgtgacaaattgcagcaagatcttgagcacataaatttgggcatcgtggaacacgggttcgcagctgccctagaggcacggcctacgcttgtggatcaagtcagagcagctcaggtaaatgatcctgaaatagctgagctgaaaaagaatatgaggtttggaaaagcccgagattttcatgaggatgagcatgacacaatttggttgggagaaagattgtgcgtacctgacgacaaagagctaaaagatctgatactaactgaagctcatcaaactcagtattcaattcatcccggcagtactaaaatgtaccaggacctcaaagagaaattctggtgggccagcatgagaagagagatagccgaatttgtcgcactctgcgatatttgtcagcgagtcaaagcagaacaccagaggcccgtaggattgcttcaacctcttcagatcccggaatggatatgggaagagattggaatggatttcataacaggtttgcccaggacatcatcggggcacgattcaatctgggtagttgtggatcgactcacgaaagttgctcacttcattccagtgaacaccacctatacagggaagagtttggcagagctgtacttagcaaggatcatgtgtttgcatggggtacctaagaagattgtatctgatcgagggagtcagttcacttcaaagttctggcagaagctgcaagaagaattggggactcgtttgaatttcagcacggcttatcatccgcaaactgatggtcagaccgagcgagtcaatcaaatattggatgatatgttgcgagcctgtgcacttgactttggcggagcttgggataaaagtctgccttatgcggaattctcctacaacaacagttatcaggccagtttgcaaatgacaccgtttgaagcattgtacggacggaagtgccgcactctgctcttctgggatcaaaccggagaacgccaactatttgggacagaagtgctaaccgaagcagaggagaaagtcagaaccgtcagagaaaggctaagaattacgcaatctcgacagaagagttatgctgacaaccgccgaagggagcttagttttgaagcaggagattatgtgtaccttcatgtcactccgctcaggggagtacaccggttccaaaccaaagggaagttggcaccacgcttcgtgggaccatacaggatcttggaacgcagaggtgaagttacttaccagcttaagcttccatctaacatggctggaatccatgatgtgttccatgtgtctcagttaaagaagtgcttgagggtaccagaagaacaagccgattcagagcacatcgacatccaggaagatctgacatatgtggtgaagccgattggtatcctcgaaaccagtgagagaaggactagaaataaggtgatcagattttgcaaagtccagcggagccaccactcagaggaagaggccacctaggaaagagaagatgaattgaaggccgctcatccgcacctcttcgccagctctttcgaatctcggggtcgagattccgtt

SEQ ID NO: 14690 - DNA, 4353 bp, Oryza sativa
  Clone ID: TFbOSC900402j.C1.o15.fg
atggcaggaatgtcggcatttagagtgtatttcagtgaaggtgaaattatggaaaatgaaagtggtgtcaatctgagcaactttaggcaatgcacactataccatccaaatcctgacacccttaccatgcccgaagtttggtactggctaacatgcacattttctttagatccgggtatatatagtgttaacgtgagggttatgtggagccgatcggccaacaacataagatgggagttaaaaaatgtgacacggagtaaggcctggcaggattggctcgctggctgcaggagacggggatatgaatatgtcatgctggtgcaagcatgtcaaggaagagtccccacggagagcgcagcggggcaatccagcaaccgtgaggagttggggtctagttcacacgaagaagatgaagttgtagctccccatcatggtggcgatgttggtcctgacattcaaaatctatccatacaaggagatgaagtggtcaaccgccatcctactggtgaagccgatgaaggggaggacatacctgctatagttgaagaaattgagagggtggaccgacatgcaatcgaagatgaggaaaacctcgctgctgaagagaatgatgacgaggatgaacaagaagttgaggaagttcctatgcctgcttcgtggaaccttgaagaccctggttatattgcagaaaactcttgtcatgattcaatatggttctacggggatggccaaatcaatctgggtgcaatgttccgtgacaaaacggggttgcaagacgcagtgaagtcatggtcattcaagacgcaaaggcagttcagggttgtgaagtctaacaagactgagtacacggtcgtcttccgtcttcatggtcacgtgccaaagtacgagtcttactggattctgtccaaactgcaggaacactcctgtctgattcggaacactagggagtcgcaccgcaacctgaccgcggcatacgttgcgaacaagtactacaaggaaattattgaaggtgatgacctgcctgtgcggcacataataaaactggtggagaaaggtgaacaatacacaattagttaccacaaggcttggagggcgaaacaaaaggccatggagaaaagatatgggacatttgaggaagcatacgacactctgtcacagatgcttaacattctgaagatcaggaaccctaggacctatgttgctgtgcaggatcgggagtcaattcgtcctccaaattatcttgtgatgcaacgggcattctttgcattcggagcatgcattcttgcgttccagtgctcgaggccggtgctgtgtgtcgacggtactttcctaactgggaagtaccgaggccaaatattaacagctgttggtgcggatgcgaacaaccagataattccagtagcttttgcttttgttgaaagcgagaattacgaaagctggttgtggttcttgcaacatctaaagtggggagtggtgcaaaaacgcacatcgatatgcatcatccatgaccggaatgccggtctgttgaaggcaatcaaagagctccaggaggatggtgatggtgcatactactggcctgacatgcacagccgttggtgcatgcggcacatgggagccaattttttcaaacaattcaacaaccggcgtctgatgaacatgttcaagcggttgtgcaaggcaaatcagtccacaaagttcgatgagctttggaaacaacttgacgaggtgacaaggacacatatccggtcaaagcagaccaacatcaacctgctggatgtacatgtcccccaggccctggaaccaatggatgatcttattccatcaaatggaaagaagcgtaggtcatcaaagaatatcaaatgttttacccattggattgagtgcgagccgaatgataagtgggcactcctgcatgacactaatggggctaggcatggcataatgaccactaatcttgcagaggcgtacaatgtggttcttagcaaattaaggcctttacctctgactgctattgttgaaggcattatgcacaggacaacgatgtggatgaggacgaggcgggccgcggcgttgcaacaaatgtctaatgcacaaacacctttctgcaaaaagatggcagagtacctccaagagaaggctaacaaggccagatttcacacggtcattaccactgggaacgtaagacgaaggtgggaagtcacatgtcgcactaagggggattttggatcttctactggggtcatcactcatgaagttactctagggcacgaatctgataacacatgttcgtgctcttgcaataagccgaagcttcttcataagccatgtagccatgtcctggccgcatgcgctaaaattaagcttgattcaacatcatacgtgtcgacgttctacctaaaggatagagttctaaatgcatggagtgctgagatcctcgggtggaggtccctccaacacctagtcgaaactgggggtgataacaggatctatgtgccagacttggatttgttgaaggccggtaagggtagaagacaaacacgtcgcttaagaaatgatatggatgcatccgaagcgggagggcctgtaaggcgatgtgagaactgtcttcagtacgggcaccgcactagagattgcaagaataacaaggagggtcttcttaccttcgtgcagatgacgcaggcaaggatgcattacgacgctagagaacctaaacaaaaacaaatgggggcacatagaaaacgacgacaaaatatcgacaagtccctacttatggcactggttgataggtggaggccagagacacatacatttcatctaccgtgcggagaaatgaccataactttgcaggatgtgtccatgctcatggggctgccactagccggccaggcaattgtacttccggaccctccgaaagattggagagatgatattgtatcacgatatgcctgtattttgccatggtacgctaccggtgatacagacgatgatgaggacaaaatatttttctctgaaaaagaaactcatggccccacattgaagtggttgtcacagtttgaggtgcgatatatgcccgacgatgtccaggagtaccaactgacgttgtaccttgaggcttatctactttggctgtttggttgggtcatgttcaccgggtcacacgggaacactgtggacgccaagctaatcccccttgctcaccaaattgctgaagaccgggcaaagcgcttctcgttcggacgtccatacatgagcgtggccgtggcccacaaggacgattacactaacgcaattgatgatcgtcctaccttcggtactcgctggtgctacggaccgccacagtgggcgagaatccaggtgcacaatgtgtacgagtactttaccgaggcgttcgaaagccttagggaaaatgaagttcggtggactccgtacacgaacgaagaggccattttgcgtgcaccgcatggagggtataatgttcaaagggtaatgcgtcagatgggactgtaccaacaagtcccagttcctgttggacttcaccttccaccagatgtgcacacgcaaaagaggcaagctgacaacaggagaccagggcatacgaccacaacacttacgaataatacatggcctggggagttagtaagggatgcaaaaacattgtgggagaagcttagagatggaatggcgggtaccaaccaggaagttatggctgcggtcgactccctccgtcgaaaaggaaagcgaatcatgcggctcgcatcgtgccggcattcctcggacgtctataatccggcaacatcaacaaggacgttcgagccaatgccggagtgtccctctacctcttcccggccgtccacctcagtccgcccttcagcatccgcgcgacgatccagtgatggtcgtgcaggagtaaggtcaacttcgtttcgtgatccacccactattccgactatcccagaaatcactgaaatttcggaacgcctaggaggctttggttcaactcaagagggaacgcgaatggtccgtcccgtgcctcatatgcctcctgctaggccacaaatgattcctcaaatggctctcgatgtgccaacctcacactggcaaggaggatttgcaccatttgcagggcctactcagtcggttccactgcatgcacctacatatggcaccaacccatggcaaggacaatccatagattacggtgggtcatttcgccctgaaataatgtcagggtttagtccttacactacatcgtacgacgacatgtctagcttcggtggagggtcgtcatcggtacccaacgagcttcggacttcacaaactaatgatgcgcctcatgtgacacagcccacataa

SEQ ID NO: 14691 - DNA, 1431 bp, Oryza sativa
  Clone ID: TFbOSC400683j.C1.o15.fg
atgtcatggcacagggctggtgtcctgctgctaggagctcaatcctgcctgcctgtcccggaggttccggctgtagatggggctgggtcggtacttttgtttatggctaggatgggttgggaactatgtgacgtcttccgtccgtatgccgtggtgatggataacactggtaacaaaggctatgtgaatgatggatccgatgactcaagaacccaagccaatgggaatgagaaaagcatcaacgaaacctcaccagagctaatccaaattgtggttaaccaaaccaacatgttggcaacagcatttcaactattacagaattggaacaacccagcaggggcaaccaacgttcaagtacctacagtccagcaacagtgcaagttatcagaatttctaaaaactaagcctccaacctttgccattgccgtcgatcctatggaagctagtgattggttgcgcacagtcgagaagaagctggggttgattcagtgcacagaccaggagcgggttgtctttgcaactcatcagttggttggaccagcttcagaatggtgggatagctacgaagcatcacggccagaaggacataccatcacctgggatgagttttcagccgtgttgaagagatcacatgttcccgcaggaatgatcacactgagaaaacgagaattccgctacctgaagcaagaagatttgaccgtcacagagtacctgcatgagttccatcgtttggctcactatgggttaaaagatgagatcgcagtgcaactactcctagaggaatatgaagattttgagaaacttgtggacaaaaccatacaactcgaaagtgagcataatcggatgaagaactgcaagagaaggattgtcagcatcccaacatttccatgtggtaaccaaagacagcgcactgagccacttcagatcaccggatcttctattgcgcatcaagagttcctgccccaagaagacggacacaatgcagacaataacattagcaatactaatgatgatgataccaccaacaaccatgcttcttgccccattagtgaccactcgaatcaagcgtgcaatgtcaacatcattcaccaaggtgtcgacgatagtatcaatgatggcacccagaatgacaaccctagaaattgtgatagcaactatggtaccactgatgccaatgttagcaaggatttccaaccaccaattccaactccaagtcagaatgatcgtccccagacggacagctcaataaagaagacgttgatttgttacaactgcaaagaaccagggcatgacttgagggactgtctacaaccaaggcaaagtcggcctccacattaccgccaatttacacgaagcagacatcctaatcgtattgtggtcactggagcaaacgccatacctgtgaggcctcgtgttaatcataacccatag

SEQ ID NO: 14692 - DNA, 3342 bp, Oryza sativa
  Clone ID: TFbOSC401051j.C1.o8.fg
atgtcgacaaccggcgacaacaacaacactggagacaaggagaaggagcctctcgtcaacaccaacggaggcaatactgcctcaaactccagcagagggccattctcgggatataacgtttcactattaccgttcgttcttcgtttcctacaactgtcggtcgcagtattattgcgttctcttatctatgttgatgcttattctatattaagcatgctcatgttgtacacatctagcactgtcactagatctactcaaattacaaatgtcatgtggaaagcacgtgcacttttgtggttgacggtgatgcaatgtttctttgtttcacggggcaaaccgagtgaaccgccgctctcccctgaggaagaggctaagttcgaggttgcggattgcttgttccgtggagcattgatcagtgtgctcgccgacagtattgtggacgtgtatatgcacatgccttcaaggaaggacatgtgggatgctcttcaggccaagttcagggtttccgatgccgggagcgagctgtatgttatggagcagttctatgactacaacatggtcgacgaccgttctgtagtggaacagtttgtggcgggtggcattattgccaaattgccaccttcttggtcggactttgctacttctctaaaacacaagaggcaagagttcagtgttactgatctcattggctctttgggtgttgaggagaaggcaagggcaaaggacaaccggggcaaaaaaaagaacgatggaggttctagtgccaatttggtgcagaagaagaaccctcacgcatctcacaacaacaagaagaaagtcaaacctgacgtcaaacctaaggctacaaccaattttaagaagaaaggccagggaaaggcaaaagtagatttctttgtgtgtggcaagcctgggcattgggccaaggattgtcttgatcgcaaagacaagaagtctgccaacatgatcattagcgagggcggaggaacatcggggagaggttcctccttgttgatgggaaacggatcgcttgcggctgttcatgatgttggtacagtcgatctgaagtttacttcgggaaaaatcgtgcagctgaagaacatgcagcatgtcctttcaataaagaagaatctagttagcggctctctactgtgtaaaggtggttttagacttgtgtttgaatccaataaatgtgtcgtatctaaatatggaacatttattggaaaaggttatgactgcggaggcttgttccgcttttccatggatgatatgtgtaataaagttgtgaaccatgtaagcgatgatgatgatgagtccaatgtgtggcattcgcgacattgtcacgtgaattttggttgtatgacacgcttagccaacatgagtttaattccaaaattcactttagtcaaaggctctaagtgtcatacttgtgttcaatcgaaacaacctcgcaaacctcacagggcatctgaggtgaggaatttggcaccactagaacttgttcattccgatctgtgcgaaatgaacggcgtgttgactaaagggggaaagaaatatttcatgagagtgatagataattgcactagattctgctatatgtacctattgaaaacaaaggatgaagcattacattactttaagatcgataaggctgaggtagaaaaccatctggaaaggaaaatcaaacggttgaggtctgataggggtggagagtatttttccaatgagtttaattctttttgcgaagagtatgaaattattcatgagaggacgcctccctattcaccccagtcaaacggggtagctgaaagaaagaaccgcactctaactgagatggtaaatgccatgttagacactgcaggattttccaaggaatggtggggtgaggcaatattgactgtgtgtcatgtcctgaatagaattcctactaagcataaggaagtaacaccattcaaggaatgggaaaggaagaaattaaatctctctcacctgcacacatggggttgtttggtcaaggtaaatgtacctatagccaaaaagtgtaaacttggacaaaagaccgtagattgtgtgttccttggttatgctatccacagtgtgggatataggttcttaatagtaaattctagagtacccaacatgcgtgttggtacaattactgagtccagagatgccacattttttgagaatgaatttcctatgaaaaatgcacttagcacttctagtcaagaacctattttatctcctgagcactttgtgccgatagaacacattgatcaaatgcttgaggaaaatcctgaggaggataacattgtagcaactcgaaagagtaagagacaaaggactgcaaagtcttttggagatgactacattgtatatcttgtggatgatactccaagaaccattgaagaggcatattcatctcttgacgctgactattggaaggaagcggtatgcagtgagatggactcaattatgtctaatggtacttgggaagtcgccgagcgtccatatgggtgcaagcctgtaggatgcaaatgggttttcaagaaaaagcttaggtctgatggtacaattgaaaagtataaggcaagacttgtggcaaagggttatacccaaaaagaaggcgatgactttttcgacacttattcaccagttgctcgcttgaccacgattcgagtactacttgctctggcagcctcttatggtctactcgtccatcagatggatgttaaagacagctttcctcaatggagagttggaggacgagatctatatggatcaaccagatggcttaagcaatggcatgagaagtttgacaatacacttacatctgctggctttattgtgaacgaagctgacaaatgtgtgtactatcgctacggtgggggagagggagtgatcttatgtttatatgttgatgacatattgatctttgggaccagtctcaatgtgattggggaggtcaaggactttctgtccaaaagctttgaaatgaaggatttggaagtggctgatgttattcttaacattaaactactgagaggagatgagggtaggattacacttgtgcaatctcactatatggataaggtcctgagtcgctttggttatagtgactgcaaggcagctcctactccttatcatcctagtgtgctattaaggaaaaaccaaagaataggaaaggatcaattgagatactcccagatcattggttcattgatgtacttagctagtgcaacgaggcctgacatctcatttgttgtgagcaagttgagccggtttatttcaaatccgggagatgatcattggcatgctcttgaaagagtaatgcgtgctatctaa

SEQ ID NO: 14693 - DNA, 1550 bp, Oryza sativa
  Clone ID: TFbOSC413055j.C1.o5.np
actatcaactgtgcttggccaagaacttgaactgcttctccgccgaatcctcggagcgatgtcgtggttgaaagagcagggctgtaaatggaggtttcatgcctctacaataattacattgttatatgtgcaggtcaaggtaaataggcctgcccacagttgttgttccataaataagactggggctgccatggcaacaaatagctgggttgctgaaagagttatagattggctgaaggagattccaactctaggagctagtgcattgaaggtcaagctagagaagaagtacaaatttacaataggatatgacaaagtttttagaggcaaagagaaggcccttgagaagatatttgggaagtgggaagacagctttgcattgctgcccacttttagagaggagcttttgaaggcacaacctggaagtattgtcgatattgataccgagattcatgaagaccaagtatgcttcaggcggctgttcatagctctaaaaccttgcattgatggattcctacaaggttgtaggccatatattgcaatggactcaacacacttgacagggaagcatagaggacagctggcagctgctgttgcaatagatggaaacaactggctttttcctgttgcatttggtgtgatagaagctaagacgacggagaggtggacatggttcgtgcagaacttgaagaatgctattggtaatcctcctgggctagccatcagcacagatgctgggaaaggactagagagagctgttagtgatgtctatccaactgctgagcaccgggagtgcatgcgacacctgtggaagaacttcaagaagcagtaccatggaccactttttggtgaaaacatgtggcatgctgctaagtgctacaccagccagcagtacaactatcacatgaacaagattgctgagaaatctcctgaagctattgcatatttaaaaaccaatcacccatttttttggagtaggagcaaattctcagagctttcaaaggtggactacatcaacaacaatctttctgagtcattcaacaattgggtgatgaagatcaaggaattacacatagtggacttatttgacacacttaggcaaatgataattgacaaatttcacttgagccaacttgcaagcaaaatggaaggaagaataattccatctattattaagacactgaatgaacagagcaagaatctaaaagattacaatgtggtaaggagtaattgcgatgatttagctgaagtttctatggtgtccaacaagggagtggtatggaggcatgcagtgaacctgaaggctcatacatgcttcaaattgatgaggccaaagttgaggagaaagcctggaaggcctaggacacataggattaaagcttcagatgagcctggctgtagaaagaagaggacatgccctgaatgtggtgacaaaggccactttgcaaagacatgtaagcaaagcagagcagcttgatcccgaggtcaggtcccggcaatatttgctaaacaaggaaatggtggattgcacccctttgttagtgattatt

SEQ ID NO: 14694 - DNA, 3525 bp, Oryza sativa
  Clone ID: TFbOSC409246j.C1.o6.fg
atggtgaagacaaggaatgatccccgtgactccaatgacgccagtggcagcgaagagcagatcgatggagctcataccagtggtgcatctagcaacattccatctccactgcccgagaacccaacggtcactcagatgatgacaatgatgatgcaacagatgcagcaacattaccatcaaatgttgcagcaggcgcaacagaaccaacagtttggtcccccaccatcccacttgtccaaactgttagactttctccgcatcaagccacccactttctcaagcaccaccaatccaatggaggccaacgactggctccgtgctattgagaagaagctgaaccttctgcaatgcaacgaccaggagaaggttgcttttgctacacatcagttgcaaggtcccgcttctacctggtgggacaactatgtggtaacccgtccagatgcaacggaagttacttgggcagagttttgtcaaagcttcaggaaggcacaaattcccgaggggattatggcacaaaggaagagagagttccgtgcactccaacaaggaaccatgtcagttacagaatacctgcatgagttcaaccgccttgcgcgctacgctcctgaggacgtgcgcaccgatgctgagaagcaggagaagtttttgtttggtcttgatgatgagttgaccaaccagctaatctcgggagtctatgaggactttgagaagcttgtggacaaggctatctgccaggaagagcaacacaacaaaatggaccgtaaaagaaaggcaactcaattcagggctcctcaggggaacaatcagaagcctcgcttcatgacgggacaacaagctcagttagatttaccagctgtgttagctcagtcagaacagctcaagaaggagtctgcaggaaagccaggaccctgcttcagctgtggcaagcacggccactttgctggcaagtgtccgaagctgaagcgcgctggacctaggttcatccaggcccgcgtcaatcatgcgtctgcagaggaggcacaggcagcaccagaggtcgtgctgggcacgtttccagtgaactcatatctggcaacagtactttttgattcgggtgcctcgcattctttcatttccaagagatttgctgggacacatggattatcagtagtggaacttaaaataccgatgcgggttcatacccctggaaataacatgaagacagcacactattgtccctcagtgactatagagatcaagagatcacagtttctatccaacctcatccttcttgaatccaaagacctagacgtcattctcggaatggattggttgaccaggcacaagggagtgattgactgcgcaagtcgcaccatcaccctcaccaacgacaaaggggagaagatcaccttccgttctccagtgtcgcagaagtccgtagtaagtctgaatcaggctgctattgaggatcagacagaaatagtgaagaaaagtctaaaggaattggaggatattcctaaagtacaagagtatcctaaggtgtttcctgaagacctcactacaatgccaccaaagagagaaatcgagttccggattgatttggcacccggaaccgctccaatttacaagaggccgtacagaatggcaactaatgagctagcagaggtcaagaagcaagttgatgaacagctgcagaaaggatacatccgaccgagtacttcaccttggggtgctccggtcatctttgtggagaagaaagacaagactaagaggatgtgcgttgattatcgcgccctcaatgaggtcactatcaagaacaagtatcccttgccaaggattgatgacctgtttgatcagttaaagggagctaaagtgttttccaagatagatctgcgatcaagctatcaccagttgagaattcaggaagaggatcttcccaagacagccttcaccactcggtatgggttgtttgagtgcacggttatgtcattcggactcaccaatgcaccggccttcttcatgaacttgatgaacaaagtgtttatggagtttcttgacaagtttgtcgtggtgttcattgacgacatacttatctattcaaagtctgaagaacaacatgagcaacatctttgtctggtactcgagaaattgaaggagcaccagttatatgccaagtttagcaagtgtgacttctggttgtcggaagtcaagtttcttggtcacgtcattactgctcaaggtgtggcagtggatccatcgaatgtggagtcagttaccaagtggaccccacctaagacaatttctcagatccggagttttcttggacttgcgggttattaccgtcagttcattgaaaacttctctaagattgccagacccatgactcagttgcttaagaaagatgaaaagttcaagtggtcagctgagtgcaaccaaagttttgaagaacttaagaagaagctagtatctgcacccgttctaattctgcccgaccagatgaaagacttccaggtctattgtgatgcatctcgccaagggctgggatgtgtactgatgcaggaaggcagagtggtcgcatatgcttcgcgacagttgcgtccacacgagaccaattaccctactcatgatcttgagttggcagcagtggttcacgctctgaaaatctggcggcactatcttattggcaaccgctgtgaagtctacactgatcacaagagcctgaagtatatcttcacccagcctgacttgaatctccgacagcgaaggtggctggagttgataaaagattatgacatggggatacattatcatccaggcaaagcaaatgtggtggcagacgctctgagcagaaagagctattgcaatttagtatgtactgaaggcatatgtgacaaattgcagcaagatcttgagcacctaaatttgggcatcgtggaacacgggtacgtagctaccctagagtcacggcctacactcgtggatcaagtcagagcagctcaggagaaagttaggaccgtcagggaaagactgcgaatcgcccagtctcggcagaagagttatgctgataactgccgaagggagctcactttcgaagcaggagattatgtgtaccttcgtgtcactccgctccggggagtacaccgcttccagacgaaaggcaagttggcaccacgttttgtgggaccatacagaatcttggaacgcagaggtgaagttgcataccagcttgagcttctatccaatatggctggtattcatgatgtgtttcacgtgtctcaactgaagaagtgtttgagggtacctgaggaacaagctagctcaaagcacatcgacattcaagaggatctgacatatgtggagaagccgatttgtatcctcgaaaccagtgagagaaggaccagaaacaaggtgatcaggttttgcaaagttcagtggagccatcactctgacgaagaagcaacatgggaaagggaagatgagttgaaggccgcccatccgcacctctttgccggctcttccgaatctcggggtcgagattccgtttaa

SEQ ID NO: 14695 - DNA, 2008 bp, Oryza sativa
  Clone ID: TFbOSC414373j.C1.o37.np
tcctccgtttcttgtcttctccagcgcgagcaacacagagagggggagagacagggtgccgccgtttcggtcgccgacggccggaacgctagctcggaggatgacgctactatcatgcacctggcacgcatggtggaggcgtacgacacgggccgcatcaacttccatcatatggtgcgccgtgggttggtcgaggacaacatgaagatcctggagctacgttaggagaatttgcagctgaaggacttggacgccgtggaggcgcagctgtgtcagctcaagattgctcagggggagatctgtcgccccaagcgccgccgcgtttgccgcagccagaagatcaccgcccgcaagagtacctctaggcctgagcttgttcgtcagttcttggcgtggacctgcttcgtggagactccttgcgtcgagcccgcgcccttggttccttaggaggagggagcctctggcgttggcagcacggaggatgtgttgttgctcaccttccgccctggcccgtcgcagaagagaagcgctgctaccggtgagggcagtcaccccgaaggcagcaaccacaacaaccatggcagcccacctccacctccccctccgccaccaccaccgccacccgataccaaccccatcctcacccaaatcctcgctcagcaggccaacatgatggctgctttcctccaccacatccagactccgccgcaacacaatgctccaccaccaccaccaccacccccacagcactccaagcttgccgagttcctccacatccgcccgcctaccttctctagctccaataaccccgttgatgccttggactggttgcatgccgttgggaaaaagttggacaccgtccagtgcaatgatgaggaaaaagttatcttcgcaacccatcagctgcaagggcccgcatcactatggtgggaccacttccaggctatgcagccagaaggacagccaatcacctgggcccgcttcaccgccgctttccaaaggacccatgtgccagctggagtcatggcccttaagaagagggaatttcgggagttgaagcaaggcaaccgctctgttatggagtatttgcatgagttcaataacctggcctggtacgccctggaggatgttcgtgaagatgaagaaaagcaggagaagtttctagtaggaatggaccctgaactttctgtgcgtctggtctccggggattaccctgatttccagctcgtagtggacaagagcatccgcctggaggccaagcacaaggaactggagtcacacaaacgtcgcttggcgaatttccgtaatcaacagggggctaaccaaaggatccgctacaccaatccctatccagggggatcctcctcacaacaacagcagcaacaacctcgcccagtgccatgacctcaatttgtggtacgcgttccacagccgcagcaacagcagaatcagcaagggaaccgtgcaccccgtccccctgcaccggccgtgcagcctagtcatggacgcagggatgttcaaggtcagccgcgtttgtgcttcaactgtttagagcctgggcacttcgcggataaattcccaaagccgaggcgttaggaaggccaagcgcctccccgccccaacaatggtggaaaggatgccactcggggtcgtgtgaaccatgttactgcagaggatgtgcagacaactccagatgtcatcatcggtacgttcttcattcattccatccccgctaccattttgtttgactctggagcttcccactcgtttatatctgtgcaattcgtggggagaaatcagctggggttagaaaggcttaggaactcactgctcatcaccacccctggaggagctatgacagcaaagtattatagcccggccgtacctatagagatccagggaattccttttccctcggatctgatccttatagacaccaaggatttggatgtgatcctcgggatgaattgttgacccaattccgaggagtagtggattgagcaaggcg

SEQ ID NO: 14696 - DNA, 1086 bp, Oryza sativa
  Clone ID: TFbOSC423123j.C1.o13.fg
atggcgccgacaggtatgaaatttgatttggtgaagtttgacggctctggaaattttggcttgtggcaaactagggtcaaagatttgttagctcaacaaggtgcttcaaaggctttgaagggtgtcaaaccggccaagatggaggatgacgattgggaggagatgcagttgcaggtggctgcgacaataaggctatgtctttcagatcagaagttgtatgggctaaagatgcaggaaggggtggatctgacagcacatgtgaacgttttcaatcaactagtcacagatcttgtgaagatggatgtggaagttgacgatgaagacaaggccatagttcttttgtgttcgttacctgaatcgtatgagcatgtgatgagaaagaacaaagagggtgaaacatctcaagcggagggtttgctagtcaaagaagatcatgctgggcataaggtaaagaagaacaaaaagaagaaggtggtgcagtgcttcagatgtgatgagtgggggcatataagcaagaagtgcccaatactgaagggaaaagctaaggctaatgcagcgacttcttcaaatgactcagatagcgatggttgtgatcttctcaaaatgtcaagtgcacagtctaaggatgcagaagcgtggatattagattcagctagctcgtttcacgtgacgccaaggaaggagtggttcttttcatacaagtctagtgagtttggttttgtctacttaggcgatgacacaagttatccagccgtgggagtaggtgaagtcaaaatcaagctagaagatggaggtgaacatgttcttcagggtgtcaggcatgtaccagggctaaagaggaatctgatttcgcttggaaccttgcatgaagaagggttaatatttcgcggtaatcggaataagaagaccatggagatcatgaagggcaagacgactgtgatgactggagagaaggtggagtcgcaactttacaagctgcgagggtgcactattgcaggtggagtccaggaggaagcggttgctgggatagcaattgcttttggtggcggcgggtctggcgcagactcgtcgggcggcttgcggtga

SEQ ID NO: 14697 - DNA, 5076 bp, Oryza sativa
  Clone ID: TFbOSC18587j.C1.o4.fg
atggcagattacaccactcgtgggcatgagataaagttagatgagacacaaaccatagttgctacatcatcttccataagtgcagataataaagcgaagcaaaaacagtgccacaatttatttctagcaaggttcatggttaagcatagatcatgtcgtgttatattcgatagtggtggaagttgcaacaaccttgtgagttcagatttagttgagaaccttgggttgcctataaaaccgcatcctcatcgatattacatccaattgttcaattcttttcataagaatgaaggtaatgataatggtgctagatttactcaagataagttcaataggttcaatgacaaggtgaaaccgaagacggtttccaatcaagaaggtgaagatgatgaggacacaactagctcagatatgactatgcctatcttatgtattaatcaacaaaaggaattagccttttcgatggccggcagcatcaaccgtcgtggtctggacctgactggcttcgttttggagctgcggggcatgtgcgttgtcttggggtatccgcatggagtggactaccagggcaagcaactcccggagcaggagggtgatgatgcagagccccacgctacttgggaggtcactgcagtgatcctcactggctcacccgagaggacttcgttggcagtcaccaacgccgctctcctcgccattggcactctgcaccagcgctacctagacgagttgcagcactcgccctaccgctaccaccctcgtcgcggaggagcccgcgactacgccaccttccgggatgctagctcggaggatgacgccaccatcatgcacctggcgcgcatggtggaggcttacgacgcggctcgtatcgacttccatcatatggtgcgtcgtgggttggtcgagaacaacatgaagatcctggagctgcgtcaggagaatctgcagctgaagaaggacctagacgcagtggaggcgcagctgtgtcagctcaagatcgcccagggagaggtttgtcgccccaagcgccgtcgcgtctgccgcagcctgaagatcaccgcccgcaagagtacctccaggcccgaacttgttcgtcagtccctggcgtggacctgcttcgtcgagacccctcgtgccgagcccgcgcctgtggttcctcaggaggagggagcctccggcgttggcagcacggaggatgcgctgctgctcaccttccgccctggcccgtcgcagaaagtcgtgtggggcatggttataccgatggtgacaaccaggagaagtgctactaccggtgatggcaaccaacccgaaggtagcaaccacaacaaccatggcagcccacctccgcctcctcccccgcctccaccaccaccaccagacaccaactccatcctcacccaaatcctcgcccagcaggccaacatgatggctgctttcctccaccacatccaaaatccgccacagcataatgctccacctccaccaccacccccgcaacactctaaactcgccgagttcctccgcatccgtccgcctaccttctctagctccaataaccccgtggatgctttggattggttgcatgccgtggggaaaaagttagacaccgtgcagtgcaacgatgaggagaaagtcatctttgccgctcaccaactgcaggggcccgcatctctatggcgggaccacttccaggctacgcagccagaaggacagcctattacttgggcccgcttcaccgccgctttccggaggacccatgtgcccgccggagtcatggcccttaagaaaagggaattccaagagttgaagcaaggcaaccgctctgtgatggagtatttgcatgagtttaacaacctggcccggtacgccccggaggatgttcgtgaagatgaggagaagcaagagaagttcttggcagggatggaccctgagctgtccgtgcgtctggtctccggggattatccggatttccagcgtttggtggacaagagcatccgcttggaagccaagcacaagaaactggagtcgcacaagcatcgcttggcaaatttctgcaaccaacagggggctaaccaaagagtccgctacaccaatccctatccagggggatcctcctcgcagcagcaacagcagcagcaacctcactccgcgccccgagctcaattcgtggtgcgcgttccacagctgcagcagcagcagagtcagcaagggacccgtgcgccccgtcctcctacgccagccgtgcagcctggacaaggccgcagagacgttcaaggtcagcagcgtctgtgtttcaactgcttcaagcccaggcactttgcggataaatgcccaaagccgaggcgccagcaaggccaagcgcctccccgccccaacaacggtggtaaggatgtcattcggggtcgtgtgaaccacgtgactgccgaggatgtgctgacaactccagacgtcatcgttggtacgttcctcattcattccatccctgctaccattttgttcgactctggagcttcccactcgtttatatctgtgccattcgtggggagaaatcagttgggggtagaaaggcttaggaaccctctactcatcaccacccctggaggggttatgacagcaaaacacgaagaacttggatgtgatccttgggatgaattggttggctcaattccaaggagtagtggattgcgcaaacgcactgtcactctgtaccgagggccggaacaaccggtagttttctttgcacccccaacctctgtcggcagttcggaacttcatcagataggactgtcggaaacccccatcgtcagtgagttcggagatgtgtttccggaagaactacccggtatgccgcccaagcgagagattgagttccggatagatcttgctccaggaacaactcctctgtacaagcaaccctaccgtatggcagcaaatgaactggccgaagtcaagaaacagttggaagagttgaaagaaaaggggtatatacggccgagcacttccccctggggtgctcccgtgatttttgtggaaaagaaggacaagacaaagaggatgtgtgttgactacagagctctcaatgaagttactatcaaaaacaagtaccctcttccccggaccgatgatctgttcgatcagcttaaaggtgccactgtcttttcaaaaatcgatcttcgctccggatatcaccaattgcgtattcgtgaagaagatatcccgaagaccgcgttcaccacgcgatatgggctgtatgaattcacggtgatgtcgttcggtctaactaatgctcctgccttcttcatgaacttaatgaataaagtgttcatggaatacttggataagtttgttgtggtcttcatcgacgacatcctggtgtactcgcaatcagaggaagaccatcagcaacatctccgtcgggtgttgggaaagttgcgggaacatcaattgtatgccaagcttagcaagtgtgagttctggttgtccgaagtcaaattcttagggcatgtgatatctgctaaaggagttgctgtggaccccaaaacagtgaccgccgtcactgattggaagcaacccaagacagtcactcaaattcacagctttttgggtttggccgggtactaccgaaaattcatcgagaatttctccaaaattgccagacccatgacgcagttgctgaagaaggaagaaaaatttgtgtggagcccgcaatgcgagaaagcgttccaaactctcaaagaaaagctggtttcctcgccagtgttaatcttaccggatactcgcaaggacttcctggtgtactgtgacgcttcgcgccaaggattggggtgcgtgctcatgcaggaaggtcatgtggtagcctatgcctcccggcagcttcgtcctcatgaaggcaactaccctacccatgatttggagttagccgctgtgaggagatggttagaactcatcaaggattatgatgtgggaatttactatcatcctggtaaggccaacgtggtcgccgacgctctaagtcgaaaaagccgttgcaacactcttggcgtccatgacattccaccggaacttaatcaacagatggaagccctgaatctaagcatagttagtcgtggatccttggctatgctggaagccaagcctaccttgctcgatcaaatccgcgaggctcagaagaatgatccagatatgcatgggatcctcaagaatatgaaacaagagttcgtggccctttgtgatgtgtgccagcgtgtcaaggcagagcaccaacgaccggccggacttctccaacctctccaagtaccagaatggaaatgggatgaaattgggatggatttcatcaccggacttccaaaaacccagggcggatatgattctatatgggtagtcatggatcgactaaccaaggtagcccggtttattcctgtgaagaccacctatggagggaacaaactagctgaactctacttcgctaggatcgtgagtctccatggcgttcctaagaaaattgtatctgataggggaagccaattcacctctcacttctggaagaagctccaagaagagttgggtacccgattaaatttcagcactgcgtatcacctgcagacagatgggcagaccgagcgtctgaaccagatcctcgaagatatgctgcgcgcatgcgttctagatttcgggaagacctgggataagagtctcccctatgccgagttctcctacaataacagctaccaagccagcctacaaatggcaccctacgaagcgttgtatggacgcaaatgtcggacaccgctattgtgggaccaagttggggaaagccaagtgttcaggactgatatcctgagagaagctgaagcgaaagtcagaaccattcgggagaatctaaaggtggcccagtctcggcagaagagttatgcagacaaccgatgccgtgacctggaattcgcagtggatgactttgtgtaccttcgggtcatgccattgcggggcgtacacaggtttcaaacgaaaggaaagctcgcacctcggttcatgggtcctttccgtatcattgctcaacgcggagaagtcgcttactag

SEQ ID NO: 14698 - DNA, 1618 bp, Oryza sativa
  Clone ID: TFbOSC401453j.C1.o7.np
atggccaagaagaccctttgcgaattcgctgccccatctgctgacaacgtgcctgttggcccgctgtcaacattggagacaccgatttcgaccttaagagcagcctgataactatggcgcaggcaagcccgttctttggcaagccgaatgaggacgcaagcgttcatctgcagcaattcctagagatctgcaccacttacacggtaaaaggtgtcagtctggacgccgagaggctatgtttgtttcctttctcactcttgggaaaggcaaagcagtggttctacgtaaaccgaatgatagttaacactcgggacagatgctccactgcgttcctctccaaattcttcccgatggaagcatgggaatgtctgcaggagtatgtagctgcctgccctaatcatgggatggatgactggctcatcctgcagagtttctacaatagactcactccatcgtcgatggatcaccaggatgctgctactggggttgccttcttctcaaagatagtccgtgcggcaattgatattattgagaagatggtatccaacatgggctggagtgaagaacgactccagaccagtcatcgtggcatgcacaccgtcaaggagacggagatgcttgctgctaaactggatgtcctaatgaagagacgggacgatcaggagaaatccaagccgcaggacactgtcaaggcattggactcgcacatcacatgcgaggtctgtggaaacactggtcactcaggaaatgattgccccgaaacccatgaggaagccatgttcatggggaacaatggctaccggcaacaaggaggccaggggtggaaccagctccggccattctaccaaggaggcaacaacagcaacaataacggtaatttcgaccagccctccttaaaggacttagtttttacgcaagctaaaacaactgttgctgtaaaaaaaagctttccattaatgataaagtagccgctttagtacctactaaggagacgggaaggattctgaggcagcccgaatcaccacgaggggacgaaaatccactcgggatccgccatatcctaacactgcagggaccaggcaagctggcgaggaggaatggggcatagcagaacccaaggaagatgaggaggcgcagctcgacaagatcccgccgcaggaatactatgactcaacgctgctgccgttccctccatgccagaagaagccttccgtggactagcaattcgctcggttcatggatgtcatccagaagatccacatcaacatcctgttggtggatgcaatgcgggtaccaatatacgcccgctatctcaaagacatcctgaacaacaagaggccactgcctaccatggagatggtcaagcttacggaggagtgtagcaatgctatactccactgactcccggaaaagaagaaaaatccagggtgtcccacgatatcatgctcaattgggacattgcatttcaaccaagccttatgcgatcttggggccagtgtcagcgtgatgcggaaggacgtctttgacaagctgaactatacgatattgatcccaacaccgatgaggctccaactagctgatttctctatctgctaccaagcaatcttggggggagatg

SEQ ID NO: 14699 - DNA, 5415 bp, Oryza sativa
  Clone ID: TFbOSC407182j.C1.o1.fg
atggatgaagtcgggggtcgatggacattctccagggcaaatgaaggctacacgagctgcggcccgatggccggcagcgttacccgtcgtggtttgggcatgactggcttcgtcttggagctgcgaggcatgtgcgtggtcttggggtatccacatggagtggattaccaggccaggccgctcccggagcaggagggtgaggatgcagagcctcacgctggttgggaggtcactgcagtgatcctctccggctctcccgagcggacttcgctggcagtcaccgcgggtggagactccttccccgccgcttgccagaacgccgctctcctcgccatcggcacccttcaccagcgctacccggacgagttgcagcactcgccctaccgctaccaccctcgtcgcggaggagcccgcgactacgccaccttccgagacgccagctcggaggatgacgccaccgtcgtgcatctggcacgcatggtggaggcgtacgacgcggctcgtatcgacttccaccagatggtgcgtcgtggcatggtggagaacaacatgaagatcctggagctgcgccaggagaacctgcagctcaagaaggacctcgacgcgttggaggcgcagctgcatcagctcaagatcgcccagggagaggacagccgtcccaagcgtcgccgcgtctgccgcagccagaagatcaccgcccgcaagagcacctccaggcccgagcttgttcgtcagtccctggcgtggacctgcttcgtcgagacccctcgtgccgagcctgcgcccgtggttccccaggagggggaagcctccggcgttggtagctcggagggtgcgctgttgctcaccttccgtcctggcccgtcgcagcgctctccttctctgtttgctggttctgtgtggggttttcagatggtgacgaccaggagaaatgttaacaccggtgaaggcaaccaacccgagggcagcaaccccaacccccaaggcaatccacctccaccaccaccaccagacaccaacgccattctcacccaaatcctcgcccagcaagccaacatgatgaatgctttcctccaccacctccaaaatccaccacaacagaatgctccaccaccacctccccaacactccaaactcgccgagttcctccgcatccgcccacctaccttctctagctccaacaatcccgtagatgcgttggattggttgcatgccgtggggaagaagctagacactgtgcagtgcagtgatgaagagaaagtcatcttcgccgcccaccagctgcaggggcccgcatctctatggtgggaccatttccaggccacgcagcccgaggggcagccgattacttgggctcgcttcaccgccgctttccggagaacccatgtgcccgccggagtcgtggctctcaagaaaagggaattccgggagttgaagcaaggcaaccgctccgtgatggagtatttgcatgagttcaacaatctagcccgttacgctccggaggatgtgcgggaagatgaggagaagcaagagaagttcttggcaggaatggaccctgagctgtccgttcgtctagtctctggggactatcctgattttcaacgactggtggacaagagcatccgcttggaagccaagcacaaggagctggagtcgcacaagcgccgcttggcgaacttccgcaatcagcagggtgctaaccagagggtccgctacactaatccctacccagggggatcctcctcgcagcagcaacaacagcagcagccacctcgcccagcgccccgacctcaattcgtggtgcgcgtcccacagccgcagcagcagcagaatcagcaagggactcgtgcgccccgtcctcctacgccagctgtgcagcccgttcaaggccgcagggacgcttcaggtccgcagcggctgtgcttcaactgcttcgagcccgggcactttacggataaatgcccgaagccaaggcgtcagcaaggccaagcgcctccccgctccaacaacggcgggaaggatgtcattcggggtcgtgtgaatcacgtgacggccgaggacgtgctgacaactccagacgtcatcgttggtacgttcctcgttcattccatccccgctactattttgttcgactctggagcttcccactcgtttatatctgtgccattcgtggggagaaatcagttgggggtagaaaggcttagaaaccctctgctcatcaccacccctggaggggttatgacagcaaagtactatagccctgccgtccctatagaaattcaggggattccttttccctcggacctgattcttctagacacaaagaacttggatgtgatccttgggatgaattggctggcacaattccaaggagtagtggattgcgcgaggcgcactgtcactctgtaccgaggaccagaacaaccggttgttttctttgcacctccaacctctgtcagaagttcagaactgcatcagataggtctgtcagaaatccccatcgtcagagagttcggagacgtgtttccggaagaactacctggtatgccgcccaagcgagagattgagttccggatagatcttgctccaggaaccactcctctgtacaagcgaccctaccgtatggcagcaaatgaactggccgaagtaaagaaacaattggaagagttgaaagaaaaggggtacatacgtccgagtacttccccatggggtgctcctgtgatttttgtagagaagaaagacaagacgaagaggatgtgcgttgactacagagctcttaatgaagtcaccatcaaaaacaagtaccctcttccccggatcgatgatctgttcgaccagcttaaaggtgccactgtattctccaaggttgatcttcgttccggatatcaccaattacgtattcgtgaagaagatatcccgaagaccgcattcactacgcgatatggactgtatgaattcacggtgatgtcgttcggcttaaccaatgctcctgccttcttcatgaacttgatgaacaaagtgttcatggaatacttggacaagtttgttgtggttttcattgatgacattctgatatactcacaatcagaggaagaccatcagcaccatctccgtctggtgttgggaaagttgcgggaacatcaattgtatgccaagcttagcaagtgtgagttctggttgtccgaagtcaaattcttggggcacgtgatatctgctaaaggagttgctgtggaccccgaaacagtgaccgccgtcaccgattggaagcaacccaagacagttactcaagtccgcagtttcttaggtttggcaggatactaccggagattcatcgagaacttctccaaaatcgctcgacccatgacacagttgttgaagaaagaagagaagtttgtgtggagcccgcaatgcgagaaggcgttccaaactctcaaagaaaagctggtttcctcgccagtgttaatcttgccggatactcgcaaggatttcatggtgtattgtgatgcttcgcgccaaggattggggtgcgtgctcatgcaggacggtcatgtggtagcctatgcctcacgccagctacgtcctcatgaaggcaactaccctacgcatgacttggagttagcagcggtggttcatgctctaaaaatctggcggcactatctcattgggaaccgctgtgaaatatataccgaccataagagtttgaaatacatcttcacccagtcggatctgaatcttcggcaaagtagatggttagaacttatcaaagactatgatgtgggaattcactatcatcctggtaaggccaacgtggttgccgacgctctaagtcgaaagagccactgcaacactctcaacgtccgaggcattccacccgagcttaaccaacagatggaagccctgaacctaaacatagttggtcgtggattcttggccgcgttggaagccaagcccaccttgctcgatcaaatccgcgaggctcagaagaatgatccggacatgcatggactcctcaagaatatgaaacagggtaaagccgctggtttcacagaggatgaacacggaaccttatggaacggaaagcgggtgtgcgttcccgataacagagaacttaaacagctgatacttcaggaagctcacgaaagtccttattccattcacccgggcagtaccaagatgtacttagacttgaaggagaaatactggtgggtcagcatgaagcgggaaattgcagagtttgtggctctatgtgatgtgtgccagcgtgtcaaggcagaacaccaacgaccggccggacttctccaacctctccaagtaccggaatggaaatgggatgaaattgggatggatttcatcaccggccttccaaaaacccaaggtggatatgattctatatgggtaatagtggatcgattaaccaaggtagctcgattcattcctgtgaagaccacctatggagggaacaaactagcggagctctacatcgctaggatcgtgagtctccatggtattcccaagaaaatcgtatctgataggggaagccaattcacctctcacttttggaagaagctccaagaagagctgggtactcgattgaatttcagcaccgcctatcacccgcagacagatggacagaccgagcgtctaaatcagatcctagaagatatgcttcgcgcatgtgtcctagatttcgggaagacctgggataagagtctcccctatgccgagttctcctacaataacagctatcaagccagcatacaaatggcaccatatgaagcgttgtacgggcgcaaatgccggacaccgctattgtgggaccaagttggggaaagccaagtgttcgggactgatatcctgagagaagctgaagctaaagtcagaatcattcgggataacttaaaggtggcacagtcccggcagaaaagttatgccgataaccgacgccgtgatctggaattcgcagtggatgattttgtgtaccttcgggtcacgccattgcgaggtgtacacaggtttcagaaaaaagggaagctcgcacctcggtatgtgggtcccttccgtatcatcgctcgacgcggagaagtcgcctaccagctggagttgcccgcctcctggggtaacgtgcatgatgtgttccatgtgtcgcaactcaagaaatgtctccgagtgccatccgagcaggccaactcagagcaaattgaagttcgcgaagatttgacgtatgtggagaagccagtgaaaatcctggacaccatggagcgcaggaccaggaaccgggtaatccgtttttgcaaggtccagtggagcaaccacgccgaagaagaagctacttgggagcgcgaagacgaactgaaggcagcccatcccgatctcttcgccagttcttccgaatctcggggtcgagattccgtttaa

SEQ ID NO: 14700 - DNA, 4565 bp, Oryza sativa
  Clone ID: TFbOSC900010j.C1.o10.np
atgaacgaagtcggggctcgatggacatctctaggacaaatgaatgctacacgagccgcggcccggtagtcgagatgtcatggcacagggctggtgtcctgctgctaggggctcaaccttggttacctgtctcgggaatcctggccgtagccagggttgggtcgatgtacacctctgatcagagtaaatctattcgaatagctgtgccctcggttatgggcaagcctagcaatgtacccaaatggccgacaacctcaaccgtcgtggtctggatctgactggattcgctttggaactgtggggcatgtgcgttgtcctgggatattcgcatggagtggactaccaaggcaagaagcttccggagcaggatgatgacgatgcagagcccggtgccgcttgggaggtcactacggtgatcctcaccggctctcccgagaggacttcgctggcagtcactgcgggtggagactccttccctgccgcttgccagaacgccgcgctcctcgccaccggcactcttcaccagcgctatccagacggacgagttgcagcactcgccctaccgctaccaccctcgtcgtggaggagcccgtgactacgccgccttcagggatgctagctcggaggatgacgctaccatcatgcatctggcgctcatggtggaggcgtacgacacagcccatatcgacttccatcatatggtgcgccgtgggttggtcgagaagaacatgaaggtcctggagctgcgtcaggagaatttgtagctgaagaaggacttggacgccgtggaagcgcagctatgttagctcaagattgctcaaggacaggtctgccaccccaagcgccgccgtgtctgccgcagtcagaagatcaccgcccgcaagagtacctccaggcctgagcttgttcgttagtccttggcgtggacctgcttcgtggagactccttgcgccgagcccgcgcccttggttcctcaggaggagggagcctctggcgttggcagcacagaggatgtgctgttgctcaccttctgccccggcccgtcgtagaagtagacgagcagctagtaggcccgcgcatggtgacaaccaggaaaagcgctgctaccggtgagggcagtcaccccgaaggcagcaaccacaacaaccatggcagcccacctccatctccacctccccctccgccaccaccaccgccaccttacacaaaccccatcctcacccaaatcctcgcccagcaggccaacatgatggctgctttcctccaccacatccagaatccgccgcaacccaatgcgccaccaccaccaccacccccacagcactccaagcttgccgagttccaccgcatccgcccgcctaccttctctagctccaacaaccccgtggatgccttggactggttgcacgccgttgggaaaaagttggacaccgtccagtgcaatgttgaggagaaagtcatcttcgcaacccatcagctgcaggggcccgcatcgctatggtgggaccacttccaggctacgtagccagaaggacagccaatcacctgggcccgcttcaccgccgctttccggaggacccacgtgccagctggagtcatggcccttaagaagagggaatttcaggagttgaagcaaggcaaccgctctgttatggagtatttgcatgagttcaataacctggcccggtacgccccggaggatgttcatgaagatgaagaaaagcagaagaagtttctggcaggaatggaccttgaactttctgtgcgtctggtctccggggattaccctgatttccagcgcctggtggacaagagcatccgcctggaggccaagcacaaggaactggagtcacacaaacgtcgcttggcgaatttccgtaatcaatagggggctaaccaaaggatccgctacaccaatccctatccagggggatcctcctcacagcagcagcagcagcagcagcctcgccccgcgccatgacctcaatttgtggtacgcgtcccacagccacagcagcagcagaatcagcaagggaaccgtgcaccccgttcccctgcaccggccgtgcagcctagtcaaggacgcagggatgttcaaggtcagccgcgtctgtgcttcaactgtttcgagcctgggcacttcacggataaatgcccgaagccgaggcgtcagcaaggccaagcgcctccccaccccaacaatggtggaaaggatgcaactcggggtcgtgtgaaccacgttactacagaggatgtgctgacaactccagatgtcatcatcggtacgttcttcattcattccatccccgctaccattttgtttgactctggagcttcccactcatttatatctgtgcaattcaaggggagaaatcagctgggggtagcaaagcttaggagctctctgctcttcaccacccctagaggggctatgcagcaaagtattatagtccggccgtacctatagagaactagggaattcctttcccctcgaatctgatccttcttgacaccaaggacttggatgtgatcctcgggatgaattggttgacctaattctaaggagtagtggattgtgcaaggcgtactgtcactatgtaccggaagcctgatctacgggttgtcttctttgcgcacccaactcccaccggctcaatacttcgtcagctaggactgtcagaaatactcgtcgccaacgagttcggtgatgtgtttccagaagagctacccggtatgccgccaagcgggagattgagttcaggatagatcttgctctaggaaccactcccatgtacaagcgaccctaccgtatggcagcaaatgaattggcagaagtcaagaagcagttggaagagttgaaagagaaggggtatatacggccgagcacttccccctggggtgctcccgtgatttttgtagaaaagaaagacatgacaaataggatgtgcgttgactaccgagctcttaatgaagtcactatcaaaaacaagtaccctcttccccggatcgatgatctgttcgatcagcttaaaggtgccactgtcttttccaagattgatcttcgtttcggatatcaccagttgcgtatccgtgaagaagatatccctaagaccgcattcaccacgcggtacgggctgtatgaattcacggtgatgtcattcggtctgaccaacgctcctgccttcttcatgaatttaatgaacaaggtgttcatggaatacttggataagttcgttgtggtctttattgatgacatactggtgtactcacagtcagaggaagaacatcagcagcatctccgtctggtgttaggaaagctccgggaacatcagttgtatggcaagctcagtaagtgtgaattctggttgtccgaagtcaagttcttagggcatgtgatatctgctaaaggagttgctgtggatcttgaaatagtaacagccgtcatcggttgacagcaacccaagacggtcacccaggtccgtagtttcttgggtttggcagggtactatcggaggttcatcgagaatttgtccaaaattgccaggcccatgacgcagttgctgaagaaggaacaaaaatttgtgtggagtccgtagtgtgagagagcatttcaaactctcaaggaaaagttggtttcctcgccagtgttaatcttactggatactcgcaaggatttcctggtgtactgtgacgcttcgcgccaaggattggggtgtgtgttaatgcaagaaggtcatgtggtagcttatgcttcacgccagcgatgaccctatgaaggtaactatcctatccatgacttggagttggccgctgtggttcatgctctgaagatctggcggcattatctcattggaaatcgctacgaaatatacaccaatcataagagtttggaatatatcttcacccagtcggatctgaatcttcggaagagaagatggttagagctcatcaaagattatgatgtgggaatccactatcaccctgataaggccaacgtggtggccgacgcgctgagtcgaaaaggccattgcagtactctttgcgtccgtggcattccaccggaacttaatcaacagttggaagcaacctaagtgtcgttagccatggattcttggctgcactagaagcaaagcccaccttgcttgaccaaatacgcgaggctcagaagaatgatccggatatgcatgggatcctcaagaatatgaagcagggtaaagccgcaggcttcacggaagatgaacacggaaccttatggaacagaaatcgtgtatgcgttccgggcgacaaggaacttaaatagttgatactttaggaagctcatgaaagtccttattccatccacccaagcagtacgaagatgtacttagacttgaaagagaaatattggtgggttagtatgaagcgggaaatcgcagagttcgtggccctttgtgatgtgtgtcagcgtgttaaagcggagcagcaacgaccggccggacacctccaacctctaaaggtaccagaatggaaatgggatgaagtctcacttgatatactatttggaactcctttttaaacattatgtt

SEQ ID NO: 14701 - DNA, 6564 bp, Oryza sativa
  Clone ID: TFbOSC900197j.C1.o21.gm
atgggcaacaatagatccaaactgacagactttctgagttctcgtccgccagagttctctcagaccgtcgagcccgtcgaggctgacgattggctgaaagatgttgatagaaaactcaacttagtgcagtgtactcctgttgagaagacgctctacgcctctcaccagctaagaggacctgctgcagattggtgggagaattactgcaatgcacaccctgaacccactaacattgcttgggatgagtttgctacggctttccgtgcagctcatgtgcctgaaagcaccattgatatgaagaaagaagaattcaacagacttaagcaaggcaacaacagtgtcaatgagtacctaagtctgttcaacaagttggctcggtacgcccctgaggaagtggacacagacaagaagaagatcaggaaggaaattcttcccgaggcgcacctcgccctcgctatggagaagaaaggcaccgatttctccatagacgatcaaggcacagtttggtgcggtccacgcatctgtgtaccggccaagaaggagttaagagatctcatcctaaaggaagctcatgagtccgcctactccattcatccaggaagtacgaagatgtaccaggatatcaaggcatacttctggtgggctagaatgaagcgagatgtcgcagaatatgtagccctgtgtgacatttgccaaagagtcaaggcagagcatcagaggccagctggtctgctgcaacctctaccgattcccgagtggaaatgggaagagatcggaatagatttcatcactggtttgccaagaacccctagcggccgccgccgcgtccgtgccctagcgccgccgccgccgcggattgcgccgcatcccgccgtccccgcgcgcattaaagagaggggaatcactccccgtgattccctctcccgtttcccccgttttcccctctctctctccctcggattcgtccggattcgtcccgcgaagttcgccggcgtcttcaatggcgcccgagatctccgcgcgcggtttcctctctccccggccgctctttccttcccccggcgctataaaatcgttgcccgagctccgctcttccgtttccgccgctcgccgctcgctctcgccgtcgatttcgtgcccgcgccgtgctccgccctctccgccatcgccgccgagctccgttccgccgccgccgccgctccggacttcctccttactcggcgacacccccgtccgcttcgccgtgttgccgccgaccccgtccgccgctccgcttcgcccgtcgaccgccggagcaccgtcgtcatcgtcatcccgaaccgcgccgccgtcttcctccgctccgtccgccgtttccaccgccttcgccgtcttggggtgagccgtggaccgctccgttcgtttccccctttcctcctctctctcgggtgccactccgccgcgccgttggtcgccggcggcgaccatcggggcgcgggtgcgcgccgctcccgtcggccgcgccggcgaggccgccctcgggcgcgccctcgcggctgccaagtgggcccggccgtcagccgcccgcgcccgcgggtgcggctgacgcgcgggacccacggcgccgaccgccgccagccgcgtgcgcccggtccaccgtggaccgagcggctgacgcatgggccccacttcccgtggacccgggcaaatgaaggctacacgagctgcggcccgatggccggcagcgttacccgtcgtggtttgggcatgactggcttcgtcttggagctgcgaggcatgtgcgtggtcttggggtatccacatggagtggattaccaggccaggccgctcccggagcaggagggtgaggatgcagagcctcacgctggttgggaggtcactgcagtgatcctctccggctctcccgagcggacttcgctggcagtcaccgcgggtggagactccttccccgccgcttgccagaacgccgctctcctcgccatcggcacccttcaccagcgctacccggacgagttgcagcactcgccctaccgctaccaccctcgtcgcggaggagcccgcgactacgccaccttccgagacgccagctcggaggatgacgccaccgtcgtgcatctggcacgcatggtggaggcgtacgacgcggctcgtatcgacttccaccagatggtgcgtcgtggcatggtggagaacaacatgaagatcctggagctgcgccaggagaacctgcagctcaagaaggacctcgacgcgttggaggcgcagctgcatcagctcaagatcgcccagggagaggacagccgtcccaagcgtcgccgcgtctgccgcagccagaagatcaccgcccgcaagagcacctccaggcccgagcttgttcgtcagtccctggcgtggacctgcttcgtcgagacccctcgtgccgagcctgcgcccgtggttccccaggagggggaagcctccggcgttggtagctcggagggtgcgctgttgctcaccttccgtcctggcccgtcgcagcgctctccttctctgtttgctggttctgtgtggggttttcagatggtgacgaccaggagaaatgttaacaccggtgaaggcaaccaacccgagggcagcaaccccaacccccaaggcaatccacctccaccaccaccaccagacaccaacgccattctcacccaaatcctcgcccagcaagccaacatgatgaatgctttcctccaccacctccaaaatccaccacaacagaatgctccaccaccacctccccaacactccaaactcgccgagttcctccgcatccgcccacctaccttctctagctccaacaatcccgtagatgcgttggattggttgcatgccgtggggaagaagctagacactgtgcagtgcagtgatgaagagaaagtcatcttcgccgcccaccagctgcaggggcccgcatctctatggtgggaccatttccaggccacgcagcccgaggggcagccgattacttgggctcgcttcaccgccgctttccggagaacccatgtgcccgccggagtcgtggctctcaagaaaagggaattccgggagttgaagcaaggcaaccgctccgtgatggagtatttgcatgagttcaacaatctagcccgttacgctccggaggatgtgcgggaagatgaggagaagcaagagaagttcttggcaggaatggaccctgagctgtccgttcgtctagtctctggggactatcctgattttcaacgactggtggacaagagcatccgcttggaagccaagcacaaggagctggagtcgcacaagcgccgcttggcgaacttccgcaatcagcagggtgctaaccagagggtccgctacactaatccctacccagggggatcctcctcgcagcagcaacaacagcagcagccacctcgcccagcgccccgacctcaattcgtggtgcgcgtcccacagccgcagcagcagcagaatcagcaagggactcgtgcgccccgtcctcctacgccagctgtgcagcccgttcaaggccgcagggacgcttcaggtccgcagcggctgtgcttcaactgcttcgagcccgggcactttacggataaatgcccgaagccaaggcgtcagcaaggccaagcgcctccccgctccaacaacggcgggaaggatgtcattcggggtcgtgtgaatcacgtgacggccgaggacgtgctgacaactccagacgtcatcgttgaaatccccatcgtcagagagttcggagacgtgtttccggaagaactacctggtatgccgcccaagcgagagattgagttccggatagatcttgctccaggaaccactcctctgtacaagcgaccctaccgtatggcagcaaatgaactggccgaagtaaagaaacaattggaagagttgaaagaaaaggggtacatacgtccgagtacttccccatggggtgctcctgtgatttttgtagagaagaaagacaagacgaagaggatgtgcgttgactacagagctcttaatgaagtcaccatcaaaaacaagtaccctcttccccggatcgatgatctgttcgaccagcttaaaggtgccactgtattctccaaggttgatcttcgttccggatatcaccaattacgtattcgtgaagaagatatcccgaagaccgcattcactacgcgatatggactgtatgaattcacggtgatgtcgttcggcttaaccaatgctcctgccttcttcatgaacttgatgaacaaagtgttcatggaatacttggacaagtttgttgtggttttcattgatgacattctgatatactcacaatcagaggaagaccatcagcaccatctccgtctggtgttgggaaagttgcgggaacatcaattgtatgccaagcttagcaagtgtgagttctggttgtccgaagtcaaattcttggggcacgtgatatctgctaaaggagttgctgtggaccccgaaacagtgaccgccgtcaccgattggaagcaacccaagacagttactcaagtccgcagtttcttaggtttggcaggatactaccggagattcatcgagaacttctccaaaatcgctcgacccatgacacagttgttgaagaaagaagagaagtttgtgtggagcccgcaatgcgagaaggcgttccaaactctcaaagaaaagctggacggtcatgtggtagcctatgcctcacgccagctacgtcctcatgaaggcaactaccctacgcatgacttggagttagcagcggtggttcatgctctaaaaatctggcggcactatctcattgggaaccgctgtgaaatatataccgaccataagagtttgaaatacatcttcacccagtcggatctgaatcttcggcaaagtagatggttagaacttatcaaagactatgatgtgggaattcactatcatcctggtaaggccaacgtggttgccgacgctctaagtcgaaagagccactgcaacactctcaacgtccgaggcattccacccgagcttaaccaacagatggaagccctgaacctaaacatagttggtcgtggattcttggccgcgttggaagccaagcccaccttgctcgatcaaatccgcgaggctcagaagaatgatccggacatgcatggactcctcaagaatatgaaacagggtaaagccgctggtttcacagaggatgaacacggaaccttatggaacggaaagcgggtgtgcgttcccgataacagagaacttaaacagctgatacttcaggaagctcacgaaagtccttattccattcacccgggcagtaccaagatgtacttagacttgaaggagaaatactggtgggtcagcatgaagcgggaaattgcagagtttgtggctctatgtgatgtgtgccagcgtgtcaaggcagaacaccaacgaccggccggacttctccaacctctccaagtaccggaatggaaatgggatgaaattgggatggatttcatcaccggccttccaaaaacccaaggtggatatgattctatatgggtaatagtggatcgattaaccaaggtagctcgattcattcctgtgaagaccacctatggagggaacaaactagcggagctctacatcgctaggatcgtgagtctccatggtattcccaagaaaatcgtatctgataggggaagccaattcacctctcacttttggaagaagctccaagaagagctgggtactcgattgaatttcagcaccgcctatcacccgcagacagatggacagaccgagcgtctaaatcagatcctagaagatatgcttcgcgcatgtgtcctagatttcgggaagacctgggataagagtctcccctatgccgagttctcctacaataacagctatcaagccagcatacaaatggcaccatatgaagcgttgtacgggcgcaaatgccggacaccgctattgtgggaccaagttggggaaagccaagtgttcgggactgatatcctgagagaagctgaagctaaagtcagaatcattcgggataacttaaaggtggcacagtcccggcagaaaagttatgccgataaccgacgccgtgatctggaattcgcagtggatgattttgtgtaccttcgggtcacgccattgcgaggtgtacacaggtttcagaaaaaagggaagctcgcacctcggtatgtgggtcccttccgtatcatcgctcgacgcggagaagtcgcctaccagctggagttgcccgcctcctggggtaacgtgcatgatgtgttccatgtgtcgcaactcaagaaatgtctccgagtgccatccgagcaggccaactcagagcaaattgaagttcgcgaagatttgacgtatgtggagaagccagtgaaaatcctggacaccatggagcgcaggaccaggaaccgggtaatccgtttttgcaaggtccagtggagcaaccacgccgaagaagaagctacttgggagcgcgaagacgaactgaaggcagcccatcccgatctcttcgccagttcttccgaatctcggggtcgagattccgtttaa

SEQ ID NO: 14702 - DNA, 2456 bp, Oryza sativa
  Clone ID: TFbOSC29718j.C1.o2.gm
atggcaccagcacagccagctccatcagcccaagccaagaaggagactggagcaaaaccagggtcctcctacaactgtggcgagctcggccactttgctgacaagtgcccgaagccaaggcgtgccgggccaaggtttgcccaagctcgtgtcaaccacgcgtccgcagaagaggcgcaagcaacaccagaggtcgtactggacctggatatcattcttgggatggattggctgaccaagttcaagggtgtcattgattgtgcgaatcgcacagtcacctttaccaaggagaaaggggaaacagtggtgtacaagtcaccagtctcaccgaatcagggaatccccttgaatcagattgaggtggaaaatccggtgaaagggtacattcgaccgagtacttcaccttggggtgctccggccatttttgtggagaagaaggacaacacgaagagaatgtgtgtcgattatcgcgcactcaatgaggtcacaatcaagaacaaatatcctttgccatggattgatgatctgtttgatcagttgaaaggagccaaggagcatcagctttatgccaagttcagcaaatgcgacttttgggtatcagaggtcaaattcttgggtcacgtcattacagctcagggtgtggcagttgatccatcgaatgtggagaagagctactacaatgctttgtgcaccggcggcatgtgtaaagaattgcagcaggagcttgaacatctcaacttggggattgtagaacacgggtacgtggctgccctagaggcacggcctacgctcgtggatcaagtccgagcagctctggtaaatgatcctgaaatagcaaagctgaaaaacaatatgagggtcggaaaagcccgagatttacttgaagatgagcacggcacaatctggttgggagaaagattcgccgtcgccgcgttcgtcttctctgtccaccaccggcagccgctccagccgcctgtagcagccgcctcggccatcgacgacctgcgccgccgcctctctcggctccgcaaggtcaagctccaccccgtccaccccttcccccaagccaaaatccaccggagctttatcgtcgccgtcaacccgaacgccaagccgaaggccgtccaccccttcttctccgccggtgttcgccgtaaagccaccgtcacagtcgtcccgatctcgccgccgctcgaagctcgtcgccggctgccgttcatcgtcgctcgtcgtcgtcatggttcattgcggggcaccagactgagaagcggtgagaagcccgtggtggtcgctggggagtccatgcctctggttattgagggggtgattatgatccaggaacggaaaagctactgcaacgcttcttgcactggcggcatgtgtaaagaaatgcagcaggagcttgaacatctcaacttggggattatagaacacgagtacgtggctgccccagaggcacggtctacgctcgtggatcaagtccgagcagctcaggtaaatgatcctgaaatagcagagctgaaaaagaatatgagggttggaaaagcccgagatttccttgaagatgagtacggcacaatctggttaggagaaagattatgcgtacctgatgacaaagagctgagagaactgatactcaccgaggctcatcagactcagtactccattcatccaggcaataccaagataacaccagagacccgcaggattactacaacctctttagatcccggaatggaaatgggaagagattggaatggatttcataacagcacagcttaccatccgcagacagatggccagaccgagagggtcaatcaaatattggaggatatgttgcgagcctatgcgctcgattttggtggagcttgggataaaagtctgccttatgctgaattctcttacaacaacagctatcagaccaatctacaaatggcaccgttcgaagtattgtatggccggaagtgccgcacacctctcttctgggatcaaataggcgaacgtcaactgttcggaacagaagtgctaacagaagcagaggagaaagtcagaaccatcagagagaggttgagaattgcacaatctcgacagaagagctacgcagacaaccaccgaagggagctcacttttgaagcaggggattatgtgtaccttcgtgtcactccgctccggggagtgcactgtttccagacgaaaggcaagttggcaccatgtttcgtgggaccatacaagatcttggaacgaagaggagaagttgcatataagctagaacttccatccaacatggccggcatccatgatgtgttccatgtgtctcagttaaataagtgcttgagggtaccggaagaacaagctgattcagagcacatcgatcttcaagaagatctgacttatgtggagaagccaattcgcatccttgagaccagtgaaaggaggactagaaacaaggtcaccag

SEQ ID NO: 14703 - DNA, 2259 bp, Oryza sativa
  Clone ID: TFbOSC101628j.C1.o6.fg
atggagattatgcaacagctcgccgccgccgccaccgccaccgccaccgccacggcaacgcccctgtgccttcctgaaccccctccgacggcgatgacgacggcgcaggtggaggccgccatcgcgacgctgcacggcaagaagcagggcctccgcgaggcctacgacagcctcgtcctccactcgcccatccccctccccttccgctggtccgacctcgactcccacctctcctccctccagtcctccatccacgcccgcttcagccagctgcaggccctccaggcttcccgccccgcgccccccgccgccgccgccgcgagccacgacgaggacgtcgagatggaggacgtccaggaacagggagaggacgaggtgatggcgcctccgtctacggtgcaggtcaaggaggagcctgtggaggcggcggcatgcgcgtcgaataccgccggcgagcgtgccggtgtcgggcaagatgggttcgttcgacccggcgggatggcggcggcgaagatggcgtctccgtcaaaggtgcaggtcaaggaggaacccgtggaggtgagtccatctcctccggccggcgccacgggtcttacggcggcggcatgcgcgagcatggacgccccgagactaaccgacgtctgcaagcgcgccggcggtggcggcggccaaggtttgtgcgcgcgaaacggtagtggtacagcgcagtcacccccgatccctagttgccctgtgctccagcagcagcacacggccggcgccccgaacggcagccaccctgtgctacggcaacacgccgctaacgccatgaacgccggccactcggccgcgttccggccgcagcagcacatgggtaaaccccgggacacgtgtgacttgcggaaggccgccgcaccgaacaccggagatcgcctgccgctgcaatggcggcagcagcgcgtgcacgctaatctcacgtgccccttgccgccaccggtggtcgcgggctcctcctcctcgccgccacagcagcgcgtgggcgtgttcccctcgccaacgccgcagatcgtgggctcctcgccgccgccgccatcacaggcgcgcgtgggagaggctaatgtaacgaacccatcgcggcagcagttcacagctagcgcgccacacgcgggcgatggccagctccagaagcggccgccgtggcagcggctgcagcgcgtgggcgtggctaatcccatgaacgccggtgacctgccgccccagaagccgcacttcacggccaacgcaagaaacgccggagaacacccgttccaggagcagcagcagccgccgcccgtggccaaacccacggacgccgccgccggtgacctgcttcctcagcagaagcagttgatggccaacgcaccaaacgccggagaacacttgctcccggagcaacagaagcagcagcccgtgacagctgcaaaacccgcgaacgcgccgcctctgcagcacgcggcgaacgccaccaacccagccgttctccggcggcagcggcagcggcagtgggttcgacttcgaccaccgaccgccactaacctgccgcaaacgaagcaggagcagcatcatctgttcatggctgacgacggcgccaacgcccgcaatcccctgtcgccgccgccgccgtgcggcatggccaaaccccccaactccggtgacccgctgacggatcagaacaatcagcagctcatggcgaacacccactctgcccctacaccggtttccacaccattggttgcatcgaaccagagtgaatcatcagccatgacgacgacgacgacgacgaacagcaaccaaaactccggcggcggtcgcaccggcccgcaacccgtagcggccggcgctgctccaaatccggccggcaaccagcagcaagggcagcggaaaggtggtgcaaacaggcgaggcggacgaggccaaggcaacaagaacaacaacgttgctaataccaatattagcaacatgagcaaggtgattggcaagggcaacaaggggcagggcaatggaaacccccagctcaacaagaatgggaacccccagttcaacaagaacgtgccgggtgatcatcaccagaagaacaagaatgcagggcagctttgctacaggtgcgggtgcagggggcactggtcgcgcatctgccgcactcctgagcatctggtgaagctttatcagcaggacagaaaggccaaactgcaagcaggagcgaatacgaatacggtttatgtgggagccatgacggattag

SEQ ID NO: 14704 - DNA, 1880 bp, Oryza sativa
  Clone ID: TFbOSC15757j.C1.o1.np
atggctaacaagactctccgagagttcgctgctccctctgctgacaatgtggccattaggctgcaggtcaatataggagacatggatttcgacttgaagtccagcctcatcacgatggcgcaggctaacccgttctgtggcaagcctaatgaggatgccaatgctcatctgcaacagttcttagagatctatagcacgtacaccatcaagggcgtcagtcccgacgtcgtcaggctgcgactgtttccgttctcccttctcgggagagcgaagtagtggttctatgccaaccgtgctgctgtcaatacctgggacaaatgctctacgacattcctctcgaaattcttcccgatggaagcatgggaacgactgtaggagtatgtggccgcctgtcctcatcattggatggatgactggctgatcctgcagaacttttataacggactcaccccgatgtcccgagatcacctggacgcggcagctggaggagcattcttctctaaaacggttcaaggagccgttgatctaatagagaagatggtctccaatatgggttggagcgaggaacgactccagacccgttagcgaggcatgcacaccgtcaaggagacggagttacttgctgccaagctggatctcctcatgaagcgattggacgaccatgagaaatggccacaaggcaccgtcaaggccttggactcccacgtcacatgtgaggtctgcggcaacacgggtcattctgggaatgactgcccggaaacccatgaggaggcgatgtacatgggcaacaacaacaacgggtaccttccacaaggaggtctggggtggaaccaaccacgcccatattatcaaggaggtaacaacaacggtaacttttctaaccagccctccttgaaggatctcgtttttgcgcaagctaaaaccaccgatgcgctaagcaaaaagcttgcaaccaatgacaagttggcatccttagtccttacaaatgaaactaggaggattccggggcaacccgactcctccattgaaaatgttaaggcaatcacgacgaggggaggtaagtccactcgtgatccgccatatcctaaccctacaggaattaatgggatatcaaaagaagcgccatctaaagactcggctgacaaggatgttcagccagaaaagacagtgccgcaagagtactgcgacacgcggttgctgccatttcctcaacggattaggaaatcgtcagtagacaagcattttgctcgttttattgaagaaatccagaaaatccacatcaacgtgccgttgttggatgctatacaagtgccaacatacgcctgttatctcaagaacatactcaacaataagagacagctcccaacaatggaggtggtcaagctgatggaacaatgcagcaacgtaatactccacaagctcccggagaagaagaaagatccggggtgtcctacgatacctgctcgatcggggcacaacagtttgacccggccttgtgcgaccttggagccagtgtcagcgtcatgccaaaagacgtcttcgacaagctcaacttcacggtgttggcaccaacaccaatgcgccttcaactggctgattcgtcagtctattactcggcagggatagcggaggatgtgccagtcaagatacgtgatttcttcatcctggttgacttcgtgatgctggacatggatacggggaaagagacgccgctcatcctggggcgcaccttccttagcaccgcaggagccaacattgacgtgggaatggggattatctgtttccacatcaatgggaaggaagagaagtttgagtttcaaccgaggatggaacaatgctccatgatcaggataaagttgggagccaactggggatgcacc

SEQ ID NO: 14705 - DNA, 1190 bp, Oryza sativa
  Clone ID: TFbOSC16925j.C1.o1.np
atggatgaagtcgttgcgacgatggatatctctgagccaaataaaggctacgcgagctgcggctcggtaatcgagatgtctaggcaaatgaagactacacggctaggatgggtgaagggttatgtcacatgtttacgacgggttccatgcccatggaatgcggagtaaagatgtgtcttgtgggttggcctgggttggcttgagactagctgggacccaggtcgggttgccagttcagtctgaatcatcgtaggccttgggttaaggcagtactagatggttagttttgcgaagaaaaagatgtcgccaattgtttgccgaagctccggaagaccgcagggtccgctagcgaagcgaaggaagcagtgaagctagatgtgaagcaggacaaaagacttagatctgttaaggtcctatccttagtttttgatctgtctctcccctttgttttccctctctccctctccaaaccttgcaacagatggctgacaatgagaaaggcaataaggtcagaagtcaggacatgggtacctcaagctcccgagtgaatgaagcaccagacaccaattgtgtggcagtggtccaacacttgattaagcagaacaaattgcttatagagatactacagcagcatcggacgccaattctgaaccggagtcagatgcaaccttaagtgcagttggaggcagtccaagcactcacaccacaagtcagcgcaccgccaacatcccagaaggcccctcatgccatgtcacatgttgactcaaaagaagcaagaatcatttgttttatgtgtgatgaacaagggcactatgcaaggaactgtcctcagcagaaaagaaaagcaccaatgcgaaccgaagatgaagtccgtaagatgatcattaccagcacagaatggcctccaccaggaatgacaaaacgtcagagaagaaattccttccgaggtgcaccacagttgacagagcatcttttagctagtggaggtagagtgtatgatagtgaagattcagatcaagtctcctcagatgatgaagatgagaagtctccccaaggtttcaaccagaataaaatggaacataaggcatgctctcgttgtggagaaatcggtcatgttgctagctcgtgtgccactacctgctttcattgtgaggaagaccatccacccgcgagtgccccatgagaaagat

SEQ ID NO: 14706 - DNA, 1072 bp, Oryza sativa
  Clone ID: TFbOSC19175j.C1.o2.np
atagctgacaagactctccatgagttcgctgctccctctgctgagaatgtggccattggaccacagatcaacatgggagacatggatttcgacttgaagtccagcctcatcactatggcgtaggctagcccgttctgcggcaagcctaacgaggatgccaatgctcatctacagcagttcctggagaactgtaacacgtacgccataaagggcgtcagtccagacaccgtcaggctaaggctgttcccggtttccctcctcaggagagcgaagcagtggttctacgctaaccgtgctgctgtcaacacctgggacaagtgttctacggtattcctctcgaagttcttcccgatggaagcatgggaacgacttcaagagtatgtggccgcctgtcctcatcatgggattgacaactggctaatcatgcagaacttctacaatggactcccatgtcccgcgatcacctggacgtggcagctggaggagctatcttctctaaattggttcgaggagccgctgatttaatagagaagatggtctccaatatgggttggagcgaggaacgactccagacccgtcagcgaggcatgcacaccgtcaaggagacggaattacttgctgccaagctggaccttctcatgaagcgattggacgaccacgacaaacggcctcaaggcaccatcaaggccttggactcacacgttacgtgtgaggtctgcggcaacatgggtcattctgggaatgattgcccagaaacctatgaggaggcgatgtacatgggcaacaacaacaacggttaccatccacaaggcggtcaagggtggaactagccacgcccgtattatctaggaggtaataacaacggtaacttttctaaccaatcctccttgaaggatctagtttttgcgcaagctaaaactaccgatgctctaagtaaaaagctcactgccaatgacaagatctgtcacaccctaaaaatcccaaattattccgacgttcccggagagtccgattttgcaggagaagattttgaagagttctaaggccagcaaggcaagtcacacacacctca

SEQ ID NO: 14707 - DNA, 2211 bp, Oryza sativa
  Clone ID: TFbOSC404812j.C1.o4.gm
atggggatggtcaagttctcggctagcgcagctcatttgcaaatagccccttcgcgctacagtagagcactgggcaccacaaaaatccccaaatctctcggccgcctccgtcgtcaccttgcccgccgccgcctcatgtcatcctcgtcgccgcacatcgtcctcgtcgcgcaccacggctgtgtcgcctcgctcgtcaagttctccggcctcgccgtgtccctagacgtgcactccgccgcagcgatcgcgtccctcccggcgtcctccgtcgccgccgtcgcgctcccggaggtcaagctcgacgacaaccccaccggacgccgcccgatggcgagatcctccacctgctccacctctactacctggttcttgccaccgaaggacaggacaagcgacagcggcggcggcggcgtgggcagcaaggaggaggaggacgaggcgtgggacgagtggctggcgaagccgatccacgagcggatgccatggcagatgccgccggcgacggagctgcaggacgccgggctggaggccgtgaccaactgctacggcgagctgtacggcgacatgatggagtattgcggccggagctggaagcctggaaccggcaccgcgccatgctggtgcatgactgccatcccaccgttcaaccctactacctccctaagtggtgcgcgactggagggccatgtcctcggaacatccgttccgccagaagccgagcttgagcagaaggaaggagaaaaaggagagaagaccatcagagtcccaaacccggcgtatggcgaatggtttgccactgaccaacaggtcattggttttctgttcacctctctgaccagggagattctgtcgcaagtcgcagacgcaccgacggcagccgcggcatggaagacgatcgagaacgtgttctcgacacgatctcgcgcaggcgcgatcaacgtcagattggctctcaccaccactcagaagggccaatcgactgtcactgagtacgtcagcaagatgcgtgctctcggtgacgaaattgctgcaacagggaagccaatagatgatgaagaacttgttgcttacattattaatggtcttgattcagagtttgatccagtggtggaagccctcgtcgccaagaatgcatctgtcacagttgcagaggtctactcacagcttcttggctttgaaaacagggtgaagatccgaacggcgtgcgctgctatgagtggaaaccgtggcggtggaaatcagggacgtggtggcggcaacccccgtggccgcggcgctggacgcggcggcagtggccgaggtggcgggcgcggccgtggcaatggacgcggcggcgctgacaacagacccacctgccaagtctgtcacaagaaagggcatgtggcggcggactgctggcactgctacgacgagaactacgtccccgatgagaagctaggaggcgctgcgacgcatgcttacggtgttgacaccaattggtatgttgacaccggggcaaccgaccacatcaccgggcagctggacaagctgaccacacgggagaagtacaagggcaccgaccaaatccacacagctagtggtgaagatgacactgaggcagatgctagcgacagcaatgcagagattaacgcagaacaacctgatggaactcatcctggtgcatcaaccggggtacacacagcagaaacagaagtggcggaagaatcgtcgtctcgtactgatcagtggcgcgccgtgcaggcccccgagcaacctgcgaccgccaccgaaccagcagccgccacgtcgtcggctgtacagagctcccgcgcgagttctcgctccatcgcaagccaccaccagcccggaggtgacacgtcgccagggcctcgtcatgatgcggcaggatcgtctgcggctccggaggttattgctgaaatagagcaagtctctaaaggttggagtcttcgtcagttagatgttcaaaatgccttcttgcatggagttctagaagaagaggatttgaatcaggagtttgcactgaaggatttggaagatcttcacttcttcctaggaattgaggttaaaaaggacctaaccttgtatcttggagtgcacgaaaacaagctacagtctctagatcaagtattgaagctgaatacaaggcattggcaaatgcaacagcagaaattatgtggatacaaacattacttcaggaacttggtgtaa

SEQ ID NO: 14708 - DNA, 744 bp, Oryza sativa
  Clone ID: TFbOSC420074j.C1.o7.gm
atgaagcgcttggatgaccacgacaaacggcctcaaggcactgtcaaggccttggactcacacgttacatgtgaggtctgcggcaacatgggacattctgggaatgactgcccagaaacccgtgaggaggcgatgtacataagcaacaacaacaacgggtaccgtccacaaggaggccaggggtggaaccagccacgcccgtattatcaaggagaaaccaatggggtagccaaggaagcgccatccagtgactcggctgacaaagagattcagccagaaaaggtcgtgccgcaggagccgcggaagtcggttcggacaggagaaggagaagaaggacatggcaatggaggcgtggagaagaagagcacggcgccggctctgtccgctgattggccggtgatggcgaactgcgggcgacggcagcggctgcgcgtgcgagcgtgcgccaagcgcgtccatggcacacggcggtggcgcccacgggacagggaggaggatcggctgtgtggctgggccagcctgggtcttggtctgttaggtggtgcatcaaacattttcctcttcctattcgtcttcgtcttcctcttcatcttcttcttcgtaagggtctccaaaagagtcttcatcttcgtcttcgtgagagttctcatcttcatcttcctccacttcgtcctgatagatatcgtcttcgccaatgcgcagcccggtggcagacttccagaggtggagccatcgccgggctag

SEQ ID NO: 14709 - DNA, 1467 bp, Oryza sativa
  Clone ID: TFbOSC20612j.C1.o3.fg
atggacatctctaggacaaatgaaggctacacgagctgtggcccggtagtcgagatgtcatggcacagggctggtgtcctgctgctaggggctcaatcctgcctgcctgtcccagaggttccggccgtaggtggggttgggtcggtactcttgtttatggctaggatgggttgggaactatgtcacgtcttccgtccgtataccgtggtgatgtttaacagagaaaaaggaaagaatgtcagcgggtatgcctcaactaactcaagttttcaactcaatccaccactgtcctcaagagagttaacaagggcacacccttggtccattccaagcatgctgctgagttcacagctaccattggttggaagtcaagaccaaaatcagtatgtgtttgatcgagcatttgccacccaggtcaatgagcttccaatgccagaagagcatgtccccttttgtcatgattgtagagaacaaggacactatgccctgaattgtccatgggtatatgccaaacaagcctcttcctttggtttagcagggcagacatcgctaaaccagcctcctcgcaccaagtcaagcttgcagcctagtgtgcaaagtagagagcccaatggagagaatccattgaatcccgggaaatgctttcctcctagcctttcgtaccacgtggggtcacatactaagcaagccaaaggcaagaagagtaagaatcagaagagaaaagcaccgatgcgaactgaagaagaagtacgtaagatgactattaccaacaccgaatggcctccagtagggataactattcctagacgtcaaagaggaaatacctttcgaggtgcacgacagttgacccagcacctcctaagccatggtggcagagtatctgatagtgaagggtcagatcaagtctcctcggatgatgaagatgagtctccccgacatctcggcgaggaagagatggaatcaaaggcatgcacctgttgtggagaaattggacacgttgctagcatgtgtctcacactctgccctcattgtgaagaagaccatccaccaggggagtgtcccacccgcaagatgacatgttttctgtgcgaaggtacaaaccatgtgcccaaggattgccaactcagtgtgttgttgaccaagaccgtagaaatccaacgaacaaccctacgattgtctcatcagctagtcagctccaacagcaacatcgacgatatcatccatagcaccaatgttcctcctgctccacctaactctgcaataaatcatagcaataataccttcagcaccaaccattctctgcaccgacagcctcagcaaagaattgtcgtcgatggaagaagttgtgtctctccccgacctactccaggccgagcaaagggcaatcaacctccggagggcgataccaagcagaagaccgtcatccgcttcaaacagcaatcagaaggaagcttctcctgtgaatga

SEQ ID NO: 14710 - DNA, 2136 bp, Oryza sativa
  Clone ID: TFbOSC401388j.C1.o4.fg
atggccagcaagactcttcgcgagttcgctgctccctctgctaacaatgtggtcgtcgggccgcaagtcaacataggagatgtggatttcgacttgaagtccagcctcatcacgatggcgcaggctagcccgttctgtggcaagcctaatgaggatgccaacgctcatatgcaacaattcctggagatatgtagcacgtacaccatcaagggcgtcagtcctgatgccgtcagactgcgactgtttccgttctccctcctcaagagagcgaagcagtggttctatgccaaccgtgctgctatcaacacctgcgataaatgctctacgacattcctctcgaagttcttcccgatgggcaaaaccaacgcccttcgaggacgaatttctagtttccagcagacaagggacgagtccattccggaagcgtgggaacgactgcaggagtatgtggctgcctgtcctcatcatgggatggatgactggctgattctgcagaatttttacaatggactcaccccagtgtcccgcgatcaccaggacgcggcagctggaggagccttcttctctaaaacggttcaaggagccgttgaattaatagagaagatggtctccaatatgggttggagcaaggaacgattccaaacccatcagcgaggcatgcacatcgtcaaggagatggagttacttgttgccaagctggacctcctgatgaaacgcttggacgaccacgacaaaaggctacaaggcaccatcaaggccttggactcacacgtcacgtgtgaggtctgtggcggcacgggtcattctgggaatgattgcccgaaaacccgtgaggaggcgatgtacatgggcaacaacaacaacgggtatcgtccacaaggaggtcaggggtggaactcaacttcacttcatggcaacgccgatgtcaggcgtcatgccaaaagacgtttcgacaaactcaacttcacggcgttggcatcaacaccaatgtacctccaactggctgactcatcagtccgttacccgactaggatagcggaggatgtgccaatcaaaatacgggatttcctcatcccggttgatttcgtggaaccgttattggaggatgccggtaaaatcacccgtaccggccaagaaattagagcagccggctcagaagaagccgtcttccgcatcgaaatcaaagaaggtgtggaaggaaaagccaaagacacccgctccatcacctccggagacgggtggaaaatccatgaactgaaacgcaaggaggagttcacactcacatggaaaggcttgagtacacttcttggttttcacgattcctgcaaaatcgatctccagagaggaatttcggggttcgagaaaaataggttttgggaagacatttctggtgctccaatttgcaagaaacctagaacgaataatatccataatcctacacttaggctcgtgcacaaatggattgctatgactttgttttctagaagtgatctgagacccattaggggagatgaattaattatcatgtttgccatggttagaaaggtcaaaatttctcctgtgaaatgtatgataaggcaatggttagaaagtataatgttctctgctcctgttgagtgcacttctctgattactcggatagcaaaagagctaggggtcgttagcgaccaaattgcttttatctcagccgctcgtccgcatattgatgaggcttatctagtgcaagggcatattttgaaacaaggagcagatggatctttgatatactttttcccaagttgtacaaatgaaatcccattgccaaatgcggggtatcatttgtacaactgccatgaactaaccattcccctgcagaccatagaagaatctcgtgcaggtggaacatacagggagacgcgcaacatgacaaggaacgaacaagagagttcatcatcctcgacacctgtgcagatgtatgaggcaggatgggcaccaactggggatgctcctagatggacccaagctccacgccatagcattggagtctcaccctgggcaagcgccggcgaggaccggtggcacgccgcccccctccggctcccttccttccattctcccctaaaccctaggcacggcagcggagtttggtgccggtag

SEQ ID NO: 14711 - DNA, 3987 bp, Oryza sativa
  Clone ID: TFbOSC102349j.C1.o24.fg
atggcaaccaacccgaagggtagcaaccacaacaaccatggcagcccacctccgcctcctcccccgcctccaccaccaccaccagacaccaactccatcctcacccaaatcctcgcccagcaggccaacatgatggctgctttcctccaccacatccaaaatccgccacagcataatgctccacctccaccaccacccccgcaacactctaaactcgccgagttcctccgcatccgtccgcctaccttctctagctccaataaccccgtggatgctttggattggttgcataccgtggggaaaaagttatacaccgtgcagtgcaacgatgaggagaaagctacgcagccagaaggacaacctattacttgggcccgcttcaccgccgctttccggaggacccatgtacccaccggagtcatggcccttaagaaaagggaattccgagagttgaagcaaggcaaccgctctatgatggagtatttgcatgagtttaacaacctggcccggtatgccccggaggatgttcgtgaagatgaggagaagcaagagaagttcttggcagggatggaccctgagctgtccgtgcgtctggtctccggggattatccggatttccagcgtttggtggacaagagcatccgcttggaagccaagcacaaggaactggagtcgcacaagcgtcgcttggcaaatttccgcaaccaacagggggctaaccaaagggtccactacaccaatccctatccagggggatcctcctcacagcagcaacaacagcagcaacctcgctccgcgccccgacctcaattcgtggtgcgcgtcccacagccgcagcagcagcagagtcagcaagggacccgtgcgtcccgtcctcctacgccagccgtgcagcctggacaaggccgcagagacgttcaaggtcagcagcgtctgtgtttcgactgcttcgagcccgggcactttgcggataaatgcccaaagccgaggcgccagcaaggccaagcgcctccccgccccaacaacggtggtaaggatgtcattcggggtcgtgtgaaccacgtgactgccgaggatgtgctgacaactccagacgtcatcgttggtacgttcctcattcattccatccctgctaccattttgttcgactctggagcttcccactcgtttatatctgtgccattcgtggggagaaatcagttgggggtagaaaggcttaggaaccctctgctcatcaccacccctggaggggttatgacagcaaagtattatagccctgccgttcctatagaaatccatggaattccttttccctcggatctaattcttctagacaccaagaacttggatatgatccttgggatgaattggttggctcaattccaaggagtagtggattgcgcaagacgcactgtcactctgtaccgagggccggaacaaccggtagttttctttgcacccccaacctctgtcggcagttcagaacttcatcagataggactgtcggaaacccccatcgtcagtgagttcagagatgtgtttccggaagaactacccggtatgccgcccaagcgagagattgagttccggatagatcttgctccaggaaccactcctctgtacaagcgaccctaccgtatggcagcaaatgaactggccgaagtcaagaaacagttggaagagttgaaagaaaaggggtatatacggccgagcacttccccctggggtgctcccgtgatttttgtggaaaagaaggacaagacaaagaggatgtgtgttgactacagagctctcaatgaagttactatcaaaaacaagtaccctcttccccggatcgatgatctgttcgatcagcttaaaggtgccactgtcttttcaaaaatcgatcttcgctccggatatcaccaattgcgtattcgtgaaaaagatatcccgaagatcgtgttcaccacgcgatatgggctgtatgaattcacggtgatgtcgttcggtctgactaatgctcctgccttcttcatgaacttaatgaacaaagtgttcatggaatacttggataagtttgttgtggtcttcatcgacgacatcctggtgtactcgcaatcagaggaagaccatcagcagcatctccgtcgggtgttgggaaagttgcgggaacatcaattgtatgccaagcttagcaagtgtgagttctggttgtccgaagtcaaattcttagggcatgtgatatctgctaaaggagttgctgtggaccccgaaacagtgatcgccgtcactgattggaagcaacccaagacagtcactcaaattcgcagctttttgggtttggccgggtactaccgaagattcatcgagaatttctccaaaattgccagacccatgacgcagttgctgaagaaggaagaaaaatttgtgtggagcccgcaatgcgagaaagcattccaaactctcaaagaaaagctggtttcctcgccagtgttaatcttaccggatactcgcaaggacttcctggtgtactgtgacgcttcgcgccaaggattggggtgcgtgctcatgcaggatggtcatgtggtagcctatgcctcccggcagcttcggcctcatgaaggcaactaccctacccatgatttggagttagccgctgtggttcatgctctaaagatctggcggcactatctcattgggaatcgctgtgaaatatatactgatcataagagtttgaaatacatcttcactcagtcggatctgaatcttcggcagaggagatggttagaactcatcaaggattatgatgtgggaattcactatcatcctggtaaggccaacgtggtcgccgacgctctaagtcgaaaaagccgttgcaacactcttggcgtctgtgacattccaccggaacttaatcaacagatggaagccctgaatctaagcatagttagtcgtggattcttggctacgctggaagccaagcctaccttgctcgatcaaatcagcgaggctcagaagaatgatccagatatgcatgggatcctcaagaatatgaaacaaggtaaagccgctggtttcacagaagatgaacatggaaccctatggaacggaaatcgtgtatgcgttccggacgacaaggaacttagacagctgatacttcaggaagctcacgaaagtccttattccatccaccctggcagtacgaagatgtacttagacttgaaagagaaatactggtgggttagtatgaagcgggaaattgcaaagtttgtggccctttgtgatgtgtgccagcgtgtcaaggcagagcaccaacgaccggccggacttctccaacctctccaagtaccaaaatggaaatgggatgaaattgggatggatttcatcaccggacttccaaaaacccagggcgaatatgattctatatgggtagtcgtggatcgactaaccaaggtagcccggtttattcctgtgaagaccacctatggagggaacaaactagctgaactctacttcgctaggatcgataagagtctcccctatgccgagttctcctacaataacagctaccaagccagcatacaaatggcaccctacgaagcgttgtatggacgcaaatgccggacaccgctattgtgggaccaagttggggaaagccaagtgttcgggactgatatcctgagagaagttaaagcgaaaatcagaaccattcgggagaatctaaaggtggcccagtctcggcagaagagttatgcagacaaccgacgccgtgacctggaattcgcagtggatgactttgtgtaccttcgggtcacgccattgcggggcgtacacaggtttcagacgaaagggaagctcgcacctcggttcgtgggtcctttccgtatcattgctcgacgcggagaagtcgcttaccagttggagctgcccgcatcattgggcaacgtgcatgatgtgttccatgtgtcgcaactcaagaaatgccttcgagtgccgtccgagtag

SEQ ID NO: 14712 - DNA, 1647 bp, Oryza sativa
  Clone ID: TFbOSC401716j.C1.o8.gm
atgccgccgccgcgccttggctcggccgagccggtctcatgccgtgcccgtgccccagccgcgccgcctcgtgaccgtccgatcggctttgtgccgatccgagccgtcggttcccgtggaccggcggtggacagcctcggtggtcccggtccacggtggaccggcgcccatgtgccgctgactggtggggcccgcttgccggcgccgcccctcccccttgatgacgtcagcgaggggtatggtttgcgtcattggtggggatgcgaccatactagcagatggtctgcaagagggacaatttcgccggatcaagaccccgtcagtttcatggggcaactcagtgcaattctaataatattccacgtcagcctcttgaagatcagcctcaaccccaagtcatggctaatcaaactcagacagtggaagagttgttacaacagatgcgacgtcgataccaaatataccagatgcaacagatgcaacgacaatgtcaggagtcacgtcaatgtcacccaccacaggtcacctgaaaaggacgagaagcagtgcccaggaagtaaccaagctccaagtcagtctactaacaagaaagatggtactctgcagcacaactttggagcgaacaggaaggtgatatggaagatggataatggcaggaccatgatcatcaccagttcagaatttactcctgaagacgcagcaaggatacccaagcgaacagatcatgtgcctaaggactgtcagttgaacgcggtcatagctaagaccaagaaagaacaagggacaaccgtgcaacccattcgtcaaccaatgacaatcgacaacagcggtcacaatccttctgctcttcctccaactccagctccagtggaagccaaccatggaagaagcaacgtcaccaaggatgttcataagtctctgcttgttcccgtttcagctgccaaagtgcataatcagaagcctgcacctcgggaccaagcaagtcgattctgccgtaactgtcgtaagccaggacatcgtttcagtgattgtcctcttccaagagcagcaaaggcagttcgtcgtgattcacaagttaccagcattgcccatgacaccaatcgacacctgaatgtgcaacctccgcctcaacggattatcgtcaagggcaccgtcaaaggtcgcattgttccaccggcaaccgtttcaagcctacagcaccaacgccagcagggtaagcaatgccaggagaacaacagctcgctacagctacaaagaggtggtacgctccttcgtcagcacccgcggcaagtgttgtcagcaccaggtcgtccaactgttgtcagttctagcaatgcacctggtattgctccaatctggaggcccatcgacaaatcaccgctcggtaaccccacgggcaagaagatcctacccgttacagctgacaagacagttgcccctccaccatcgaagatcaacaagcagagcaacgttcccggcagcatcagtggtactcaaatgaaaagagtgatggaatatttgaaagtgacaatggttggatccatggtgctcgacactatgaaatctctccaaaggcagtaccaagggatgtggcagttcaatgtgcagatcagtcagaccgccgaccagcaccagctttctttctag

SEQ ID NO: 14713 - DNA, 2139 bp, Oryza sativa
  Clone ID: TFbOSC405120j.C1.o8.gm
atggggcaactcagtgcaattctaatagtattccacgtcagcctcttgaagatcagcctcaaccccaagtcatggctaatcaaactcagacagtggaagagttgttacaacagatatgacgtcggagttcccaatatcggcatcgaagacccctgtcaaaatgctgtccagatccccgaagataacgacagccaagtcaacgtgttcgccaggtcacctgaaaaagacgagaagcagtgcccagggagtaaccaagctccaagtcagtctaccgacaagaaggatggtactttgcagcccaactctggagtgaacaggacagtgatatggaagatggataatggccggaccatgatcatcaccggttcagaatttactcctgaagacgcagcaaggatacccaagcgagaacggttttctgctgatgacgatgacgacaacgatgatgataatgatgacaatgatgatgcgacccttgacagtttcagggaaagagagttgaagttcaaagcatatcatgtgcctaaggactgtcagttgaacgcggtcatagctaagaccaagaaagaacaagggacaaccgtgcaacccattcgtcaaccaatgacaatcgacaacagtggtcacaatccttctgctcttcctccaactccagctccagtggaagccaaccatggaagaagcaacgtcaccaaggatgttcataagtctctgcttgttcccgtttcagctgccaaagtgcataatcaggagcctgcaccccgggaccaagcaagtcgattctgtcgcaactgtcgtaagccaggacatcgtttcagtgattgtcctcttccaagagcagcaaaggcagttcgtcgtgattcacaagttaccagcactgcccatgacaccaatcgacacctgaatgtgcaacctccgccccaacggattatcgtcaagggcaccgtcaaaggtcgcattgttccaccggcaatcgtttcaagcctacagcaccaacgccagcagggtaagcaatgccaggagaacaacagctcgctacagctacaaagaggcggtacgctccttcgtcagcacccgcggcaagtgttgtcagcaccaggtcgcgcaactgttgtcagatctagcaatgcacctcgtattgctccaatctggaggcccatcgacaaatcaccgctcggtaaccccacgggcaagaagatcctacccgttacagctgacaagacagttgcccctccaccatcgaagatcaacaagcagagcaacgttcccgaagtagagggtgttctaacacaaagcggaacttctcccgattacaaggttggcaacagaataacagacatcagccaaaaaatggttgaagaactaaaggagtctgtgaaagaagagcaggctgagaaaaaggaggaggcagccaaggagaagccagatgaaccacaagagatcgtactgaaagtcgacatgcactgcgaaggatgtgcaaagaaggtcgagaaatccctcttgagatttgaaggtcagaaagcatttcataccgtctcaaactacgacttctgtcgtagggccgcagatccctcaaaggtctgcgagagggttcagaggaagacaaagagaagagttgagctgattttccctcttcctccacctccagaagaggagaagaaagaggaggctccagcaccacctccagaagaaaagaaagaggagccaccgaagacaataactgtcatcttgaaggtccagatgcactgcgacgcttgtgcgcagattctgcaaaagcgtataagcaggacagaaggtgtagaatcggtcgagactgatctcctcaacggcctagtggtcgtcaaaggggtgatggatccggctgtgctcatcgaaagcatccagcggaagacgcggaggccggcagtcatcgtcgaagaggtgaagccgcgggaggaggagaagaaggcagaggaggaagagaagaagccagatgaggataaggccgacggcatcgaagagatcaagaagtatgacttctggccgcccgtccagtactatgtcgagtacgtctacccatacccgctaccgccgccaccgacggcactggtgtccgaggagttcagtgacgagaacccgaacgcttgcaccgtcgcgtga

SEQ ID NO: 14714 - DNA, 3273 bp, Oryza sativa
  Clone ID: TFbOSC14471j.C1.o1.fg
atggcttctaagcttaaatcaatggaaatggaaatctctaaaggttttcttgtccatttcattatgtcatctctgccccaggagttttctccatttacgatcaattataatgcaatgaagatcaagtggggcattgatgaattaatagctatgtatgtacaagaagaggaaaggcttaaggcagaaagagttgaccatgcaaatctatttaaacactccaagaagaaaaagtataagaaatttaagaaggagtatttgaagcctaagcctagtcaatttaaagaaaaagggcaatcttcgaatcaatcccagcagaataaatctggaggaaatccctatacagaagaaaagggaaaagaaaaggatgggtgctacttttgtggaaagagtggacaccgccaaaaggactgtattgggtttatgagatggctcagtaagaaagatactgatgttatttcttttgttgatgaatccctaaatattgattatgccaccaattcttggtggattgactcaggagcgacaattcatgttgcaaattccttgcagggattcgctatgaggaggacactaagaagaggggaaagaagaattagagttgctaatggagaaagaatctccacccacggtgactgccaacgaggtcctctcggatgtaagcgggcctgtcctggggaaggcgggacattacagtattatagccctgccgttcctatagaaatccagggaatcccttttccctcggatttgattcttctggacaccaagaacttggatgtgatccttgggatgaattggttggctcaattccaaggagtagtggattgcgcaagacgcactgtcactctgtaccgagggctggaacaaccggttgttttctttgcacccccaacctctgtcggcagttccgaacttcatcagattggactgtcggaaacccccatcgtcagagagttcagagatgtgtttccggaagaactacccggtatgccgcccaagcgagagattgagttccggatagatcttgctccaggaaccactcctctgtacaagcgaccctaccgtatggcagcaaatgaactggccgaagtcaagaaacagttggaagagttgaaagaaaagggaggaagaccatcagcagcatctccgtctggtgttgggaaagttgcgggaacaccaactgtttgcaagctcagcaagtgtgagttctggttgtccgaagtcaagttcttagggcacgtgatatccactaaaggagttgctgtggaccccgaaacagtaaccgctgtcactgattggaagcaacccaagatagttactcaggttcgcagctttttgggtttggcaggatactaccggaggttcatcgagaacttctccaaaatcgctcgacccatgacacagttgttgaagaaagaagaaaaatttgtgtggagcccgcaatgcgagaaggcgttccaaactcttcatgaaaagctggtctcctcgccagtgttgatcttaccggatactcgcaaggactacctggtgtactgtgacgcttcgcgccaaggattggggtgcgtattaatgcaggaaggtcatgtggtagcctatgcctcacgccagctacggccccatgaaggcaactaccctacccatgatttggagttggccgctgtggttcatgctctaaagatctggcgacactatctcattgggaatcgctgtgaaatatatactgatcataagagtttgaaatacatcttcactcagtcggatctgaatcttcggcagaggagatggttagaactcatcaaggattatgatgtgggaattcgctatcatcctggtaaggcaaacgtggtcgctgacgctctaagtcgaaaaagccgttgcaacactcttggcgtccgtggcattccaccggaacttcatcaacagatggaagccctgaacctaagcatagttggtcgtggattcttggctatgctggaagccaagcctaccttgctcgatcaaatccgcgaggctcagaagaatgatccagatatgcatgggatcctcaagaatatgaaacagggtaaagccgctggtttcacagaggatgaacacggaaccctatggaacggaaatcggcgtgtcaaggcagagcaccaacgaccggccagacttctccaacctctccaagtaccagaatggaaatgggatgaaattgggatggatttcatcaccggacttccaaaaacccagggcggtcatgattctatatgggtagtcgtggaccgactaaccaaggtagctcggttcattcccgtgaagaccacctatggagggaacaaactagctgaactctacttcgctaggatcgtgagtctccatggcgttcctaagaaaattgtatctgataggggaagccaattcacctctcacttctggaagaagctccaagaagagttgggtacccgattaaatttcagcaccgcgtatcacccgcagacagatggacagaccgagcgtctaaatcagatcctagaagatatgctccgtgcctgtgttctagattttgagaagacctgggataagagtctcccctatgccgagttctcctacaataacagctaccaagccagcatacaaatggcaccctatgaagcgttgtatggccgcaaatgccggacaccgctattgtgggaccaagttggggaaagccaagtgttcgggactgatatcctgagagaagctgaagcgaaggtcagaaccatttgggataatctaaaggtggcacagtcccgacagaagagctatgcagataaccgacgccgtaacctggaatttgcagtggatgactttgtgtaccttagggtcacgccattgcggggtgtagacaggttccagacaaaagggaagctcgcacctcggtttgtgggtcctttccgtatcattgctcgacgcggagaagttgcttaccagttggagctgcccgcctccttgggcaacgtgcatgatgtgttccatgtgtcgcaactcaagaaatgtcttcgagtgccatccgagcaggccgattcagagcaaattgaagttcgcgaagacttgacctacgtggagaggctagtgaaaatcctggacaccatggagcgcaggaccaggaaccgggtaatccgtttttgcaaggtccaatggagcaacaacgccgaggaagaagctacttgggagcgtgaaagcgagctgaaggcagcccatcccgatctcttcgccagttcttccgaatctcggggtcgagattccgtttaa

SEQ ID NO: 14715 - DNA, 1833 bp, Oryza sativa
  Clone ID: TFbOSC21716j.C1.o1.fg
atgggcaatattgaacaacttaatggaagtaattatgcttcatggaaggagaagctggaaattactctagctctattggatattgattatgccctccataatgatcctccggttgagcctagaccggaaaatgagaattatgagacattaaaaaggatatatgatgaagtaaaggcaaaatgggatatttcaaaccgtaaatgccttatgattatcaagagctccattattgacgcaataagaggagcagtcccagatactcagacagccagagaatatcttgctaaagttgaggaacaatttaaaggctcttctaaggtttatgccaccactcttattaaaagattggtcaatgaaagatacgattttactgaaaatctgagggaacatattatgaagaaatgtcacatggtttctaagcttaaatcaatggaaatggaaatctctgaaggttttcttgtccatttcattatgtcatctctgcctcaggagttttctccatttacgatcaattataatgcaatgaagatcaagtggggcattgatgaattaatagccatgtgtgtacaagaagaagaaaggcttaaggcagaaagagttgaccatgcaaatttatttaagcactccgagaagaaaaagtataagaaatttaagaaggagtatttgaagcctaagcctattcaatttaaagaaaaagggcaatcttcgaatcaatcccagcagaataaatctggaggaaatccctatacagaagaaaagggaaaagaaaaggatgggtgctacttttgtggaaagagtggacaccgccaaaaggactgtattggatttatgagatggctcagtaagaaaggtactgatgttatttcttttgttgatgaatccctaaatattgattatgccaccaattcttggtggattgactcaggagcgacaattcatgttgcaaattccttgcagggattcgctatgaggaggaccctaagaagagggcaaagaagaattagagttgctaatggagttgaaactgaagttgaggccattggagacttcactctcacacttcatactggcttcaaacttcagctgcatgatgttctttattatcgtttgggccatatttcaagggggggaattgagcgtctcattaaagaaaacatcctttatcctttggacttctcagatgcagatgttgatcactgcattgattgcatcaaaggaaaatattccaagcaaatcaagaaaggtgcaaatcgaagtatgggagttttggaaatcatccacacagacatctgtggtccatttaatgaaaaacatactacttatggtcaaattcctggaccttttgcgaggttcttacaggaaaatggcattaaggcccagtactcagcaccaggcgaaccccagcaaaatggagtagctgaaaggcgtaatcgcactcttatggatatggtttcacttggagaccaagaacacgctgtgttcttggaaaatgacataatcaaggggagtatgacacccagagaagttgttctggaagagaaacgaaattatattccaatgcctataattgaagaacccgttttctcaacacatactcatgttgcaccttcaatagaaagaaataatgatgcaacacctgctgaaactcctgcaactacttctagtagtgtatcaaatgatgagaataatgaggatgctcagcagccccagattgtgatagatgagcaaaataacgaacccgtcagaagatcacaacgagttagaaagtcagcgattccaagtgactatgtcacttacataaatgaagaggtgaataaacctatgggtgaagag

SEQ ID NO: 14716 - DNA, 4314 bp, Oryza sativa
  Clone ID: TFbOSC23733j.C1.o3.fg
atggcgtcttcttcctccaacccatctgctctcaatgggcagacagtttctgagaagctcaccaagagcaacttcgtgctgtggaaagcgcaagttcttgccgcgctgcgcggcgcacagatggccggcttcctcgacgggagcaatcaggcaccggctgcaacgatcatcatcaccaaggacgatggcaagaccaccgagaaggtggcaaatccggcgctggtgcaatggaaggcgcaggaacagcaggttctcagctacctgctgtcgtctctgtcgcgtgagatggaggcaattgagagcctcttcgcatctcaatctcgcgcccgcatcctcaacactcgcatggcgctctccaccaccgtgaaaggaaaccggagcatggcggagtatgtcggaaaaccagttgatgatgaggagctcatctcctacattcttgccgggctggatttcgactacaactcggtggtctcgtcagtcacgggacgcaccggtccaatctctgtgagcgatgtctatgcgctcctggttggctttgagtcgcggctggaacttctccagaacgcggccaatccttctgccaacaccgcgtcgcgaggaggacgaggcggaggcggtcgtgatggcagagggcgcggcggcggcaaccctggacgtggcggcagcttcgggcgcggtcgtaatgacggcaagcccaagccgacgtgccaactctgcggcaagatcggccacatcgtcgccaagtgctggaagaggtttgatccctctttcaccggtgaagagaagaacgccaacactgctgcagtgaactcctacggcatcgacacgaactggtacatcgacagcggcgccaccgaccacatcactggagagatggagaagctcatggtgaaggacaaatacaccggcaatgatcaagtccacaatgctagtggcgcaggtatgaatatcgatcatgttggtcatactgcaattcgtacccctactcgtgatctaacgttgaaaaacgtcctccatgttcctgatgcatgcaaaagccttgtttctgcccatcgctttactcgtgacaataaaacatttgttgaacttcatcctttcttctttttggttaaggatcaggtaacgaggatgccactccttcgaggcaggtgtagatccggcctctatcctctgccaacagacaagctccaaaccatctccaacaagcaggcttttggtgttgtcaagccctctcttttccggtggcacagtagattagggcacccttctttttctgttgtcaatcgcgtcattagccaaaataatctcccagttgttagggattctagtcaagagtttgtgtgtgatgcttgccagaaaggcaagagccatcagctaccctaccctaagtccagtagtgtttctattgaacctttgcaacttgtgttttccgatgtatggggtcctgctataaactctgttggcaataaagtttattatgttagtttcatcgatgactttagcaaattcacttggatctatctccttaaacacaaatctgaggtttttgccaagtttcaggattttcaaaaccttgttgaacgcttgacgaatagaaaaatcaaagctgtgcagacggattggggcggggaataccaacgtcttaattccttctttcagcgcattgggattgaacactacgttgcctgtccctatgcgcatcagcagaacggttctgccgagcgcaaacaccgtcacatcgttgaggtcgggctctcgttgttagctcatgcctccatgcctctcaaattctgggatgaggccttcaccaccgctgcttacctcataaacaggaccccaaccaaagtgataaactttgagacccctctacaacgtctgtttaacctgcccccagattattctctgcttcgcaccttcggctgtgcctgctggccgaatctgcgtccctacaacgcccgcaaattagctttccgttctaaacagtgtgcttttctgggttatagcacgcttcacaaaggttttaagtgcctagacatctctacagggcgtgtgtatatttcccgtgatgttgtctttgacgagcaaatctatccctttgaaaaacttcatcccaacgccggtgctcgcctccgggctgagatcaatctcctcccggcgcatcttcttccgctgcttgatcacgggggtgtacagatgcatgatcaaccgctgattgatgattctaatcctgctaatccaattattgagaatagtgcaggcagcagtgcaggcaatggagcaaaatcaggggcgcagcacgggcatgatttcatgcagagttccggcgggcaacctaccggcggccatcatgactctctgacgcacagtaccatgcatggcacggagaaccaggcggaccaggagaactcggcgtcatctcgatctgcagaaccggtcacgccgcgacacgcagcgagtccctcggccgcgccacacgcggcaaccgcgccaatcgcgtcgtcacacgcggcagcctcgtctctgtcgggagacattgtgggaccgggttcacgtgggccatcgcaggaggatcaagacacgtcgcaggaggatcaagacacgtctgcatcagctcctgcttcttccacatcgcatgatgatgatagtgctcagtttgccgctcagccgactcgaccagtgaccagagcacagcgtggtatccacaaaccaaagaagtacacagatggcacagtaaggtatgcaggactcacacatacaggagaaccaggtaatctccaagaggctttaagtaatactaattggaagtcagctatggatagcgagtttgctgctttagtgagaaataaaacctggcacctagttccaccaaagcagggggtgaatgtaatagattgtaagtgggtctataagattaaaagaaaggcagatggaactatagatagatataaagctaggttagtagcaaagggttttaaacaacgttatggtattgcttatgaggataccttcagtcctgtagttaaggctgctactattagacttgttctgtcactggctgtgtcacagggatggagtcttcgacagcttgatgtacagaatgccttcttgcatggctatcttgaagaagatgtgtacatgaggcagccaccaagatacgaggagaaaaagatgccacactatctctgtaagttggataaggctctgtatggcttaaaacaggcacctagagcttggtactccaggttgagtaaaaggctacaagaacttggttttgtttcatctaaggctgatacatctttgttcttctataataagaagggacttgttatgtttctgcttgtatatgttgatgatattatagttgctagctcttctggtcaagcagttacagttttactcaaggaacttgagaaagattttgctctgaaagatcttggggatctgcactactttctgggaattgaagtaaagaaaactgagaaaggtctgctgttgacacaggaaaggtatgcaggtgatattattaagagaactggaatgagtaattgtaagcctgtgagtactcctctctgtgtgtctgaaaaactgtggttaaatgatggtgaatttttgggtgcaaatgatgccagtcagtacaggagtatcgttggggctctacagtacttaactcttacaagaccagacatatctttctcagttaataaagtgtgtcagttcttacagaatcctactattgtacattgggcagcagtaaagagaatacttagatatctgcaaggtactcttggtctaggattaaagattgacaaatccttttcttatattgttagtgctttctctgatgcagactgggcaggatgtctagatgacaggagatctactggaggttttgcagtatttctgggatcaaatttgatatcctggagtgccaggaagcaagcttctgtatcacgctctagtactgaagccgaatataaagccttggctaatgcaactgctgaggtaatgtgggttcgtaaattgctagaagagattggtttgttgcatccaggaccttctcaattatggtgtgataatattggagctacctatttgtcagcaaatcctgtgtttcatgctagaacaaaacacatagaagtggattaccattttgtcagagaacaggtggcgcagaaaatgttggaaattcggtttgttccgtcacaagatcaaattgctgatggatttacaaagcctcttcctgtgagacaattacaattgttctgtaacaatctcaatcttggagagttgagattgagggggagtgttagatga

SEQ ID NO: 14717 - DNA, 336 bp, Oryza sativa
  Clone ID: TFbOSC23733j.C1.o3.gm
atgtctcccgacagagacgaggctgccgcgtgtgacgacgcgattggcgcggttgccgcgtgtggcgcggccgagggactcgctgcgtgtcgcggcgtgaccggttctgcagatcgagatgacgccgagttctcctggattagaatcatcaatcagcggttgatcatgcatctgtacacccccgtgatcaagcagcggaagaagatgcgccgggaggagattgatctcagcccggaggcgagcaccggcgttgggatgaagtttttcaaagggatagatttgctcgtcaaagacaacatcacgggaaatatacacacgccctgtagagatgtctag

SEQ ID NO: 14718 - DNA, 3765 bp, Oryza sativa
  Clone ID: TFbOSC400390j.C1.o57.fg
atgggcaatattgaacaacttaatggaagtaattatgcttcatggaaggagaagctggaaattactctagctctattggatattgattatgccctccataatgatcctccggttgagcctagaccggaaaatgagaattatgagacattaaaaaggatatatgatgaagtaaaggcaaaatgggatatttcaaaccgtaaatgccttatgattatcaagagctccattattgacgcaataagaggagcagtcccagatactcagacagccagagaatatcttgctaaagttgaggaacaatttaaaggctcttctaaggtttatgccaccactcttattaaaagattggtcaatgaaagatacgattttactgaaaatctgagggaacatattatgaagaaatgtcacatggtttctaagcttaaatcaatggaaatggaaatctctgaaggttttcttgtccatttcattatgtcatctctgcctcaggagttttctccatttacgatcaattataatgcaatgaagatcaagtggggcattgatgaattaatagccatgtgtgtacaagaagaagaaaggcttaaggcagaaagagttgaccatgcaaatttatttaagcactccgagaagaaaaagtataagaaatttaagaaggagtatttgaagcctaagcctattcaatttaaagaaaaagggcaatcttcgaatcaatcccagcagaataaatctggaggaaatccctatacagaagaaaagggaaaagaaaaggatgggtgctacttttgtggaaagagtggacaccgccaaaaggactgtattggatttatgagatggctcagtaagaaaggtactgatgttatttcttttgttgatgaatccctaaatattgattatgccaccaattcttggtggattgactcaggagcgacaattcatgttgcaaattccttgcagggattcgctatgaggaggaccctaagaagagggcaaagaagaattagagttgctaatggagttgaaactgaagttgaggccattggagacttcactctcacacttcatactggcttcaaacttcagctgcatgatgttctttattatcgtttgggccatatttcaagggggggaattgagcgtctcattaaagaaaacatcctttatcctttggacttctcagatgcagatgttgatcactgcattgattgcatcaaaggaaaatattccaagcaaatcaagaaaggtgcaaatcgaagtatgggagttttggaaatcatccacacagacatctgtggtccatttaatgaaaagtctgaccgtggtggtgaatactatggtagacatactacttatggtcaaattcctggaccttttgcgaggttcttacaggaaaatggcattaaggcccagtactcagcaccaggcgaaccccagcaaaatggagtagctgaaaggcgtaatcgcactcttatggatatggtacgaagtatgttaagtcactccactctgccggtaaagttatggatggaagctcttaaaacagctacacacattcttaacagggttcctagtaaatcagtccctaagacaccttttgaattatggactgggaagaaaccaaccctaaattattttcatgtgtggggttgtcctgctgaagcacgagttttcaatccaaatatgggaaaattagacatcaaaataatcagttgtcattttatcggttatcctgataagtcaaaggcatatagattctactgcccaaatcagtttacaaagttcattgagacaagacacgctgtgttcttggaaaatgacataatcaaggggagtatgacacccagagaagttgttctggaagagaaacgaaattatattccaatgcctataattgaagaacccgttttctcaacacatactcatgttgcaccttcaatagaaagaaataatgatgcaacacctgctgaaactcctgcaactacttctagtagtgtatcaaatgatgagaataatgaggatgctcagcagccccagattgtgatagatgagcaaaataacgaacccgtcagaagatcacaacgagttagaaagtcagcgattccaagtgactatgtcacttacataaatgaagaggtgaataaacctatgggtgaagaggtgaatgagcctatactagataatgatcccatctcatttaaagaagcaatgaagagtaaacattcgtctgaatggctaaaagctatgaaagatgaaatgaaatccatgagtactaataaagtctgggacttagtagaaattcccgaaggagccaaaacagttggctgcaaatgggtctataagactaaacgtgaccccaagggaaatatcgaaaggttcaaagcaaggcttgtagcaaaaggatttacgcaaagagaagggattgattataatgaaacattttctccagtatctactaaggattcattcagaattattatggcactagttgctcattatgatttggaactacaccaaatggatgttaagacggcattcctgaacggtgatttgtatgaagatgtatacatggcacaaccagaaggttttgttatgaaaggaaaagaacatatgggatgtcatctaaagaaatcgatttatggactaaagcaagcatcaaggcagtggtatctaaagtttgaccaaatcataagacaatttggttttaaagaaaataaaaaggatgactgtatatacactaagtttaaggagagtaagttcatcttcctaatattatatgtcgatgacatactcttagccagtaatgataaaaatatgctactggaaacaaagaaatttctggcctctaagtttgaaatgaaagatctcggtgaagccaattatgtgttgggtatagagatttaccgaggcagatcaaatggtgttttggggctatctcagaaagcatatatagaaaaggtactgaaaaagtataatatgcataattgttcagcctcgcctgctcctataatgaagggtgataagtatggaaaattccaatgtcctaagaatgagtatgaagctgcgcagatgaagtcaatatcatatgcttcagctgtcggaagcataatgtatgcacaagtgtgcactcgccctgatttagcttttgttaccgggatgcttggcagatatcaatctaatccaggtctagaacactggaaattagctaagaagaccttgcgttatcttcaaggcactaaagacctcatgctcacatatagaaagtctgaaaaccttgaagttgttggttattcggactccgatcttgcagggtgtgttgatgataagaaatccacgtcaggttatatattcacccttgcaaggggagctatatcgtggaaaagctccaaacaaagagttactacatcgtcgacaatgcaggctgagtatgtggcatgttatgaagctactggacaggcaatatggctgaaaaactttatcccgggattaagagtggtcgacagcatatcaaaaccactcaaattatactgcgataacaaaccagcagtatactatgcgagtagcaacaaatcaagtgcttctgccaaatacattgatatcaagtaccatgttgtgaaagaaatgatccaggatcagacaataagcattgagtatatgaacactaagttgatgttagcggatccacttacaaaaggcctaccacctgttgtatttaaagaacatgttgccggcataggtttggtagaaaagccttcgatcctggaataa

SEQ ID NO: 14719 - DNA, 3560 bp, Oryza sativa
  Clone ID: TFbOSC400596j.C1.o9.np
atgggaacccctggagatcaagcatcttatgcctcacaaattgccggaataattggcaatattgaacaacttaatggaagtaattatgctccatggaaggagaagcttgaaattactttagctctgttggatattgattatgccctccataatgatcctctggttgagccaagaccggaaaatgagaattatgataccctaaaaaggagatatgatgaagtaaaggcaaaatgggatatttcaaaccgtaaatgccttatgattatcaagagctccattattgacgcaataagaggagcagtcccacatacttagatagccagagaatatcttgctaaagttgaagaagaatttaaaggctcttctaaggtttatgccaccactcttattaaaagattggtcaatgaaagatatgattttactggaaatctgagggaacatattatgaagaaatgtcacatggcttctaagctaaaatcaatggaaatggaaatctctgaaggttttcttgtccatttcattatgtcatctctgccccaggagttttctccatttacgatcaattataatgcaatgaagatcaagtggggcattgatgaattaatagccatgtgtgtacaagaagaggaaaggcttaaggcagcaagagttgaccatgcaaatctatttaaacactccgagaagaaaaagtataagaaatttaagaaggagtatttgaagcctaagcctattcaatttaaagaaatagggcaatctttgaatcaatccgagcagaataaatctggaggaaatctctatacagaagaaaagggaaaagaaaaggatgggtgctacttttgtggaaagagtggacaccgccaaaaggactgtattgggtttatgagatggctcagtaagaaagggattcgctatgaggaggaccctaagaagaggggaaagaagaattagagttgctaatggagttgaaactgaagttaaggccattggagacttcactctcacacttcatactggcttcaaacttcagctgtatgacattctttatgtaccctctatgaaaaggaacttagttttagtttcacgtttagataacggtggttactattgtacttttggaaacaatagatgtataattatgcatgataataaagaggttggtctcgccgatgggaacaactttatcaaatctttatgtgcgatgccacctataatgttcactcctcaaatgcaaatgtcagtaccaaacgaaaatataacgataatgagacttcttcgaaattatggcactatcgtttaggccatatttcgagggggagaattgagcatctcattaaagaaaatatcctctatcctttggacttctcagatgcagatgttgatcactgcattgattgcatcaaaggaaaatattccaagcaaatcaagaaaggtgcaaatcgaagtatgggagttttgaaaatcatccacacagacatctgtggtccatttaatgaaaagtcagtggatggatttgtttcattcataacattcaccgacgactactctcgttatggatatatctatccaatcaaagaaagatctgaggcattagacaagtttaaaattttcaaagcagaagttgagaatcaacatgatcgaaagataaaaatttttacaaagttcattgagacaagacacgttgtgttcttggaaaatgacataatcaaggggagtatgacacccagagaagttgttctggaagagaaacggaattatgttccaatgcatataattgaagaacccgttttctcaacacatactcatgttgcaccttcaatagaaagaaataatgatgcaacacctactgaagctcctgcaactacttctagtagtgtatcaaatgatgagaataatgaggatgctcagcagccccagattgtgatagatgagcaaaataacgaacccgtcagaagatcacaacgagttagaaagtcagcgattccaagtgactatgtcacttacatgaatgaagaggtgaatgaacttatgagtgaagaggtgaatgagcctatactagataatgatcccatctcatttaaagaagcaatgaagagtgaacattcgtctgaatggctaaaagctatgaaagacgaaatgaaatccatgagtactaataaggtctgggacttagtagaaattcccgaaggagccaaaacagttggctgcaaatgggtctataagactaaacgtgaccccaagagaaatatcgaaaggttcaaagcaaggcttgtagcaaaaggatttacgcaaagagaagggattgattataacgaaacattttctccagtctctactaaggattcattcagaattattatggcactagttgcctattatgatttggaattgcaccaaatggatgttaagacggcattcctgaacggtgatttgtataaagatgtatacatggcacaaccagaaggttttgttatgaaagaaaaagaacatatgggatgtcatctaaagaaatcgatttatggactaaagcaagaatcaaggcagtggtatctaaagtttgaccatatcataagacaatttggttttaaggagaataaaaaggatgactgtatatacgctaagtttaaggagaaattcctggtctctaagtttgaaatgaaagatctcggtgaagccacttatgtgttgggtatagagatttaccgagacagatcgaatggtgttttggggctatcctagaaagcatatatagaaaaggtactgaaaaagtataatatgcataattgtttagcctcgcctgctcctataatgaagggtgataagtatggaaaattccaatgtcctaagaatgagtatgaagctgcgcagatgaaatcaataccatatgcttcagctgtcggaagcataatgtatgcacaagtgtgcactcgccctgatttagcatttgttaccgagatgcttggcagatatcaatctaatccaggtctagaacactggaaattagctaagaagaccttgtgttatctacaaggcactaaagacctcatgctcacatatagaaagtctgaaaaccttgaagttgtcggttatttggactctgatcttgcagggtgtgttgatgataagaaatccacgtcaggttatattttcacccttgcagggggagctatatcgtggaaaagctccaaacaaagagttactgcatcgtcgacaatgcaggctgagtatgtggcatgttatgaagctactagacaggcaatatggctgaagaactttatcctgggattgagagtggtcgacagtatatcaaaaccactcaaattatactgtgataacaaaccagcagtatactatgcgagtagcaacaaataagtgcttctgccaagtacattgatatcaagtaccatgtcgtgaaagaaatgatccaggatcagacaataagcgttgagtatatgaacactaagttgatgttagcggatccacttacaaaaggcctaccacccgttgtatttaaagaacatgttgccagcatgggtttggtagaaaagcctttgatcctggaa

SEQ ID NO: 14720 - DNA, 3678 bp, Oryza sativa
  Clone ID: TFbOSC401051j.C1.o47.fg
atgggaactccgggagatcaagcatcttatgcctcacaaatttccggaataatgggaaatattgaacaacttaatggaagtaattatgcttcatggaaagaaaagctggaaattactctagctatgttggatattgattatgccctccataatgatcctccagttgaacctagaccggaaaatgagaattatgagaccctaaaaaggatatatgatgaagtaaaggcaaaatgggatatttcaaaccgtaaatgccttatgattatcaaaagctccattattgacgcaataagagtagcagttccagatactcagacagctagagaatatcttgctaaaattgaggagcagtttaaaggctcttctaaggtttatgccaccactcttattaaaagattggttaatgaaagatatgatttttctggaaatctgagggaacatattatgaaaaaatgtcatatggcttctaagcttaaatcaatggaaatggaaatctctgaaggttttcttgtccatttcattatgtcatctctgcctcaggagttttctccatttacaatcaattataatgcaatgaagatcaagtggggcattgatgaattaatagccatgtgtgtacaagaagaggaaaggcttaaggcagaaagagttgatcatgcaaatctatttaaacactctgagaagaaaaagtataagaaatttaagaaggagtatttgaagcctaagcctattcagtttaaagaaaaagggcaatcttcgagtcaatcccagcagaataaatctggaggaaatccctatacagaagaaaaggaaaaagaaaaggatgggtgctacttttgtggaaagagtggacaccgccaaaaagactgtattgggtttatgagatggctcagtaagaaaggtactgatgttatttcttttgttgatgaatccctgaatattgattatgccaccaattcttggtggattgactcaggagcgacaattcatgttgcaaattccttgcagggattcgctatgaggaggaccctaagaagaggggaaagaagaattagagttgctaatggagttgaaactgaagttgaggctattggagacttcactctcacacttcatactggcttcaaacttcagctacatgatgttctttatgtaccctctatgaaaagaaacttagtttcagtttcacgtttagataacggtggttactattgtacttttggaaacaatagatgtataattatgcatgataataaagaggttggtctcgccgttggacgggaacaactttatcaaatctctgtgtgcgatgccacctataatgtggactcctcctcaaatgcaaatatcagtaccaaacgaaaacataacgataataagactttttcgaaattatggcactatcgtttgggccatatttcgagggggagaattgagcgtctcattaaagaaaacatcctttatcctttggacttctcagatgcagatgttgttcactgcattgattgcatcaaaggaaaatattccaagcaaatcaagaaaggtgcaaatcgaagtatgggagttttggaaatcatccacacagacatctgtggtccatttaatgaaaagtcagtggatggattcgattcattcataacattcaccaacgattactctcgttatggatatatctatccaatcaaagaaagatctgaggcattagacaaatttaaaattttcaaagtagaagttgagaatcaacatgatcgaaagatcaaaatttttacaaagttcattgagacaagacacgctgtgttcttggaaaatgacataatcaaggggagtatgacacccagagaagttgttctggaagagaagcggaattatgttccaatgcctataattgaagaacccgttttctcaacacatactcatgttgcaccttcaatagaaagaaataatgatgcaacacctgctgaagctcctgcaactacttctagtagtgtatcaaatggtgagaataatgaggatgctcagcagccccagattgtgatagatgagcaaaataacgagcccgtcagaagatcacaacgagttagaaagtcagcgattccaagtgactatgtcatttacatgaatgaagaggtgaatgaacctatgattgaagaggtgaatgagcctatactagataatgatcccatctcatttaaagaagcaatgaagagtgaacattcgtctgaatggctaaaagctatgaaagacgaaatgaaatccatgagtacaaataaggtctgggacttagtagaaattcccaaaggagccaaaacagttggctgcaaatgggtctataagactaaacgtgaccccaagggaaatatcgaaaggttcaaagcagggcttgtagcaaaaggatttacacaaagagaagggattgattataatgaaacattttctccagtgtctactaaggattcattcagaattattatggcactagttgctcattatgatttggaattacaccaaatggatgttaagacggcattcctgaacggtgatctgtatgaagatgtatacatggcacaaccagaaggttttgttatgaaaagaaaagaacatatgggatgtcatctaaagaaatcaatttatggactaaagcaagcatcaaggcagtggtatctaaagtttgaccaaatcataagacaatttggttttaaagcaaataaaaaggatgactgtgtatacgctaagtttaaagagaaaattctggcctctaagtttgaaatgaaagatctcggtgaagccacttatgtgttgggtatagagatttaccgagacagatcaaatggtgttttggggttatctcagaaagcatatatagaaaaggtactgaagaagtataatatgcataattgttcagcctcgcctgctcctataatgaagggtgataagtatggaaagttccaatgtcctaagaatgagtatgaagctgcgcagatgaagtcgataccatatgcttcagctatcagaagcataatgtatgcacaagtgtgcactcgccctgatttagcttttgttaccgggatgcttggcagatatcaatctaatccaggtctagaacactggaaattagctaagaagaccttgcgttatctacaaggcactaaagacctcatgctcacatatagaaagtctgaaaaccttgaagttgttggttattcggactctgatcttgcagggtgtgttgatgataagaaatccacatcaggttatatattcacccttgcaaagggagctgtatcgtggaaaagctccaaacaaagagttactgcatcgtcgacaatgcaggctgagtatgtggcatgttatgaagctactggacaggcaatatggctgaaaaactttatcccgggattaagagtggtcgacagcatatcaaaaccactcaaattatactgcgataacaaaccagcagtatactatacgagtagcaacaaatcaagtgcttctgccaagtacattgatatcaagtaccatgttgtgaaagaaatgatccaggatcagacaataagcgttgagtatatgaacactaagttgatgttagcggatccacttacaaaaggcctaccacccattgtatttaaagaacatgttgccggcatgggtttggtagaaaagcctttgatcctggaataa

SEQ ID NO: 14721 - DNA, 1884 bp, Oryza sativa
  Clone ID: TFbOSC405418j.C1.o1.fg
atggccgccgccacggcctcctcgccggcgaccgccgccgccgccaactccgatgacgaagacaactacgaggagtacatccccgtcgccaagcgccgggccatggaggccgaccgcctccgccgcctccgcctctccaagcccgcgcccccatcctcctccgccgcggaggccgcctcggatctcccgcctccccctcccccaccgccgaaccagccctcagccggcggtggcggtggcggcctcgaagcctccgcgaagcccagcctcctcgtcaaggcgacgcagctcaagcgggccgcgccggaggtgacccacacggagcagctcatcatgcaggagaaggagatgatcgagcacctctccgaccgcaagacgctcatgtcggtgcgcgagctcgccaaggggatcacctactccgacccgctcaagacggggtggaagccgccgctccgcctccgccgcatgccgcgcgccaaggccgacgagctccgccgcaagtggcacatcctcgtggacggggacgacgtgccgccgcccgctcgggacttccgcgacctccgcctgcccgagcccatgctgcgcaagctccgcgagaagggcatcgtccagcccactcccatccaggtgcagggattgcccgtggtgctctccgggcgcgacatgattggcattgccttcacagggtccgggaagacgttggtgtttgtgctgccgctcatcatggtggcattacaggaggagatgatgatgccaatcgtgccgggtgaagggccatttgggatgatcatctgtccatcgcgagagctggccaagcaaacgtacgatgtcattgagcagttccttgttccacttaaggaggctgggtacccggagatacgcccgttgctttgcattgggggtgtcgatatgagggcgcagctggatgtggtcaagaagggagtacatattgtggtggctacacctggccgactcaaggatttacttgccaagaaaaagatgaacctcgacaattgcaggtacttgaccttggatgaagctgataggcttgtcgatcttgggtttgaggatgatatccgtgaggtttttgaccatttcaaggcacaaaggcagacacttctattttctgccactatgccgaagaagattcaaaactttgcgaagagtgcccttgtgaaacctgttattgtgaatgttggtagagctggtgcggcaaatctggatgtcatccaagaagttgagtatgtcaaggaggatgccagaattatatatctcctggaatgcctccagaagactccacctccagttcttgtcttttgtgaaaacaaagctgatgtcgactatatccatgagtatcttcttctgaagggtgtagaggctgttgcaatccatggaggaaaggatcaagaggaaagagagaatgcaatcgagttcttcaagaatggaaagaaggatgttttggtggctactgatgttgcctcgaaaggtcttgatttccctgatatccagcatgtgattaactatgatatgcctgctgaaatagaaaactatgttcaccggattggtcgaactggtcgatgtgggaaaactggaatagcaacaaccttcataaacaagaatcaaacggagactacccttcttgaccttaagcacttgcttaaggaagctaagcaaagaataccgccagtgttggctgagctcaatgacccattggaagatgaggaaaccatggccaaggagagcggtgttaagggatgtgcatactgtggtggtcttggccatcgtgttaccgactgtccaaagctggagcaccagaagtccatggcgatcgcgggctctagaagagattactatggcggtggaggctacagaggagaaatatga

SEQ ID NO: 14722 - DNA, 3297 bp, Oryza sativa
  Clone ID: TFbOSC416746j.C1.o19.fg
atgggaacccctggagatcaagcatcttatgcctcacaaattgccagaataatgggcaatattgaacaacttaatggaagtaattatgcttcatggaaggagaagctggaaattactctagctctgttggatattgattatgccctccataatgatcctccggttgagccgagaccggaaaatgagaattatgagaccctaaaagggagatatgatgaagtaaaggcaaaatggtatatttcaaaccgtaaatgccttatgattatcaaaagctccattattgacgcaataagaggagcagtcccagatactcagacagccagagaatatcttgctaaagttgaagaacaatttaaaggctcttctaaggtttatgccaccactcttattaaaagattggtcaatgaaagatatgattttactggaaatctgagggaacatattatgaagaaatgtcacatggcttctaagcttaaatcaatggaaatggaaatctctgaaggttttcttgtccatttcattatgtcatctctgcctcaggagttttctccatttacgatcaattataatgcaatgaagatcaagtggggcattgatgaattaatagccatgtgtgtacaagaagaggaaaggcttaaggcagaaagagttgaccatgcaaatctatttaaacactccgagaagaaaaggtataagaaatttaagaaggagtatttgaagcctaagcctattcaatttaaagaaaaagggcaatcttcgaatcaatcccagcagaataaatctggaggaaatccctatacagaagaaaagggaaaagaaaaggatgggtgctacttttgtggaaagagtggacaccgccaaaaggactgtattgggtttatgagatggctcagtaagaaagatgttgatcactgcattgattgcatcaaaggaaaatattccaagcaaatcaagaaaggtgcaaatcgaagtatgggagttttggaaatcatccacacagacatctgtggtccatttaatgaaaagtcagtggatggatttgattcattcataacattcaccgacgactactctcgttatggatatatctatccaatcaaagaaatatctgaggcattagacaaatttaaaattttcaaagcagaagttgagaatcaacatgatcgaaagatcaaaattgtaaggtctgaccgtggtggtgaatactatggtagacatactacttatggtcaaattcctggaccttttgcgaggttcttacatgaaagtggcattaaggcccagtactcagcaccgggcgaaccccagcaaaatggagtagctgaaaggcgtaatcgcactcttatggatatgggttgtcctgctgaagcacgagttttcaatccaaatatgggaaaattagacctcaaaacaatcagttgtcattttattggttatcctgataagtcaaaggcatatagattctactgcccaaatcagtttacaaagttcattgagacaagacacgctgtgttcttggaaaatgacataatcaaggggagtatgacacctagagaagttgttctggaagagaaacggaattatgttccaatgcctataattaaagaacccgttttctcaacacatactcatgttgcaccttcaatagaaagaaataatgatgcaacacctgctgaagctcctgcaactacttctagtagtgtatcaaatgatgagaataatgaggatgctcagcagccccagattgtgatagatgagcaaaataatgaacccgtcagaaaatcacaacgagttagaaagtcagcgattccaagtgactatgtcacttgcatgaatgaagatgtgaatgaacctatgagtgaagaggtgaatgagcctatactagataatgatcccatctcatttaaagaagcaatgaagagtgaacattcgtctgaatggctaaaagctatgaaagacgaaatgaaatccatgagtactaataaagtctgggacttagtagaaattcccgaagcagccaaaacagttggctgcaaatgggtctataagactaaacgtgaccccaagggaaatatcgaaaggttcaaagcaaggcttgtagcaaaaggatttacgcaaagagaagggattgattataatgaaacattttctccagtgtctactaaggattcattcagaattattatggcactagttgctcattatgatttggaattacaccaaatggatgttaagacggcattcctgaacggtgatctgtatgaagatgtatatatggcacaaccagaaggttttgttatgaaaggaaaagaagatatgggatgtcatctaaagaaatcgatttatggactaaagcaagcatcaaggcagtggtatctaaagtttgaccaaatcataagacaatttggttttaaagagaataaaaaggatgactgtatatacactaagtttaaggagagtaagtttatctttctaatattatatgttgatgacatactcttagccagtaatgacaaaaatatgctactggaaacaaagaaatttctggcctctaagtttgaaatgaaagatctcggtgaagccacttatgtgttgggtatagagatttatcgagacagatcaaatggtgttttggggttatctcagaaagcatatatagaaaaggtactgaagaaatataatatgcataattgttcagcctcgcctgctcctataatgaagtgtgataagtatgaaaaattccaatgtcctaagaatgaatatgaagctgcgcagatgaaatcaataccatatgcttcagctatcggaagcataatgtatgcacaagtgtgcgctcgccctgatttagcatttgttaccgggatgcttggcagatatcaatctaatccagggggagctgtatcgtggaaaagctccaaacaaagagttactgcatcgtcgacaatgcaggctgagtatgtggcatgttatgaagctactggacatgcaatatggctgaaaaactttatcccgggattgagagtggtcgacagtatatcaaaaccactcaaattatactgtgataacaaaccagcagtatactattcgagtagcaacaaatcaagtgcttctgccaagtacattgatatcaagtaccatgttgtgaaagaaatgatccaagatcagacaataagcgttgagtatatgaacactaagttgatgttagcggatccacttacaaaaggcctaccacccgctgtatttaaagaacatgttgccggcatgggtttggtagaaaagccttcgatcctggaataa

SEQ ID NO: 14723 - DNA, 3891 bp, Oryza sativa
  Clone ID: TFbOSC421895j.C1.o14.fg
atgggaactccaggagataaagcatcttatgcctcacaaattgccggaataataggcaatattgaacaacttaatggaagtaattatgcttcatggaaggagaagctggaaattactctagctcagttggatattgattatgccctccataatgatcctccggttgagcctataccggaaaatgaaaattatgagaccctaaaaaggagatatgatgaagtaaaggcaaaatgggatatttcaaaccgtaaatgccttatgattattaagagctccattattgacgcaataagaggagcagttccagatactcagacagccagagaatatcttgctaaagttgaggagcagtttaaaggctcttctaaggtttatgccaccactcttattaaaagattggtcaatgaaagatatgattttactggaaatctgagggaacatattatgaagaaatatcacatggcttctaagcttaaatcaatggaaatggaaatctctaaaggttttcttgtccatttcattatgtcatctctgcctcaggagttttctccatttacgatcaattataatgcaatgaagatcaagtggggcattgatgaattaatagccatgtgtgtacaagaagaggaaaggcttaaggcagaaagagttgaccatgcaaatttatttaaacactccgagaagaaaaggtataagaaatttaagaaggagtatttgaagcctaagcctattcaatttaaagaaaaagggcaatcttcgaatcaatcccagcaaaataaatctggaggaaatccctatacagaagaaaagggaaaagaaaaggatgggtgctacttttgtggaaagagtggacaccgccaaaaggactgtattggatttatgagatggctcagtaagaaaggtactgatgttatttcttttgttgatgaatccctgaatattgattatgccaccaattcttggtggattgactcaggagcgacaattcatgttgcaaattccttgcagggattcgctatgaggaggaccctaagaagaggggaaagaagaattagagttgctaatggagttgaaactgaagttgaggccattggagacttcactctcacacttcatactggcttcaaacttcagctgcatgatgttctttatgtaccctctatgaaaaggaacttagtttcagtttcacgtttagataatggtggttactattgtacttttggaaacaatagatgtataattatgcatgataataaagaggttggtctcgccgttggatgggaacaactttatcaaatctctgtgtgcgatgccacctataatgttgattcctcctcaaatgcaaatgtcagtaccaaacgaaaacataacgataatgagacttcttcgaaattatggcactatcgtttgggccatatttcgaaggggagaattgagcgtctcattaaagaaaacatcctttatcctttggacttctcagatgcagatgttgatcactgcattgattgcatcaaaggaaaatattccaagcaaatcaagaaaggtgcaaatcgaagtatgggagttttggaaatcatccacacagacatctgtggtccatttaatgaaaagtcagtggatggatttgattcattcataacattcaccgacgattactctcgttatggatatatctatccaatcaaagaaagatctgaggcattagacaaatttaaaattttcaaagcagaagttgagaatcaacatgatcgaaagatcaaaattgtaaggtctgaccgtggtggtgaatactatggtagacatactacttatggtcaaattcctggaccttttgcgaggttcttacaggaaagtggcattaaggcccagtactcagcaccgggtgaaccccagcaaaatggagtagctgaaaggcgtaatcgcactcttatggatatggtacgaagtatgttaagtcactccactctgccggtaaagttatggatggaagctcttaaaacagctacacacattcttaacagggttcccagtaaatcagtccctaagacaccttttgaattatggactgggaagaaaccaaccctaaattattttcatgtgtggggttgtcctgctgaagcacaagttttcaatccaaatatgggaaaattagacctcaaaacaatcagttgtcattttatcggttatcctgataagtcaaaggcatatagattctactgcccaaatcagtttacaaagttcattgagacaagacacgctgtgttcttggaaaatgacataatcaaggggagtatgacacccagagaagttgttctggaagagaaacggaattatgttccaatgcctataattgaagaacccgttttctcaacacatactcatgttgcaccttcaatagaaagaaataatgatgcaacacctgctgaagctcctgcaactacttctagtagtgtatcaaatgatgagaataatgaggatgctcagcagccccagattatgatagatgagcaaaataacgaacccgtcagaagatcacaacgagttagaaagtcagcgattccaagtgactatgtcacttacatgaatgaagaggtgaatgaacctatgagtgaagaggtgaatgagcctatacttgataatgatcccatctcatttaaagaagcaatgaagagtgaacattcatctgaatggctaaaagctatgaaagatgaaatgaaatccatgagtacaaataaggtctgggacttagtagaaattcccgaaggagccaaaacagttggctgcaaatgggtctataagactaaacgtgaccccaagggaaatatcgaaaggttcaaatcaaggcttgtagcaaaaggatttacgcaaagagaagggattgattataatgaaacattttctccagtgtctactaaggattcattcagaattattatggcactagttgctcattatgatttggaattacaccaaatggatgttaagacggcattcctaaacggaaaagaacatatgggatgtcatctaaagaaatcgatttatggactaaagcaagcatcaaggcagtggtatctaaagtttgaccaaatcataagacaatttggttttaaagaaaataaaaaggatgactgtatatacactaagtttaaggagagtaagttcatcttcctaatattatatgttgatgacatactcttagccagtaatgacaaaaatatgctactggaaacaaagaaatttctggcctctaagtttgaaatgaaagatctcggtgaagccacttatgtgttgggtatagagatttaccgagacagatcaaatggtgttttagggttatctcagaaagcatatatagaaaaggtactgaagaaatataatatgcataattgttcagcctcgcctgctcctataatgaagggggataagtatggaaaattccaatgtcctaagaatgagtatgaagctgcgctgatgaagtcaataccatatgcttcagctgtcggaagcataatgtatgcacaagtgtgcactcgccctgatttagcttttgttaccgggatgcttggcagatatcaatctaatccaggtctagaacactggaaattagctaagaagaccttgcgttatcttcaaggcactaaagacctcatgctcacatatagaaagtctgaaaaccttgaagttgttggttattcggactctgatcttgcagggtgtgttgatgataagaaatccacgtcaggttatatattcacccttgcaaggggagctgtatcgtggaaaagctccaaacaaagagttactacatcgtcgacaatgcaggctgagtatgtggcatgttatgaagctactggacaggcaatatggctgaaaaactttatcccgggataa

SEQ ID NO: 14724 - DNA, 4224 bp, Oryza sativa
  Clone ID: TFbOSC900317j.C1.o15.fg
atgggaacccctggagatcaagcatcttatgcctcacaaatttccggaataatgggaaatattgaacaacttaatggaagtaattatgcttcatggaaagaaaagctggaaattactctagctctgttggatattgattatgccctccataatgatcctccggttgagcctagaccggaaaatgagaattatgagacccttaaaaggatatatgatgaagtaaaggcaaaatgggatatttcaaaccgtaaatgccttatgattatcaagagctccattattgacgcaataagaggagtagttccagatactcagacagccagagaatatcttgctaaaattgaggagcaatttaaaggctcttctaaggtttatgccaccactcttattaaaaggttggtcaatgaaagatatgattttactggaaatctgagggaacatattatgaagaaatgtcacatggcttctaaacttaaatcaatggaaatggaaatctctgaaggttttcttgtccatttcattatgtcatctctgcctcaggagttttcttcatttacaatcaattataatgcaatgaagatcaagtggggcattgatgaattaatagccatgtgtgtacaagaagaggaaaggcttaaggcagaaagagttgaccatgcaaatctatttaaacactccgagaagaaaaagtataagaaatttaagaaggagtatttgaagcataagcctattcagtttaaagaaaaagggcaatcttcgagtcaatcccagcagaataaatctggaggaaatccctatacagaagaaaagggaaaagaaaaggatgggtgctacttttgtggaaagagtggacaccgccaaaaagactgtattgggtttatgagatggcttagtaagaaaggtactgatattatttcttttgttgatgaatccctgaatattgattatgccaccaattcttggtggattgactcaggagcgacatttcatgttgcaaattccttgcagggattcgctatgaggaggaccctaaaaagaggggaaagaagaattagagttgctaatggagttgaaactgaagttgaggctattggagacttcactctcacacttcatactggcttcaaacttcagctgcatgatgttctttatgtaccctctatgaaaagaaacttagtttcagtttcacgtttagataacgatggttactattgtacttttggaaacaatagatgtataattatgcatgataataaagaggttggtctcgccgttggatgggaacaactttatcaaatctctgtgtgcgatgccacctataatgttgactcctcctcaaatgcaaatatcagtaccaaacaaaaacataacgataatgagacttcttcgaaattatggcactatcgtttgggccatatttcgagggggagaattgagcgtctcattaaagaaaacattctttatcctttggacttctcagatgcagatattgatcactgcattgattgcatcaaaggaaaatattccaagcaaatcaagaaaggtgcaaatcgaagtatgggaattttggaaattatccacacagacatctgtggtccatttaatgaaaagtcagtggatggatttgattcattcataacattcaccgacgattactctcgttatggatatatttatccaatcaaagaaagatctgaggcattagacaaatttaaaatcttcaaagcagaagttgagaatcaacatgatcgaaagatcaaaattgtaagatctgaccgtggtggtgaatactatggtagacatactacttatggtcaaattcctggaccttttgcgaggttcttacaggaaagtggcattaaggcccagtactcagcaccgggcgaaccccagcaaaatggagtagctgaaaggcgtaatcgcactcttatggatatggtacgaagtatgttaagtcactccactctgccggtaaagttatggatggaagctcttaaaacagctacacacattcttaacaggattcccagtaaatcagtccctaagacaccctttgaattatggactgggaagaaaccaaccctaaattattttcatgtgtggggttgtcctgctgaagcacgagttttcaatccaaatatgggaaaattagacctcaaaacaatcagttgtcattttatcggttatcctgataagtcaaaggcatatagattctactgcccaaatcagtttacaaagttcattgaaacaagacacgctgtgttcttggaaaatgacataatcaaggggagtatgacacccagagaggttgttctggaagagaaacggaattatgttccaatgcctataattaaagaacccgttttctcaacacatactcatgttacaccttcaatagaaagacataatgatgcaacacctgctgaagctcctgcaactacttctagtagtatatcaaatgatgagaataatgaggatgctcagcagccccagattgtgatagatgagcaaaataacgaacccgtcagaagatcacaacgagttagaaagtcagcaattccaagtgactatatcacttacatgaatgaagaggtgaatgaacctatgagtgaagaggtgaatgagcctatactagataatgatcccatctcatttaaagaagcaatgaagggcgaacattcgtctgaatggctaaaagctatgaaagacgaaatgaaatccatgagtacaaataaggtctgggacttagtagaaattcccgaaggagccaaaacagttggctgcaaatgggtctataagactaaacgtgaccccaagggaaatatcaaaaggttcaaagtaaggcttgtagcaaaaggatttacgcaaagagaagggattgattataatgaaacattttctccagtgtctactaaggattcattcagaattattatggcactagttgctcattatgatttggaattacaccaaatggatgttaagacggcattcctgaacggtgatctgtatgaagatgtatacatggcacaaccagaaggttttgttatgaaaggaaaagaacatatgggatgttatctaaagaaatcgatttatggactaaagcaagcatcaaggcagtggtatctaaagtttgaccaaatcataagacaatttggttttaaagaaaataaaaaggatgactgtatatacgctaagtttaaagagagtaagttcatcttcctaatattatatgttgatgacatactcttagccagtaataacagaaatatgctactggaaacaaagaaatttctggcctctaagtttgaaatgaaagatctcggtgaagccacttatgtgttgggtatagagatttaccgagacagatcaaatggtgttttggggttatctcagaaagcatatatagaaaaggtactgaagaagtataatatgcataattgttcagcctcgcctgctcctataatgaagggtgataagtatggaaagttccaatgtcctaagaatgagtatgaagctgcgcagatgaagtcaataccatatgcttcagctgtcggaagcataatgtatgcacaagtgtgcactcgcccagatttagcttttgttaccgggatgcttggcagatatcaatctaatccaagtctagaacactggaaattagctaagaagaccttgcgttatcttcaaggcactaaagacctcatgctcacatatagaaagtctgaaaaccttgaagttattggttattcagactctgatcttgcagggtgtgttgatgataagaaatccacgtcaggttatatattcacccttgcaaggggagctgtatcgtggaagagctccaaacaaaaggttactgcatcgtcgacaatgcaggctgagtatgtggcatgttatgaagctactggacaggcaatatggctgaaaaactttatcccaggattaagagtggtcgacagcatatcaaaaccactcaaattatactgcgataacaaaccagcagtatactatgcgagtagcaacaaatcaagtgcttctgccaagtacattgatatcaagtaccatgttgtgaaagaaatgatccaagatcagacaataagcgttgagtatatgaacactaagttgatgttagcggatccacttacaaaagacctaccacccgctgtatttaaagaacatgttgccggcatgggtttggtagaaaagcctttgatcctggaataa

SEQ ID NO: 14725 - DNA, 3942 bp, Oryza sativa
  Clone ID: TFbOSC400615j.C1.o16.fg
atggcgagctcttctatggcggcggcaatctccaaccctctgtttggcctccaaatctcggagaagctaaccaaacagaatcatcctctctgggctgcacagatcctcaccaccttgcgaggtgcgcagctggaggagcacatcgtcagcacgaccgcagctccggcggctgaaattgaaaaagaagacggcgacaaggacaagaagaccaagattgtcatccccaaccctgagtacaagacatggtttgttcaggaccagcaagtgctcggattcatcttctcctctctatcaagggaggtgctgcaacaagtggccggcgctaggacggcggcccaggcatggaacatgattgatgacatgttctcgtgcaagtcgaaggcgggtacaatcaatgtactcctcgccttaaccaccacacagaagggacctatgtctatcagcgaatatattgcgaagatgaggtccctcgccgacgagatggcggctgcagggaagccgctggatgaggaggagctggtggcgtacatcatcaacgggctggattcagaattcgacgccgcggttgaaggaccgatggccacggcaaggattgctccagtttcaatttctcatgtttattcacagctcttgagttatgaaaacaggattcggattcggcaagcttatctcaccacttcggcaaatgcggcaaaccgaggtggtggtcgtggtggacgcggcagcagcactggaaacagaggtggcggacgcggcggcttcggtcgtggcggtcacggccgcggcgcccctagcggcgcaagtcagggacgcgggcgaggcaatgatactcgccccgtgtgccaagtgtgtcacaagcgagggcatgttgcaagcgactgctggcatcgttatgatgactcatatgttcctgatgagaagcttggcggtgctgcaacatacgcctacggtgttgataccaactggtatgttgacactggggcgacgaatcacattaccgggcagctagacaaattgacaaccaaggagagatacaagggaacagatcaaattcacactgcaagtggcgaaggtatgagtattaaacatgttggtcatgctattgttcctactcctagtcgccccttgcatcttaaaaatgttttacatgttcctgaagcggcgaaaaatctagtatctgttcataaacttgttgcagataattatgcttttcttgaaattcatggcaaatattttttgattaaggacaaggccacgaggaggacaattcttgaaggtccctgtcgacgaggcctgtacccacttccagccagattgtctttgagacaggccttcgttgcgacgccatcttttgagaggtggcatgggcgtcttggtcatctctccaagccaattgttcttagaattctcagtcaaaataaattgccttgtcttagtaattctgtcaatgagtctgtgtgtgatgcctgtcaacaagcaaagtgtcatcaattaccttttcctagatcaactagcgtgtcaaataatcctttggaacttattcattccgatgtgtgggggcctgcctctgagtctgtaggtgcaaagaaatactatgttagtttcattgatgattatagtaaattcgtttggatctactttcttaagcataaatctgaggtgtttcagaagtttcatgaatttcagaaacttgttgaaaggcaatttgatcgcaaaattctttcgatgcaaactgattggggaggcgaatatcttaagctgcacactttctttaatgaaatagggatctcccatcatgtctcttgccctcacacacatcaacaaaatggagctgtagagcgcaaacatcgccacatagtagaagttggtctatctcttttagctcatgcctccatgcctttgaaattctgggatgaagcctttttagctactacttatttcattaatcgccttcctagtaaggtcataaaatttgatacaccccttgaacgaatctcccagaaatgtgaattcagatataccgggggcatttggccgggtacatggagcaaatggcgacttggcgggagaatccgcctcagattcagcgtcggtccaggcgcagctgcagcggcaggcctccggatctgcgacgcagggggagtcggagcagcagcgctcgggcatccaaccagcgcgcgcgccacgtcgcctgctgcatcgcctactgctgctcctccatcgcctgcccgtgctgtcgcgtcttcgtcaggtggtgcgcagcagtcacatcagccaggatcatctgcgccgtctgagtctgcacagctatctgaggtaatgcgacctaaaacaaggttacaaagtggtattagaaaagagaaaatatacactgatgggacagttagatacagttgttttacatcttctggagaaccacaaactttgcatgaggctttaggtgataaaaattggaaagaagcaatggatagtgaatatcaagctcttatgaaaaacaaaacctggcacctagttccttctaagaaagggcagaatataatagattgtaagtgggtctataaggtcaaacgaaaggccgatggcagtctagatcgatataaggctagacttgtggcaaaggggttcaaacagagatatggtatagattatgaggataccttcagtcctgtagttaaggctgctactatcagaactattttgtccatagcaatctctagaggttggacccttcgtcagctagatgtacagaatgcctttcttcatggggttctagaggaagatgtctttatgaggcagccaccaggttatgaacagaaagatggctatgtgtgcaaactagataaggccttatatggtttaaagcaggctcccagggcatggtattccaggttaagtactaagctgcatgagttaggttttaaatcatctaagtcagatacatctttgttcttttacagtaagggagatgttactatgtttatgttggtatatgtggatgacattatagtagccagctcatctattgatgccactaatgctttgcttaagaatcttaatcaagaatttgcactcaaggatctaggaagactgcattacttcctaggcattgaagttaaagaagtaaatgatggcatagttttgacacaagagaaatatgctatggatgtgttaaagagagtgaatatgagtgactgtaaagcagtcaatactcctttgtctatttcagaaaaattaagtgctcatgaaggtaatcctcttggaccagaagacagtaccaggtacagaagtctggttggagcattgcagtatttgactctgactagaccagatttatcattttcagtaaataaggtgtgccagtatttgcatgcaccaaccactaagcattgggcggcggctaagaggattttgagatatttgaaacatacagttaagcttgggctaaaaattagcaagtctaattctcttcttgtaagtgctttctctgatgcagattgggcaggatgtttggatgatcggcgttctactgggggttttgctgtttttatagggcctaatcttgtgtcctggagtgcacgtaagcaagctactgtatccagatctattacagaagcagaatataaggctttggctaatgctactgcagagattatgtggatacaaaccttacttcatgaactgggaattcaggtacccaaaattgctaaggtatggtgtgataatattggtgcaaagtatatgacagctaatcctgtttttcatgctcgcaccaagcatatcgaggtagattatcactttgttcgtgagcgggttgcaagaaaacttttacaagtggaatatatatctaccaaagatcaagttgctgatggcttcaccaagacactgtcagtcagacagttagagatgtttagaaacaatctaaaccttacaggttcagattga

SEQ ID NO: 14726 - DNA, 3096 bp, Oryza sativa
  Clone ID: TFbOSC400622j.C1.o17.fg
atggcgagcttttctatggcggcggcaatctccaaccctctgtttggcctccaaatctcggagaagctaaccaaacagaatcatcctctctgggctgcacagatcctcaccaccttgcgaggtgcgcagctggaggagcacatcgtcagcacgaccgcagctccggcggctgaaattgaaaaagaagacggcgacaaggacaagaagaccaagattgtcatccccaaccctgagtacaagacatggtttgttcaggaccagcaagtgctcggattcatcttctcctctctatcaagggaggtgctgcaacaagtggccggcgctaggacggcggcccaggcatggaacatgattgatgacatgttctcgtgcaagtcgaaggcgggtacaatcaatgtactcctcgccttaaccaccacacagaagggacctatgtctatcagcgaatatattgcgaagatgaggtccctcgccgacgagatggcggctacagggaagccgctggatgaggaggagctggtggcgtacatcatcaacgggctggattcagaattcgacgccgcggttgaaggactgatggccacggcaaggattgctccagtttcaatttctcatgtttattcacagctcttgagttatgaaaacaggattcggattcggcaagcttatctcaccacttcggcaaatgcggcaaaccgaggtggtggtcgtggtggacgcggcagcagcactggaaacagaggtggcagacgcggcggcttcggtcgtggcggtcgcggccgcggcgcccctagcggcgcaagtcagggacgcgggcgaggcaatgatactcgccccgtgtgccaagtgtgtcacaagcgagggcatgttgcaagcgactgctggcatcgttatgatgactcatatgttcctgatgagaagcttggcggtgctgcaacatacgcctacggtgttgataccaactggtatgttgacactggggcgacggatcacattaccgggcagctagacaaattgacaaccaaggagagatacaagggaacagatcaaattcacactgcaagtggcgaaggtatgagtattaaacatgttggtcatgctattgttcctactcctagtcgccccttgcatcttaaaaatgttttacatgttcctgaagcggcgaaaaatctagtatctgttcataaacttgttgcagataattatgcttttcttgaaattcatggcaaatattttttgattaaggacaaggccacgaggaggacaattcttgaaggtccctgtcgacgaggcctgtacccacttccagccagattgtctttgagacaggccttcgttgcgacgccatcttttgagagaatctcccagaaatgtgaattcagatataccgggggcatttggccgggtggtgcgcagcagtcacatcagccaggatcatctgcgccgtctgagtctgcacagctatctgaggtaatgcgacctaaaacaaggttacaaagtggtattagaaaagagaaaatatacactgatgggacagttagatacagttgttttacatcttctggagaaccacaaactttgcatgaggctttaggtgataaaaattggaaagaagcaatggatagtgaatatcaggctcttatgaaaaacaaaacctggcaccgagttccttctaagaaagggcagaatataatagattgtaagtgggtctataaggtcaaacgaaaggccgatggcagtctagatcgatataaggctagacttgtggcaaaggggttcaaacagagatatggtatagattatgaggacaccttccgtcctgtagttaaggctgctactatcagaactattttgtccatagcaatctctagaggttggacccttcgtcagctagatgtacagaatgcctttcttcatggggttctagaggaagatgtctttatgaggcagccaccaggttatgaacagaaagatggctatgtgtgcaaactagataaggccttatatggtttaaagcaggctcccagggcatggtattccaggttaagtactaagctgcatgagttaggttttaaatcatctaagtcagatacatctttgttcttttacagtaagggagatgttactatatttatgttggtatatgtggatgacattatagtagccagctcatctattgttgccactaatgctttgcttaagaatcttaatcaagaatttgcactcaaggatctaggaagactgcattacttcctaggcattgaagtgaaagaagtaaatgatggcatagttttgacacaagagaaatatgctatggatgtgttaaagagagtgaatatgagtgactgtaaagcagtcaatactcctttgtctatttcagaaaaattaagtgctcatgaaggtaatcctcttggaccagaagacagtaccaggtacagaagtctggttggagcattgcagtatttgactctgactagaccagatttatcattttcagtaaataaggtgtgccagtatttgcatgcagcaaccactaagcattgggtggcggctaagaggattttgagatatttgaaacatacagttaagcttgggctaaaaattagcaagtctaattctcttcttgtaagtgctttctctgatgcagattgggcaggatgtttggatgatcggcgttctactgggggttttgctgtttttatagggcctaatcttgtgtcatggagtgcacgtaagcaggctactgtatccagatctagtacagaagcagaatataaggctttggctaatgctactgcagagattatgtggatacaaaccttacttcatgaactgggaattcaggtacccaaaattgctaaggtatggtgtgataatattggtgcaaagtatatgacagctaatcctgtttttcatgctcgcaccaagcatatcgaggtagattatcactttgttcgtgagcgggttgcaagaaaacttttacaagtggaatatatatctaccaaagatcaagttgctgatggcttcaccaagacactgtcagtcagacagttagagatgtttagaaacaatctaaaccttacaggttcagattga

SEQ ID NO: 14727 - DNA, 1501 bp, Oryza sativa
  Clone ID: TFbOSC401245j.C1.o3.gm
aggtggcggacgcggcggcttcggtcgtggcggtcacggccgtggcgcccctagcggcgcaagtcagggacgcgggcgaggcaatgatactcgccccgtgtgccaagtgtgtcacaagcgagggcatgttgcaagcgactgctggcatcgttatgatgactcatatgttcctgatgagaagcttggcggtgctgcaacatacgcctacggtgttgataccaactggtatgttgatactggggcgacggatcacattaccgggcagctagacaaattgacaaccaaggagagatacaagggaacagatcaaattcacactgcaagtggcgaaggtacgagtattaaacatgttggtcatgctattgttcctactcctagtcaccccttgcatcttaaaaatgttttacatgttcctgaagcggcgaaaaatctagtatctgttcataaacttgttgcagataattatgcttttcttgaaattcatggcaaatattttttgattaaggacaaggccacgaggaggacaattcttgaaggtccctgtcgacgaggcctgtacccacttccagccagatcgtctttgagacaggccttcgttgcgacgccatcttttgtgagggtatatgtatctcgtgatgtcacctttgatgaacaagtgtttccctttgctaatcttcatccaaatgctggcgcccgtcttcgagctgaaatttctttgcttcctcctactctaatcaatgagaaaacatctgatcaagggggagaggaacatcatgatcatctgtttaatatctctatgccaaatgctactgatatttcatgtgcagaatctcccagaaatgtgaattcagatataccgggggcatttggccgggtacatggagcaaatggcgacttggcgggagaatccgcctcagattcagcgtcggtccaggcgcagctgcagcggcaggcctccggatctgcgacgcagggggagtcggagcagcagcgctcgggcatccaaccagcgcgcgccacgtcgcctgctgcatcgcctactgctgctcctccatcgcctgcccgtgctgtcgcgtcttcgtcaggtggtgcgcagcagtcacatcagccaggatcatctgcgccgtctgagtctgcacagctatctgagaatgccttccttcatggggttctagaggaagatgtctttatgaggcagccaccaggttatgaacagaaagatggctatgtgtgcaaactagataaggccttatatggtttaaagcaggctcccagggcatgtaagggagatgttgctatgtttatgttggtatatgtggatgacattatagtagccagctcatctattgatgccactaatgctttgcttaagaatcttaatcaagaatttgcactcaaggatctaggaagactgcattacttcctaggcattgaagtgaaagaaattgggcaggatgtttggatgatcggcattctactgggggttttgctgtttttatag

SEQ ID NO: 14728 - DNA, 2964 bp, Oryza sativa
  Clone ID: TFbOSC403212j.C1.o1.fg
atggcgagctcttctatggcggcggcaatccccaaccctctgtttggcctccaaatctcggagaagctaaccaaacagaatcatcctctctgggctgcacagatcctcaccaccttgcgaggtgcgcagctggaggagcacatcgtcagcacgaccgcagctccggcggctgaaattgaaaaagaagacggcgacaaggacaagaagaccaagattgtcatccccaaccctgagtacaagacatggtttgttcaggaccagcaagtgctcggattcatcttctcctctctatcaagggaggtgctgcaacaagtggccggcgctaggacggcggcccaggcatggaacatgattgatgacatgttctcgtgcaagtcgaaggcgggtacaatcaatgtactcctcgccttaaccaccacacaaaagggacctatgtctatcagcgaatatatcgcgaagatgaggtccctcgccgacgaaatggcggctgcagggaagccgctggatgaggaggagctggtggcgtacatcatcaacgggctggattcagaattcgacgccgcggttgaaggactgatggccacggcaaggattgctccagtttcaatttctcatgtttattcacagctcttgagttatgaaaacaggattcggattcggcaagcttatctcaccacttcggcaaatgcggcaaaccgaggtggtggtcgtggtggacgcggcagcagcactggaaacagaggtggcggacgcggcggcttcggtcgtggcggtcgcggccgtggcgcccctagcggcgcaagtcagggacgcgggcgaggcaatgatactcgccccgtgtgccaagtgtgtcacaagcgagggcatgttgcaagcgactgctggcatcgttatgatgactcatatgttcctgatgagaagcttggcggtgctgcaacatacgctacgctagacaaattgacaaccaaggagagatacaagggaacagatcaaattcacactgcaagtggcgaaggtatgagtattaaacatgttggtcatgctattgttcctactcctagtcgccccttgcatcttaaaaatgttttacatgttcctgaagcggcgaaaaatctagtatctgttcataaacttgttgcagataattatgcttttcttgaaattcatggcaaatattttttgattaaggacaaggccacgaggaggacaattcttgaaggtccctgtcgacgaggcctgtacccacttccagccagatcgtctttgagacaggccttcgttgcgacgccatcttttgtgaggtggcatgggcgtcttggtcatccctccaagccaattgttcttagaattctcagtcaaaataaattgccttgtcttagtaattctgtcaatgagtctgtgtgtgatgcctgtcaacaagcaaagtgtcatcaattaccttttcctagatcaactagtgtgtcaaataatcctttggaacttatccattccgatgtgtgggggcctgcctctgagtctgtaggtgcaaagaaatactatgtcagtttcattgatgattatagtaaattcgtttggatctactttcttaagcataaatctgaggtgtttcagaagtttcatgaatttcagaaacttgttgaatggcaatttgatcgcaaaattctttcgatgcaaactgattggggaggcgaatatcttaagctgcacactttctttaatgaaatagggatctcccatcatgtctcttgccctcacacacatcaacaaaatggagctgtagagcgcaaacatcgccacatagtagaagttggtctatctcttttagctcatgcctccatgcctttgaaattctgggatgaagactttttagctgctacttatctcattaatcgccttcctaatataccgggggcatttggcccggtacatggagcaaatggcgacttggcgggagaatccgcctcagattcatcgtcggtccaggcgcagctgcagcggcaggcctccggatctgcgacgcagggggagtcggagcagcagcgctcgggcatccaaccagcgcgcgccacgttgcctgctgcatcgcctactgctgctcctccatcgcctgcccgtgctgttgcgtcttcgtcaggtggtgcgcagcagtcacatcagccaggatcgtctgcgccgtctgagtctgcacagctatctgaggtaatgcgacctaaaacaaggttacaaagtggtattagaaaagagaaaatatacactgatgggacagttagatacagttgttttacatcttctggagaaccacaaactttgcatgaggctttaggtgataaaaattggaaagaagcaatggatagtgaatatcaggctcttatgaaaaacaaaacctggcacctagttccttctaagaaagggcagaatataatagattgtaagtgggtctataaggtcaaacaaaaggccgatggcagtctagatcgatataaggctagacttgtggcaaaggggttcaaacagagatatggtatagattatgaggacaccttcagtcctgtagttaaggctgctactatcagaactattttgtccatagcaatctctagaggttggacccttcgtcagctagatgtacagaatgccttccttcatggggttctagaggaagatgtctttatgaggcagccaccaggttatgaacagaaagatggctatgtgtgcaaactagataaggccttatatggtttaaagcaggctcccagggcatggtattccaggttaagtactaagctgcatgagttaggttttaaatcatctaagtcagatacatctttgttcttttacaaaaaattaagtgctcatgaaggtaatcctcttggaccagaagacagtaccaggtacagaagtctggttggagcattgcagtatttgactctgactagaccagatttatcattttcagtaaataag

SEQ ID NO: 14729 - DNA, 2775 bp, Oryza sativa
  Clone ID: TFbOSC416267j.C1.o3.np
atggcgagttcttcctcagcggtggtgatctccaacccattgttcgggatccaaatcttggagaaattcaccaagcaaaatcactccctctggtctgcacaaatccttaccaccctacggggtgcgcagctagaagggtacatcaccggcacagctgaagctccggcggccgagtgtgagaaagaagatggcgacaagaaagtcaagaccaccatctccaatccagaatacatcaagtggttcacccaggaccaacaggtgctggggttcctcttctcctccctgtcacgggaggtcctgcagcaggtggctggcgcaaagacggcggcccaagcatggagcatgatcaacgacatgttcacctgcaagtccaaagctggtgccatcaacgttctccttgcactaacgacaactcagaagggacccatttccatctccgagtacatcgccaagatgcgatctcttggcgacgagatggcgggtgcagggaagcctcttgacgatgaagagctgatagcgtacatcatcaacggcctcaactccgacttcgacgcaacagttgaaggattgatggcaacagcaagaatcgcacccctttcaatttctcatgtgtattctcaactcttgagttatgaaaacaggattcggattcgtcaagcctacctcaccacgtcggcgaacgctgcaaatcgcggtggtcgtggtggccgtggtggaaatcgtggcgggcgcagcagcgcacctcacggcggccgtggtggtggccgtgggaacacaggcggtgccaatcctgggcgagggcgtggcaatgacactcgcccggtgtgccaagtctgtcacaaaagaggtcatgttgcaagtgactgctggcatcgctacgatgagaactacggccccgacgagaagctgggtggtgcggccacatatgcctatggtgtcgacacaaactggtatgttgacactagggcaacagatcacatcacagggcagctggacaagctgaccacaagggagaagtacaaaggaacagatctgatccacacggtcagtggcgaaggggcaaagaaatattatgtcagttttattgatgattacaacaaatttgtttggatctatttccttaagcacaaatatgaggttttccagaaatttcataagtttcaaaaactttttgaaagacaatttgataggaaaattcttgctatgcaaaccgattggggaggtgaatatgtcaacaatctccacaaggggttcaagtgcctagatgtgtcttccggcagggtgtatgtttctcatgatgtcacgttcgatgaacaagtttttccctttgcaacacttcatccaaatgccggtgcccgtcttagagctgaaatctccttgcttccttctaatcttatgaataacacattggatcaagggggagaggaacagtatgatcaaatgtttaatattcatgtaccaaatgctactgatgatgcttgtatagctgtagaatcttatgataggaacagcgcagaaaactgcaatggaaatgaaagatcaggcgagtgtggctgctacgcacagccgggtgcacggagcgccggcggtttcggcgggagaatccccctcggcaggggactagcagcagcgctctcctgcgcgtccgacgcgttcgccgatgggaggccagtcagaagctggcacgtcgcctgccgtcaactctccccgctagcccagcagcatcatcacgtgcccagagcaggacgtgcagcagtcccatccacctggatcatctgtgcaaatggaggccgcacaacaggatatagttgctttacatcttctggggaaccacaaactttggatgaggctctaggggataaacattggaaagaggcaatggatagtgaatatcatgctgttatgaaaaataaaacttggcatctagtacctcccaagagaggtttaaatgtgatagattgtaagtgggtatataaaattaagaggaaagctgatggcagtctagacagatataaggctagacttgtagcaaaagggttcaaacaaagatatggtatagactatgaagatacctttagtcctatagtcaaggctgctactatcaggaccatactgtctatagctgtctctagaggatggacactgcgtcagctagatgtgcagaatgctttctttcatggaattttagaagaggaattttacatgaggcaactacctggttatgaacaagatgatattataatagctagctcatctaacagtgccactgacaccttgttgaagaatcttaatcaagagtttgcactgaaggatctaggtgagttacattacttcctaggaattgagttaagtgctcatgaagggacacctcttggaccagtggatagtacaaggtatagaaaccttgttggtgctttgcaatatctgactctgactagaccggatctatctttttcagtgaacaaagtatgtcagtatttgcatgctccaacaacagaacattgggctgttgccaagaggattctgagatatctaaagcatacagttaagcttggtttaaagattagtaaatctaactccttgcttgttagtgcgttttctgatgcagattgggcaggatgtttggatgacaggctatcaactggaggctttgctgtgtttataggacccaatcttgtgtcatggagtgcacgtaagcaagctactgtgtctagttcaagtacagaagcagaatataaggcattggctaatgcaactgctaagattatgtggata

SEQ ID NO: 14730 - DNA, 3024 bp, Oryza sativa
  Clone ID: TFbOSC900055j.C1.o8.gm
atgcacataccagcgggtgttgtagctctaaagaagagagaatttagagcactcaaccagggatctcgttcggtcaccgagtacctccatgatttcaaccgtttagctcgttatgctccggaagatgttcgcactgatgaagagcgtcaggagaagttcttggagggactgaatgatgagttgtcttatgccttgatgtctacggatttccgggatttccagcagttggtggacaaggcgattcgccaggaagacaagtataaccggatggagcagaagaagcgcagggctgcccaattcaaggcacaacagggcagtaaccagaggctgcgtctcgttgtgggacctcaagctccaccgtaccctcaaggaggatcttcatcagttgtccgcccccaacgccagttctacaacaacaatactggtaatcgtggcaatgacaaccgcaacatggttgctcgtcatgtagcaactccagttcagaaccagcccgtcaggaaggaacagggaagcaagccaggggtgtgcctcaattgtggtgatccaggacattatgatgataagtgtcctaagcctcggcgcgtgaagaacgttccagccccgaacaactccaatgctccagcaccaaaggcacgtgttaatcatgttgcagcagcagaagctcagagtgcaccagatgtggttttggctaatgagttagctgaggtgaagagacaggtggatgatttgcttcagaaaggatacatcagaccctgtacttcgccatggggagcaccagtcatctttgtggagaagaaagatcatactcagagaatgtgcgtggattatcgagcgttgaatgaggtcactatcaagaataagtatcctctacccagaattgatgacctgtttgatcaattggaaggtgctacagttttctccaagatagatctccgttctggatatcatcaacttcgaatccgtgaggaagatataccaaagaccgccttcacaactcggtatggtttgttcgaatgtaccgttatgtcatttggacttactaatgccccagcctttttcatgaatctgatgaacaaggtgtttatggaatatctggataagtttgtcgtggtgtttattgatgacattcttatttactccaagacgaaggaagaacatgaagagcatcttcgtctagctttagagaaactacgtgagcatcagctttatgccaagttcagtaaatgtgaattttggttgtccgaagtgaagtttcttggtcatgtcatctcgtctggaggagtggcagtagatccaagcaatgtggagtcagtgttaagttggaagcaacccaagacggtttcagaaattcgtagtttccttggacttgcagggtattaccgcaggtttattgagaacttttcaaagatcgccagaccaatgactcgtctgcttcagaaggaagtgaagtacaagtggacggaggattattatgatatggagatccactatcacccggggaaagcaaatgttgtagccgatgctcttagaaggaaaagctactgtaatatgtcagaaggtcgacgtttaccttgggagttatgccaagaatttgaaaaattgaacttgggaatagtcagcaatggttttgtggccgctttagaagctaaacctactctgtttgatcaagtcagagaagctcaagtgaatgatcctgacatactagaaatcaaaaagaacatgagaagaggaaaagccatcggttttgtagaagatgagcaaggaactgtgtggttaggagaaagaatttgtgtcccagataataaggagttgaaggatactatcatgaaagaagctcatgaaactttgtattccattcaccctggaagcactaagatgtaccaagacttaaagcaacaattctggtgggctagtatgcgacgtgagatagcagaatatgtggctctatgtgatgtatgtcagcgggtcaaggcggaacaccagaagccagccggtctgttacaaccattgaagattccagagtggaagtgggaagaaataggaatggattttataaccggtctacccagaacgtcggcaggacatgattctatttggatagtggttgataggttgacaaaagtcgctcatttcataccggtcaaaacaacctacacggggaataagcttgcagagttatacatggccagagtgttgaagaaatgtttacgtgtacctacggaggaagcagatcctgatcgtatagagcttcaagaagatttaacttatgctgagaagccagtcagaatcttggaagtgcgcacggaggtgaggaagctcggccgcatctccttcgtcgccgccggtcgccgtagctcgctgccgacggtgtcctccaatcacccggccgaccgccctagctccggcgaggtcgccaacccgagtcggccggtcatggatgacgtcatgctgacccgcgctgccgtgcctgtgccgctgctgccgctgccatgtgctgtgcttgctgctccgccactgcaccgctgctcgctgcgccgctactgccactgctgtgccgctgcattgccgcgccggctgccgccttgctgtgctggccgtttcgccttgcctcgccacgccaccacgccgcttagccgctgtgctgtgcgctgccttgtcgcaccactgctgcacgctgccgccatgtcgcgcaccaccatcgcattgtcgccactgccgccgtgccgctgtgtctctccctgccacagccatgccgctgctgcagtgtgtcgccgctccgccaccacgccgcttgccgccaagcgcaaccgcgccgctgccctagcatcgccactgccgtgccgcaccaccaagctgtgccgtcacttggccgagccgtgctgcagcctggcactacttgccggctcagccgagccattgctaccgctcggtagtcgccttgccgagtcgcggttgagtcgctgccgctgccgcgtgtcgaaacatgatttcggcaatataaaaggggtagcgcacaagacctaa

SEQ ID NO: 14731 - DNA, 4020 bp, Oryza sativa
  Clone ID: TFbOSC401126j.C1.o15.fg
atggcatcgaaggagaatagatccgaggctatggtttcgggggctgacgggataaaccaaggcgaaaacttggatccaattggtgagggcttggatgatcatcatggcaacctagatcagggtttgtcgagcgccatggtgcttttcaaaaagaagctaactgatggtgaagaggaagatgacgatgtcttggatgtggaccttggtgaagaggtggaggagatgaaatctaagtggctgatcattgctcgcttctactcaggacaaagagaaagactcggttctttgggggataatagattcttggttgagtttgcttgcgaagctgactacaaccgagttgtgtatgggggcccttggaaacataagggtgatgctcttcttgttgtcccgtatgatggccttgctagaccttctgaaatctgtattgaatcgctccctctgtggttacggatatacgatcttcctgagattatgatgactactggtttcgctaggagtttgggtggaaagatcggggaggtactggaggtaggaggagctatacacgacttcctgcgggttaaagttgcttttccgctatcctctcctttaaaacctctgttgaggatttggattaaggataaaggtgttatgtcttttccagtgaagtatgaaaatgtgccttttttctgtttctcgtgtggacgaattggtcatgcagagcgggaatgcccggaggtgggatcgtctagcgctcaggtgcgctttgggaaggagcttcgagcttcaccgttaaagaggaaacttcagagttttgctccctcttcaatctctaccccaaaagctgccaaggtgctgaattttagtggtgcccaacgggagaaggttcttactgcctctagttcttctaaagcttctgtgcttagtaatccaaagttgaacagcggtggcgcgactatgttcttggttggggagaaagcggatcaggaagagaaggcggccagtgttgaggcagaagcctcgttgtatccattgccgaagggaatcaccgcagctctagaggaaggtgtctctcagatgaagatgcagttagacgatggtgagctgaacttggcagctcgggggccatgcagtagagagcgagtgtccatgagttcagattatgggctgtcgggggaggaaacaccgcaacatagtgccgggattgtctctggtgtggtgaaccaagatgtaaagtcccctggcgggcaatccaaaaagaagcaatgggtgccaactagggagactgatcgtgcagttaaagctaagagcctatccataggcagggatattggcaaaccaaggaagataactgtcagattatcagcagatgcagtagaagcaaggaactgtatgcagattcgggaacagctaccctggtgggcgctcacggcgagccccaccaggaacaatgaatgctctagcctggaactggtccgtcttgtgcggatgtacagcccgaggctggtgtttctctcagcaaccagacaagatcaggagagagttcagggtctcagatggaggctaggtttgaagaattgcctggccttgaaaggagaaggatcaggtggtggagtggcacttatctgggatgaaactttatctgttcatcttttgtctatgagctgcaggtccgaccactgtcctatactgcttcgggtggagagagagaaataccgacctgtcaaatgtttccgctatgaaatcatgtgggaacgagaggattctttgggggaggctattaagctggcctgggagcaggaaggtaccgctttgaatcttggggagtggagtgtcagggtttttggttctgtgtcgcaggagataaaggagatcaaagctaaggtggaggaactatcaagtttggatccaattaaccatgacggtgagattaggaagttgtatgcccgcttagatgagctgttgtatagggaagaaatgatgtggctccaacgatcgcgggtgtcttggttaaaggagggagaccgcaacacaaagttttttcaccgccaggcagcttggagagcgaagaagaataagatcaattgtcttaaagatgaggatagtagatatgtcgagaacaaaggagatatggaaaagttaacgagggatttctttcaaaagttatatgcaagagatgagggagtggatcctggtgagttagtggacttgtttgatgtccgggttgatgcaactgaaggcctctcgacgattctgaaccatgaagtggttgctgggcgacttgaggaactgaaagtttgtcgaagggcgccgggggtttcccatttactctttgctgatgatagcctgttgtttgtcaaagcatgcccgcagcaggttgaatctgctaccttcgagagtaattatttgggtctccctactctagaggggagaatgacggcagacaaatttaaaacaatcaaggaacgcttgatcaaaagactgaatagctgggcagaaaagttcatgtcgtcgggagcgaaggatattcttatcaagttcgtggcgcaggcaatacctacctatgtgatgggggttttcaaactttcggtgtcatcctgcgaagcttacactaaactggtgagagacttttggtggggtgacgaggaggataagaggaaggtacattggacagcctgggataatttggttctccctaagtgcatgggtggactcggatttagagatgtcagaattttcaatcaggcgctactggggagacaagcctggagattaattcagttcccggagagtctatgtgctcgcattctaaaggccaaatactttccaaactgcgatctgattgatgcagtgttcccagctgatacatcgcagacatggaaaggaattgaacatggaccgcaacttttaaaggaaggactgatctggcgcattgctgatggcaagagggtcaaattctggaaggaccgttggatcccaagggagtcctcttttagggtgtcaggtatgaaaagtcgatgtcggctccgatgggcatcacaattcatcatccctgaggggaattgttgggacgaacagctaatcaggcgggtctgtcatccttttgatgccgatgaaatgttaaagattaagttgccccaatttcctactgatgattttctggcatggcactttgagaagtatggaatgtacacagttaggagtggataccgtgctgctctgatgaagcaaatcaatacggactgtgtctcttttagctcggctaactctgactggcttctgattctgcttgatagactaagccctgaagagcgagcaaagctcctccttgtcctgtggagctcctggttcttaaggaatgacagcttgtttggttcaggttcatcgactgtccatggctctgtcttgttcttgcagagcctgtgggaatccattagtaccacaaaggtcaatcctgttactgatataaaagggaaaggcccccagatgggtactaaatctgctactacggttgcccggagtagtcccagtgatttggtgcgctgggaagcaccgccgcaaggatgggctaaaattaatgttgatggagctttcgtgcagcaaatcggagaagcaggtactggaattgtcatccgtgatcatgtgggtgatgtcctcctgacttcatggaatgggatccgaagctgtcagtcgcctgaggaagctgaagctcaagcgtgcagggatgggctacggctagcagcagactggattcagatgccggtgatcctagaatcagattgtgcgaatgtggtggctagccttacgtcgggagctaagaacagatcgcctttgtggcaggtcttccaggaaatcaagtcgattcttccacttcttcctgcttttaagtttaataggattaataggggagctaacgaagttgctcattgccttagccagttggctaggcgcctgaagcaatcttcggtgtggcgtatctgtgcgcctgagtgtgttaaggagagcttagccaaagactgtatccctcctaatctttaa

SEQ ID NO: 14732 - DNA, 4182 bp, Oryza sativa
  Clone ID: TFbOSC401339j.C1.o46.fg
atggccggcacttcttcatcctccaacacctcaaccggtggctactccttgatgggttgcattaaagatattccgaccctaaaaggagataactacgcagaatggaaaagaaaactcgaccttgcttttatcttaggagaggtggactgggtgttgactaccccatgtcctatagaacctgctgaacttgtcagaggtgaaaatgagtcagatgctgactggcaaaagagacagagggacaatgctcctctcgtcatgtcgtatgacattgaacaaaagaaatggtccttagccaacaagaaatgtttggctgtggtaaagaatacgattgagcctaccatattgggctcgatcccagagtgtgacgctgtctcagagtaccttgaaagaataaagagtcagtttactggctcttcaaagacttatgctacacagctgatcaagcagcttgtgacagaaaggtaccatggaggtggtgttagagaccacatacttagaatgagcaacatggcttccaagttgaagccaatggatttgggcataacagatgactttctggtccatctggttatggcctcattgccaaagcagtttgacaattttattgtcaactacaacataagtccagagaaatggaactttgagaagctcattgctaattgtgtgcaagaggaggagagaatcaaagaatcaaatggtggttcaataaactatgttaaagataagaaaaagaaccacaagtctcccacctcaaaaggtaaacagtctcagcatctgcctcagcaacaacagttcgctgttgagaaagatcaatgtctccactgcaagaagacaggacactacaagaaagattgttctgactttttgaaaatgatcatggcaatgaaaggtgagaacattattacatttgtaaatgaatctcattatgttggttactctagatccacatggtggattgattctggagcaactattcatgcttgtaattgtttaaaggcattccgttcgacgaggactacgcaaagaagagaaagcaccattagagttgccaatggagttgaagaaaaagttgaagctgttggagatcttcctctagagctcgcgaatggcttcatacttttacttcgagatgtcttttatgttccttctttgcaaagaaacttaataagtgtatcaaagttggattttgatggatatgattgccgctttggaagtggcaaatgtgaactatggcataataatgcatgtattggtcttgctgtgttgcgagacgagctttatttgttatctctttctgagaatgtgaatgttgtgtcctcgttgacaaaagaaaacaagaaaagaaagcgaactcccgatgtctcatcgaaattatggcactgtcgtttgggccatatttcgagggggagaattgagagactagttaagaatgaaattcttcctccattggagttctcagacttagaacaatgcatagaatgcattaaaggaaaatttgtaaagagcatcaaaaagggtgcaaaacgaagcgcaggaattttagagatcattcatacagatatttgtggtccatttcctgtgaaaagtgtggatggctatgactcgttcataacattcacagatgattactcccgctatggttatatttatccaattaaagagcgatcagaagcactggataaatttaagatattcaaagctgaagttgaaaatcagcatgatataaagattaaagtagtaagatctgaccgtgggggggagtactatggtcgacatacgccttatgggcaagtccctggaccttttgcaaggttcttgctagagaatggaatagtagcccagtattcaacaccgggcgaacctcaacagaatggggtagctgaaaggcgcaaccgtacccttatggatatggtgcgcagcatgatgagctactccacactaccactcggtttatggatggaggcattaaaaaccgccattcatattctcaacagagttccaagcaaatcggtgcccaaaacaccgtatgagctatggacaggaagagtaccctcgctaactcacctccgtgtgtgggggagtcctacagaggccaaagtatttaacccaaatattgggaagttggaccccaaaacagtcagctgccattttattggctatcctgaaagatcaaaaggctatcgtttctactgtccaaacagttatacaaagtttgtagaaacgagacacgccgtcttcttggaagatgaaatgattagggggagctcggtagttcgagaaattgatcttgaggagaggcgggtgtctgtacccgctccgtcgactcaggaacctttcttctctctacctgctgatgttgtgcctgcaatgcctgtcattgaggtaccagcacctgttgttacccctcctgtggcaacaatgaatgagagtgaggaacctgttatacaggattcaacagaaatggttgccacaccagaggaggagctacaacagcctcaaatagataatgtgccagtacaggagactcatcaagagcctcaggtacaggatgtgccaaatgtgcaggcccctagaaggtctgaaagagtcagaagatcggctatccgtgatgactataaagtttataatatagaagagtcgcatatggaggatgatcccacctcatatgaagaggccatgagaagcgctcgctcatctgaatggttggaagccatgaaagatgaaatgaaatcaatgaaactaaacgatgtttgggatttagaagaaattcctaaaggagccaaaacagtaggctgtaaatgggtctacaaaaccaaatatgactccagagggaatatagaaaagtttaaagcgcgacttgtggcaaaaggcttcacgcaacgagaagggattgattacaatgagacattttctccagtctcttgtaaagattccttcaggattataatggcactagtggcacattatgatttggaattacatcagatggatgtaaaaacggcatttctaaatggagatttggaggaaaaagtatacatggcgcaaccgaaaggttttgtcatgaaaggaaacgaaaatatgggatgtcgtctaaagagatccatttatggattaaagcaagcttcgagacagtggtacttgaagtttgatgggacaataaagaaatttgggtttcaagagaatgtcgaggacaactgtatttattcaaagtttaagaatgggagatttattttcctaattctgtatgtggatgacattctactggctagtagtgatgtcagtctactgcaggaaacaaagaaattcttgtcctcaaactttgacatgaaagacctcggtgaggcttcatatgttttgggcatagagattcaccgagatagaacaaaaaaggtgttgaagaaattcaacatgtacagatgcagtgctacacctgctcctataatgaaaggcgaaaagtatggggcatcgcaatgtcccagaaatcagtatgagctcaatgaaatgaaaacaaagccatatgcgtcagctgtaggaagcctacagtgcgcgcaagtgtgcacacgacctgacttggcatttgttaccgggttacttggcagatttcagagtaatccaggcctagagcactggaaattggtaaagaaagtcttgcgttatttgcaaggaacaaaaggcctcatgctgtcttacagaagatcagaatcactccagatagtggggtactcagattctgactttgcaaaagataatacaaagtcaacatcgggatacgtgtttaccctggcaggaggagctatttcatggaaaagctcaaaacagactatcactgcagggtctactatgtatgccgagtttatagcatgctatgaggcaacggggcaggtgaactggctaaagaagttcatacccggtttaaaggtggttgacagtattgagaaaccactaaagttatactgcgacaacgaacccgcagtaatgtacgctcacaacaatcagtcaagtggtgttgccaaacacattgacataaagtactatgttgtgaaggacaaagtccgggatcaaacaatcagtctcgagcacattaaaacagaaaggatgctcgcggatccgctcacgaaaggcctaccacccaacgtgttcaaggaacatgtagccggcatgggtttaagggaagccttatga

SEQ ID NO: 14733 - DNA, 2973 bp, Oryza sativa
  Clone ID: TFbOSC401835j.C1.o5.gm
atggtgaagacaaggaatggttctcgtgtctccaacgacgccagtggcagcgaagagcagatcagtggagcacgtgccagcgatgcatctaacagcagttcatctccaccgcccaagaacccaacgatcgctcagcagcagcagcagcagaacctgcgatttggtcctccacctccccagtccaaactgctagattttctccgtgtcaagccacccactttctcaagcaccaccaacccaatcgaggccaacgattggcttcatgctattgagaagaagctgaatcttttgcagtgcaacgaccaagagaaggttgctcttgctacacaccagctgcaaggtcctgcttttgtttggtgggacaactacatggtgaccggtccagctgggacagagagggagttccgttctctgcaacaaggaaccagaacagttatagagtatttgcatgagttcaaccgcctcgcgcgctacgcccctgaggacgtgcgcactgatgccgagaggctggagaagtttttgtctggtcttgatgatgaattgactaaccagttgatctcccgagattatgaggacttccagaagctggggaacagtcagaagtctcgcttcatgacgggacatcagggtggaccttccaccatgattatccggcagcaccgtccctaccacccggttcagccagctcagccaacgcagccagaacagcctaagaggtttggagaaaagcccgaactgtgcttcaattgtaacgagctcggacacatggttggttcatgcccgaagccaagacgttctggactcaagttcgttcaagcccgtgtcaatcatgcgtctgcagaggtggcgcagtcagcaccagaggttatattgggcacatttcccatcaactcgacaccggcagtaatattgtttgattctggtgtaactcattccttcatttccaagcgttttgctggtgcacatgggttatctttagtgaagcttaagataccaatgcgagtttatactcctagaggtggcatgaccagaactcactattgcccatccgtgatagttgaaatccaagggttgatttttccagccaacctcattcttctcgaatccaaggacttcgatgtcatacttggaatggattggttgacaaggcacataggagtgattgattgcgctagccgcaccatcaagttgaccaatgcgaaaggagaagtggtaaccttccagtctctagtaccgcagaagcaagggatcagtctgaaccagtctactggtgaagaacaagaagaagcagtggagaaaaccactaagaagttggaggatattcctatcgtcagagagtatccagaggtttttccagatgacctgacaaccattccaccaaaaagggatattgagttccgaattgacttggtacctagaactgcaccgatccacaagaggccgtacagaatgggagccaacgagttggcggatgtcaagaagcaagttgatgaacagttacaaaagggatacatctgtctgagcacgtcgccttggggtgctccggttatctttgtggagaagaaagacaaaaccaagaggatgtgcgttgactaccgcgcactcaatgaggtcactattaagaacaagtaccctttgccaaggatttatgatctgtttgatcagtttaaaggagctacggtgttctctaagatagacctgcgatcaggctatcaccagttgaggatccgtgaagaggatattccaaagacagcattcatcacttggtacgggttgttcaaatgcatagttatgtctttcggactcactaatgcacctgccttcttcatgaatttgatgaataaggtgtttattgaatttctggacaagtttgtcgtagttttcaccgatgacatacttatctactctaagtccgaggaagaacatgagcagcatcttcggctggtacttgaaaagttaaaggagcaccagctatatgccaagttcagcaagtgtgacttctggcttaagaaagttcagtttcttggtcatgtcgtaagtgctcaaggagtggctgtggatccagcaaatgtggagtcagttaccaagtggaccccaccgaggacagtctctcagattcggagtttcttaggacttgcgggctattacagccgattcattgagaacttctctaaaattgctatgccaatgacacagctcttgaagaaggaagaaaagtttatctggtctgctgaatgcaacaggagttttgaagaactcaaacgacggttggtatctgcacctgttttgattctgcctgatcagacgaaagatttccaggtttattgtgatgcatctcgccaggggctaggatgcaactacccgacccacgatctggaattggccgcagttgttcatgctttaaagatctggcggcactatctcatcggtaaccgttgtgaggattatgatatgggaatacactaccatcccggcaaggccaatgtggttgcagatgccttgagcaggaagagttactgcaacgtcgcatggatagaggaactatgttgtgagaagctcatcaaactcagtatgccattcatcctggcagtaccaaaatgtaccaagacctcaaacaaaagttctggtgggggtgaagttgcttaccagcttgagcttccctccagcatgcttggcatccataatgtgttccacgtttctcagttgaagaaatgtttgagagttcctgaggaacagacaagtccttattacatcgaaattcaggaagatctgacatatgtggagaagccgactcgtatcctcgaaaccagtgtgccccacctgttggtcgtctcctacctccggcagttagagccggagccccaaccgcccgcgccaccgcctttcccgcctatccgcgcccccactccgcccgcacctcgcgcccacgtcgccgctctttccccgcgtctactgccccccgcgcgcgcatga

SEQ ID NO: 14734 - DNA, 933 bp, Oryza sativa
  Clone ID: TFbOSC27006j.C1.o1.fg
atggctgacaagttttcaaccaaaccacatgttttcaatggtgtcgattttccttattgtgtcacatctaaaaatggcaatgagatctggaacgctttgcgtaattttcatcaacgtacttccaacattaaagaattacgtaaagatattttcaaaaaggattacataaaattagagaagaaatctgaagaagctttagatgattatcttgctagattcaataagattttgagtaatcttcgatctgtggattcttcttatgatgttaattactctcaatttgaagtttctcgccactttttgaatggacttgatatgtcaatttgggagatgaaagtaacttcgattcaagaatcagttgatatgttttgcttgactttggattctctttacacaaaactcaaaacccatgagatgaatattctttctcaaaaggttgattctaagtcaagtgctttggtttcttcattggatcttggtgcttcttcatcgaactctgtctctctttattccattaatgccttgtccgatgatcaactcgaatcattcgaggaggaggatttggctttggctattaacaagttgtctcgagctatgaacaatgttaggttgaagaaaagaggaggtcgaattcgatgttttgaatgtggggagcttgatcacattcgctcacattgtcccaagttggggagagacaagaaagatgacaatggagtcaagaccaaggacaacaagcccgttacaacattcaagggaagaagatccaaggaggctctcaagaaggtgctaaatcaagtctatgctgcttttgaaccggcaagcaatggtgatattaaaagtgatgaagataaggacaaggaagagtacatctctgatttttgcttcatggctcatggtgaatctgagtcagaaattgaagataatgagttttaa

SEQ ID NO: 14735 - DNA, 3856 bp, Oryza sativa
  Clone ID: TFbOSC400675j.C1.o35.np
atgccttggactggttgcatgccgttgggaaaaagttggacaccgtccaatgcaatgatgaggagaaagttatcttcacaacccatcaactgcaagggcccgcatcactatggtgggaccacttccaggctacgcagccagaaggacagccaatcacctgggcccgcttcaccgccgctttccgaaggacccatgtgccagctggagtcatggcccttaagaagagggaattttgggaattgaagcaaggcaaccgctctgttatggagcatttgcatgagttcaataacctggcccggtacgccccggaggatgttcgtgaagatgaagaaaagcaggaaaagtttctggcaggaatggaccctgaactttctgtgcgtctggtctctggggattaccctgatttccagcgcctggtggacaagagcatccgcctagaggccaagcacaaggaactggagtcacacaaacgtcgcttggcgaatttccgtaatcaacagggggctaaccaaaggatccgctacaccaatccctatccaaggggatcctcctcacagcagcagcagcagcaacctcaccccgcgccacgacctcaatttgtggtacgcgtcccatagtcgcagcaacagcagaatcagcaagggaaccgtgcaccccgtccccttgcaccggccgtgcagcctggtcaaggtcgcagggatgttcaaggtcagcagcgtctatgcttcaactgcttcgagcccaggcacttcgctgataaatgcccgaagccgaggagccagcaaggccaagcgcctccccgccctaacaacggtggtaaggatgccacccggggtcgtgtgaaccacatcactgcagagaatgtgctgacaactccagacgtcatcgttggtatgttcttcattcattccatccccgctaccattttgtttgactctggagcctcccactcgtttatatctgtgcaatttgtgggaagaaatcaactgggggtagaaaggctaggaactctctgctcatcaccacccctggaggggctatgacagcaaagtattatagcccggtcgtacctatagagatccagggaattccttttcccttggatctgatccttctagacaccaaggacttggatgtgatcctcaagatgaattggttgacccaattccaaggagtagtggattgtgcaagacgtactgtcaccgtgtaccagaagcctgatcaaccagttgttttctttgcgcacccgactcccaccggcagctcagtacttcatcaactaggactgtcagaaatacccgttgtcagtgagttcggtatgccgcccaagcgggagattgagttcaggatagatcttgctccaggaaccactcccctgtacaagcgaccctaccgtatggcagcaaatgaattggccaaagtcaagaagcagttggaagagttgaaagagaaggggtatatacggccgagcacttccccctggggtgctcccgtgacttttgtagaaaagaaagacaagacaaagaggatgtgcgttgactaccgagctctcaatgaagtcactatcaaaaacaagtaccctcttccccagatcgatgatctgttcgatcagcttaaaggtgccactgtcttttccaagattgatcttcgttccggatatcaccagttgcgtatccgcgaagaagatatccctaagaccgcattcaccacgcggtacgggctgtatgaattcacggtgatgtcgttcggtctgaccaacgctcctgccttcttcatgaatttaatgaacaaggtgttcatggaatacctggataagttcgttgtggtctttattgacgacatactggtctactcacagtcagaggaagaccatcagcagcatctccgtctggtgttgtaaaagctccgggaacattagttgtatgccaagctcagcaagtgtgaattctggttgtccgaagtcaagttcttagggcatgtgatatctgctaaaggagttgccgtggatcctgaaacagtaacagccgtcaccgatttgaagcaacccaagtcgttgctgaagaaggaagaaaaatttgtgtggagtccgcagtgtgagagagcatttcaaactctcaaagaaaggttggtttcctcgctagtgttaatcttaccggatactcgcaaggatttcctggtgtattgtgacgcttcgcgccaaggattggggtgtgtattaatgcaagaaggtcatgtggtagcttatgcttcacgccagctacgaccccatgaaggcaactatcctacccatgattttggagttgaccgctgtggtccatgctctgaaaatctggcggcgttatctcattggaaatcactgcgaaatatacaccgatcataagagtttgaaatacatcttcacccagccggatctgaatcttcggctaagaagatggttagagctcatcaaagactatgatgtgggaatccactatcaccctagtaaggccaacgtggtcgccgacgcgctgagtcgaaagggccattgcagtactctttgcgtccgtggcattccaccagaacttaatcaacagttggaagctctgaacctaagtgtagttagccatggattcttggctgcactagaagcaaagcccaccttgcttgatcaaatacgcgaggctcagaagaattatccggatatgcatgggatcctcaagaatatgaagcagggtaaagccgctggcttcatggaagatgaacacggaaccttatggaacggaaatacgaagatgtacttagacatgaaagagaaatattggtgggttagtatgaagcgggaaatcaccgagttcgtggccctttgtgaggtgtgccagcatgtcaaagcagagcaccaacgaccggccggactgctccaacctctacaggtaccagaatggaaatgggatgaaattgggatggatttcatcaccggacttccaaaaactcaaggcggatatgattctatatgggtagtcgtggatcgactaaccaaggtggctcggttcattcctgtgaagaccacctatggagggaacaaattagatgaactttacttcgctaggatcacctgggataagagtctcccctatgcggagttctcctacaataacagctaccgagccagcatacaaatggcaccctatgaagcgttgtatggacgcaaatgccggactccgctgttgtgggaccaagttggggaaagccaagtgttcgggaccgatattctgagagaagctgaagctaaagtcagaaccattcgggataacctaaaggtggcacagtctcggcagaaaagttatgcagataaccgacgccgcgatctggaattcgcagtgcacgactttgtgtatcttcaggtcacgccactacagggagtgcataggtttcagacaaaggggaagctcgcacctaggtatgtggggcctttccgcatcattgctcgacgcagagaagttgcttaccagttggagctgcccgcatccttgggcaatgtgcacgatgtgttccacgtgttgcagctcaagaaatgtcttcgagtgccgtccgagcaggccgattcagtgcagattgaagttcgcgaagacttgacctacgtggagaagcctgtgaagattctggacactatggagtgcaggacttggaatcgggtaatccgtttttgcaaggtcctgtggagcaaccacgccaaggaagaagctacttaggagcatgaagacgagctaaaggcagcccatcccgacctcttcgtcagttcttctgaatctcagggtcgagattccgtttaagggcggtaggtttgtcacgtcccaaaacgaccctaaaatataacctt

SEQ ID NO: 14736 - DNA, 3153 bp, Oryza sativa
  Clone ID: TFbOSC400676j.C1.o11.gm
atggtgaagacaaggaacgatccccgtgactccaacgatgccagtggcagcgaagagcagaccgatggagctcataccagtggtgcatctagcagcagtccatctccaccgcccgagaacccaatggtcactcagatgatgacaatgatgatgcaacagatgcaacaacattaccatcagatgttgcagcaggcgcaacagaaccaacagtttggtcccccaccatcccacttgtccaaactgttagactttctccgcatcaagccacccactttctcaagcaccaccaacccaatggaggccaacgaccggctccgtgctattgagaagaagctgaaccttttgcaatgcaacgaccaggagaaggttgctttttctacacatcagttgcaagggcctgcttctgcctgcctcacggtccacggtggaccaggtgcacccgggctcacaccggccgacgccgtgggccccacgcgtcagccgcaccagagggcgcgggcggctgacggccgggccccacgcggcagccgctcggtgcgcccgaaggcggccacggcggcgcggccggcgggaggcggcgcgcccgcgccccctatggtcgccggcggcggccataggcacggtggagcggccgccgagagaagggagggaaagggggaaacgaggcggcggtccacggctcaccctaggtcgacggcgacgacgaaaaggcggccggagcggaggaaggcggcggcgcggctcgggtcgacggggacggcggcgctccagcggtcgacgagcgaaacggagaggtggacgaggtcggcgaggatgcggcgaagccgaaggaggcggcgccgaggtgggaggtggtccggggcgacgacggcggcggaccggagctcggcggcgacggcggagagagagagcgacggcgcgagctcgattctggcgaggagaaagggcggcgagaggcggaaacgaatggaggaggtgcggggaggggtcgttttgggacgtgacaagttccgtgcactccagcaaggaaccatgtcagttacagagtacatgcacgagttcaaccgccttgcgcgctacgctcccgaggacgtgcgcaccgatgctgagaagcaagagaggtttttgtttggtcttgatgatgaattgaccaaccagctgatctccggagtctatgatgattttgagaagcttgtggacaaggctatccgtcaggaagaacaacgtaacaaaatggaccgaaaaagaaaggcagctcagatcagctttcctcaggggaacaatcagaagcctcgcttcatgacgggacagttaggtgagccttccaccctgatcgtccgtcagcaccgtccttaccactcgagtaacttcaacaacgactacaatagtggctgtcacggcagcagtaagcagcacaaccacaactcgactccacccccattaatggcaccaactcagtcagatccgccagctatgtcagctcagtcagaacaactcaagaaggagtctgcaggaaagccaagaccctgcttcaactgtggcaagcacggccactttgctggcaagtatccgaagccgaagcgcgctggacctaggttcgtccaggcctgcgtcaatcatgcgtctgcagaggaggcacaggcagcaccagaggtcgtgctgggcacgtttccagtgaattcatttccggcaacagtactttttgattcgggtgcctcgcattctttcatttccaagagaattgctgggacacatggattatcggtagtggaacttaaaatactgatgcgggttcatacccctggaaatgacatgaacaccacacactactgcccctcagtgaccatagagatcaaaaggtcaccgttcctatccaacctcatccttctcgaatccaaagacctagatgtcattctcggaatggattggttgaccagacacaagggggtgattgactgcgcaagccgcaccatcaccctaaccaacgacaaaggggagaagatcaccttccgttctccagtgccacagaagtccgtagcaagtctgaatcaggctactatcgaggatcagacagaaatagcggagaaaaatcccaagaaattggaggatatacctatagtacaagagtatcctgaggtgttcctagaagacctcactacaatgccaccgaagagagaaatcgagttccggattgatctggcacccggaactgctgcaatctacaaaaggtcgtacagaatggcagctaatgagctagcagaggtcaagaagcaggttgatgaacagctgcagaaagggtacatccaaccgagtatttcaccttggggtgctccggttatctttgtggagaagaaagacaagaccaagaggatgtgcgttgattatcacgcccttaatgaggtcacaatcaagaacaaatatcccttgcccagaattgatgacctgtttgatcagttaaaaggggctaaggtgttttccaagatagacctgcgatcaggctatcaccagttgagaattcgggaagaggatattcccaagacagccttcactactcggtatgggttgtttgagtgcacggttatgtcatttggactcaccaatgcaccggctttcttcatgaacttgatgaacaaagtgtttatggagtttcttgacaagtttgtcgtggtgttcattgacgacatacttatttattcaaaatcagaagaggaacatgagcaacatctccgtctggtactcgagaaattgaaggagcaccagttatatgccaagttcagtaagtgtgacttctggttgtcggaagtcaaatttctgggtcacgtcattactgctcaaggtgtggcagtggatccatcaaatgtggaacccatgacacaattgctaaagaaagatgaaaaattcaagtggtcagttgagtgcaatcaaagttttgaagaactcaagaagaagttagtatctgcaccagttctgattctgccggatcagacgaaagactttcaggtctactgtgatgcatctcgtcaagggctgggattggttcatgctctgaaaatctggcggcactatcttattggcaaccgctgtgaagtctacactgatcacaagagtctgaagtacatcttcacgcagcctgacttgaatatccgacagtga

SEQ ID NO: 14737 - DNA, 3750 bp, Oryza sativa
  Clone ID: TFbOSC409253j.C1.o1.fg
atgtcagttacagagtacatgcacgagttcaaccgccttgcgcgctacgctcccgaggacgtgcgcaccgatgctgagaagcaagagaggtttttgtttggtcttgatgatgaattgaccaaccagctgatctccggagtctatgatgattttgagaagcttgtggacaaggctatccgtcaggaagaacaacgtaacaaaatggaccgaaaaagaaaggcagctcagatcagctttcctcaggggaacaatcagaagcctcgcttcatgacgggacagttaggtgagccttccaccctgatcgtccgtcagcaccgtccttaccactcgagtaacttcaacaacgactacaatagtggctgtcacggcagcagtaagcagcacaaccacaactcgactccacccccattaatggcaccaactcagtcagatccgccagctatgtcagctcagtcagaacaactcaagaaggagtctgcaggaaagccaagaccctgcttcaactgtggcaagcacggccactttgctggcaagtatccgaagccgaagcgcgctggacctaggttcgtccaggcctgcgtcaatcatgcgtctgcagaggaggcacaggcagcaccagaggtcgtgctgggcacgtttccagtgaattcatttccggcaacagtactttttgattcgggtgcctcgcattctttcatttccaagagaattgctgggacacatggattatcggtagtggaacttaaaatactgatgcgggttcatacccctggaaatgacatgaacaccacacactactgcccctcagtgaccatagagatcaaaaggtcaccgttcctatccaacctcatccttctcgaatccaaagacctagatgtcattctcggaatggattggttgaccagacacaagggggtgattgactgcgcaagccgcaccatcaccctaaccaacgacaaaggggagaagatcaccttccgttctccagtgccacagaagtccgtagcaagtctgaatcaggctactatcgaggatcagacagaaatagcggagaaaaatcccaagaaattggaggatatacctatagtacaagagtatcctgaggtgttcctagaagacctcactacaatgccaccgaagagagaaatcgagttccggattgatctggcacccggaactgctgcaatctacaaaaggtcgtacagaatggcagctaatgagctagcagaggtcaagaagcaggttgatgaacagctgcagaaagggtacatccaaccgagtatttcaccttggggtgctccggttatctttgtggagaagaaagacaagaccaagaggatgtgcgttgattatcacgcccttaatgaggtcacaatcaagaacaaatatcccttgcccagaattgatgacctgtttgatcagttaaaaggggctaaggtgttttccaagatagacctgcgatcaggctatcaccagttgagaattcgggaagaggatattcccaagacagccttcactactcggtatgggttgtttgagtgcacggttatgtcatttggactcaccaatgcaccggctttcttcatgaacttgatgaacaaagtgtttatggagtttcttgacaagtttgtcgtggtgttcattgacgacatacttatttattcaaaatcagaagaggaacatgagcaacatctccgtctggtactcgagaaattgaaggagcaccagttatatgccaagttcagtaagtgtgacttctggttgtcggaagtcaaatttctgggtcacgtcattactgctcaaggtgtggcagtggatccatcaaatgtggagtcagttacaaagtggaccccaccaaagacagtttctcagattcggagttttcttggacttgcgggctattaccgtcggttcatcgaaaatttctctaagattgccagacccatgacacaattgctaaagaaagatgaaaaattcaagtggtcagttgagtgcaatcaaagttttgaagaactcaagaagaagttagtatctgcaccagttctgattctgccggatcagacgaaagactttcaggtctactgtgatgcatctcgtcaagggctgggatgtgtgctgatgcaggaaggcagagtggtcgcatatgcttcgcgacagttgcgtccacatgagagcaattatcctactcatgatcttgagttggcagcagtggttcatgctctgaaaatctggcggcactatcttattggcaaccgctgtgaagtctacactgatcacaagagtctgaaatggctggagttaattaaagattatgacatagggatacactatcatgcaggcaaagcaaatgtggtagcagatgcttttagcagaaagagccattgcaatacagtatataccgaaggcatgtgtgacaaattgcaacaagatctagagcacctaaatttgggcatcgtggaacacgggtacgtagctgctctagaggcacgccctacgctcgtggatcaagtcagagatgctcaggtaaatgatcctgaaatagctgagctgaaaaagaatatgaggattggaaaagcccgagattttcatgaggatgggcatggcacaatctggttgggagaaagattgtgtgtacctgacgacaaagaactgaaggatctgatactcactgaagctcatcaaactcagtattcaattcatcccggtagtactaaaatgtaccaggacctcaaagaaaaattctggtgggctagcatgagaagagaaatagctgaattcgtcgcactctgcgatgtttgccagagggtaaaggcagaacatcaaaggcccgcaggattgttacaacctcttcagatcccggaatggaaatgggaagagattggaatggatttcataacaggtttgcccaggacatcatcgaggcacgattcaatctgggtagtcgtggatcgactcaccaaagttgctcatttcattccagtgcacactacctatacggggaaaaggttggcagagttgtacttagcaaggatcatgtgtttgcatggggtacctaagaagatagtatctgatcgagggagtcagttcacttcaaaattttggcagaagttgcaagaagaattggggactcatttgaatttcagcatagcttatcatccacaaactaatggtcagaccgagcgagtcaatcaaatattggaagatatgttgagagcttgtgcacttgactttggcggagcttgggataaaagtctgccttatgcggaattctcttacaacaacagttatcaggccagtctgcaaatggcaccgtttgaagcattgtccggatggaagtgccgcacttcgctcttctgggatcaaacaggtgagcgccaactgtttgggacagaggtgctaaccgaggcagaggaaaaagtcaggaccatcagggaaagattgagaatcgcccagtctcggcagaagagttatgctgacaaccgccgaagggagcttatttttgaagcaggggattatgtgtaccttcgtatcactccgcttcggggagtccaccgcttccagactaaaggaaagttggcaccacgctttgtgggaccatacaggatcctggaacgcagaggtgaagttgcttaccaccttgagcttccatctaatatggctggtatccacgatgtgtttcatgtatctcaactgaagaagtgtttgagagtacctgaggaacaagctagctcagagcacatagacatttag

SEQ ID NO: 14738 - DNA, 2016 bp, Oryza sativa
  Clone ID: TFbOSC412908j.C1.o19.fg
atggctaacaagaccgtccgtgaattcgttgctctctccgctgacaatgtggccattgggccgcagatcaacatgggagacgtggatttcgatccgaagtccagcctcatcatgatggcgcaggctagcccgttctgcagcaagcctaatgaggatgccaatgcttatctgcaacagttcctggagatctgcaacacgtacaccatgaagggagtcagtccatatgccgtcaggctgcggctgtttccgttttctctccttggggaagcgaaactgtggttctatgccaaccgtcctacaatcaacacctgggacaagtgttctacggcattcctatcgaagtttttcctgatgggcaaaaccaacgcccttcgcggaaggatttcgagtttccagcatacaagggatgagtccattcctgaggcgtgggaacaacttcaggaatatgtggccgcctgtcctcatcatgggatggacgactggcttatcttgcagaacttctacaatggactcactcccatgtctcgtgaccacctggacgcggcagctggaggagccttcttctcaaagacgcgaggtatacacaccgtcaaggaaacggaaatacttgttgccaagctggacctcttcatgaagcggttggacgaccacgaaaaaaggccacaaggtaccatcaaagccttggactcacacatcacgtgtgaagactgcggcagcatgggtcactctgggaatgattgtccggaaacccgtgaagaggtgatgtatatgggcaacaacaataacaacgagtatcgtccacaaggaggtcaggggtggaaccagccactcccatactatcaaggagctacattagtacctacaaatgaatctgggaggatcccagggcagcccgaatcctccgttgaaaatgtaaaggtaatcacaatgaggggacgtaagtccactcgggatccgccatatcctaaccctgcagggactagcagtatcaccaaggaagcgccatatagtaattcggctgatgaaaaggttcagccagagaagactatgccgcaggagtaccgcgacacccgtttgctgccgtttcctcaaaggaacaagaaaccgtcagtggacgagcagtttgctcgttttgttgaagtaatccagaaaatccacatcaacgtgccattgttggacgctatgcaagtgccaacatacgcacgttatctcaatgatatcctcaacaacaagagaccgttcccgacaacggaggtggtcaagctgacggagcattgcagcaacgtcatacttcacaagttcctagaaaagaagaaggatccggggtgtcctacgatcacctgctcgatcgggacacagcaattcgaccaagccctttgtgatcttggagcgagtgtcagcgtcatgccaaaggacgtctttgacaagctcaacttcacggtgttggcagcaacaccgatgcgcctgcaactagccgactcgtcagtccgttacccagccgggatagcggaggatgtgccggtcaagattcgggatttcttcttcctggtcgatttcgtagtgctggacatggacacggagaaggaaacaccgctcatcttggggcgtccgttccttagcactgcagaagacaacaatgacatgggaatggggagtatccgtttccgtatcaacgggaagcaagagaagtttgagtttcagccaaggaccaaacaatgctcgatggtcaggatcaactacgggccaaaccaacagaatattcaaatggtcgaagtggagccacccaagacggacagcctggtgaagttcatgcggaatttcctggaaaaggaaacaacgtttcccaggaaccgttattggaagacgccagtaaaatctagtacaccggccaagaagctagagcagctggctcagaggaagccatctccctcaccgaaaccaaagagggtgtggaaggaaaaaccaaagacgcccactccatcacctccggagacaggtggaaaatctgcaaactga

SEQ ID NO: 14739 - DNA, 3366 bp, Oryza sativa
  Clone ID: TFbOSC6630j.C1.o3.fg
atggcggcatcgggctctgtctcctgccggctggaggatgtgacattgcatgagttcaataacctggcccggtacgccccggaggatgttcgtgaagatgaagaaaagcaggaaaagtttctggcaggaatggaccctgaactttctgtgcgtctggtctctggggattaccctgatttccagcgcctgtcgcagcaacagcagaatcagcaagggaaccgtgcaccccgtccccttgcaccggccgtgcagcctggtcaaggtcgcagggatgttcaaggtcagcagcgtctatgcttcaactgcttcgagcccaggcacttcgctgataaatgcccgaagccgaggagccagcaaggccaagcgcctccccgccctaacaacggtggtaaggatgccacccggggtcgtgtgaaccacatcactgcagagaatgtgctgacaactccagacgtcatcgttggggctatgacagcaaagtattatagcccggtcgtacctatagagatccagggaattccttttcccttggatctgatccttctagacaccaaggacttggatgtgatcctcaagatgaattggttgacccaattccaaggagtagtggattgtgcaagacgtactgtcaccgtgtaccagaagcctgatcaaccagttgttttctttgcgcacccgactcccaccggcagctcagtacttcatcaactaggactgtcagaaatacccgttgtcagtgagttcggtatgccgcccaagcgggagattgagttcaggatagatcttgctccaggaaccactcccctgtacaagcgaccctaccgtatggcagcaaatgaattggccaaagtcaagaagcagttggaagagttgaaagagaaggggtatatacggccgagcacttccccctggggtgctcccgtgacttttgtagaaaagaaagacaagacaaagaggatgtgcgttgactaccgagctctcaatgaagtcactatcaaaaacaagtaccctcttccccagatcgatgatctgttcgatcagcttaaaggtgccactgtcttttccaagattgatcttcgttccggatatcaccagttgcgtatccgcgaagaagatatccctaagaccgcattcaccacgcggtacgggctgtatgaattcacggtgatgtcgttcggtctgaccaacgctcctgccttcttcatgaatttaatgaacaaggtgttcatggaatacctggataagttcgttgtggtctttattgacgacatactggtctactcacagtcagaggaagaccatcagcagcatctccgtctgctcagcaagtgtgaattctggttgtccgaagtcaagttcttagggcatgtgatatctgctaaaggagttgccgtggatcctgaaacagtaacagccgtcaccgatttgaagcaacccaagtcggtcacccaagtccgcagtttcttgggtttggcagggtactatcggagattcatcaagaatttctccaaaatttccaggcccatgacgcagttgctgaagaaggaagaaaaatttgtgtggagtccgcagtgtgagagagcatttcaaactctcaaagaaagctacgaccccatgaaggcaactatcctacccatgattttggagttgaccgctgtggtccatgctctgaaaatctggcggcgttatctcattggaaatcactgcgaaatatacaccgatcataagagtttgaaatacatcttcacccagccggatctgaatcttcggctaagaagatggttagagctcatcaaagactatgatgtgggaatccactatcaccctagtaaggccaacgtggtcgccgacgcgctgagtcgaaagggccattgcagtactctttgcgtccgtggcattccaccagaacttaatcaacagttggaagctctgaacctaagtgtagttagccatggattcttggctgcactagaagcaaagcccaccttgcttgatcaaatacgcgaggctcagaagaattatccggatatgcatgggatcctcaagaatatgaagcagggtaaagccgctggcttcatggaagatgaacacggaaccttatggaacggaaatcgtgtatgcgttccggacaacaaggaatttaaacaattgatacttcagggagctcatgaaagtccttattccatccaccctggcagtacgaagatgtacttagacatgaaagagaaatattggtgggttagtatgaagcgggaaatcaccgagttcgtggccctttgtgaggtgtgccagcatgtcaaagcagagcaccaacgaccggccggactgctccaacctctacaggtaccagaatggaaatgggatgaaattgggatggatttcatcaccggacttccaaaaactcaaggcggatatgattctatatgggtagtcgtggatcgactaaccaaggtggctcggttcattcctgtgaagaccacctatggagggaacaaattagatgaactttacttcgctaggatcgtgagtctccatggcgttcctaagaaaattgtatctgataggggaagccaattcacctctcacttctggaagaagctccaagaagagctgggtacccgattgaatttcagcaccacttatcacccgcaggcagatggacagaccgagcgtctgaatcaggtcctagaagacatgctccgcgcctgtgttctagattttgggaagacctgggataagagtctcccctatgcggagttctcctacaataacagctaccgagccagcatacaaatggcaccctatgaagcgttgtatggacgcaaatgccggactccgctgttgtgggaccaagttggggaaagccaagtgttcgggaccgatattctgagagaagctgaagctaaagtcagaaccattcgggataacctaaaggtggcacagtctcggcagaaaagttatgcagataaccgacgccgcgatctggaattcgcagtgcacgactttgtgtatcttcaggtcacgccactacagggagtgcataggtttcagacaaaggggaagctcgcacctaggtatgtggggcctttccgcatcattgctcgacgcagagaagttgcttaccagttggagctgcccgcatccttgggcaatgtgcacgatgtgttccacgtgttgcagctcaagaaatgtcttcgagtgccgtccgagcaggccgattcagtgcagattgaagttcgcgaagacttgacctacgtggagaagcctgtgaagattctggacactatggagtgcaggacttggaatcgggtaatccgtttttgcaaggtcctgtggagcaaccacgccaaggaagaagctacttag

SEQ ID NO: 14740 - DNA, 3900 bp, Oryza sativa
  unsure (1)..(3900): unsure at all n locations
  Clone ID: TFbOSC7844j.C1.o2.fg
atggcggcgacggaggagcggcccggancgaaggnagcggncggcgcggctcgggtcgacggggtcgacggcgttcggcgggtcggcgacggaaacggagaggtggacgaggttggcgaggatgcggcgaacccgaagaaggcggcgccgagggtcgttttgggacgtgacaagttccgtgcactccagcaaggaaccatgtcagttacagagtacatgcacgagttcaaccgccttgcgcgctacgctcccgaggacgtgcgcaccgatgctgagaagcaagagaggtttttgtttggtcttgatgatgaattgaccaaccagctgatctccggagtctatgatgattttgagaagcttgtggacaaggctatccgtcaggaagaacaacgtaacaaaatggaccgaaaaagaaaggcagctcagatcagctttcctcaggggaacaatcagaagcctcgcttcatgacgggacagttaggtgagccttccaccctgatcgtccgtcagcaccgtccttaccactcgagtaacttcaacaacgactacaatagtggctgtcacggcagcagtaagcagcacaaccacaactcgactccacccccattaatggcaccaactcagtcagatccgccagctatgtcagctcagtcagaacaactcaagaaggagtctgcaggaaagccaagaccctgcttcaactgtggcaagcacggccactttgctggcaagtatccgaagccgaagcgcgctggacctaggttcgtccaggcctgcgtcaatcatgcgtctgcagaggaggcacaggcagcaccagaggtcgtgctgggcacgtttccagtgaattcatttccggcaacagtactttttgattcgggtgcctcgcattctttcatttccaagagaattgctgggacacatggattatcggtagtggaacttaaaatactgatgcgggttcatacccctggaaatgacatgaacaccacacactactgcccctcagtgaccatagagatcaaaaggtcaccgttcctatccaacctcatccttctcgaatccaaagacctagatgtcattctcggaatggattggttgaccagacacaagggggtgattgactgcgcaagccgcaccatcaccctaaccaacgacaaaggggagaagatcaccttccgttctccagtgccacagaagtccgtagcaagtctgaatcaggctactatcgaggatcagacagaaatagcggagaaaaatcccaagaaattggaggatatacctatagtacaagagtatcctgaggtgttcctagaagacctcactacaatgccaccgaagagagaaatcgagttccggattgatctggcacccggaactgctgcaatctacaaaaggtcgtacagaatggcagctaatgagctagcagaggtcaagaagcaggttgatgaacagctgcagaaagggtacatccaaccgagtatttcaccttggggtgctccggttatctttgtggagaagaaagacaagaccaagaggatgtgcgttgattatcacgcccttaatgaggtcacaatcaagaacaaatatcccttgcccagaattgatgacctgtttgatcagttaaaaggggctaaggtgttttccaagatagacctgcgatcaggctatcaccagttgagaattcgggaagaggatattcccaagacagccttcactactcggtatgggttgtttgagtgcacggttatgtcatttggactcaccaatgcaccggctttcttcatgaacttgatgaacaaagtgtttatggagtttcttgacaagtttgtcgtggtgttcattgacgacatacttatttattcaaaatcagaagaggaacatgagcaacatctccgtctggtactcgagaaattgaaggagcaccagttatatgccaagttcagtaagtgtgacttctggttgtcggaagtcaaatttctgggtcacgtcattactgctcaaggtgtggcagtggatccatcaaatgtggagtcagttacaaagtggaccccaccaaagacagtttctcagattcggagttttcttggacttgcgggctattaccgtcggttcatcgaaaatttctctaagattgccagacccatgacacaattgctaaagaaagatgaaaaattcaagtggtcagttgagtgcaatcaaagttttgaagaactcaagaagaagttagtatctgcaccagttctgattctgccggatcagacgaaagactttcaggaaggcagagtggtcgcatatgcttcgcgacagttgcgtccacatgagagcaattatcctactcatgatcttgagttggcagcagtggttcatgctctgaaaatctggcggcactatcttattggcaaccgctgtgaagtctacactgatcacaagagtctgaaatggctggagttaattaaagattatgacatagggatacactatcatgcaggcaaagcaaatgtggtagcagatgcttttagcagaaagagccattgcaatacagtatataccgaaggcatgtgtgacaaattgcaacaagatctagagcacctaaatttgggcatcgtggaacacgggtacgtagctgctctagaggcacgccctacgctcgtggatcaagtcagagatgctcaggtaaatgatcctgaaatagctgagctgaaaaagaatatgaggattggaaaagcccgagattttcatgaggatgggcatggcacaatctggttgggagaaagattgtgtgtacctgacgacaaagaactgaaggatctgatactcactgaagctcatcaaactcagtattcaattcatcccggtagtactaaaatgtaccaggacctcaaagaaaaattctggtgggctagcatgagaagagaaatagctgaattcgtcgcactctgcgatgtttgccagagggtaaaggcagaacatcaaaggcccgcaggattgttacaacctcttcagatcccggaatggaaatgggaagagattggaatggatttcataacaggtttgcccaggacatcatcgaggcacgattcaatctgggtagtcgtggatcgactcaccaaagttgctcatttcattccagtgcacactacctatacggggaaaaggttggcagagttgtacttagcaaggatcatgtgtttgcatggggtacctaagaagatagtatctgatcgagggagtcagttcacttcaaaattttggcagaagttgcaagaagaattggggactcatttgaatttcagcatagcttatcatccacaaactaatggtcagaccgagcgagtcaatcaaatattggaagatatgttgagagcttgtgcacttgactttggcggagcttgggataaaagtctgccttatgcggaattctcttacaacaacagttatcaggccagtctgcaaatggcaccgtttgaagcattgtccggatggaagtgccgcacttcgctcttctgggatcaaacaggtgagcgccaactgtttgggacagaggtgctaaccgaggcagaggaaaaagtcaggaccatcagggaaagattgagaatcgcccagtctcggcagaagagttatgctgacaaccgccgaagggagcttatttttgaagcaggggattatgtgtaccttcgtatcactccgcttcggggagtccaccgcttccagactaaaggaaagttggcaccacgctttgtgggaccatacaggatcctggaacgcagaggtgaagttgcttaccaccttgagcttccatctaatatggctggtatccacgatgtgtttcatgtatctcaactgaagaagtgtttgagagtacctgaggaacaagctagctcagagcacatagacatttag

SEQ ID NO: 14741 - DNA, 304 bp, Oryza sativa
  Clone ID: TFbOSC24811j.C1.o2.np
tcaccacttctagcaccaacacctaacacaacaggaggatgtctagagttatgagcataaggatcaaaacctaaaccacagttatttgtgctaacctttgattgatcctagatcgtaaagggcctttcccaccccaaaagctagccattgaggtgaggggctcccccacttatatcttaggtcctttacccttccacaaccaatgttggactattcaacaatctcccccttcacacattggtgtccctcagcccttcaccgccccttcaccgtatccgggccccaccggcccatggtccatcag

SEQ ID NO: 14742 - DNA, 2706 bp, Oryza sativa
  Clone ID: TFbOSC400261j.C1.o3.fg
atgacaggtttcgacttgccggaaaattttcaagaaaatccagaagtcttcttccgaagcgtaaagccgcgggttgttcccccgcagaagactcttccgacaaagaagccagccgtaccagcgccaccaactttcaagactatggctgacaagaccctccgcgagttcgctgctccctcctctgagaacgtggccactgggccgcaactcaacatgggagacgtggactttgacctgaaatccagcctcattacgatggcgcaggctagcccattctgcggcaagcctaacgaggatgctaatgcacatatgcaatggttcctggagatctgcagcacgtacaccgtaaagggcgtcagtcctgacgtcgtcaggctgcggctgtttccgttttccctcctcgggaaagcgaagcagtggttttatgccaatcgtgccgtgatcaatacctgggacaaatgctcgatagtattcttgtcgaagttctttccgatgggcaagacaaatgcccttcgtgggagaatttcgagcttccagcagacacgtgatgagtccattccagaggcatgggaacgtctgcaggaattggacgaacacgagaagaagccccaaggcaccgtcaaggccttggactcacacgttacgtgtgaagtctgtggcaacacgggtcactctgggaacgactgcccgaaaacccatgaggaggtgatgtacatgggtaacaacaacaataacaacaatgggtatcacccacaaggagccaaaactaccgacgcactcaacaaaaagatggctgccaatgacaagatcttagaaaatataaatgtgaaactagatggctttgcttccgcatttcaaaaccagttgagtttcaataagatgattgaaacccagttggcgcaacttgccgctctagtacttgcaaatgaaactggaaggatcccggggcaacccaaaccctccattgaaaatgttaaggtgatcacgacgaggggaggacatcctcaacaacaagcgaccactaccaacaaccgaggtggtcaagctgacggaggaatgcagcaacgtgatcctccacaaactcccggagaagaagaaggatccgaaggatccgagaaattcgacctggcgctctgcgatcttggggcaagtgtaagtgtcatgcccaaggatgtctttgacaagctcaacttcacggtgttgacaccaacaccgatgcgccttcaattggctgactcatcggttcactacctagctgggatagcggaagacgtaccggtcaagatacgagattgctttatcccggtcgacttcgtggtgctagacatagacactggcaaggagacaccgctcatcctggggcgtccgttcctgagcactgcggaagcaaacattgatgtcggaacgggaagtatccgtttccgcatcaacgggaaggaggagaagttcgagttccagccaaggacggaacaatgctccatgttccgaataaagatgaggtcccgttattggaaaacgccggtaaaacccaagacaccggccaagaaggaagaaaagctggctcagaagaagccgccgcccataccaagaacaaagaagagcttgactcaggcttctcatcaaccggtggcaaatccaccttgtgtctttgaattactgtacccgaacgagtcagaacaaatgaatctacaagcctaccacatgctgaaggaccgggagttcggccacaccagggcgtatgatccagaacttctaagaaaaacaggtgatcttagacccattcggggagatgagttgattatcatgtttgccaaggttaggaagactaaagttgctcctgttaaatatatgattaggcaatggttagaaagtattaagtataatgcccctgttgagtgcacttccttgatcacccgcatagcgaacggacatggagttatcaccactgatcaaatcgagtatatcttcactgtccatccctatgtggatgaaacatatttaatgcaagggcatatacttaagcatggagccgatggctctttgatatactttttcccctgtacaaatgaaatcccgttacccaatgcggggtatcatttgtacaactgtcaggaactaaccattcccctgcagaccatagaagaatctcgtgcaggtacatcctacagggaaacacgcaacaaaccaaggcaaaaacacgaggagtcatcatcatcaacacccatgcagatgtacgaggcggactgggaaccaacgggggatgcacccggttggacccaagcaccacgacacaacacaggaggtatgccatgtttgatccctaccaagctccacatactaaaccttagagtaggaatcaacaaggttactttgggcaaggtaaagcaatgtctcgcgggaatcaggtgtaaggaaataccaacacgtactgtcggccggcgacggcggcgacacgaggagaatctccacgctcggcttggcgatgaggtgggaaggagggggaacttgatctacgccggcagcgatgaccagtcgaggcagagagccaagacgcagcagctgaggtccgcggatgaagctgctcggtgggaaatcccgaggtgcgggaggaagaagcagcggctggcgacagggtcgcagacacagaggtcggagggcgccgcctgccgccggccaccgctgtcgtcgtcgctcacccgcgcgtga

SEQ ID NO: 14743 - DNA, 4362 bp, Oryza sativa
  Clone ID: TFbOSC400993j.C1.o54.gm
atggtgaagacaaggaatgatccccatgactccaacgacgccagtggcagcgaagagcagaccgatggagctcatgtcagtggtgcatctggcagcagatcatctccaccgcccgaaaacccaacagtcactcaaatgatgacaatgatgatgcaacagatgcagcaacattaccatcagatgttgcagcaggcgcaacagaaccagcagtttggtcctccaccatcacacgtgtccaaactgttagactttcttcgtatccagccacccactttctcaagcaccaccaacccaatggaggccaatgactggctccgtgctattgagaagaagctgaacctactgcaatgcaacgaccaagagaaagttgcttttgctacacaccagttgcaaggtcccgcttctgcctggtgggataactacgtggcgacccgtctagatgcaacggaggttacttgggcagagttttgtcaaagcttcaggaaggcacagattcctgaagggattatggcacaacagaagagagagttccgtgcgctccagcaaggaaccatgtcagttacagagtacttgcatgagttcaaccgccttgcgcgctacgctcctgaggacgtgcgcaccgatgctgagaagcaggagaagtttttgtttgggctcgacgatgaattgaccaaccagctaatctccggagtttatgaggactttgagaagcttgtggacaaggctatccgccaggaagagcaacgcaacaaaatggaccgaaaaagaaaggcagctcagatcagctttcctcaggggaacaatcagaagcctcgcctcatgacgggacagctaggtgggccttccaccctgatcgtctgtcagcaccgtccctatcacccgagtaacttcgacaacgactacaacggtggcagtcacaacaacaaacaacccaagaagggggctgtaggaaagccaggaccctgcttcaactgtggcaagcacggccactttgttggcaagtgtccgaagctgaatcgcactggacccaggttcatccaggcccgcgccaatcatgtgtctgcagaggaagcacaggcagcaccagaggtcgtgttgggcacgtttccagtgaactcatatccagcaacagttctctttgattcaggtgcctcgcattctttcatttccaaaagatttgctgggacacatggattatcggtagtggaacttaaaataccgatgaaggttcatacccctggaaatgatatgaggacagcacactactgcccctcggtgactatagagatcaaaagatcaccgtttctatccaacctcatccttctcgaatctaaagacctggatgtcattcttggaatggattggttgaccagaaacaagggagtgattgactgcgcaagccgcaccatcaccctaaccaacgacaaaggggagaagatcaccttccgttccccagcgtcgcagaagtccgtagcgagtctgaatcaggctgctattgagggtcagacagaaacagtggagaaaagtcccaggaagttggaggatattcctatagtacaagagtatcctgaggtgttcccagaagacctcactacaatgccaccgaagagaaaaatcgagttccggatcgatttggcacccggaactgctccaatttacaagaggccgtacagaatggcagctaatgagctagcagaggtcaagaagcaggttgacgaacagctgcagaaagggtacatccgaccgagtacttcaccttggggtgctccggttatctttgtggagaagaaagacaagaccaagaggatgtgcgtggattatcgcgcccttaatgaggtcacaatcaagaacaaatatccgttgccaagaattgatgacctgtttgatcagctaaaaggagctaaggtgttttccaagatagacctgcgatcaggctatcatcagttgagaattcgggaagaggatattcccaagacagccttcaccactcggtatgggttgtttgagtgcacggttatgtcctttggactcaccaatgcaccggctttcttcatgaacttgatgaacaaagtgtttatggagtttcttgacaagtttgtcgtggtattcattgacgacatacttatttattcaaaatcagaagaggaacatgagcaacatcttcgtctggtacttgagaaattgaaggagcaccagttatatgccaagtttagcaagtgtgacttctggttatcggaggtcaaatttctgggtcacgtcatttctgctcaaggcgtggcagtggatccatcaaatgtggaatcagttacaaagtggaccccaccaaagacagtttctcagatccggagttttcttggacttgcgggttattaccgtcggttcatcgaaaatttctctaagattgccaggcccatgacacagttgctaaagaaagatgaaaaattcaaatggtcagctgagtgcaaccaaagttttgaagaactcaagaagaagttagtctctgcaccagttctaattctgccagatcagacgaaagacttccaggtctactgtgatgcatctcgccaaggattgggattggttcatgctctgaaaatctggcggcactatcttattggcaaccgctgtgaagtttacactgatcataagagcctgaagtacatcttcacccagcccgacttaaatctccggcaacgaagatggctggagttgattaaagattatgacatggggatacactatcatccaggcaaagcaaatgtggtagcagatgctctgagcagaaagagctattgcaatgcagtatgtaccgaaggcatgtgtgacaaattgcagcaagatcttgagcacctaaatttgggcatcgtagaacacgggtacgtagctgccctagaggcccggcctacgctcgtggatcaagtcagagcagctcaagtaaatgatcctgaaatagctgagctgaaaaagaatatgagggttggaaaagctcgagatttccatgaggatgagaatggcacaatctggttgggagaaagattgtgtgtgcctgacgacaaagaactgaaggatctcatactcacagaagctcatcaaactcagtattcaattcatcccggcagtactaaaatgtaccaggacctcaaagagaaattctggtggggcccacctgtcggccccttcttccacctcccgctgccgctccctaagccggccgccgccgaaaccgccaccgacgccgccgggtcgccgccgcaccccgccatcggcgccgccgcgtccgccatcccgaggtccacctcgtccgctgttctcccgtccaattccatcgccggagctcgcatctcctcgcactccgagttgaagtccttcccagttgaagatgtctcgaagaggttggtttcgtcgctgccgtcaaggattgcctgtggaatggagtcgcccgctgcaggagtcaacttagaaattctggttcgtgaatttctgggcgtgacaaggcgcgcgcggccacgggcatggcgcggcagcgaggaggcagtccctgcggcggggcggcacggcaccgcgaggacgatgacgagcggcagggcgtcaatgaggtttgaagagctcgcggttggaaagataatggatccgaactttccataccagtcgccgtcgttcaccttgggtgatttcgaccccaactacatgtcggggtttgacggaggcgacagcttcggaaggattttccggaaccgcgagcggaagtgtttcgacacacaccggctcgaagagatcgagaacctccggcaaattttatctgctcgttcttctggtggtacaggtcacctcaagcgccatgcggagtcgtgtgccaagaagcaaggaatacaactccggcagcagcaacttatgctaaacccagacggtgaccacatcgatgctgttcgtcaagcaatcgcgtggttaactgcttctaacccgcggattgctgcatggaagaggttttgcattgcggccggaagttcgccagcggagaccccctcctatccccactacagcgacgccatccaccacgaagcacaagatttcaacgtcctcgggtggtggaatgaccacaagataacatatcctgtgctttcaaaactagcacgggatgtgttgacggtgcccgtgtcgacggtgtcctccgaatcggccttcagtctatgcggccgaatcatcgaagaccggaggacgactctgcgcagcgaccacgtcgaaatgctactaagcgttaaagactgggagcttgctcgacaacatgcccaatacactgcggacaaccaagaattggccgcccacttcgagcaactctacctggatccagaccaaccccagtag

SEQ ID NO: 14744 - DNA, 3420 bp, Oryza sativa
  Clone ID: TFbOSC401472j.C1.o6.fg
atgcagcatgagattatatgtggttgtatctgtaagcgaaacaatgatgaacggataatgaaagttataggtgaagtgaataaatttgaaaatgagactgtacagggtgataaggcatgcagattcagtaaatgctatggtagaatgtgggagaggataagggataagagtaaggtggaatcgaagagtatcataagtaattatacgggggtctatcggtgcatcaacgctaggtcatgcgcatggtccctagggcgtgacgacaagcaccgtttcaccattagttcggtttgtggaaccccaattgggttagccttctcggcaaggtcaactggacaatgcacgattggtaaccagaggagacatggtgcatgcaccatgctggaccttccacatgtgatcaattccatcgcgtctgatcatagcgacgttgctcagtttgttgcaggtgatatgatggatttcaacctcaaagcagatgccgtcctgcttaagtctgtgctacatgattggagtgatgaggactgcataaagatactaaaatgttgcaaggaagcaattattccttctaaagatgcaggaggaaagatcatcattatagatgttgtagttggatcttcttctgaagcaatatgccaaggaacccaacatttggttgatctgaatatttcggttctaacaccagggaaggaaagggacgaggaagagtggttcaagatgttcactaagtacaagattagcccagtgttaggttttcgatccattatcaaaattactgttgaagtggttttggagataattgattttcaggtgtgtcgggaccgatcagaccgggcggtggttgccggtgactcgatgcctcgggagagtatttgcggtgatggaccgggagtcggcttggtgagagaagtaataaagttgtcatctactttgagagttcttcgatgtgtgtttcatcgggtgcggcggtccgaccggcgactcaacgatggtccgaccggcgacaagcggtggtcagaccggcggtatacgggcggtcagaccggcggtggcgacagcaagcggcagctgatcttggaggtcaaaccggagattgaatctcggtcagaccgacggcaaccaggtggtcagaccggtgcatctacttcggtcagaccacgatccatcgattttgaggctcgcaatattcttttgagtgggatttctcgttcggattatgatcgtgttgctcatcttcaaactgctcatgagatttggattgctttgagaaattttcatcaaggtacaaataacattaaagaacttcgtcgtgatcttttcaaaaaggagtacattaaatttgaaatgaaacttggagaagctttggatgactatctttctaggtttaataaaattttgagtgatcttagatctgttgattcttcttatgatgctaattatccacaatctgagatttctcgtcactttttgaatggttttgacatgtctatttgggagatgaaagttacatctattcaggagtctgttaacatgtctactttgactttggattcgctttacactaaactgaaaactcatgagatgaatattctttctcgtaaaggtgattctaagtatagtgctttggtttcgtctacaacttctttggatgttgatgcttcttcatcgaagtcttctgttcttgctttatttaatgccatgttcgacgatcaacttgaacagttcgaggaggacttggttttgctatctaacaaattttctcgagctatgaataatgttaggaacaggaaaagaggtggaccgaatcgttgttttaagtgtggtgcacttgatcatcttcgctcgcattgtcctaagcttgggagaggcaagaaggaagatgatgtaagagtcaaagaagatgacttgaacaagaagaagaacatgaaggagaaggagaagaagaagcattgcatgcagtggctaattcaagaattaataaaagtttttgatgaaccggaagatgaagatgagagcaaaggtaagcaagttgttgatctagcttttattgctcgtaatgcaagttctggtgttgatgaatctgatgatgataatgaagaaaagcttagttatgatcaattagaatatgctgcttataaatttgctaagaaacttcaaacatgttctattgtgcttgatgagaaggatcatactattgagattcttaatgctgaaattgctagattaaaatctttgattcctaatgctaataattgtcaatcttgtgaagttttattttctgaaattaatgctttgcgagatgtcaattctattagttgcaagaaattggaatttgagattgaaaaatctaaaaggttggagtcttcttttgctcttggatttgctttacatgctcgtgttgttgatgagttgattttgacaaagaacgttttggaaaaatacaaagttgctttttgtgcaagttctttggtcaatgtttcatgtgcaaataaggcaaaacaaaacaatggtgctttgatttctcaatattgttcaaagtgtggtttgaatgagttgaagttgaaagatgctttagagcgtgttaatcacatggaagaaattgttaaacaagatgaggtgttttcttgctcaacttgtagaaaacaaaaaggtcttttggatgcatgcaaaaattgtgttgttcttacacaagaggtttcttatttgaaaagttctttggaaagattttctgatggtaaaaagaacctcaatatgattcttgatcaatccaaagttagcacgcacaaccgtggtttaggttttgattcttatgatcatcatactagacatcctcctactgttttgggtgttgctaggagaggttttaattcgaggagcacggttagaccgacattgtccagtcggtcagaccggccagcggtcaaaccgcaggtgaacgggcggtcagaccaattaccaggccaggtcatatcgcagtctcagcggcggtcagaccagcctcggggcaagttatcgcataattcaaatcagacttttgtgaagcgtcaagagaataaaaaatatgaaaaaaatgaataccgaatccttggaaacagtcttgacgacaatgacgtattcgatagagaagtaataaagttgtcatctactttgagagttcttcgatttgtgtttcatcgggtgctgcggtccaaccggcgacccaacggcggtccgaccggcgacaagcggcgatcagactggcggcatacgggcggtcagaccggcggcggcgacagcaagtggcagctgatctcggaggtcggaccggagattgaatctcggtcagaccgacggcaactaggcggttacaccggtgcatctacttcggtactaattcttggaaatgtttggcaaattgctattctactgatattgaggtga

SEQ ID NO: 14745 - DNA, 1692 bp, Oryza sativa
  Clone ID: TFbOSC405120j.C1.o12.fg
atggctaacaagactctccgcgagttcgctgctccttcggctgacaatgtggccattgggccgcaggtcaacataggggacttggatttcgacttgaagtcaagcctcatcacgatggcgcaggctagcccgttctgtggcaagcctaatgaggatgtcaatgctcatctgcaacagttcctggagatctgtagcacgtacaccatcaagggcgtcagtcctgacgccgtcaggctacgactgtttccgttctcccttctcgggagagcgaagcagtggttctatgcctaccgtgctgctaacttctacaatgggctcaccccgatgtcccgcgatcacctagacgcggtagctggaggagctttcttctctaaaacggttcaaggagccgttgatctagtagagaagatggtctccaatatgggttggagcgaggaacgactccagacccgtcagcgaggcatgcacaccgtcaaggagaccgagttacatgctgccaagctggacctcctcatgaagtgtttggacgaccacgagaaacagccacaaggcaccgtcaaggccttggactcacacgttacgtgtgaggtctgcggcaacacgggtcattctgggaatgattgcccaaaaacccgtgaggaggcgatgtacatgggcaacaacaacgggtatcgtccacaaggaggtcaagggtggaaccaaccacgcccatattatcaaggaggcaacaacaacgaaacccagctagctcagttagcatctttagtccctgcaaatgaaactgggaggattccaaggcagaccgactcctccgttgaaaatgttaaggcgatcacgacgaggggaggaactaatgggatatcaaaagaagcgccatctaatgactcgactgacaaagaggttcagcgagaaaagacagtgcctcaggagtactgcgacacacggttgctgccattccctcaacggagtagaaaacctaatccagaagatccacatcaacgtgccattgttggacgctatgcaagtgccaacatatgcccgttatctcaaagacatactcaacaacgagagaccactcccaacaacggaggtggtcaagctgacggagcaatgcagcaacgtaatactccacaagctcccggagaagaagatctggggtgccctacgatcaactgctcgatcggggcacaacagttcgagcaggccttgtgcgacctaggagccagtgtcagcgtcatgcccaaggacgtcttcgacaagctcaacttcacggtgttggcactgagacggatgcgccttcaactggctgattcgtcagtccgttacctggcagggatagcggaggatttgccagtcaagatacaggatttcttcatccttgttgacttcgtagtgctagatatggacacggagaaggagacgccgctcatcctagggcatccgttccttagcaccgcgagagccaacattgacgtgggaacaggaagtattcgtttccatatcaacgggaaggaggaaaagtttgagtttcaaccaaggacggaacagtgctccatggtcagaatcaagtacgggccaaacctgcagaatattcaagtggtcgaagtggagccacccaaaacggatagcttggtgaaattcatgcagaatttcctggagaaggaaacaacgatgcccaggaaccgttattga

SEQ ID NO: 14746 - DNA, 4500 bp, Oryza sativa
  Clone ID: TFbOSC900356j.C1.o3.fg
atggctactcccgctaggttttcaactaagcctcatgttttcgatggaacggattttactcattggtgtagtaggatgcagtcttacattatggctaaagattatgatatttggagaaaagtttctcatgcttatgtgattcctgaagttattaatactgctgctgaaaaaactgcttttgaacaaaattgcaaagctcgcaacatttttttgagtgggatttctcgttctcattatgatcgtgttgcacatcttgaaactgctcatgagatttggaatgctttgaagaattttcatcaaggaacaaataacattaaagagcttcgtcgagatctttttaaaaaggagtacattaagtttgagatgaaacatggagaagctttagatgactatctttctaggtttaataaaattttgagtgatcttagatctgttgattcttcttatgatgttaattatccacaatctgagatttcttgtcactttttgaatggtctcgacatgtctatttgggagatgaaagttacatctattcaggagtctgttaacatgaacaggaaaagaggtggtccaaatcgttgctttgaatgtggttcaattgatcatcttcgttcgcattgtcctaagcttgggagaggcaaaagagaaggcaaagatggtgagaagaccaacaacaacaagcccaacaactacaagtcgaagggttctaaccaagggaggaagatggagaatcttaggaaggcttttcaacaagtttgcgccgctttcgagccactaagtgatgtagatggtgaaagtggagatgatgacaagggaaagaacgtctccgatgtttgcttcatggcgcgtggtgaatctgacacagagtatgaagacaatgaggtgagtgcttttgaggaagctattaatattttgagtgcaaaaaataaaaagtgtgagaagatgtataaaaaacaggagtttatcattaaatctcttaaatctgaaattgatagattaaaatctcttattcctaatgatgatgattgtgaaaattgtgaggttttaatgaatgagatttcaaaaattagagatgttaatgctgcacatgatttgaaaaatagaccttctcttgcttgtagttttgctctgcacacacgcactttggatgagttgtttttaactaaaaagttgttgcaaaaatatcaaattgctttttatgctagtttgatgtttaacatgatttctgctaaaaagttaaaacaacatcatgatgttttggattgctcaacatgtaatttgaataacatgaaactaaaagatgctttaggtcatgttgagtacatggaagatgttgtgaaaaacaatgaagtgctttcttgccccaaatgtcggaaaagcaaaggtgtaatggtagattgtgaaaattgtgttaatttggaaaaagaggtttcttatttgaaaaattctttgctaagattttctgatggtgttggtgctagaagtggtgagattttgattaaacctgatacaaataaaactgtgtttaaatctgctggtatcatgtctactatgagtgcatcttcttcaaaatccaatgttgtgcatgcaaaacctcctgtttctgcttgtgttgctaaatcttctagctctaacaatgtgtctaaacaacgtgaaaaatatacttgttctttttgtggaaaagatggacatattgttgatttttgtttcagattagctcataaacagaaaaaggagagagagattgcttttgcaaaatcaaagtggcaaaaatctggttttccctcgaagaaaccggtcagaccgcagtgggtcccgcggtcagactggcgaccggtcagaccggctgaacagcctcgatcagaccgggcaccggtcagaccggcggtacagaggcggtcagaccggcccccggctttggtggcaaggaaggagaacgtgtggattgtggattccggttgttcgtggcacatgaccggtgataaagattggttctcctccctcaaaaaggcatccaagactgaatcaattgtctttgctgatgcttctactagtgtcgttgtcgctacaggtatggttaaggatgaagcttttcaacactttcgtggtttgtttcttcgattggagcttgaatttcctggtttgagaagaattcgaagtgataatggtggagagtttaaaaatgcttcatttgaacaattttgcaacgaaagaggtcttgaacatgaattttcttctccttgtgttcctcaacaaaacggtgttgttgaaaggaaaaatcgtgttttggttgagatggctagaacaatgttggatgaatacaaaactcctagaaaattttgggctgaggctattaacattgcttgttatatttcaaatcgagttttcttgcgatctaaacttggaaaaacttcttatgaacttcgatttggtcatcaacccaaagtttcacatttgcgtgttttcggttgcaagtgctttgtcttgaaatctggaaatttggataagtttgaggcacgccctaccgatggattgtttcttggttaccccgcacacactcgtggctatcgtgtacttattttagggactaacaagattgttgagacttgcgaagtttcttttgatgacgctagtccaggtactagacccgatatttcaggtacactgtcacaggttcagggggaggatggtcgtatttttgaagacgagagcgactacgacgacaacgatgaggttggctcggccggtcagaccgggcgccaggccagtcagaccgccggcacacctccggtcagaccggctcatgaggagcggtcagaccggccaggttcgtcgggttcgggtactgttgatgctgatcaagatggtcctccagagaattcaacttcgaacagtactgatacagaacgtggatcaacttcagaagtcgctgctcctttgcacattcaacgacgacatccgccggaacaaattattggtaatataggtgagcggactacaaggtcaaaggtaacggctcatgatgtttgtgcaaattctgcatttgttgcttcttttgaacccaaagatgtgtcacatgcattaactgatgaatcgtgtattaacgccatgcatgaagaacttgaaaattttgagagaaataaagtttggactttagttgaaccaccttctggacataatgtcattggaaccaagtgggttttcaaaaataaacaaaatgaggatggtttgattgtgagaaataaagctagacttgttgctaaaggttttactcaagttgagggtttggattttgatgaaacttttgctcctgtttctagaattgaggcaattagacttttgttggcttttgctgcttcaaaaggttttaaattgtatcaaatggatgtgaaaagtgcttttctaaatggttttatacaggaggaagtttatgtcaaacaaccaccaggttttgaaaatcctgattttcccaaccatgtttttaaattgtctaaagctttgtatggtttaaaacaagctcctagggcatggtatgatagacttaagaactttttgcttgcgaaaggttttacaatgggtaatgttgataaaatgctttttgttcttaagcatggtgataatcaacttttcgttcagatatatgtggatgatatcatctttggttgttcgactcacgctttggttgtagattttgctgagactatgcgcagggaatttgagatgagcatgatgggtgagttatcgtactttttgggattgcaaattaagcaaacacctcaaggtacttttgtgcatcaaacgaagtatacgaaggatcttttgagacggttcaagatggagaattgcaagtcaatttcaataccaattggttctacagctgtgctggatcctgatgaagatggtgaagctgttgatcaaaaggaatatagaagtatgattggatctttattgtatctaactgcttctaggccagacatacaatttgttgtgtgtttgtgtgcacgctttcaagcttctcctcgtgcttcacatcgtcaagcggtcaagcgaataatgaggtatttgaatcatacacttgagtttggaatttggtattctacttcatcttctatatgcttaagtggatattccgatgctgattttggaggttgtagaattgataggaaaagtactagtggaacatgtcattttcttggtacatcattgattgcatggtcttctaggaaacaatctagtgttgctcaatcaactgctgaatctgaatatgttgctgctgctagttgttgttcacagattctttggcttttatcaactttgaaagattatggtcttacttttgagaaagtacctctattttgtgataatactagtgctatcaatattgctaagaatcctgttcaacactcacgcacaaaacacattgatattcgttttcactttttgaggaatcatgttgagaaaggagatattgagttgcagtttttggacacaaagttgtaa

SEQ ID NO: 14747 - DNA, 3723 bp, Oryza sativa
  Clone ID: TFbOSC11344j.C1.o8.fg
atggctaataagactctccgcgagttcgctgctccctctgctgacaatgtggccattgggccgcaggtcaacataggggacgtggatttcgacttgaagtccagcctcatcacgattgcgcaggcaaacccgttctgtggtgagcctaatgaggggtccaatgctgatctgcaacagttcctggagatctgtagcacgtacaacatcaagggcgtcaatcccgacaccgtcaggctgcgactgtttccgttctcccttctcgggagagcgaagcagtggttctatgtgatgaggacatcaacaccaacgatacatccacacttccacaattacaacttcatgttgcttgttcatcttgttcttgctggttctcgattgcttgcaggaacaaataccctcgtagttgggctgatcgtgcatccgtcgagattcacgaccacctctggagttggggtaacgattgctaaggcgcaacatccccggatagttgtagtcggatcgccaacgtcactccatccaatcgacttatccctctcatcgaaagatcgagacaccctcgagcacatcaggtggtatcagagcccaagttgctcgtttttctttgactcattacacagcccacccatagctccaccggttcgactaacacttgacagggattcagctaccaaggcatcaatacaccttctccagaggttcgtccaagtccgacggttgccatcacctcctgtttggcatgatgagaattggttagtgagggaccgcacacaagggctcgaggaggatgtttgtatcaccaatgaaaagcttggtcatgttgaacgcacgcaaattgattccaacaccaagcttaccaccttggaagcttctgttgcgacggtgaacaccagtcttgatggtattgtgtggcgtcttgatgagatggcccgagcatcccaccatggtagtgagatggatgaccatgactacgttggtgattctgaggatgatgcggaccagcgacgacatcgcttcaatcgccgtggtgtggctcatcgtcggccacgccgtgaggtacgaaataatgatgattcatttggtaagattaaattcactattcctgcttttgatggtaagtatgaccctgatgcctatctttcatgggagttagtagtagatcaaaagtttgcttgccatgatgttcctgaggataagagggttagggctgccaccagtgaatttactgattttgcttctgtttggtggtgtgaataccgtcgtactcatataaatgctttgccacctacttgggatgatttgaaacaaattatgcgtgctagatttgtaccttcatattatgcacgtgacatgttaaataagctgcagcaattgaaacatggtggtactagtgtggaagaatattaccaagcgctgcaaatgggtagaactccatggacggctcggagtggcgctgcccccaccgatcgttcatcagtttcgacatcgacatctgcaccctccaacagcaacagcaacaaagcgtggccaacaccttctacggcccgctctcgtgcttcagaggttgcagaaaagcccaccaagagtgcctcctctgttgcttccacgggtagaacaagagatgttcagtgccaccgatgcaagggctttaggcacatgcaacgtgactgccctagcaagcatgttttggtagtcaaggctgatggtgagtactcgtctgctagtgatttcgatgaagatacacttacattgcttgtagctaacaacatagctagcgaggatgagaaacacatcggggctgatgtagcggaccaatatgagagccttattgtgcaacgtgtcttgagtgcacaaatgggcaaagcggagcagaaccagcggcataacctttttcagacgaagtgtgtcgtccacaagcgttcctggtgcacaatcatcgatggggccaccgggactaaaaatctggggatactatacgatacaaacgcagagggaagcagccagtactggaacgaagaagaggggaacgaggatccaaaccagtacttgaacgaggaggggaacgtggagagcgatgcggaggggaacgaggagggaaacgatgaggaggagtctactggaagtcatccctctgctggacagaagagggcacacggacaacgaggtgccgcaaagaagatagagggtcggcacatcgtaactgaggtggacgaagacggccgacctagtgccctagcagaagcagccaagaattttgtacaccacagcagttgggttgtgagggacaacgtgcctgtcagcacggtgtactggcgcagaacaagggcacgcagggataatgacagctttgtcccggactcagaaaaagagatgctgtggaccacaatgctcgagacgttcacgctacccgcaggtacgaagaacatagtgaaacagtggactctgaagaaaatagcagaacagttccagagcttcaagggagatctctacaagaaatacatcttgaagggactaacaccgaacttcgacgtattccaaaagctaagggatcattgggacgagttcgttgcttacaagacagggcaacaagggcaagcgatgatggccagaaacaaagaaaatgccgccaagaagaagtaccatcaccacttggggtcaggcggatatagcgtcgcaatgccgaagtgggaggagatggaggcaagtttgattgagaggggtatcgaaccggccaccgctaaatggccggatcgatcgaagttctggtactatgctcacggtggaacgcttaagccagttgatggctcccttgtcttcagtgatcagatacgcgacgctgccagtcgactaacggacgcggtggaagcctcttctcagggcacattccgacccgacagagagaaggaagagctgtcactcgccctacagattcccgagcatccaggacgaacacgagggaaaggcgtgattccgtggaagattggatttaaggaggacatccacacgtataggagtcggatgaggagcaagagagataccgaggcgaagattgcagatcttgagtacagggtatcgagctacgagctcagcatgcaagagaagatggcaaggaaggtggcgtcgggaatggccatcccaacggacccttccgggacttaccactgcaggccgattccagcaggatactcgagggtcgaagttgagctggtagaagccgcgtacaaggacctcgagttggactacccaggaggagacggtgagacgcatctacgagacacaagacacgccattatactatggtgcaagcggtacatcatcctccctgggcgacaagcggcatctcatgcaccatctcctctggctccgccatctcctcctgcaccatctcctccggttcctccgccacgtcctcctgcaccatctcctccggctcctctgcctcctccgcctcctccacctccaccgtgtctgcctgcaccacccaagacaaggtctcgccaagctccaccgcctgcccgcacaagggcaacgaagaaggcgaaagttgatgccaccaaaaacaaggagccaccgtacgattgtagtcaagaggagcttgatgcttatgtggcaggagaagtgaagaggcaacttgagcctcggagtcctgaaaagaagatacctattgacccgagcgtgaagaactacttcaagggaatgtccgcaacaaacaaggaggccttatag

SEQ ID NO: 14748 - DNA, 393 bp, Oryza sativa
  Clone ID: TFbOSC900326j.C1.o16.gm
atggcgagttgcgccacaccctccatcacattcttcttcaactcttcatactcgtcactgaaaagcctcgtcgctattcctctcttcggcaaacttggcctccaactcatcgcgcgagagcagcagctactgctacctttccttaccatgacgttggtgtatgaagcatctttggcagggcaatgtcgttgcaaggaaagggagcagcagctgctgctcacgcgcgccgagtggaaggccaagtttgaagagaggaagagcaatgaggcctatggtagcaatgccaagaagtaccatagcagattcgataagtcaaagattgattgccgaaagtgtggcaaatttggacacttcaccaacgagtgcgaagagtcgaagaagaaagtgatgtag

SEQ ID NO: 14749 - DNA, 1404 bp, Oryza sativa
  Clone ID: TFbOSC400718j.C1.o26.fg
atggtgaggatcgggactatgttcagggaggaacataggtctagtgcggtcaggataccatgtgaaaaggtgactagagtcaggattcttggaggtcaacttcggtcaacggtggggaccgggactaaactcagggagaagttgaggtccaaatggtcaaggataccgggtgacgaagttgaatacaagatggcacacggtggatggacaccgtgtgtgagagatcttcgcaacgggttttatgaggtccgtggcttggactgggaggagcagcagtggctcggttggatggcaggccgagtcggcccaggcggccaggagaccgagtgcgagctggcgaaggatcggcggcagggaggcgatctaaccggcggcgtgcgagcggtccgaccggcggcgacaggactacgtcgagatttccatcgatttgaggctcgcaatattttattgagtgggatttctcgttcggattttgatcgtgcttcacattttcaaactgctcatgagatttggaacgctttgaaaaattttcatcaagaaacttcaaatattaaagaacttcgtcgtgatctttttaaaaaggagtacattaagtttgagatgaaacctggagaagctttggatgactatctttctagattcaacaaaattttgagtgatcttagatcggttgattctgcttatgacaaaaattactctcaatctgaagtttctcgtcactttttgaatggtcttgacatgtctatttgggagatgaaatttacatcaattcaggagtctgtcgatatgtctactttgattttggattcactttacacaaaactgaaaacacatgagatgaatattctttctcgtaaaattgattctaattctagtgctttggtttcttcctcgacttctttggatgttggtgcttcttcatcaaattctactgttcttgctttgattaatgccatgtccgatgagtacaggaaaagaggtggaccaaatcgttgttttgaatgtggttctacggatcactttcgttcacgatgtcctaagcttgggagaggcaagaaggaagatgatggtagagttttggagaatgaagttgacaagaagaagatcacgaaggagaagaagaagaattgcatgcagtggctaatccaagaattaataagaacttttgatgaatcggaggatgaagatgagagcaaaggtaagcaagttgttgatctagcttttattgctcgtaatgcaagttctgatgttgatgaatctgatagtaatagtgaagaaaagcttagttatgatcaattagaatatgctgctttcaaatttgctaaaaaacttcaaacatgttctaatatgcttgatgagaaggatcacactattgagattctaaatgctgaattgatagattaa

SEQ ID NO: 14750 - DNA, 3102 bp, Oryza sativa
  Clone ID: TFbOSC414570j.C1.o19.fg
atgactaatgttaggtacaggaaaagaggtggaccaaatcgttgctttgaatgtggttctacagatcactttcgttcgcgatgtcctaagcttgggagagcaaggagggaagataatggtgatgagaagaccaatgacaagaagccgaagggtactttcaaagggaggaagatcaaggagactctcaataaggcttttgatcaagtctacgctgcgtttaagccactaagcgatgtagatggtgatagtagagatgaagataagggaaagaacatctccagtgtttgcttcatggcgtgtggtgaatcggattcagggtgtgaagacaatgagttaaaacaaccacatgatgttttggattgctcaacatgcacattaaacaagattaaactaaaagatgttttaggtcgtgttgagtacatggaagatgttgtgaaaaacaatgaagtgctttcttgccccaaatatcgtaaaagcaaaggtgtcatggtagattgtgaaaattgtgctaatttggaaaaagaggtttcttatttgaaaagttctttgcaaagattttatgaagattggctcataaacaaaaaaggagagagaaattgcttttacaaaattaaagtggcaaaaatctggttttccctcgaggaaaccggtctgaccgcagtgggtcccgcggtcagaccggctactgagcggcggtcagactggcttcggtcagaccgacgtactgaggcttcgacttctgcttgtgtgtacgctttggtggcaaggaaggagaacgtgtggatcgtggattccggttgttcgcggcacatgaccggtgataaaaattggttctcctccctcaaaaaggcatctaagactgaatcgattatctttggtgatgcttctacgagtgttgttctcgctaaaggtttggttaagaaaactggaagtaaagtttttgattcttgtggtgattctgtgctgaatatttctcgctatggaagagtgtttaaagctgattttgataatcatgtttcacctgcgataacatgtttggttgctaagtttgataaagatgtgatgttttggcatcgtagacttggacatgttggttttgatcatctcactaggctaagtggtttggatcttgttcgtggtttgcctaaacttaagaaagatcttgatttggtttgtacaccgtgtcgtcatgctaagatggttgcttcttcacatgctcctattgtttttgtgatggtggatgcactgggacagctattacatatggacattgttgatccagctagagtgcaatctgttggaggaaagtggtatgtgttggttattgttgacgatttttcttcatattcttgggttttcttcatggcaactaaggacgaagcttttcaacactttcgtggtttgtttcttcgattggatcttgaatttcctggttctttgaaaagaatccgaagtgataatggtggtgagtttaaaaatgcttcatttgaacaattttgcaacgaaagaggtcttgaacacgaattttcttctcctcgtgttccgcaacaaaatggtgtttttgaaagaaagaatcatgttttggttgagatggctagaacgatgttggatgagtatcacactcctagaaaattttgggcggaggcggctaacaccgcatgctatatttcaaatcgggttttcttgaggtcaaaacttggaaaaacttcttatgagcttcgatttggatgtcaacccaaagtttcacattttgcgtgtttttggtgcaaatgctttgtcttgaaatctggaaatttggacaagtttgaggcacgttctatcgatataatgtttcttggttaccctacacattctcatggctatcatgtacttattttggagactaacaaaattgttgagacttgcgaagtttcttttgatgaggctagtccaggtactagactcgatattacaggtacattgtcacaggttcagggggaggatagttgtatttttgaagacgatagcgacgacgatgacgacaaggtcggctcggccggtcagaccgggcgccaggccggtcagaccgcaagcacacctccgggcagaccgcctcaggacgagcggtcaaaccggccagggtcgtcaggttcgggttctgttgacgctgatcgagattgtcctccagaggctacaacttcgaccagtactggtacagaacgtgaaacaactttagaagtcgctgctactttgcatattcaacgacgacatccaccggaacaaataattggtaatctaagtgagcggaccactaggtctaagataacgactcatgatgtttgtgcaaattctgcatttgttgcttcttttgaacccaaagatgtgtcacatgcattaattgatgaatcatggattaacgccatgcatgaagaacttgaaaattttaagagaaataaagtttggactttagttgaatcaccttctggacataatattattggaaccaagtgggttttcaaaaataaacaaaatgaggatggtttgattgtgagaaataaagctagacttgttgctcaaggttttacccaggtggagggtttggattttggtgaaacttttgatcctgttgctagaattgaggcaattagacttttgttggcttttgctgcttcaaaaggttttaaattgtatcaaatggatgtgaaaagtgattttctaaatggttttatacaggaggaaatttatgtggaagatatcatctttagttgttcaactcacgctttggttgtggagtttgctgagactgtgcccaaggaatttgagatgagcatgatggcttctcctggtgcttcacatcgtcaagcggtcaagcgaataatgaggaaacaatctagtgttgctcaatcaattgctgaatctgaatatgttgctgctgctaattgttgttcacagattctttggcttatttcaactttgaaagattatgatcttacttttgagaaagtacctctcttttgtgataatactagtgctattaacattgctaaaaatcctgttcaacactcacgcacaaagcacattgatattcgttttcactttttgagggatcatattgagaaatga

SEQ ID NO: 14751 - DNA, 1570 bp, Oryza sativa
  Clone ID: TFbOSC15262j.C1.o2.np
atgcggaccccacatgtcaacctaaaggaccgcggtagaccgactaacgactgccgacgccgatacacgggtaccggggccgacaaccgcacaacgggcacgggggacaccgaaaggacgaggacagggcagcgagggagagggaaccttaccaccacgcgacgaggcgtgggaacgacaacgacgaacgggcgcggcggaggcagacgggcgcaacggagacgaacggcgaggggacggcttcggcggcgatccttgggcgaaggcgagacgcggccggcacgaggcttgacgacgcggagccgaggacgaacacgaggacggggctgcagcgatcttgacgaagcgaggacgacgaacgagaacggcttgacggagggacgaacgccacgacgatcgggaacgacgagaggacgaggacgacgacgaccggggccggcgaggaggctacgagggcagccggcgaggagacgacgagggcagccggcaacggctgcacggaggcgaggacggcgtggaacacgccgcagcgatgacgatgacggaggcggcgccgcaagacgacgagccgggcgaccgatgggacgtcgacgacgagaacgatcggagacgacgatgaaacgatgatggcaggccggcgtggaacacgccgctgcgatgttggtgaaggtggtggtgcagcggggcgacgagccgacgaggaggaaggagaggccggcgcggagacgacggcgttccggcgaaattcgggcgaggaggaggtgatgccggggaagaaggcgatgccgcggtgtcgaaggaggagacggcggcgtcgatcggcgcaccggcgatgaacagcagccggctggagggagtacagtggcaccaatgccactggttgccggcgggggcaccgttccggcgagtttccggcgaggagacgagccgagggaggcgacgacacggccggacgatgctccggtgaggagggagaggcggctggaggccggccggcgtcggagagggagaaggagaaggcggggagaggtggatgggggagagagccggccacgggaggagcgggaacggcgacgggaatggcggccggcggcaaaggaaggcggccggacttggcgcggccgttccgaacggttggatccggggcggatttggaggaggaaacgagctagggttccacgggagtgagaggagccgggcgggaggaggaagacgacgcccgcctgacgcgcgggccccacgcggtcgggcggcggcgtcagcgcgcgcacgcgcgcggcacgtgcgggaggggagcggctcgggggctggggcggcttgggccggcggccggcccaggaagagaggagggagaggcggcctgggccgggcaggccgggaggggaggggaagagagaggcagcccgggagggagagggaagagggaggtgggccgaggggaagggggcccaagaggaggagggagagaaaaaagggaggagaggaggacttcggactgggcttggcccaaaggaggaagaggagggacttttaggttttctttttattgaactttgataattgtttttgt

SEQ ID NO: 14752 - DNA, 4101 bp, Oryza sativa
  Clone ID: TFbOSC413084j.C1.o4.gm
atgaccaggagaagtgctaacacaggtgatggcaaccaacctgaaggcagcaaccacaaccatcagggcaacccacctccacctcctcctccgcctccaccaccactaccagacaccaacgccattctcacccaaatcctcgcccagcaggccaacatgatgactgctttcctccaccacctccaaaatccgccacaacttaatgctccaccaccacccccacaacactctaaactcgccgagtttctccgcatccgcccacctaccttctctagctccaacaaccccgtggatgcgttggattggttgcatgccgtggggaaaaagctagacactgtgcagtgcagcgatgaggagaaagtcatcttcgccgcccaccagctgcagggacccgcatctctatggtgggaccatttccaggctacgcagccagagggacagcctattacatgggctcgcttcaccgccgctttccgaagaacccatgtgcccgccggagtcgtggcccttaagaaaagggaattccgagagttgaagcaaggcaaccgcttcgtgatggagtatttgcacgagttcaacaacctggcccgttacgctccggaggatgtgcgggaagatgaggagaagcaagagaagttcctggcaggaatggaccctgagctgtccgtccgtctagtctccggggattatccggatttccaacgtctggtggacaagagcatccgcttggaagccaagcacaaggaactggagtcgcacaagcgccgcttggcaaatttccgcaaccaacggggtgctaaccaaagggtccgctacaccaatccctatccagggggatcctcctcgcagcagcaacaacagcagcagcaacctcgctccgcgcctcgacctcaattcgtggtgcgcgtcccacagccgcagcagcagcagaatcaacaagggactcgtgcgccccgtcctcctacgccaactatgcaacctggtcaaggccgcagggacgctcaaggtccgcagcgtctgtgcttcaactgcttcaagcccgggcactttgcggataaatacccgaagccaaggcgtcagcaaggccaagcgcctccccgccccaacaacggtggtaaggacgtcattcggggtcgtgtgaaccatgtgacggccgaggacgtgctgacaactccagacgtcatcgttgaacttcatcagatagaactgtcagaaattcccatcgtcagagagttcggagacgtgtttccggaagaactacctggtatgccgcccaagcgagagattgagttccggatagatcttgctccaggaaccactcctctgtacaagcgaccctaccgtatggcagcaaatgaactggccgaagtcaagaaacagttggaagagttgaaagaaaaggggtacatacgtccgagtacttccccctggggtgctcctgtgatttttgtggagaagaaagacaagacgaagaggatgtgcgttgactacagagctctcaatgaagtcaccataaaaaacaagtaccctcttccccggattgacgatctgttcgatcagcttaaaggtgccactgtattttccaagattgatcttcgttccggatatcaccaattacgtattcgtgaagaagatattccgaagaccgcattcactacgcgatacggactgtatgaattcacggtgatgtcattcggtttaaccaatgctcctgccttcttcatgaacttaatgaacaaagtgttcatggaatacttggataaatttgttatggtgttcattgatgacattctgatatactcacaatcagaggaagaccatcagcaccatctccgtctggtgttgggaaagttgcgggaacatcaattgtatgccaaacttagcaagtgtgagttctggttgtccgaagtcgaattcttagggcacgtgatatctgctaaaggagttgctgtggaccccgaaacagtgaccgccgtcactgattggaagcaacccaagaccgtcactcaagtccgcagtttcttaggtttggcaggatactaccggaggtttatcgagaacttctccaaaatcgctcgacccatgacacagttgttgaagaaagaagagaaatttgtgtggagcccgcaatgcgagaaggcgttccaaactctcaaagaaaagctggtttcctcgccggtgttaatcttgccggatactcacaaggacttcatggtgtattgtgatgcttcgcgccaaggattggggtgcgtgctcatgcaggacggtcatgtggtggcctatgcctcacgccagctacggcctcatgaaggcaattaccctacccatgatttggagttagccgcggtggttcatgctctaaaaatctggcggcactatctcattgggaatcgctatgaaatatatactgatcacaagagtttgaaatacatcttcactcagtcggacctgaatcttcggcaaaggagatggttagaactcatcaaggattatgatgtgggaattcactatcatcctggtaaggccaacgtggttgccgacgctctaagtcgaaaaagccattgcaacactcttaacgtccgtggcattccacccgaacttaatcaacagatggaagccctgaacctaagcatagttggtcgcggattcttggctacgttggaagccaagcccaccttgctcgatcaaatccgcgaggctcagaagaatgatccagacctgcatggactcctcaagaatatgaaacagggtaaagccgctggtttcacagaggatgaacacggaaccctatggaacggaaaccgagtatgcgttccagataacagagaacttaaacagttgatacttcaggaagctcacgaaagtccttattccatccaccctggcagtacgaagatgtacctagacttgaaggagaaatactggtgggttagtatgaagcgggaaattgcagagttcgtggccctttgtgatgtgtgccagcgtgtcaaggcagagcaccaacgaccggccggacttctccaacctctccaagtacctgaatggaaatgggatgaaattgggatggatttcatcaccggacttccaaagacccaaggtggatatgattctatatgggtagttgtggatcgattaaccaagacagatgggcagaccgagcgtctaaatcagatcctagaagatatgcttcgcgcatgtgtcctagatttcgggaagacctgggataagagtctcccctatgccgagttctcctacaataacagttatcaagccagcatacaaatggcaccttacgaagcgttgtatgggcgcaaatgccggacaccgctcctgtgggaccaagttggggaaagccaagtgttcgggactgatatcctgagagaagctgaagcgaaagtcagaaccattagggataatctaaaggtggcacagtcccggcagaaaagttatgcagataaccgtcgccgtgacctggaattcgcagtggatgattttgtgtaccttcgggtcacgccattgcggggtgtacacaggtttcagacaaaggggaagctcgcacctcggtatgtgggtcctttccgtatcgttgctcgacgcggagaagtcgcttaccagttggagctgcccgcctccttgggcaacgtgcatgatgtgttccatgtgtcgcaactcaagaaatgccttcgagtgccatccgagcaggccgactcagagcaaattgaagttcgcgaagacttgacctacgtggagaggccagtgaagatcctggacaccatggagcgcaggaccaggaaccgggtaatccgtttttgcaaggtccaatggagcaaccacgccgaggaagaagctacctgggagcgcgaagacgagctgaaggcagcccatcccgacctcttcgccagtccgccgccgtcctcgccccggacctcctcccgcttcggcatcgcctccttcggcttcgccgcgttctcgccgaccttgtccactcctccgtttcgcccgccgaccgccggagcaccgccgtcctcgtcgacccgagccgcgccgccgcctctctccgcttcggtcgccgttcccgtcatcgccgtcgacccggggtga

SEQ ID NO: 14753 - DNA, 1458 bp, Oryza sativa
  Clone ID: TFbOSC900380j.C1.o25.np
ggacctaaggcatcgaatctcagagccaacacatccaccacagtttagaactcagcaaggtggacaacaaaagcccagtttcagttccggacagcatagtggtcctactactatgatcgtttgtcagcacaggccctaccaaccaggaaatttcggctagaacagtagtgggagcaacaatggtggaaatcagaacaaccgtaatccagctccgcgcccgctgatggcacagtctcaagcttcgtagcccacccaacagaagaaggaagcaggaggaaagcctctcatttgtttcaattgcaatgaacccgtgcatttcgctgataagtgtccaaagccaaagcgcaatgggcccaagatcgttcaagctcgtgtcaatcacatatctacggaggaagctcaagcagcaccagaagtggttttgggtacgttccctgtgaacttatttcctgctacagtattatttgattctagcgctacacattcatttatatccaagaaatttgttggtggtacatgggttaagaaaagtggaacttagtgctccaatgaaagttaatacaccgggtaatagcacaagattggttagtttttgtccctctatgatgatagaaatccaaggatcaccttttttagccaatcttatccttctggagtgcaaagacctagatgtcatactaggaatggattggttgtcaaggcataaaggagttattgattgcgcaagttgcactgtcaccttggttgatgagaaaggggaagtggtaataattcagttcccaatgactcagaagaaaggagtagtcttgaatcaaatggaaggtgaaaaacaggatgaagtcgagaaagatgttcagaagttggaaaacattcccgtagtctgtgagtatcctgaagtttttccggaggatttaacgactatgccacccaagagagatatagagtttcgtatcgatttggtaccaggtacagctccgatctataagagaccgtacaggatggcagccaaggaaatggcagaagttaagaaacaagttgatgagcaattgtagaaagaatacattcgtccaagcacgtcgccttgggtgctccagtaatttttgttgagaagaaagacaagactaagaggatgtgtgctgattacagagcactcaatgaagttacaatcaagaataagtatcccttgccgaggatagatgatctgtttgatcagttgaaaggagcaactgtgttttcaaagatagacctgcgatcaggttaccatcagttgaggattcgagagtaagatattcctaagacagcttttacgacttgttatgggttgttcgagtgcacagtgatgtcttttggacttactaatgcacccgtgttcttcatgaatttgatgaataatgtgttcatggaatatctagataagtttgtggtgattttcatagatgatattttggtttattcaaa

SEQ ID NO: 14754 - DNA, 2151 bp, Oryza sativa
  Clone ID: TFbOSC22997j.C1.o2.fg
atgcacaccgtcaaggagacggagttacttgctgccaagctggatctcctcatgaaacgcttggacgaccacgagaaacggccacaaggcaccgttaaggccttggaatctcacgtcacgtgtgaggtctgcggcggcacgggtcattctgggaatgaatgcccggaaacctgtgaggaggtgatgtacatgggcaagaacaactggtatcgtccacaaggagctaaaaccactgatgcgctaagcaaaaagcttgctgccaatgataagatcttagaaaacataaatgtgaatctagatggctttgcttccgcatttcaaaaccagctgagctttaataagatgatagaaacccagttagctcagttggcatctttagtccctgcaaatgaatctaggaggattccggggcaacccgactcctccattgaaaatgttaaggcgatcacaacgaggggagttatccaaaagatccacatcaacgtgccgttgttggacgctatgcaagtgccaacatatgcccgttatctcaaggacatactcaacaacaagagaccactcccaacaacggaggtggccaagctgacggaacattgcagcaacatcatactccacaagctcccggagaagaagaaagatccggggtgtcccacgatcacctgctcgatcggggcacaacaaatcgaccaggccttgtgcgaccttggagccagcgtcagcgtcatgcccaaagacatctttgacaagctcaacttcacgtccgtccgttacccggcagggataacggaggatttgccagacaaaatacaggatttcttcatcccggttgattttgtggtgctggacatggacacggggaagaagacgccgctcatcttggggcgtccattccttagcaccgcaggagccaacattgacgtgggaacggggagtatccgtttccatatcaacgggaaggaggaagagtttgagtttcaaccaaggacggaacaatgctccatggtcagaatcaagtacggaccgaacccgcagaatattcaagtggtcgaattggagccacccaagacggatagcctggtaaagttcatgcagaacttcctggaaaaggaaacaacaatgaacaggaaccgttattggaggatgccggtaaaatcacctataccggccaagaagttagagcaaccggctcagaagaagccgtctaccgcaccaaaatcaaataaggtaaattgtatgaggaggcgactgtctcgtctgttcaaggggtcaggctctccatcaagtcatcatggcgagtctagcactcgttcatcagcggatgtttcgatggaagacgccgacgctccgcgacaactcctgagtgacactgacctcgaccttgtcagtgatcgggagagacaagcctactacatgcgaagcgaccgggagtatgctcacacgcgagaatactcaccggagttgctgaaaaagatagaaatagaagatgatattttttttcgctttttccgtaaggagttcacgctcacatggaaaggcttgagtacacttcttggttttcacgattcctgtaaaatcgatctccagaaaggaatttctgggttcgagaaaaataggttttgggaagatatttttggtgctccaatttgcaagaaacctagaacaaatgatatccataatcctacacttaggctcatgcacaaatggattgctatgactttgtttcctagaagtgatctgagacccattaggggagatgaattaattatcatgtttgccatgatttatgaggcaggttgggcaccaactggggatgcacccggatggacccaagctctacgctatagcatggactctcaacttgggcaagcgccagtgaggaccggtggcatgcgcctcatgacatccactggggagacaatcaaccttccagatcaagtggacttgggtgaaatcactaggagaatggacacccttgatgtgcagacgggggagatccaatacaacctcacggaacacatagctcaaacgcaagaatggcaacaatctgctgatgctcagttcaccaacatcaacaacatgatgcagcaacagcatgatgaccttcaggcgtactttcgctttcaggggttcaatccttatcaaggaccctga

SEQ ID NO: 14755 - DNA, 5415 bp, Oryza sativa
  Clone ID: TFbOSC13173j.C1.o9.fg
atggctccgtccccttccctcagccccgacacccacccccgccataggcgatttcgctcctcgccggagcatctcgtcggcgtcttccaagcctcgctagcatccccaaccctcgaaaccttccccatcccggttccccgccacaaccctcctctctcagcccaaaccccctcgccaaaatcccctttctccacccacccagatccaccagaaaccattcaaatctccggcattgattcctctactgcagcttcgatttgtctttcccctcgattggactcaaggttcgtcacactgcgtcctcaagatcccagcaaatcctccacgctccaagatctgccagccacagcgccgcttggagcactccgcctttactctgaggtcctggccgctcctgctcccatacccctagctgctagttccaagtcccaacaggagctgtctccgcccaaaatccggtccctcgccggccgccttaacttccctgcagcgcaaccctgctcttccgtcactgagcgccttaacccagtcaacctgacggatccagatgtgggttcccaaggagcagctcccaaagatcttcgtatcctcaagagtggacgcaaggttcagatgccagctcaaatcctttctgcagtgcagcatccgagaggtagccttgatgtctctggttcagagtggcaagaagtcaaagcaaatcgatggaggaggagccctgctcactctcccgatagcaccaaccaatttcaattgcagttaagccgagcgaggttcctcaagcatatggaaggtaaatgctttcgttgtcttcggtcagatcatcgagttattgaatgcagagagccccttcgctgctggttctgtatgggcattggtcattgtgcttcctcgtgcctaaagagaaaatcctttaaatccacagctacctcgcagccgctcccccaaacctccgttgaatctttccctcctctcgccccaattcgtttcccccctaagttgctcccgcgatctgctctttcctccccttcctccatggatgacctctctgctcgtccctctcaagagcctgtggttatttcggccacgggggagattgagcgactgaggcagaaattctctgctcgctctattgttgcctggcaggttggccatcagggctccaatgtggatcccaatgtgtttgcagatgatgttcattcggccttccgcatcagacgctcagacattcaaattacgaagttccaccccgaagacttcttcatcacctgttccagccagaatgatagagatgccatcctgaggcagccccggcttgccaccaagtcggggagggtttatctcttctgcccgtgggaggaaggccttcacggcgttccggcgcgcttcagatacagagcaagagtgtgcattgaggggatcccaatgcatgctcgaacagaagaaacggcagccaagatcattggaagaaagtgctccatcaactatgtcgaagagtactctcgccgccagaactacaaccgcaccttcgacatttggatttggactgacgcaccaaagttcatcccgcgttcctccactttctctatcactaatgctgatgaagaagggctccccacagacatttctcttctagaccttgaacctcaccacaaccctccgcctgacgagccaaaggaagggtggacctacgacatcctcgttcacatcgacaccctagaagaccttcacagcaaggtggcccgcgcgtacgactggcagtacggcgcagagactgatgaagggagcctgatcccaaaagaggtccagatgatgaagacgaagacagagagcagcgctcccaggggtagcgtaggagccgttccctttggagccgtgtctgtggacggtcgtaaagtcgtagccgtgtctgtggaagagatcaacaagtttacaaccaagacacgtgcggacgccagcatgttcgagcgccctccgctggcagcagctgctcctaccgttctcgctcgccaagtgcagtacgaccgcccccggctgtctagaagaggtacaagatccccccgcattcagtcgtctccacaagtcccttcgccttgcaagagcgcaattccacgccgcagcggcagccctgatgagggggcaaatgccttggccactcttttttctccatcctcatccttggttgtacagcctgaaccggtgattttttcgcagggacaggtcgctgtgctggagttgctggagaagcatcttgaccccatgctccatgaggccacaatccagcattctctgtactcaccagacacctcatcgccaaggatcgcctcccccgtcttcatcccttccagtacccagctgggttctggcgctgctgacggggtcctaggcgctgccaagaacctccaggagttcgcggcaagcctctcaactcccatccagccggcgatccttcctactcctgatgtgagctcccgtcgcccttgccgcaataaggtgacccttcactcccctcaaaggcatagtgaacgcctagcacgcaagcgcagattcgggaccaagattgaacatttcgcacaagaaattcttgcaaaaaactttggctttttaaacgatcaaactcgttttgatgaaaacatcgaaaaactttatgtgcagcatttcaagaagcctatatcccctgcctcgatgaagattatcacaaccttggtcgagaagggtggatgcgaaggcattcacctgaagactgccaagaagaaggcggcggtggtgccaatttgtcttcttgttttcattatgtctcaacacaatgtacacctgttcaactggaatgtgagagggctaaatgcccaggccaaacaagatgtagttaaagcctttgttcataaagttggtgcttctattgtgtgtttgcaagaaaccaaattagcaacagttactgacagaaacatcttaagtatcctaggtcaaaactttgtccaatcttatgctttcctgccggccagtggaactagaggtgggattattcttgcctgcaatgcaaaccttttttctttgtcagaagctgtacagggacaattttctctgtcagcaacaatcacaatgtttgaggagggcctccaatggtcaataacggtggtatacagccctcaattggaagctgacaaaatagccttcctagcagaaattgaagccatgtcctcgtttatgaagccggcttggcttctaattggagacttcaatctaatttataaagtttctgacaaaaataatgatcgcctaaataggagaatgatgcagcgtttcaaagggctaattgacaagattgaggtaaaagaacttcatctcccaggccggcgcttcacctgggcaggagcgggccaaaacccaactcaaacaaaaattgaccgtgcctttgtcatacctgactgggatatcatgttttcaaacgcctctttgcaacctctctcttcgtcgacctcggatcatgcggcactctttttaataggaaatgaaatgaggggtaaacccccaaattccagatttgaagctttctggttaaaaattccagggtttttagaagttgttgaagattcttggaaccgccctctcctagctgcaaatccgcttgccatcctgtacatcaaactaaaacggctagctcgagacctcaagagatggaatcggcaaaatgttggagacatcaagcttcagttagcagtggcaaatgaggttgtttttcaactggatgttgcacaggaaacaaggcccttatcggatgatgaatgtgttcttcgcagcaacctaaaagctagaatcctaggtttggctgtcctaaacaagattcaaattcgtcaacgatcaagactaacatggctaaaggaaggcgatgttaattcaaaatttttccatatcaaagaaaactcccgaaggcgaaagaatttcattcaaactctccagactcaaaatggcatagcagtttcggctcaggaaaaggctgacactctttttcgtttcttctcagacagacttggcactccatcacaaaggcaatcctgtctcaattgggctaccctaaatttcccttctttcgacctagatgatcaagaggatgatattacagaagaggaactcaaacatcctgtgttctccgtgccgtcagaaaaggccccaggaccggatggttacattggagcttttttcaaacatgcttgggaaataatcaaagaagatctgctgctagctgcaaaatcgttcatggccctaaatacaaatcaacttaaaaagttgaacacagcttacatctgcctcctcccaaaaaaaagaaggagcggctggactaaattgcttgcaaataggcttgctccccgactaaatgaattagtctctcaaaaccaaagtgctttcgtcaggaaaagggcaattcacgacaatttcctcttcgtgcagaatttagtgcatattctgcatagaaatcacaaagaagcgcttttcctaaaggtgcacatcacaaaagcgttcgatacagtgggttggccttacctgttagaagtcctccagaggaaagtggacttcttaccgctcattgaaaagattggatcgcgtctcccaggttggaaaggtcgatacttcacatctgaaggtaggagaatcctggtgcaatcagttttaagtgcaatgccgacctttcatctatctgcccttcaagcccccaaatgggtaatcaagagaatagatcgtttccataggtcatttttatggaaaggtgaggatcctagcaaaacaaacccagggagtagcttagtaaattggagtacagtttgcaaaccgaaatttttaggcggccttgggatactggagttggagaaattccctcgcgctctgcgacttcgatggttatggttcaaatggaaagaggaaaataagccatggattggaatggacataccctgtgataactgtgacatgagactttttcaagctgccacaacaatctctcttggcaacggtgaaaaaacagctttttggcaggacaagtggctgcaaagttcatgtccaaaagatattgcacccatgtgtttcaacctagctaagcgcaagcagagatcggtcaaaacggagcttacaaataattcttggcttctctctttccggaatataacgtcgatagaggaaatcaatgaagtcgttcagcttggagaaaactctcacggctcaaaacctcctgcgccgcaacctcctgcgccgccattggccttgcaattggatttgcagtttgtgtggagatcgcctttgaagacaccaaccatcttttcaatgggtgttctttcttcaggaaagtttggagctcgatatgtcaatggcaaaatatccaaggaacccaacctccagatgacattgcagcttggtggatcgacctag

SEQ ID NO: 14756 - DNA, 2337 bp, Oryza sativa
  Clone ID: TFbOSC400773j.C1.o74.fg
atggagagtgagagaccagatgcatctgcagaagatagaagattagaagacctgcgcaaacgagaggagagatgctgctcgtacagaagtcaggagattgcacagaagaagaaacattttgatgagcttgcagcaagagaagaaatacagtcgtacgtaatgcaattgtttatttgtttaggaatggcaaactttagagtatattatggcgacggagaaattatatcgaacaaaatgggtgttgacttgagcaactttagtcagtgcacactgtatcacccaaatcgggacaatcttagaatgcccgaagtgtggtactggttgacatgctcattctcattggacccacaagtctatagtgttaatgtcagtctgttatggagtcgttcggccacggacatccaatggcaactgaaagaagtaaccggaagtcaatcatggaagaattggttgcaaggttgcagacgccgaggatacgagatggccatgttggtgcaggcttgtccaaggagggctcgaccaaacagttcgttcggtcagtccgatatgcagggagaggcatgtgctcaatcgagtgcatttcatgtggaagtctcccggcataatgaagacaatatcagcattgacatgcagagccttcatattgaacaagttgaacaaacggtggttgcgatgccgagcacggtgcaacaagatggttcgggtgaagccgatgaaggggaagagataaatgctatagtggacgagattgagagggttgataggaatgctcgtgaggatgaagctaacttggcttgggaggaggatgaggaggaagatgatgaagagtacgaagtccaacctgttccagcatcatggaaccgtgaagatcttggatatatcagagagaacgagcttcatgactcaatatggttctatggtgatggcccaatcaacaagggcgcaatgttttcgacgaagtctgcatttcaggatgcagttaagtcgtggtcctttaagatgcagaggcagttcaaagttctcaaatcaagcccgaccgtctacaccgtgttgtgtgagacggaagggtgcaattttagggttcatgggcatgtgccaaagtacgagtcgtacaggctcgtgtcgagagagggcacaactgcagtagagactggtgaatggtacactattagctaccacaaagcgtggagggcaaagcaaaaggcgacggagaaaaggtatggatcattcgaggtggcatatgacacattgccgcagatcctagatatcctgaaacagagaaatcatggtacctatgttgctgtccaagacagggattctatgcgacctccgaatttccatgtaatggaaagggcattcttttcattcggagcctgtattcacgcatttcaatggtctagacccgttctatgcgtgcacggtacttttcttaccagaaagtaccgtgggtctattctgatagctgttggtgccgatgcgagcaaccatataataccggttgcattcgcttttgttgagagcgagaactacgacagttggttgtggttcttgcagcatgtcaaatggggtgtggtgcaaagcagatcgaatgtctgcattattcatgatagaaatgctgggttgcttaaggcaatcaaggagctcaaagaggatgagaacggagcatactactggccggatttgcatagtcgatggtgcatgcgtcacatgggcgcaaactttttcaaacagttccatagcaaaaggctaatgcaaatgttcaagcggctgtgtatgcaaaaccagcgacagaagttcgaagatctttggaggcagctggatgaagcaacatcagcacatgttaagtcaaaaaaggattccaagaaaaatgaccaaccagccccggaggccttagaaccaatggacggtcttattacttccaacgggttggacagcacagcatacgtctctcctttctacttgaaggatagagtgttgcaagcttggtccgcagatatactaggctatcgggcacatgagaacctcatacgaaccggtggagacgatactgtgtgggttcctgacttacatctgttaaagggtggtaaaggccgacgacaaacaagacgtttaagaaatgacatggatgagtccgaagctggtggccccattaggagatgtgaaacttgtctgcagtatggtcacaggactagagattgcacgaacaacaacgatggtacctcgtcgacagctcagcaaggccaacaaacatgggaatcatcacgtgctacaagggctaggaggacaagaaggggcacgggttcctcccgcaacacaccggaaggcaccaccctttga

SEQ ID NO: 14757 - DNA, 5214 bp, Oryza sativa
  Clone ID: TFbOSC900041j.C1.o11.fg
atggctccgtccccttccctcagccccgacacccacccccgccataggcgatttcgctcctcgccggagcatctcgtcggcgtcttccaagcctcgctagcatccccaaccctcgaaaccttccccatcccggttccccgccacaaccctcctctctcagcccaaaccccctcgccaaaatcccctttctccacccacccagatccaccagaaaccattcaaatctccggcattgattcctctactgcagcttcgatttgtctttcccctcgattggactcaaggttcgtcacactgcgtcctcaagatcccagcaaatcctccacgctccaagatctgccagccacagcgccgcttggagcactccgcctttactctgaggtcctggccgctcctgctcccatacccctagctgctagttccaagtcccaacaggagctgtctccgcccaaaatccggtccctcgccggccgccttaacttccctgcagcgcaaccctgctcttccgtcactgagcgccttaacccagtcaacctgacggatccagatgtgggttcccaaggagcagctcccaaagatcttcgtatcctcaagagtggacgcaaggttcagatgccagctcaaatcctttctgcagtgcagcatccgagaggtagccttgatgtctctggttcagagtggcaagaagtcaaagcaaatcgatggaggaggagccctgctcactctcccgatagcaccaaccaatttcaattgcagttaagccgagcgaggttcctcaagcatatggaaggtaaatgctttcgttgtcttcggtcagatcatcgagttattgaatgcagagagccccttcgctgctggttctgtatgggcattggtcattgtgcttcctcgtgcctaaagagaaaatcctttaaatccacagctacctcgcagccgctcccccaaacctccgttgaatctttccctcctctcgccccaattcgtttcccccctaagttgctcccgcgatctgctctttcctccccttcctccatggatgacctctctgctcgtccctctcaagagcctgtggttatttcggccacgggggagattgagcgactgaggcagaaattctctgctcgctctattgttgcctggcaggttggccatcagggctccaatgtggatcccaatgtgtttgcagatgatgttcattcggccttccgcatcagacgctcagacattcaaattacgaagttccaccccgaagacttcttcatcacctgttccagccagaatgatagagatgccatcctgaggcagccccggcttgccaccaagtcggggagggtttatctcttctgcccgtgggaggaaggccttcacggcgttccggcgcgcttcagatacagagcaagagtgtgcattgaggggatcccaatgcatgctcgaacagaagaaacggcagccaagatcattggaagaaagtgctccatcaactatgtcgaagagtactctcgccgccagaactacaaccgcaccttcgacatttggatttggactgacgcaccaaagttcatcccgcgttcctccactttctctatcactaatgctgatgaagaagggctccccacagacatttctcttctagaccttgaacctcaccacaaccctccgcctgacgagccaaaggaagggtggacctacgacatcctcgttcacatcgacaccctagaagaccttcacagcaaggtggcccgcgcgtacgactggcagtacggcgcagagactgatgaagggagcctgatcccaaaagaggtccagatgatgaagacgaagacagagagcagcgctcccaggggtagcgtaggagccgttccctttggagccgtgtctgtggacggtcgtaaagtcgtagccgtgtctgtggaagagatcaacaagtttacaaccaagacacgtgcggacgccagcatgttcgagcgccctccgctggcagcagctgctcctaccgttctcgctcgccaaggacaggtcgctgtgctggagttgctggagaagcatcttgaccccatgctccatgaggccacaatccagcattctctgtactcaccagacacctcatcgccaaggatcgcctcccccgtcttcatcccttccagtacccagctgggttctggcgctgctgacggggtcctaggcgctgccaagaacctccaggagttcgcggcaagcctctcaactcccatccagccggcgatccttcctactcctgatgtgagctcccgtcgcccttgccgcaataaggtgacccttcactcccctcaaaggcatagtgaacgcctagcacgcaagcgcagattcgggaccaagattgaacatttcgcacaagaaattcttgcaaaaaactttggctttttaaacgatcaaactcgttttgatgaaaacatcgaaaaactttatgtgcagcatttcaagaagcctatatcccctgcctcgatgaagattatcacaaccttggtcgagaagggtggatgcgaaggcattcacctgaagactgccaagaagaaggcggcggtggtgccaatttgtcttcttgttttcattatgtctcaacacaatgtacacctgttcaactggaatgtgagagggctaaatgcccaggccaaacaagatgtagttaaagcctttgttcataaagttggtgcttctattgtgtgtttgcaagaaaccaaattagcaacagttactgacagaaacatcttaagtatcctaggtcaaaactttgtccaatcttatgctttcctgccggccagtggaactagaggtgggattattcttgcctgcaatgcaaaccttttttctttgtcagaagctgtacagggacaattttctctgtcagcaacaatcacaatgtttgaggagggcctccaatggtcaataacggtggtatacagccctcaattggaagctgacaaaatagccttcctagcagaaattgaagccatgtcctcgtttatgaagccggcttggcttctaattggagacttcaatctaatttataaagtttctgacaaaaataatgatcgcctaaataggagaatgatgcagcgtttcaaagggctaattgacaagattgaggtaaaagaacttcatctcccaggccggcgcttcacctgggcaggagcgggccaaaacccaactcaaacaaaaattgaccgtgcctttgtcatacctgactgggatatcatgttttcaaacgcctctttgcaacctctctcttcgtcgacctcggatcatgcggcactctttttaataggaaatgaaatgaggggtaaacccccaaattccagatttgaagctttctggttaaaaattccagggtttttagaagttgttgaagattcttggaaccgccctctcctagctgcaaatccgcttgccatcctgtacatcaaactaaaacggctagctcgagacctcaagagatggaatcggcaaaatgttggagacatcaagcttcagttagcagtggcaaatgaggttgtttttcaactggatgttgcacaggaaacaaggcccttatcggatgatgaatgtgttcttcgcagcaacctaaaagctagaatcctaggtttggctgtcctaaacaagattcaaattcgtcaacgatcaagactaacatggctaaaggaaggcgatgttaattcaaaatttttccatatcaaagaaaactcccgaaggcgaaagaatttcattcaaactctccagactcaaaatggcatagcagtttcggctcaggaaaaggctgacactctttttcgtttcttctcagacagacttggcactccatcacaaaggcaatcctgtctcaattgggctaccctaaatttcccttctttcgacctagatgatcaagaggatgatattacagaagaggaactcaaacatcctgtgttctccgtgccgtcagaaaaggccccaggaccggatggttacattggagcttttttcaaacatgcttgggaaataatcaaagaagatctgctgctagctgcaaaatcgttcatggccctaaatacaaatcaacttaaaaagttgaacacagcttacatctgcctcctcccaaaaaaaagaaggagcggctggactaaattgcttgcaaataggcttgctccccgactaaatgaattagtctctcaaaaccaaagtgctttcgtcaggaaaagggcaattcacgacaatttcctcttcgtgcagaatttagtgcatattctgcatagaaatcacaaagaagcgcttttcctaaaggtgcacatcacaaaagcgttcgatacagtgggttggccttacctgttagaagtcctccagaggaaagtggacttcttaccgctcattgaaaagattggatcgcgtctcccaggttggaaaggtcgatacttcacatctgaaggtaggagaatcctggtgcaatcagttttaagtgcaatgccgacctttcatctatctgcccttcaagcccccaaatgggtaatcaagagaatagatcgtttccataggtcatttttatggaaaggtgaggatcctagcaaaacaaacccagggagtagcttagtaaattggagtacagtttgcaaaccgaaatttttaggcggccttgggatactggagttggagaaattccctcgcgctctgcgacttcgatggttatggttcaaatggaaagaggaaaataagccatggattggaatggacataccctgtgataactgtgacatgagactttttcaagctgccacaacaatctctcttggcaacggtgaaaaaacagctttttggcaggacaagtggctgcaaagttcatgtccaaaagatattgcacccatgtgtttcaacctagctaagcgcaagcagagatcggtcaaaacggagcttacaaataattcttggcttctctctttccggaatataacgtcgatagaggaaatcaatgaagtcgttcagcttggagaaaactctcacggctcaaaacctcctgcgccgcaacctcctgcgccgccattggccttgcaattggatttgcagtttgtgtggagatcgcctttgaagacaccaaccatcttttcaatgggtgttctttcttcaggaaagtttggagctcgatatgtcaatggcaaaatatccaaggaacccaacctccagatgacattgcagcttggtggatcgacctag

SEQ ID NO: 14758 - DNA, 788 bp, Oryza sativa
  unsure (1)..(788): unsure at all n locations
  Clone ID: TFbOSC6545j.C1.o1.np
agggacccatgtccataagtgagttcattgccaagatgcgatcctttgactatgagatgacggggcaaggaaagctccttacgatgaagagctgatagcgtacatcatcaacggcttcgactcagactttgactcatcggttataggattgatgccagcgacaagaattgctcctctcttaatctctcatgtgtattcccaacttttgagctatgaaaacaggatcagtattcgccaaacttacctccgtatttcggcaaacgctgcaaatcgtggcggtcgtggtggtcgcggtggaaatcgcggtcggtgctcctcccgccggtcgcagtgccggccgtggtggcgcagtcggggccaacactgggcgagggcgcggtaaggacacccacccggtgtgtcgagcgtgccataaaggaggtcacattgcaagtgactgctggcaccgctatgatgagaagtacgtctccgacgagaagctaggcgacgcggccacatatgcgtatggtgttgacaccaattggtatgtggacaccggggcaacagatcacatcacagggcagctagataaacgtgactacatggagaagtacaagggaacagatcagatccacactgctagtggcgaaggtatgaatatttaacatattggtcataccattgttcctacccctagtagtcccttacctcttaaaaatataattcatggtccccaagcaatcaaagaatttagtctctgttcatacactcatagggtgcagaaatgatcgcagtcactnnttcccagg

SEQ ID NO: 14759 - DNA, 969 bp, Oryza sativa
  Clone ID: TFbOSC900148j.C1.o4.fg
atggcgaagcagtggttctacgcgaaccgggcgacagtcaacacatgggacaagtgctccactgcgttcctctcaaagttcttcccgatgggcaagaccaacgcccttcgtggaaggatctcaagctttcagcagacaagggatgaatcaattcctgaagcatgggaacgtccgcaggaatacgtggctgtctgtcctcatcatgggatggatgactgcctcatcctgcagagtttctataatggactcacttcctcgtccagggatcacttggacgctgctgctgtaggagccttcttttcaaagacggtccgtgcggccgtcaatcttactgagaagatggtgtcgaacatgggttggagcgaagaacgactccagacccgacagtgtggcatgcataccgtcaaggagacggaaatgctggccgcaaagctagatctcctaatgaagaggatcgacgatcaggagaaggccaaaccgctggtcgctttcaaagcgctggactcgcacctcacctgcgaggtatgcgggaacacaggtcactcggggaatgactgccccgagacccgtgaagaagccatgttcatggggaacaatggctatcggccgcaaggaggccaggggtggaaccagccccggccatactatcaaggaggcaacaacggcaacaacaataataacggtaacttcaatcagccctccttgaaggacttagtctttgcgcaagctaaaactacggatgctataaacaaaaagactgccttaaatgataaagtcctagagaacataaatgttaagctagaagtcttcgcttctgctttccaaaaccagctgagttttaacaaaatgataaagactcagttggcgcagcttgctgctctggggttttatttggctttggcatctcttgctcactatgtttggtggtctcactcaagtgtttctcactctctcgctgttgtctcttaa

SEQ ID NO: 14760 - DNA, 4215 bp, Oryza sativa
  Clone ID: TFbOSC900399j.C1.o1.np
atggccgatcacccacccaaccatcgcggagaaggcatggatgattttgtggcagagttggctcgcatgacactggtggtgggctaccccaacgcgccagagtactcaactgttccgccgctcagtggtgagtttcctcaccgggttcgtctggaggttcatggctatgtgggtacctgcctcgctaacatggtggttgaggcatctggaggcaccgcagatcacgcctgtcaggaggcggcatacctgatgatggctagactacgtgagcgccacaactacatcttctgcaacacagcgtaccgtttccaccctcgtcgagcaagtggcgatgatatcagcactttctgtccgacagccggcgagaacgacaccaccttaggtcatatgtgtgccgtgatgaggggaatggacaagatgcactcggatgacgggaagctcatgaggatcatagctctgaaggatgagatcgcacgcctgaagaaggagaatgctcagttgaagggcctccccattcccggaggagtccggatccgcaacatgccccgcaagtcaacgactgcacccgtgcgcattcagcttgcgcccaggaacccacctccgcccgcagctcctgcagctcctccagttctgcccgcagttcccgcagctcgagcagctctagctccagtcccagctcctgccccagtgtcagctcccgcgtccgctctctccttcgctccagcatcagccgtcaggggcccagccagtggcaacgggggttggttgcctgctactcccagtggcagccgcaaccacatcagcagcagttcgagtggctcagagctgggccagattccaggagcagctcagagggacctggcctcttccttcagatggtctacaccaggaatggtagccgtacagcaggcgagggcagcaacggcgaagaatgcactgacggtgtgcatcccaacagcgactccagcaatggtccgctaccgctccccgagaatccggctctggcccaagtaatggctcatcagactcaagatgatggcagccatgatgcagcagatgcaccagaggatgcagcagcaagccgagcagcagcagcagcagtttggtccccctccccctcagtccaaactgccggagtttctacgcgtcaggccacccaccttctctagcaccaccaaccctatggaggcgaatgactggctccatgccatagagaagaagctaaatctcctgcagtgcaatgatcaggagaaggtcgcctttgccacacaccagctccagggtcccgcgtcagcttggtgggacaatcacatggctacccgcccgccaggcacggaagtcacttgggcagagttctgtcgcagcttcaggaaggcgcaggtgccagacggggttgtggcacagaagaagagggagttccgggcactccaccagggcaacaggacagtgactgagtatctccatgagttcaatcatctagcgcgatatgcaccggaggatgtccgcactgacgccgagaagcaggagaagttcctagcaggcctggatgacgagctaaccaaccagttaatctctggagactatgccgactttgagaagctggttgacaaagcaatccatcaggaggatcagcgcaacaaaatggacaggaagagaaaggcagcgcaattccagtccaaccaaggaagccaccaacgaccgcgcttcactcccggacagcagggtggacctaccactatgattgtccgccagcaccgcccgttcaactcaagcggtttccaccagggcgccagtggcagccagaaccaccagggaggtcagccccaaccgcaatgcagctccgcgcccaccaatggcaccagcacagtcagctccatccacccaagccaagaaggagactggaacaaagccagggtcctgctacaactgaggcgagcatggccactttgctaacaaatgcccgaagccaaggcgtcccgggccaaggtttgtccaggctcgtgtcaaccacgcgtccgcagaggaggcgcaagcagcaccagaggtcgtactgggtacgtttcctgttaactcaatccctgcaacagtactttttgattctggtgcaacgcattcgttcatttcaaggaagtttgttgggatacacgggttaataagagaagaacttagcacaccaatgcaggttcataccccagggaatagctccacttcggttcaattcagcccctctataacaatagaaattcaaagatcaccatttctagccaacctcattcttctcgaatccaaggacctagatgttattcttagaatggattggctgaccaagtttaagggtgtcattgattgtgtgaatcgcacagtcaccttgaccaatgagaagggagaaaccatggtgtacaagtcaccagtctcaccgaagcaaggaatctccttaaattagcatgaggtggaaaaccctgtggccaccgacgagaagagttcgcggaaattggaagatatccccgtagtctgcaagtatccagaagtgttccccgaagacctcactaccatgccacccaagagagagattgaattccggattgatttggcaccaggaaccgctccaatttacaagagaccgtaccgaatggcagccaacgagctagcagaggtcaagaagcaggtggatgagcagctgcagaaaggatacattcgaacaagtacttcaccttggggcgctccgatcatttttgtggagaagaaggacaagacgaagagaatgtgtgtcgattaccgcgcactcaataaggtcacaatcaagaacaaatatcctttaccgcggatcgatgatttgtttgatcagctgaaaggagctaaagtgttttctacgatagacctgcgatcaggctatcaccagttgagaattcgggaagaggatattcccaagacagccttcaccactcggtatgggttgtatgagtgcacggttatgtcttttggacataccaacgcacctgcattcttcatgaacctgatgaacaaggtgttcatggaatttctggataagtttgttgtggtattcattgatgacatactcatctattcaaaatctgaagaagaacatgagcaacatctccgtctggtactcgagaagttgaaggagcaccaattatatgccaagttcagcaagtgtgacttctggttgtcggaagtcaaatttctgggtcacgtcattacagctcagggcgtggcagtcgatctgtcgaatgtggagtcagttaccaagtggaccccacctaagaccgtgtcacagattcgaagttttcttggacttgcgggttattaccgtcggttcattgaaaatttctataggatcgccagacccatgactcagttgcttaagaaagatgagaaatttaaatggacagctgagtgtgaccagagttttgaggagcttaagaagaaattagtatccgccctagttctgattctgcccgaccagacgaaagacttccaagtctactgcgacgcgtcccgccacgggcttggatgtgttctaatgcaagagggcagagtggtcgcttatgcctcacggcagttgcgtccacatgaagggaattatccaactcatgacctggaattggcagcggtggtacatgctttgaagatctggaggcactatctgattggcaaccgctgcaaagtatatacggaccacaagagtcagaaatacatcttcacccaaccgaatctaaatctccgacaacaaagatggttggagctaatcaaagattatgacatgagcattcattaccatccgggtaaagccaatgtggtggcagatgcattaagcaggaagagctactgcaatgccctatgcaccgagggcatgtgtaaagaattgcagcaggaacttgaacgtctcaacatgggaatcgtagaacacgggttcggagccgctctagaggcacggcctacgcacgtggatcaagtcagagcagctcaagtgaatgatcccgagatagctgaactgaaaaagaatatgagggtcggaaaagcccgggactttcttgaggatgaacatggcacaatctggatgggagaaagattgtgcgtgcccgatgacagagagctgaaagatctgatacttactgagactcatcagactaaatattccattcatccgggtagcaccaagatatatcaagatctcaacgaaaagttttggtgggc

SEQ ID NO: 14761 - DNA, 3066 bp, Oryza sativa
  Clone ID: TFbOSC5516j.C1.o6.fg
atggcgagttcctccagcagcgccgggagtcctttttccggtcaggcggtcgcagagaagctcacccggacgaacttccttctgtggaaggcgcaaatcctcccggtgatccgcggtgcccgcatggaagggtacttgacaggcgcgacacaggccccgctggctgtgatcgacgccaaagatggagaagcgaccgtcaaggcgtcgaagccggcgttcgagatgtggataacggcggaccaacaggtgctgggtttccttctttccacactttccaaagagatcctcacccaagtcatcagtatggaatctgccgcacaagtatggaaggccatcacggagatgttgtcttcccaatcacgtgcgcgtgctttgaacacgcggctggcgctcgcgacgaccctcaagggcgatctcagcgtctctgattacatcagtaagatgaaagtcctcgccgacgagatggcattcgccggcaagccgcttgatgacgaagaactcatttcctacgtcctggctggcctcgacgacgactacgagccggtcgtctcctctctcgtcggcaagtcggaggttgtctccctcgccgagtgctactctcaactcctgagcttcaagtccaggcagaagcttcgtcatgcggctgcacatcaggcttcgtccgtcaacgcggccaggcgcggtggcggaaagggcggtggatacactcccttcaatcgcggcgggcgcagcggtggcaacaacaacggcaggcgcagcaacaatggaggtggacgtggtggccgcggcaacaacaatggagaccggggtggcaaaccacatcctgtgtgccatctatgtggcaaaacggggcatgttgtcgccgattgttggtacaggtatgatgagaattttgtgcctgaaaataagatagctgctgcagcctcatatggtgtagacacaaattggtacgtggacactggagccacggatcatatcactggagaattggacaaattgacgactcgggagaagtataatggcaaggatcagatatatacggcaagtggtgcaggtatggacattaaacatattggtcattctgttatttgtacccctactcgcaatatatacttgaaaaacatccttcatgttcccaaagccaagaaaaatttactttttgctcatcgcttagcccttgataatcatgcctttgttgaagttcattctcgtttctttgccatcaaggatcaggctaagagtcatcaacttccctatcctaagtctttcagtgtgtttagtcatcccctagaacttgttttctcagatgtttggggtcctgctcctgattctgttggtggcagaaaatattatgttagttttatagatgattttagtaaatttacttggatctatttgcttaaaaagaagtctgaagttcttcagaaattctctgagtttcaacagcttgttgaaagactatttaatcgcaaaattattgctatgcaatctgattggggaggagagtatgaaaaacttaatgccatttttactaaaattgggatcactcatcatgtctcttgtccctatgctcaccaacagaacggttccgcagaacgtaaacatagacacattgttgaagttggtctctccttacttgctcatgcttccatgcctctcaagttttgggatgaggctttccttacagctacttatcttattaatcgcacaccaagtaaagttatacagtactcgacgcctttagagcgtctcttgaatcaaaaaccaaattactcctccttgagaacctttggatgtgcgtgttggccgaatcttcgaccctataataatcgcaaacttcagtttcgctcaaaacagtgtgtttttcttggctatagcaatattcataaagggttcaagtgtcttgatgttgcaactggcagagtttatatttctagagatgttgtgtttgatgaaaatatttttcccttctcacaacttcactctaatgccggggctagactacggtcagaaatcttgcttttgccatctacactgttgaatcctgaaattgctagtaggggtatgcaagtgaatgatcatatgtctaatgctccctctggagaatctaatattatttctgagcatgcacctgaacaggaagcaggaggttcaaatataaatgcacctacagatacacatgatacagaagatcctggtgctggcggcagtactggatttgatgaaaatactgctggaagtgatggacctgacggcagtgatggatttgatgggtcagctgctggctcagatcccggcgatggcagtacagaagttgggagcagcagcagcagcgctgtcggcagtcctagcactgggaacggcggcagtagtggtgcgtcagtcaatccaggaccagggagtgcatcggcaacagaaccagcccgtcatggtggtgcgacaggtgatgagacacatactaatcagattattcctgagcaggtgcaccagccaagtcgtccaaccacaaggttgcagaggggaataaggaaggaaaaagtctatactgacggaacagtaagaggttggtgtcttcgacagtttgatgtacagaatgcctttcttcatggtgttcttgaagaagaggtgtatatgagacaaccgcctggctatgaggataagacaagtgctacacagggtgctgctgaggctttgttgaaagatttaaaacaagagtttgctctcaaggatttaggtgatttacattatttccttggaatagaagttaacaagattaacaggtcttcttctactcttgttagtgctttttctgatgcagattgggcaggatcagtagatgacagaagatcaacaggagctacatatctgtcagtcaatcctgtgtttcatgccagaactaagcatatagaagtggattatcattttgttagagaaagagttgctaggaagcaactggagataaaatttatatcttctggtgatcaagtggcagatggttttactaaaccaatctctgttcaacagcttagagattttagaaacaatcttaacttagataagttatga

SEQ ID NO: 14762 - DNA, 1572 bp, Oryza sativa
  Clone ID: TFbOSC900304j.C1.o1.fg
atgcacaccgtcaaggagacggagttacttgctgccaagctggacctcctcatgaaacgattggacgaccacaagaaacggccacaaggcaccgtcaaggccttggactctcacatcaagtgtgaagtctgcggcgtcacaggtcattctgggaacgactgcccggaaacccgtgaggaggcgatgcctttgtgcgaccatggagccagcgtcagcgtcatgtcaaaagatgtctttgacaagctcaacttcacggtgttggcaccaacaccgatgcgcctccaactggctgactcgtcagtccgttacccggtggggatagtggaggatgtgccagtcaagatacgggatttcttcatcgcgtttgatttcgtggtgctggacatggacacgaggaaggagacgccgctcatcctaggcagtccgttccttagcaccgcaggagccaacattgacgtgggaacggggagtatccgtttccatatcaacgggaaggaggctccatggtcagaatcaagtacgggccaaacccgcagaacattcaagaggtcgaagtggagccacccaagacggatagcctgtatgaggaggcgactgtctcatctgttcaaggggtcgggctctccatcaagtcgtcatgacgagtctagtactcgttcatcagccgatgcctcgatggaagacgccgacgctccgcgacaactcctgagcgacgctgacctcgaccttgtcagtgatcgggagagacaagcctactacatgctgagcgaccgggagtatgctcacacacgagaatactcaccggaattgctgaaaaagataggtatggatgttaaatttcgttctatttggaaagctgttggttggcagagatttgctatgaaaggaatttctaggttcgagaaaaataggttttgggaagatatttctggtgctccaatttgcaagaaatctagaacgaatgatatccataatcctacacttaggctcatgcacaaatggattgctttgactttgtttcctagaagtgatctgagacccattaggagagatgaactaattatcatgtttgccatggttagaaagatcaaaatttctcctgtgaaatgtatgataagacaatggttagaaagtataaagttctctgctcttgttgagtgcacttctctgattactcgatatacgaggcaggttgggcaccaactagggatgcacccggaaggacccaagctccacgccataacatcggagtctcaacctggtcaagcgccagtgaggaccggtggcatgcgcctcatgacatccactgggagggacaatcaacctcctagatcaagtggtgtgcctccatctccaagtgaatggcgctcgagttcctctcgttgggacttgggtgaaatcactaggaggatggacacccttgatatgcagacgggggagatccagtacaacctcacggaacacacagctcaaacgcaagaatggcaacaatctgctgatgctcaattccccaacatcaacaacatgatgcaacaacagcatgatgaccttcaggcgtactttcgtttttag

SEQ ID NO: 14763 - DNA, 132 bp, Oryza sativa
  Clone ID: TFbOSC101455j.C1.o16.gm
atgggccggcaagaggtatctagcgccatctctgttctcgccgagtacagattcgaggaggaagattaccctgtcatcgactacgacaccggcttcggccaacaggatgtagggctattacctatcagataa

SEQ ID NO: 14764 - DNA, 2911 bp, Oryza sativa
  Clone ID: TFbOSC1518j.C1.o2.np
aggacgaggacggggcagcgaaggagagatccttaccaccacacgacgaggcgagggaacgacaacgatgaacgggcgcggcggagacggccgggaatgacggagacgaaaggcgaggggacgacttcacagaacagtggcggtaacgccactgttgccggcggggatgcacttccggaggtctccatgggcaacagagggcaggccggtgcagaggaggcggctgcgacgctggagaaggcaccggcacggccgaccggcgctcgggcaaggcggtaggggcggctggagggtggccggcactgaggaaagagaaggaggaggcggggagaggtggtgcagccacggggagggcgcgggagggggctaaaacgagagaacggagcgaggggccctcgtaccacggtcgatccggaagccgcaaaggccgtcgcagggcccatccaaactccatcacgcccaccctagccagggtacgtcaaccagaggaaagctatacttcaaatcaagcagttacccattcccgcttaataaaagatgctataactggtaataatttgattagctcctggtttggaatggttaattcctagtttggagatagaactgtgcagccgatgccgcgcttcaagcctgagtacttgtttggtgttgagggatttgtccaggagttgcatacgatgtcctttgccataggatttgggactgcccctttgtatgcccagattcctcatgatcgtgatgaagagaagtgccgagtcaaagtcaccatgaacagtaatagtgaagatatcccatcagtgatgttcgaagctggaggaggaaactacattcatgcatgtcaggaggtggcaaggatggccataggagagctccgcgatcgctacagtgatcagttggccgacactgagtatcgctaccatcctcgccaaccccagggaagtgaccgtggcagttaccttgagactgtggggattgagaatgatgctaccacaaggcatttggttgagatgctgtgagctatggatgagacccgcgcggagactgtgttagcagctcaagatcgtgaagaccagaatcgtggtaagatttgcaagctagaggacaaggtggatcatttggagaaggaactagccgcgttgaagggagaagcaccaccgcagaaggccagggttcgtcttaccgcaaggaagagagctctattcgtccctcgctaccaattggcgccaaaggttcgtgtggtggagaaagaagttaccccagccctagcggatcctccggtcgtcaatgtaagtaatgatgataaagaagaatccaagcgcacccattccaagatcgagtggggagcaactcaagatgatggagacgaaccgaacgagccttcaatcaactccgatgcccggaagacctagacaacgggaatggtcccaacatcatcaacaacaacaacaatggagagaatcccacgcttgcccaagtcctagctcaacaggcacagcttatgaacatgatgatgcagcaactccagaaccagcagaaccagggaaataaccatgcacctccccagaacaagttagcagaatttcttcgtgtgaggccgcccactttctctagcaccactaatcctgttgaagctggtgattggctggatgccatagagaagaagttggatttgctccagtgcactgatcaggagaaggtctcatttgcatcacaccaactgcatggccctgcctctgagtggtgggatcacttccgccttaacaggactattgctgaacctatcacttggcttgatttcaccgctgctttccgaaagatgcatataccatcgggagtggtgtctctcaagaagaaggaattcaggtcgctcatccagggatctcgcacggtcaccgagtatctgcacgagatcaatcgtcaggctcgttatgctccggaagatgtgcgcactgatgaagagcgccaggagaggttcttggaaggacttaatgatgagctttcttacccactcatgactggggattatcatgatttccagaagttagtggataaggctattcaccaggaggacaagtacaaccgcatggagcagaagaaatgccggattgctcacttcaaggcacaacaggggaatagtcagaggccgcatcttactttgggacctcagtcaatgtcacagggaggttcttcgtctgttgttcgtccccagcgtcagttcttcaacaacaacacgggcaacaacatccgcaatcaagctccacgccttgttgcagctttgacacagcaacagcctgccaagagggagcaaggcagcaagcccggggtgtgcttcaactgtggtgaaccaggccattactctgacaagcgtccaaagccccgacgcgtgaaggttgtccctgcccaaagcaactctaccgcaccagcatcaaaggctcgtgtcaatcatgttgctgctgcagaagctcaaggtgctccagatgtgattttgggtacgttccttgttaactcagttcctgcaacagtgcttttcgattctggtgctacacattcattcttatctatgagttttgcgggaaatcatgggatggaagtagaagatcttagacgtcctttgatggttagtaccccgagtaatcaagcactctctttgcaacatagcccctctgtcagaatagaaattcaaggagtaccatttcttgccaatcttattctgttagaagccaaagaccttgatgttatcctagggatggactggttagccagatataaaggtgtgatagactgcgccaacagaaaagtaattctcaccagcaatgatggtcgagttgtaactgttcatgcattgtcttctgagtctttaaggtcaagtctgaaccaaatgactttggaagagattcctatagtccag

SEQ ID NO: 14765 - DNA, 288 bp, Oryza sativa
  Clone ID: TFbOSC1661j.C1.o1.np
atgaagttaagcatgaaacgacccccgcataatttaagatgtgtgtgagacttctctttcccgggagcgccagaactcctctcactgctagaaatatggacgcctagagtgcatgaggatttaagttcatggagcaggtactgccaatgcgaggttatcgaaaaggtttgccgtgacgtgtctcatgtgttgggacgaggctcatgtgttaagcagtcgcggagtgcgggtaaagtgtatccactgcagtgtgagtatactagaaaaatgtctctacaaagcattttt

SEQ ID NO: 14766 - DNA, 4269 bp, Oryza sativa
  Clone ID: TFbOSC1661j.C1.o2.fg
atggcaattaaggaccggttcacgggaaaccctgggagacttaccgtgcttaccacaagcgggagtgggtttgttgcttgtgggttagtcagcggtcgatatcatgtgtcagtgatggagataaggaatggttcacgcgactccaacaacgtcagtggcagcgaagagccgatcaatggagcacgtgccaatggtgcatctgactacagtctgtccccaccgcccgagaacccaacaattgctcaggtgttgaacaatcagactcagatgatgacaatgatgatgcaacagatgcagcaacagtaccatcaggtgttgcaacaggtgcagcagcaagcacagcagcagcaacagaacctgcagtttggtcctccacctcctcagtccaaattgttagaatttcttcgtgtcaagccgcccattttctcaagcaccaccaacccaatcgaggcccacgactggcttcatgccattgagaagaagctgaatcttttgcaatgcaacgagcaggagaaggttgcttttgctatacaccagctacaaggtcccgcttctatttggtgggacaactacatggtgacccgtccagctggggcagaggttacttggacagagttttgtcatagtttcaataaagcacaggttcccgagggaattgtggcacaaaagaagagagagttccgttccctgcaacaaggaaccagaacagttatagagtatttgcatgagctcaaccgcctcgcgcgctacgcccctgaggacgtgcgtaccgatgccgagaggcaggagaagtttctgtctggtcttgatgatgaattgactaaccagttgatctctagagattatgaggactttgagaagctggtggataaggctatccgtcaggaggagcactataacgaaataaaccgtaagaggaaggcagctcagttcaggactccccaggggaagagtcagaagcctcgtttcacgatgggacatcagggtggaccttccaccatgattatccggcagtaccgtccctaccacccgggtagcttcaacaagacccaccatagtggcagtcacaacaacagtgagcagcacaggctcaagcctactccaagtccattaatgattccagctcagccagctctgccagctcagccagaacagcccaagaagtttggagaaaagcccgaactctgcttcaattgtaacgagcccggacacacggtcggaaggtgcccgaagccaagacgtgctggacccaagtttgttcaggcccgtgtcaatcatgcgtcagcagaggaggcgcagtcagcaccagaggttatattgggcacatttcctgtcgactcgacaccggcaaaaatattgtttgattctggtgcaacccattccttcatttccaagcgttttgctggtgcacatgggttatctttagtgaagcttaagataccaatgcgagtgcatactcctggaggtggcatgaccacaactcactactgcccatctgtgacagttgaaattcaagggatgatttttccagccaacctcattcttctcgaatccaaggacctagacgtcatacttggaatggattggttgacaaggcacagaggagtgattgattgcgccagccgcaccatcaagttgaccaatgcaaaaggagaggtggtaactttccagtctcaagtgccgcggaagctagggattagtttaaaccaggctgctggtgaagaacaagaggtagcagtggagaaaaccactaagaagctggaggatattcccatagtcagagagtatccggaggtttttccggacgatctgacaacaatgccaccaaaaagggatatcgagttccggattgacttggtacctggaactgcaccgatccacaagaggccttacagaatgggagccagcgagttggcggaagtcaagaagcaagtcgatgaacagttacagaagggatacatccgcccgagcacgtcgccttggggtgctccggttatctttgtggagaagaaagacaaaaccaagaggatgtgcgttgactaccgcgcactcaatgaggtcactattaagaacaagtatccgttgccaagaattgatgatctgtttgatcagttgaaaggagctacggtgttctctaagatagacctgcgatcaggttatcaccagttgaggatccgcgaagaggatattccaaagacagcattcatcactcggtacgggttgttcgaatgcacagttatgtctttcggactcactaatgcacctgccttcttcatgaatttgatgaacaaggtgtttatggaatttctggacaagtttgtcgtggttttcatcgatgatatactgatttactccaagtccgaggaagagcatgagcagcatcttcggctggtacttgaaaagttaaaagagcaccaactatatgccaagttcagcaagtgcgacttctggcttaaggaagttcagtttctcggtcacatcgtgaatgctcaaggagtagctgtggatccagcaaatgtggagtcagttaccaaatggaccccaccaaggacagtcactcatgttcggagtttcttaggacttgcgggctattaccgccggttcattgagaacttctctaaaattgctaagccaatgacacagctattgaagaaggaagaaaagtttatctggtctgctgaatgcaataggagttttgaagaactcaaacgacggttggtgtctgcaccagtcttaatcctgcctgatcagacgaaaggtttccagatctattgtgatgcatctcgccaggggctaggatgtgtgttgatgcaggatggcaaagtggtttcttatgcttcacggcagttgcgtcctcatgaaggcaactacccgacgcatgatctggaattggccgcagttgttcatgctttaaagatttggcggcactatctcatcggtaaccgttgtgaggtatatacagatcacaaaagtctaaagtacatctttactcaacctgatttaaatctcagacagcgaagatggttggagctgatcaaggattatgatatgggaatacattatcatcccggcaaggctaatgtggttgcagatgccttgagcaggaagagctactgcaatgttgcatgggtagagcaactatgttgtgaggttcaacgcggtctggaacatctgaaccttggtatagttgagcacggattcgtggttgccctagaggcacagcccacactggtggagcaggttcgcatagctcaagcaagtgatcctgaaatagcagagctcaaaaagaacatgagggttggaaaagcccgaggttttgttgaggacgaacaaggaacaatctggatgggagaaagattgtgtgtacccgaaaacaaggaattaaaagacctgatactaatcgaggctcatcaaactcaatattccattcatcccggcagtaccaaaatgtaccaagacctcaaagaaaagttctggtgggtcagcatgagaagggaaatagctgagttcgtagcactctatgacgtctgtcaacgagtaaaggcagaacaccaaaggccagcaggtttgctacagccacttcagattccagaatggaagtgggaagaaatcggaatggatttcatcaccggtttgcccaggacgtcatcggggcatgattctatttgggtagtcgttgaccgactcaccaaagtggctcacttcattccgttctcgtacaacaacagttaccaggctagtctgcagatggcaccgtttgaagcactgtatggacgaaggtgtcgtactccgctcttctgggatcagacaggggaacgccaattgtttggtacagaagttttaaatgaggcagaagagaaagtcagagctgttagggaaagattgagaatcgcacagtctcggcagaaaagctatgcagacaaccgccgaagggagctcgctttcgaaacaggggattatgtgtatctccgtgtcactccgctcaggggagtacatcgcttccaaaccaaaggaaagttggcaccacgctttgtgggaccatacaggatcttggaacgtagaggtgaagttgcttaccagctcgagcttccctccaacatgcttggcatccacaacgtgttccacgtctctcagttgaagaaatgtttgagagttcctgaggaacaggcaagtccggatcacatcgaaattcaggaagatctgacgtatgtggagaagccgactcgtgtcctcaaaaccagcgagagaaggaccagaaacaaagtataa

SEQ ID NO: 14767 - DNA, 636 bp, Oryza sativa
  Clone ID: TFbOSC400196j.C1.o1.fg
atggatcaaatggctctcgccaccattgtccaagctgtgccggaggccatggtgatggtcatatccgagaaggaaatggcgagggaggcgtgggatgccctcaagcagatgaacatgggtgaagagcgtgtcaagaaggcccgagtacaaactctcaagagagtgcttgatgattcgttctctcggcacgaaagtggaggagaccaccgtcgtggagaggctcttgcattccgttcccgacaagttccaatccctcataagcaccatcgagcagtgggggatgtgtcggagatgacggtgacggagacaattggatgtttgcgggcgttcgaggtgtcctccaaggggcgacgtcgtgaaaacgcaggggaggagcagctgcttattgcaggggctgagcaacggctcacacgcgctgagtgggaggccattgttgctgaagagaagaagagctacgaggcctctggcagtgtcacgaagaagtttcgcagcaagttcgacaagtcgaagattgagtgctgcaggtgtggcaagtttggacacttcgctgatgagtgtgacgagcctcggaagatgactaaggcagtggcgcagcttgcaattgcagatgctgatgatgagccaacattactttga

SEQ ID NO: 14768 - DNA, 2178 bp, Oryza sativa
  Clone ID: TFbOSC400872j.C1.o5.fg
atgtcaggtacaagttccgatgaaccaacactggagaatctagcgcataaactgaagggcatggaaaattggtatgaagagttgatgcgtaatagtaaatcatacaaggaaagcacagataaacatttaaaaaccttaagtgaaagcctggtgaaagtagtggatcaaattgagaaaatgaatcaatcacataaacaattaactgaaaacattcagaatatgaatattggacatgaaaatattgtgcgacgcattggtttacttgaggctgcaggtgaagaaggtgcaggtgccactgcccatcgacaccaaagatatgacaatgaagatgaagagcaatctgttgctgatgatgaggaggaagacgagagtgttagaaatagaagacaacgtcgagttagggacaaagatgatcctttatctaagtttgagccttctgtctatctagattgggagttagctgttgagcaaaaattctcctgctatgattttcctgataataagaaagttaaagctgccagtagtgaatttacctcctttgcatctctatggtggaatgatatatgtggtagaggacttagacctagaacatgggatgatatgaaacgtacaatgagatctagatttgttcctttttactatgctcgtgacatattaaataaactgcaacttttaagacaaggtcccaattctgtagaaacatactatcaagagatgatgattactttgtcacgctgtgatttgcaagaaactgaggatgctagaatttctatgttctatggaggtcttaagagagaaattcgggatattcttgaatataaagaatacaataccatgaatagattattccattttgcttgcaaagctgaaagagaagtgcagggacgcaacaagcataggagttcttttgcaggtgctacttctacacgacagtcaacaccacgtcaatctactactgccgttcgtccagcttcttccacaccacctacctccacgccatcccatgctcaagaaacaagcaaaaatgcttcagttcagactccagccaagagtgaaacttcagtagtttccactggacgtacccgtgatactacatgtcataggagccatggcattggacacattgcacgtgactgtccaaatcggcgagctctatttgtgaatgctgatggtgagtatacttctgctagtgattgtgatgatgaatatgctttagctaccactaaccacgcaggaggacaagataatgatgacatcgagaaagtccatttgcatccagagtcgctagatcagtatcctagcctaattgtcaagctagcacttagtgctaaagagaagtgtgaagagcaaaaccaacgtcacaatttgttccaaagcaaagttcttgtgaaaggccataccgtcaaaatgattattgatagcgggagttgcaacaatttagcaagtgaagagatggtcaagaagcttggcttgactacccatccacatccacatccgtatcatattcagtggtttaatacatgtggtaagatgaaggaatatgaggatgtttttcacgatgagatacctccaaggatggccaatggacgagagagtgcacacaatcaagaagatgggattgagtcgaggacaactccaattcaagaaggggaggatgatgaggacatcacttcatcggatacgctcataacttcacacgctccaatgataattccaagtccaagtccagttcagcctccggagatagcactgacttcaaacggacctagcaccttcatgccaactccgatttggtgttctctcgtttgcattgcagggatgatcaaccgcgcgtcacggttgtgggagaggccatgcgcccatgcctaccggatcaacgcacgacgagggagcggagtcggttggatctacacgggatggggagagcccaccggatccgctaccgccggattccgcacccaacggcctctcacaatctcgccgccagaccccatggtcgctgacaggtctcgagctcactgctcccgctaccacttgccgttggaggaagtggagcggagaggtggagagaacaggaagtggaagataggtgtagcagagaggataaggagagggatgggggaaagaatacaaagatattttacggaagagagagtggatgctggtctggttggctag

SEQ ID NO: 14769 - DNA, 3066 bp, Oryza sativa
  Clone ID: TFbOSC900139j.C1.o6.fg
atggcgagctcttcttcagcggcgacgatctccaaccctatgtttggcctccaaatctcggagaagctcaccaagcacaaccactccctctggtctgcgcagatcctcaccactcttcgtggtgcgcagttagatgggcatctctccggcacgaccgaagctccggcggccgagattgagaaagaagaaggagacaagaagatcaagatcatggtctcaaatccggcgtacaaggcgtggttcgcccaagatctacaagtgctcgggttcctcttctcctccctcacgcgggagatacttcaacaagtcgctggtgcaacaacggcggctcaggcgtggagcatgatcggcgacatgttctccaccaagtccaaggcgggttcgatcaacgtccttctcgccctcacgatgacccagaagagtcccatgaccatcagcgaatacatcgcaaagatgagatctctcgctgatgagatggcggccgcaggcgaaccgctggatgatgaagaactggtggcatacatcatcaacgggctcgactccgacttcgatgctgttgtcgaaggaataatggcaacggaaagaattgctcctccttctgtttctcatgtttattcacaggttttgagttatgaaaataggatgaaaattcgtcaagcttatgtcaccacatccgcgaacgctgcgaactgtggcgggcgcggtggacgtaacagcggaggaaaccgtggtcgcggtggctttggtcgcggtggtcgcggtggaggacgcggcaatcctgccggcaacaaccagggacgcgggcgcggcaatgacagccgccccttgtgccaagtctgccacaagcgcgggcatgttgctagcgattgttggcatcgctatgacgattcatatgtccctgatgaaaaacttggagataattatggtttcctcgaaattcatggcaaatattttttgattaaggacaaggccacgaggaggataattcttgaagatgtatgggagcctgcctccacttcattaggagcaaagaagtattatgttagttttattgatgattacagcaaatttgtttggatatatttccttaaacacaaatctgaagtgtttcaaaaattccatgagtttcaaaagcttgttgagagacagtttgatcgcaaaattcttgccatgcaaaccgattggggaggacctcctgaaatagctgctacagatgccctgggtacacttgatggggtgcctggagcgcacgaagagctgagtgaatccacccaggattcagcgccagctgctgtctcaggattgccgactgacaccccaggatcgctgagtcagggggagcaggagcgctcgcctgcgcgtacggcggtacgctctcagccatcgcaccagtccggcggcgacacgtcggcaggcagtggcgtcctctctcctgcacatggggacaacatcgtcacctctgatgtgacggcaccaggatcctctacatcagcagcgccagcgcagcagcaaattccagctgaggtaatgcgtccaaaaaccaggttacagagtggcattaggaaagaaaaagtttatactgatggaactgttagatatagttgtttcacatcctctggagaaccacagtctctgtgtgaggctctaggtgataaaaattggaaacatgcaatggatattcctcccaaaaaaggactgaatataatagattgtaagtgggtctataaaattaaaagaaaggctgatggaagtctagatagatacaaggctaggcttgtggcaaagggatttaaacaaaggtatggtatagactatgaagatacttttagtctagtagtgaaggctgctactatcagaactattttgtctatagctatctctagaggatggtccttgcgtcaattagatgttcagaatgccttcctccatggagtcttagaggaagatgtttatatgaaacagctactagggtatgaacagaaggatggctatgtgtgcaaactagacaaggctctgtatgggttaaaacaagctcctagagcatggtactctaggttaagtacaaagttacatgagttggggtttaagtcctcaaaatcagatacgtctctgttcttttacagtaagggagatatcacaatgtttatgctggtttatgtggatgacattatagtagctagctcttctcatgatgctactaatgttttgcttaagaatctgaatagagaatttgcactaaaggacctaggtgaactgcattatttcctagggatagaagtcaagaaggtaaatgatggcatagtcttaacacaggagaaatatgctaaggatgtgttaaggagggtaaatatgagtgaatgcaaagcagttaatactccattgtctatctcagaaatattaagtgctcaaggaggcactcctctggggccagaagatagtactaaatacagaagtttggttggagctctgcagtatttgactttaactagaccagatttgtccttctcagtgaacaaagtgtgtcagtatttgcatgctccaactacagaatactgggtagcagccaagaggattctgagatatttaaagcacacagttaaacttgggttaaagatcaattgggcaggatgtttggatgatcggcgatccaccggaggttttgctgtttttatagggcctaatcttgtgtcatggagtgcacgtaaacaggcaactgtgtcacgatcaagtacagaagcagaatataaagccttggctaatgctactgctaaaattatgtggatacaaacattacttcttgaacttggagttcaggtgcctagagcagccaaggtaaggtgtgataatattggtgcaaaatatttatcatctaatcctgtgtttcatactcgtacaaaacatattgaagtggattatcattttgttcgagaacgagttgcacgtaagttgttgcaagtggagtacatatctactacagatcaagttgctgatggttttaccaagacgttagctgtcagacagttagagatgtttagaaacaatctaaaccttacatgtatagattga

SEQ ID NO: 14770 - DNA, 5736 bp, Oryza sativa
  Clone ID: TFbOSC900300j.C1.o6.fg
atggctgacaagacactccgcgagttcgctgctccctctgttgacaatgtggccattgggccgcaaatcaacatgggagacgtggatttcggcttgaagtccagcctcatcacgatggcgcaggctagcccgttcagcggcaagcctaacgaggatccaacgctcatatgcagcagttcctggagatctatagcacaactcctacaatggactcactcccatgtcccgcgatcactggccgcggcggctggaggagcattcttctctaagacggttcgaggagctgttgatctaatagagaagatggtctccaatatgggttggagcgaggaacgactccagacccgtcagcgaggtatgcacaccgtcaaggagacggaattactcactgccaaactagacctcctcatgaaacacctggacgaccacgacaaacggcctcaaggcaccgtcaaggccttggactcacatgtcacgtgtgaggtctgcggcggcacgggacattctgggaataactgcccggaaatccatgaggaggcgaagtacatgggcaacaataacaacgggtaccgtccacaaggaggtcaggggtggaacgagccacgcccgtattatcaaggaggaaccaatgggatagccaaggaagtgccatccaatgactcagctgacaaggagattcagccagagaaagccgtgccgcaggagtattgtgacacacgattgctgccgtttcctcaacgaagtaggaaaccgtcagtggacgagcaattcgctcattttgttgaagtaatccagaagatccacatcaacgtgccattgttggatgctatgcaagtgccaacatatgcccgctaccttaaggatatactcaacaacaagagactgctcccaacaacggagttcggccaagctttatatgatcttggagcaagtgtcagcgtcatgccaaaggacgtctttgacaagctcaacttcacggtgttggcaccaacaccgatgcgcctacaactggctgactcgtcagtccgttacccggtgcggatagcggaggatgtgccggtcaagatacgggatttcttcatccctgttgacttcgtagtgctggacatggacacgggaaaggaaacagcacttatcttggggcgcccgttccttagcaccgcacgagccaacattgacgtgggaacgggaagtatccgtttccatatcaatgggaaggaggaaaagttttattttcagctaaggaccgaacaattctccatggtcagaataaagtacaggccaaacccgcaaaatattcaagtggtcgaagtggagccacccaagacggacagcctcgtaaagttcatgcagaatttcctggagaaggaaacaacaatgcccaggaaccgttattggaagacgccgatggatcggtcgtcatggatgtatgagatgcggagaatgcagccggtatttattaaggaagcatctaaatttattgatcaggctaaggcgcatgctttgagggagaatatgacaaagatcttttgtccgtgccgtcattgcaagaatcagaaattgttggtagatcctgatgaaatattgggtcacataatggagtacggattcaccgccaactacaaggtttggacctatcacggggaattcgccgatcccgaagatgacaatgaagagttaagtttcgagatgaataaggcagagaattttataatcgaagacatgtcccgtgaaagaatggatgttgatgtttccaccgatagtgatgatttcgagggtggttttgatttagacgatatgctacgccatgttgaaccaaaggtgctagcgggcaggtcacgaggattggagaattggcaggcattagagaaggcatcgaaggatcttctttacgatgaaacgaagggatgtgataaggatttcacagtcttgcgttcagtgcttgaacttctgagattgaagactaaacatggatggttggacacaagttttaatgatctgatgagtttgttgcttgtgttgcttcctaagcctaactttgtaccatcaaacacgtatcaagcgaagaaactcatatgtcctttatctcttggtgtagaaaagattcatgcttgtaagaatcactgcatattataccgtaaagaatatgcaaacttggaaagttgcccaatgtgtggcacaagtcggtataaaatggggaatgggcccatagattcagagtgtaccgatccagattctgataagggtaagcgcggaaagattccctcaatggtgatgtggtacctaccaattaaggaccgccagaagcgtctgtactcaaacccgactgatgctgagttgatgagatggcatcaagagagccggaagatagatggtatgattcgacatcctgccgacgctcgccagtggaagaaatttgatgcaaaacacccagaatttgctaaggatcccaggaatgtaaggtttgcgttgagcattgacggaatgaactcgtttggtgacttaagcaactcgcacaacacatggccagtccttctcacaatgtataatcttccaacatggatatgccagaaacgaaagtacattcttctcactatcctcatacaaggtccaaaccaacctggaatcgacatagatattttccttgagcctttgatggaggacatggaggagctttcgaaagaggggttacgactatgggatgagtttaagcgggagcacttcaatctagggaagactggatgtctgatatgtttggagaaaacttcgtacaaatacctgacatcgtctttgaagacagtgtacatgcggcatcgacggttcctaccacaaagacacaggtaccgtaagatggctagattgttcgataatatagtggagaatgacactgccccagaagcacgaagtggtacatacgtgtatgagataacaaagaagattaaggttgtatatggaaagggaaagaagaagacagtaaagaggaagaaagctgatggtgacaaagatactgcattgcctttcaagaagcactcaattttcttcagatacttagattattggaaggacctagagattcgacatgcaattgatgttatgcacctcgagaagaacgtgtttgatagcaccattggcacattgctggacatcccgagtaagacgaaggatggattgaagtcacataacgaccttgtagatttggccatacggcatgaccttctcccagtagtgcttccaaatgggaagaccgagattcctcctgcttgttactcattgacacttgaagagaaaaaagccttctgtaaatgtttgcaaggggttagagtgcctactggtttcgcatcaaacatcaggaagctagtatcaatgaaggatttgaccatttctggatacaatgcgcatgactgccataggttgctaatggtattcctaccaattgctataagggcagtcaaaccagtccataccaaggtggttataacaaagttgtgctactttttcaatcgaatttcgcagaagatgtgggcctttgagcgttacatgtcgatcctcaaaggctatgtactcaatcgcgctcaccccgaaggatcaatgatagagggatacacaactgaagaggcggtcgagtgttgtatggattacataaaggatgctaatgccattgggattcctgttcatcgacacgaatggagattgtctggaaggggtacggttggtaggaagcagttcttcgataatgagtacaaaatggtgtccgcggcacacaacaatgttcttcaacagctcgctatcgatgagccattcattgagcgacaccttgaagaaatgaaagcatgcttcccagggaacttactttacaaagactggcatgtgggccttcaagtattgtcaattcatggcaagatccctgtgctccgttgtgaatgggtcaaagacacaacaggggtttccgttgatgactacgggctaacgatagtcgatcacagtaaaacaggccacgaggatgatccatgggttttagcagagcgtgtggctcaagtgttttatgtgaaggacccttcggatgaaagaaaaactattgtcatatccggaaagcaacagatcgtcggcatcgacaacatcgaagaccccaatgattacaaccagttcgatgatgtaccattgtttactgatcttcctatgcgaattaagaaggttgagagaacaattgatgaagcgaatatgtcttggaagatgtcgaacgataaggttccatcgaacgcgccaatagctcctcaagaaggtaacgctcctcaaaaatctggtagcaacaagcagcctgacgcttctagtgaagaaacatggcgcacaccaagtgacccgtttccaatggaaataacacaagtcgcccctcgcgatgatgatccgtactacatacctatggaacaggccgatgggaagcccgtcgagccaccgatagtgcggtccaagtttagcaacacctgtggcactctagtcaggacgcgttttcccattaatgtcaagttgtgggaaacggtggatgacaacatcaagacacttctttggaatgagttgcagaagtattttgtgtaccctcctggatcagagttaatatcgacatatgacccaaaggagattgacaaggataaggagaagttcatgttttcagctttcaggaattctgagaagaggaaaaaacttgctcatgtcatgtcagactcccagaagtcagtactagcggcccaagatgaagtgcaatcctggttatctgccgatgtgcctgaaacttatgagtatggcaagccattcttgccaacttatcttatgaacaagctaccatgggaaatgagggtaattcacgaatggtatatcaaggcatctaggaagggtctcggtttcataagcgtcgccgtcccggaaggtgctttcatgagtggtcctaatgggatattttttatctctttccaagacctttacgccctctacaagctagataaaatggacgttaatctcgttgcggtgttctgtcttatgcaattccacgaagctgatagaactggagcaaaggttggatacgtcgatccaacaagaatatgcaaaacacaacacatcgtagagctgagagaggactgcgagcaattggttggcaagacccctaaagaaaaggaagaatatgtgaagacattgcacaagaggaagaagctagaagtagcaacatacttggcaatagcaatgttggcgcacgccgacaaagatgacttaatggtcccctacgcgttcacagaccactacatattattccttgtatatccaaaagaccaattgatcatatcattggaccccgcacactatgacaaggaaacatttatggaattcctcactattttgaatttagcacataagtactaccgcaaaagaggtggaccagtacatattacatcccagaagcagttatctgtcaggactggctggctgtgctacaaacaaccaccgggaaccaacttgtgcggttattacgtgtgcaagatgctcagagtaaatgggaggtacaaaacaaccagtaaccgaatccccaaaatcccatatattgcacaacaattcaatgacaatactatcttgaacatggccgctgacctctgtcgattcatccatcgcgatgtctgcaacgcaagaggtctcttctacgacaaccagagtgaactcgcaatggacgacaaatttaaacctctcagagagtag

SEQ ID NO: 14771 - DNA, 3738 bp, Oryza sativa
  Clone ID: TFbOSC401367j.C1.o87.fg
atggcatcttcgtccagctccattccatttgctctccatgggcaatcagtctctgagaagctgacgaagagcaacttcgtgctctggaaggcgcaggtcctagcgacgttgcgcggcgctcagatggcgggcttccttgacgggagcaacaaggcgcctgaagccaccatcgtcatcaccaaggacgatgggaagaccactgagaaggtggcaaatcctgctcttgcgcaatgggttgcgcaggaacaacaagtcctgagttacttgctgtcgtcgctctctcgcgacgtcctcacccaggtggccacgctcggcaaggccacagaagtctgggaggcattgaaagcctctttgcgtcgcagtctcgagctcgcgtcatcaacacccgcatggcgctctccaccaccaagaaagggaacaaaactgtcgctgaatatgaatccactggacgaggaggatctcgtctcctacatcctcgtcggcctcgacttcgactacaactcggttgtctcctccgttgctgggcgtgcagattcaatctcagtcagcgagctatatgctttgctcgttggctttgagacacgcctggatctgcttcagaacaactcctccccttctgccaacaccgtgtcgcgaggagggcgcggcggtggtggcggtggcaggggacaaggcggcaacaacggcggacgcggcggcggtttcaggcgcggccgtggtgacggcaaacccaagcccacttgccagctttgcggcaaaattggtcacgtggtggccaagtgttggaagaggtttgatccctctttcacaggagaagagaaggttgcgagcactgctgcaaccaacaactcctatagcatcgacacaaactggtatattgacagtgccgccactgatcacattaccagcgagatggagaagctggcgataaaggacaagtaccatggcaacgaccaggtccacgctgccagcggctcaggtatggacattgattatgttggtcatactgctatttgcactcccactcgtgatctctggctcaagaacattcttcatgtccttgaagcttataaaagtcttgtgtctgcccattgttttgctagagataatagagcctttgttgaacttcacccctgtttctttttggtaaaggatcaggtcacgaggaggccacttcttcgaggcaggtgtgaaagcggcctctaccccttgccaactgataagcaggcccatggcgccatcaagccgtctttgtctcggtggcatagccgtctagggcatccttctttttcaattgtcgatcgagttgttagcacaaataatctccatgtcactagggattctagtcgaagattaaaaccatgcaaacagattgggggaggggaatttcagcgcctcaatagtttctttaacaatgttggcattgaacatcatgtcgcctgcccctatgcttaccagcagaacggatcagttgagcgcaaccatcaccatatcgtcgaagttggcctttccttgctagctcatgcgtcaatgccactcaaattctgggatgaggcgtttaccaccgctgcatacctcataaatcgaacccctaccagagttctgtcttatgagactcctctccagcgcctattcaatcttcctcccgactacttcctgcttcgtaccttcggctgtgcctgttggccgaatcttagaccctacaacacacgcaaacttgccttccgatctaaacagtgtgctttcctagggtatagcacgatgcacaaagggtttaagtgcttggacattgctgccggtcgggtatatatctctcgtgatgttgtgtttgatgtacaagttttcccctttgctcagttgcattccaatgctggtgctcgtcttcagtctgaaatccagcttcttactcccaatctccttccttcaattatgcttgatcacgggggtgcagtagtacatgatcaacctctaattaataatcctaatcctactgattccagtggtgagagtgcaggacaaaattctggagcaaacggagaaaacagcgcagctaatgatagcgaatccacatcaattaaccatgattttatgcagaactgcgatctggctagttccggcgaacattataccgctgatgacgatcctaatgctgattcagctgactcggtgtcgcgtcaggtggatcccgaggcggatgcggcggctcatggctcggcggcgtcatctccaccaaccacgccgagccacgtcgactcagatgcgttcgggccaaccatgtctctgcaagatgcgggcccgacaccgacgccagctaccggatcgcctactccaaccatctctgcagtcgagtccgaggcaacgccagaagcacagccaattccaggtccaatcacacgagcgcaccatggaattcacaaacccaagaaatatacagatgggacggtaagatatgcttgcttaactgatactgaagaaccatctagtttacaagaagcactgcatgataaaaattggaagatagctatggataaagaatttgctgctcttgttcataataaaacttggcatctagttccaccacagaagggaacaaatgttattgactgtaagtgggtttataagataaaaaggaaggcagatggtataatagatagatataaggctaggttggtagctaaggggtttaaacagagatatgggattgactatgaggataccttcagtcctgtagttaaggcaacaactattagacttgttttgtctttagctgtttcacagggctggagcctgcaacagttggatgtccagaatgcctttttacatggatatcttgaggaggatgtgtatatgcgacaacctcctggatatgaggaatctaaggtgcctcactatctttgcaagcttgataaggcattgtatggtcttaaacaagctcctagagcttggtactccagattaagtaagaggctgcaggagttaggattcacctcatcaaaggcagatacttcgttgttcttctttaacaagaaaggtcttgtgatgtttctacttgtttatgctgatgatattattgttgccagttcttgttctcaggcagtcacagttctacttgaaaatctagagaaggactttgctcttaaggatcttggtgagttacattattttctaggtatagaagtaaagaaagatggagatggcttgctgctaagtcaggaaaggtatgcaaatgagatccttaagcaagtcagtatgactggatgcaaacctgtaagtactccactctccactgtagagaagctgtcggctcatgaaggagaaaagttaggagtaaatgattcaagtcagtatcgtagtattgttgtagctttacaatacttgacacttacaagaccagatatatcattctcaatcaataaggtctgtcagttcctacagaatccttttgttgttcattgggcagcagttaaaagaatactaagatatttgcagggaacagttaaacttggtctcaaaattgagaaatcaccttctagtgttgtaagtgccttctctgatgctgactgggcaggatatttagatgacagaaggtctacagggggttttgcagtcttcctaggttctaatttgatctcatggaatgctagaaaacaggctacagtatccaggtctagtactgaagcagaatataaagctttggcaaatgcaacagctgaagtaatgtggaattcctcatcctaa

SEQ ID NO: 14772 - DNA, 188 bp, Oryza sativa
  Clone ID: TFbOSC14790j.C1.o1.np
caaacacaccgaatacggggcgactgctgttttataggcgcggggtggggcgtcgaggagaaggaaccggcattggggcgatcaaggggagcgagctggcggttgtgctcggagctagcggccaaacggcagtggaggtgcggtggctgaggttggaaaaagagaaaaagaagggggaaagaggagct

SEQ ID NO: 14773 - DNA, 1362 bp, Oryza sativa
  Clone ID: TFbOSC401437j.C1.o16.fg
atggcacgtcgctccacccgtcagatccgtgcccctaaccgctttggttttgaggaagagctagttcagtcagaaatccccgatcaaccagttaaccggacagatgagcaagaagccgagagtgatcatacggttgcttccggatcagttaatgatgtcgcaagaggtaatcaacccccacccgtggaccttcaccaaatcctggccatgcaaacgcatataatacaaggaatggttcagaatataattgctatgcaacaacaacacacacaagagcgtcaaccccatatggttcaagatgatggcaaatcaaaactgaatgatttcttggggtctcgtccaccggagttctcccaaacaaatgagcctattgaagctgatgattggattaaagatatggaaaggaaattaaatctggtacagtgtactccgcaagagaaaaccctttacgccgcacatcagttaagaggacctgccgcagattggtgggataactactgtgctacccatacagatgctagtaccatcgtctggacagagtttgcaggagcctttcgctcagcacacatccctgaaagcataattgatttgaagaaggaagaatttgcaaatatcaagcaaggatcctcttgcatcaacgagtatttgagtcgcttcaatagattggcccgatatgccccagaagatgtagacactgataaaaagaagatcagaaaatttttaaaaggaatggacgcgaaactgcgagtgaaacttttggctcacgactttccgacgtttcagcaaatggtcgataagtccttgttactagaagatgcagaaaaagagatgcaagaatacaagagacgcaaagtaatgtccctagagattcaagcaaaagaagatttgtgtcgaaaaacaaactcgccagcacaatactatcagaaagcatctcagcattcaaatggttccggttctacgtctcgttcgactatgtcagaacctggtcagcaagccacaatgatcaacagtaatagccatgaaggaagcaactccgtaccatgccctacaccttcaaaaagacgtggttataaggcaggagtcgaatgtttcatctgccatgagatgggacactattcgtggtattgccctcagaaagtcaagtcaaagcgagttcaaccaacgacaggccttcccaacgtatctagaccaaaaagtttgaaggcaccgaacagtggatctatctcactgacgtcaccgcctattggacaaagtcatctgaaccatgtgcaagtagaaacaaatggaaaagttgtgaatctcgagcaagttgaaggagcaggagaagaacaggttccacaggcaagagcagagccacagtaa

SEQ ID NO: 14774 - DNA, 2064 bp, Oryza sativa
  Clone ID: TFbOSC408741j.C1.o9.gm
atggaagacgccgaagctccgcgacgactcctgaacgacaccgacctcgaccttgtcagtgatcgggagagacaagcctactacattctgagcgaccgggactgccgtgaactaaccattccccagcagatcatagaagaatctcatgcaggtggagcatacagggagacgcgcaacatgacaaggaatgaacgaaaaagtacatcatcctcaacacccgtgcagatgtatgaggcagagaagggtaagagaccttctcaccgtgccacccgttttgtcaagagcaatggtaagtattgctccaagtgtcgtgaggttgggcatttggtgaatgattgccccggtggttgtgcctcaaatagcaaggcataccagttctacaacaagaacagaggtattgtggaagaaactgccgatgttcaatttggtgaaactaatggcacccaagaggggcacgagaatttggatgatgtaggtgatgaaggattgatgagagctatgaagaacatgtctattggagatgtcaaggaatttgatatgtccttgattggagagttgagcttcttccttggacttcaaatcaagcaactcaaggatgggacgttcgtgagccaaaccaagtacatcaaggatctactcaagaggtttggcttggaggatgcgaagcccatcaagacacctatggcaaccaacgggcatctcgcccttgatgaggaagtgatggcttcccgcactcgccgtggtcgtcgtgagcccactccggagcccgtgagtgagaatgatgaatcgagcggagaggaatatgctcaaagtgaggaagaatttgtggaagaagttgagggggctgaggaggaagcaagtagagatgatagtggcagtggtggtggagaagatgaggaaagtgatgatgagggtcttctcgatcctaccatctatttttcgctcaatttgaggaatgcccaacagtacactatcctccatcatcacaaccaattccggaggcccaatgattgcgccaatcctcagtttcatacacggtatcagaaagctgtgtatgagcaagtatatgcaaacaaagccttcgctgaccacaagtggatttcttggaggcacattagtgagacaccagaatttgtggatcttcaagggatgttcaaggcggtgggcattgataggattgtcaccttgaagcaaccatatgatgaagatctcatccgacatttctatgccaccgtgtgggtgtccagcgactgtgatgctatgaaatggatgtcggggaccattcaatgctccatcaaccggcgtgaattcaaggagctcttgcacatccatttcaacaacggggatgacctccatgatgagcacactcacaaccccttccccattgatcactatgctcagttttatgaagaagggggaaggcacacctatgaaaaggtggcgggattgaggatcatccctagtggtcaaccgcatagtgagagccacccttctcccaaggagatagccatttccaaggggacaattggacaagaaatttactatgctccctacataatgcgattgattcaaagcaagttgggggaagttggcgacaatttgagagaacacaaggagtacaagcttcgccgccaactctccactcctcgagctccccaaatgcaccaacatatctttgatcaaggcgcaagctcaagtgcggcacctcctcatcctcatgggtttgttgatcctaatgccttctttaatcctcaatatgcttactttgggatgcaaccaaatgactacttcaacccggtgcttagggctataaataccctaagtgaaagcattcaaaggctatccaccaggcatgaggccatgcatgaggatcctgaccaggccggtctgaccggtgcacaaggccggtctgaccgacggcaattgggcggtctggccggccccccggaggccgggatgtcctctctgtgggctggctcccgccttacccaccccttgacgaatggggcgtgcggtggcttcgtgattgagcagtggagttgggctcgcctcaacggggagtag

SEQ ID NO: 14775 - DNA, 6052 bp, Oryza sativa
  Clone ID: TFbOSC34301j.C1.o1.np
ttgacggcggccgacctcccacgccggtttccttcctccctggccgctctctcccccttccaaccctatttaaaccctccccgcacctcctccgtccggttccacctctcgccgcccttcctcctcgccggattcgagctcgcgacgtcgctctctctccgccgtcgccgccgagctccggtccaccaccgtcgtcgccccggaccgcctcccacctcggcgccgcctccttcggcttcaccgcatcctcgccgacctcgttcacctctctgtttcggtcgccgatagccggagcgccgccgtccccgtcgacccgagccgcgccaccgcctacctccgctccggccgcctcctccgtcgccgccgtcgccccggggtgagccgtggaccgtcgcctcctttccccttccctcccctctctcggccgccgctccgcagcatctatggccgcagccggcgaccatcggggcgcgggcgcgccgcctcccgccgaccgcgccggcgtggccgccctcgggcgcgccgagtggctgccgcgtggagcccggccatcagccgcccgcgccctcaggtgcggctgacgtgtggggcccacggcgccggccggtgcgagcccgggtgcgcccggtccaccgtggacccacctcggccatataaggatcagtcttcgggcctctgttgcaaagcactaccgtacttccacatgtctagtgggacaaatgacggctacacgagctgcggcccggtagtcgagatgtcatggcacagggctggtgtcctgctgctaggggctcagtcctgcctacctgtccggggggttccggccgtaggtggggttgggtcgatgtacacctctgatcagagtataatctgttcgaatagccgcgccctcggttatgggcaagccgagcaatgtacccaaatggccggcagcatcaaccatcgtggcttggacctgactggcttcgttttggagctgcggggcatgtgcgttgtcctggggtatccgcatggagtggactaccagggcaagcagctctcgaagcaggagggtgacgatgcagagccccacgctgcttgggaggtcactgcagtgatcctcactggctcacccgagaggacttcgttggcagtcaccgcgggtggagattccttctccgccgcttgccagaacgccgcactcctcaccatcggcactcttcaccagcgctacccggatgagttgcagcactcgccctaccgctaccaccctcgtcgcggaggagcccgcgactacgccaccttcagggatgctagctcggaggatgacgctaccatcatgcacctagcgcgcatcgtggaggcgtacgatgtggctcgtatcgacttccatcagatggtgcgccgtgggttggtcgagaacaacatgaagatcctggagctacgtcaggagaatctgcagctgaagaaggacctagacgcaggggaggcgcagctgtgtcagctcaagatcgcctagggagaggtctgtcgccccaagcgctgccgcgtctgccgcagcctgaagatcaccgcccgcaagagtacctccaggcccgagcttgttcgtcagtccttggcatggacctgcttcgtcgagacccctcgtgacgagcccgcgcccttggtttctcaggatgagggagcctctggcgttggtagcacggaggatgcactgctgctcaccttccatggtgacaaccaggagaagtgctgctaccggtgaaggcagtcaccccgaaggcagcaactacaacaaccatggcagcccacctccacctcctcacccgcctccaccaccaccaccagacaccaactctatcctcacccaaatcctcgcccagcaggccaacatgatggctgctttcctccatcacatccaaaatccgccacagcataatgctccacctccaccaccacccccgcaacattctaaacttgccgagttcctccgcatccgtccgcctaccttctctagctccaataaccccgtggatgctttggattggttgcatgccgtggggaaaaagttagacaccgtgcagtgcaacgatgaggagaaagtcatctttgccgctcaccaactgcaggggcccgcatctctatggtgggaccacttctaggctacgcagccagaaggacagcctattacttgggcccgcttcaccgccgctttccggaggacccatgtgcccgccggagtcatgacccttaagaaaagggaattccgagagttgaagcaaggcaactgctctgtgatggagtatttgcatgagtttaacaacctggcccggtacgccccggaggatgttcgtgaagatgaggagaagcaggagaagttcttggcaggaatggaccctgagctgtccgtgcatatggtctccggggattatccggatttccagcgtttggcggacaagagcatccgcttggaagccaagcacaaggaactggagtcacacaagcgtcgcttggcaaatttccgcaatcaacagggggctaaccaaaggatccgctacaccaatccctatccagggggatcctcctcgtagcagcagcagcagcaaccacgctccgcgctccgacctcaattcgtggtgcgcgtcccacagccgcagcaacagcagagccagcaagggacccgtgcgccccgtcctcctacgccagccgtgcagcctggacaaggccgcagagacgttcatggtcagcagcgtctgtgcttcaactacttcgagcccgggcactttgcggataaatgcccaaagccgaggcgccagcaaggccaagcgcctccccgccccaacaacggtggtaaggatgtcattcggggtcgtgtgaaccacgtgactgccgaggatatgctgacaactccaggcgttatcgtgggtacgttcctcattcattccatccctgctaccattttgttcgactctggagcttcccactcgtttatatctgtgccattcgtggggagaaatcagttgggggtagaaaggcttaggaaccctctgctcatcaccacccctggaggggttatgacagcaaagtattatagccctgccgttcctatagaaatccagggaatcctttttccctcagatttgattcttctggacaccaagaacttggatgtgatccttgggatgaaatggttggctcaattccaaggagtagtggattgcgcaagacgcactgtcactctgtaccgagggccggaacaaccggttgttttctttgcgcccccaacctctgccagtagttcagaacttcatcagataggactgtcagaaatccccatcgtcagagagttcggagacgtgtttccggaagaactactcggtatgccgcccaagcgagagattgagttccggatagatcttgctccaggaaccactcctctgtacaagcgaccctaccgtatggcagcaaatgaactggccgaagtcaagaaatagttggaagagttaaaagaaaaggggtatatacggccgagcacttccccctagagtgctcccgtgatttttgtggagaagaaagacaagacaaagcggatgtgcgttgactacagagctctcaatgaagttactatcaaaaacaagtaccctcttccccggatcgatgatctcttcgatcagcttaaaggtgccactgtcttttctaaaattgatcttcgttccggatatcaccaattgcgtatccgtgaagaagatattccgaagaccgcattcacctcgcgttatggactgtatgaattcacggtgatgtcgttcggtctgaccaatgctcctgccttcttcatgaacttaatggacaaagtgttcatggaaaacttggataagtttgtggtggtctttattgacgacatcctgatgtactcacaatcagaggaagaccatcagcagcatctccgtctggtgttgggaaagttgcgggaacatcaattgtatgccaagcttagcaagtgtgagttctggttgtccgaagtcaaattcttagggcacgtgatatccgctaaaggagttgctgtggaccccgaaacggtgaccgccgtcactaattggaagcaacccaagacagttactcaggttcgcagctttttgagtatggcaggatactaccgaagattcatcgagaatttctccaaaattgccagacccgtgacgcagttgctgaagaaggaagaaaaatttgtgtggagcccgcaatgcgagaaagcattccaaactctcaaagaaaagctggtttcctcgccagtgttaatcttaccggatactcgtaaggacttcctggtgtactgtgacgcttcgcgccgaggattggggtgcgtattaatgcaggaaggtcatgtggtagcctatgcctcacgccagctacggccccatgaaggcaactaccctacccatgatttggagttatccgctgtggttcatgctctaaagatctggcggcactatctcattgtgaatcgctgtgaaatatatattgatcataagagtttgaaatacatcctcactcagtcggatctgaatcttcggtagagaagatggttagaactcatcaaggattatgatgtgggaatccactatcatcctagtaaggccaacgtggtcgccgacgctctaagtcgaaaaagccattgcaacactcttggcgtccgtggcattccaccgaaacttaatcaacagatggaagccctgaacctaagcatagttggtcgtggattcttggctacactggaagccaagcctaccttgctcgatcaaatccacgaggctcagaagaatgatccggatatgcgtggactcctcaagaatatgaaacaaggtaaagccactggtttcacagaggatgaacatggaacccaatggaacggaaatcggcatgtcaaggcagagcaccaacgaccggccggacttctccaacctctccaagtaccagaatggaaatgggatgaaattgggatggatttcatcaccggacttccaaaaacccaaggcggatatgattctatgtgggtagtcgtggaccgactaaccaaggtagctcggtttattcctatgaagaccacctatggaggaaacaaattagctgaactctacttcgctaggatcgtgagtctccatggcgttcccaagaaaattgtatctgatcagggaagccagttcacctctcatttctggaagaaactccaagaagagttgggtacccgattaaatttcagcaccgcgtatcacccgcagacagatggacagaccgagcgtctgaaccagatcctcgaagatatgcttcacgcatgtgtcctagattttgggaagacctggggtaagagtctcccttatgccgagttctcctacaataacagctaccaagccagcatacaaatggcaccctatgaagcgcgttgtatggccgcaaatgccggacaccgctattgtgggaccaagttggggaaagccaagtgttcgggaccgatatactgagagaagctgaagctaaagtcagaaccattcgggataatctaaaggtggcacagtctcggcagaagagttatgcagacaaccgacgtcgtaacctggaattcgcagtggatgattttgtgtaccttcgggtcacgccattgcgaggcgtacacaggtttcagataaaagggaagctcgcaactcggttcgtgggtcctttccgtatcattgctcgacgcggagaagtcgcttaccagttggagctgcccgcatccttgggcaacgtgcaagatgtgttccatgtgtcgcaactcaagaaatgccttcgagtgccatccgagcaggccgattcagagtaaattgaagttcgcgaagacttgacctacgtggagaggctagtgaaaatcctggacaccatggagcgcaggaccaggaaccgggtaatccgtttttgcaaggtccaatggagcaaccacgctgaggaagaagctacttgggagcgtgaagacgagctgaaggcagtccatcccgatctcttcgccggttcttctgaatctcggggttgagattccgtt

SEQ ID NO: 14776 - DNA, 4905 bp, Oryza sativa
  Clone ID: TFbOSC400231j.C1.o31.fg
atgacaactttagcaccttgtgccaaacattatacaccaaaaggcctaaccactctccttcaaaccaatcctaataacagacatactatccccaaaaccctgaaatgggatgagatcaccctgcctgagaaatgggttttatctcaagctgttgaacctaagtctatggatcagtcggaagtcgaatccttgattgaaacactagacggagatgttgagataacatttgcttcaaaacaaaaagcctttctccagtctagaccttctgtcagtctagattctaggcctaggacaaaacctcaaaatgttgtctatgctacctatgaagacaactccgacgaaccttcaatctcagacttcgatatcaatgttatcgagcttgatgttggctttgttattgctttagaagaagaagaatttgaaattgacaaagaattgcttaggagagaaataaggctccccaaaaatagagctaagactaaaagataccttgaagaagttgacgaatcattcagaatgaagataagagaagtttggcataacgaaatgagagaacaaaggagaaatattttcttctttgactggtacgagaatagccagattatacacttcgaagaattcttcaaaagaaaaaacatgataaaaaaagagcaaaaatccgaagcagaagatttaactgttatcaagaaggtttctacagaatgggagacagccagtggaaacaaggtagactctgttcatcctccatttgaatccattcaattatctcataatggaggaaaagcttgtccactaaaaagtatttctaaaaatacatatggagaaacagcaaaggttgaacacataggacatttggtagaacaacaaaattatgcaaatatatctctacgttctcttggtcaacaaacagatcgaatagagacaatccttatggaaggctacaaaacaggaagacctgaggtaaaaataaatattccttctaattctcagtcttctagttctcagtctgttagtcctatgtttgtcccaacaattgatcctaacatcaaatttggaaaacaaaaggcttttggacccgcaatctctgaagaactagtcaatgagctagccttaaaactaaataatttaaaagtaaataaaaacatcaatgagatttctgataatgagaaatatgatatagtcaacaagatttttaaaccttctactcttacttccacaactaggaattattaccctcgaccaacttatgcagacctacagtttgaggaaatgcctcagattcaaaatatgacttattacaatggcaaagaaattgtagaatggaacctagatggctttactgaatatcaaatctttactttatgtcatcaaatgattatgtatgctaatgcctgcatagctaatggaaacaaagaaagagaagctgccaatatgattgtcattgggttttctggtcaattaaaaggatggtggaataattatttaaatgaaactcaaagacaggagattctttgcgcagttaagagggatgatcaaggaaggccattacctgatagagatggtaatgggaatccaaccggtaacatttctgatgccttagccactctaatctataacataatttatcactttgctggaaactatcatgatatctatgaaaaaaatagagaacaattgataaatttaaaatgtaaaacaatgtcagattttagatggtataaagatactttcttgtcaaaactatataccctaccagaacctaatcaagacttttggaaagaaaaatatatttctggtttacctcctttatttgctgaaaaggttagaaattccctaagaaaagaagggggagggagtataaattatcactatctagatattggaaaaatcacacaaaagatacaattagtaggggctgagctttgcaatgacctaaaaatcaaagatcaactcaaaaaacaaaggattcttggtaaaagagaaatgggagatttttgctatcagtttggttttcaagatccttatgtctatagaaaaagaaaaacccattccaaacccatgacaaaaccaaatgataaaagcaagatgagctttcaagctaccaaaaggaaaccaaaaagaatttacaataagaatataagaacacaagacactgaaagcaaagaaaccatttgttacaaatgtggcttgaaaggacacatagctaacagatgtttcaaatccaaagttaaaaaagagatccaagccttgttagattcagaatcagaagacgttaaagaaaaacttgaagcaatactaaataatatagacaatgacttaagttcagatgaagaaaaaaatgcagaaattaattgttgccaagacagtggttgctcttgttgtgagccagataattcagaagaagagtctgatgaaaatatactcgttttaaccagtttagaagaatttgttctcgatacttttgaaaccattcaagatccagaagaaaaaagaagagtcctcgaaaaattcctttcaagagtcaaaactgataaggataaactaaaaaaggatattcaaaagagcaaattcctctctattgatgaagtgtttaaaaggttagatgaacagaaaaagaagaatgagcaaccagatttgatcagcctattcgaagaccaaaaaattatgaaacaagatttagaagaaataagaaagcgtctatacatgttagaatcaaaagaaggattccatatggaagaaaaggacgaaccaattcaagaagatgatcatgttgttggaaccattcaaaaatatatgaagcaaaaatggtacacagaagttatgtatcgttttatagacggatcctacttccagcatattactttaattgattctggtgctgatgtcagttgcattcgagaaggtattatccctcataaatatttctataaagccgcccacagaattcgtggggcagatggaaggcttttaacagtagaatatcaaatccctgaaatctatatttgcatatctgaagtttgcattaaaacatctttcctactcgttaaaaatcttaagcaagatgttattttaggaacaccatttttatcacttattcgtcctttccttgtcacgaacgaagatattcaatttaagataatggacaaacaggtgagcctaagattttcgtctaacacagatgagattcttgaccagcttattcagaccaagagagaacaagttgtgaatacaatatatttacatgacaattctttcccatcatatcttccaaaatctatggacttgccaggtaagacgtcatgggaagatagatatttattaaaagctactaaagattttgaatatatatgcagggaaatggcttcacagaagtctgaatggctcacgaatatgagttcatggagactgccccaactgcccagaggccatggagaacgatttaatcacaacttcagagtaacagagctacaacaagggttattaaacctcttgtggcagacaaaaaacaaaaaagaaaaagctcatgccttaaatggcctggcatattatttcaaaaatttcgtgccctcagatcaaaagataacagaaaaaagggctaaaatacaagatatccctcatcatgaggagatgttactagattatcgcgaggaaaaatcccgtgatggccaagataaacttcccatggaagttgaacaatctatggcaacagataagaataccaaggtattctcagataagattttgatctcaacagatcctgcttcgagcatggttgctttccacataaatatcaataacctattgcaatcttttccacataataaaccatcatcatccacaaaaaggcatgataccattccccaaacaccatacatactgcataatcatcccaattcattccttccacaatatatactccggacccagccaaaagcaccatgtagatcttgtgcctacaaagattcttgccaaaagaaacttaaaagccaaaatcccatgagtactacatacgaaaatctccagcccagattaagcttcaaaacggagcaaaccttatcctgctttgggcaagacatcctcgatcttgtttggcacaagtttaaggagagacaaatgaaaatattccttggactccaagattatttctttgatctcttagaagggagagaaagaaacccagccatacgagtaatcatatatatgctccctctcttaaggctagatgatcaggcaatctctgacccatcctatagattcctggttctcaaagctgagataaatcttcaaagattccggaacctacccacatacaaccatgaagaaatatctctccaaaccattatagatcatggtcttgtgaattccatctatgcaaccctcgatcagatccttcaatctgatttaggaaacgctgtgaaagatatctgcaggagacttggacatggaagatacagaattatcttctcctcaataccaccaaaattcacaccacctgttcgtccagcaattcattatatatatatcatgaatagacaatttaattttcaagaagacggtcctagcaaactatcggatgaagaggaagaaatatatacaacaattgctaatcatgaaaattggagattattttctgaagctgcagaaattgaagaagctatcaccacagattatgaatatcagctggttttccaaaacaagatcacaaggatttttatcagcaaattctacaaccaaagttatgaatacttcaagggagcagggcacataattaaaccggattttggaaatgaatgctccaagaaaagttactacagaagcctggctcagtggtttcagaaaacagagccatcagagatcgacacggtgcaatcagcacccatgataatcaacgaagataatgaataa

SEQ ID NO: 14777 - DNA, 3615 bp, Oryza sativa
  Clone ID: TFbOSC401054j.C1.o45.fg
atggacaacaagatttttaaaccttctactcttacttccacaactaggaattattaccctcgaccaacttatgcagacctacagtttgaggaaatgcctcagattcaaaatatgacttactacaatggcaaagaaattgtagaatggaacctagatggctttactgaatatcaaatctttactttatgtcatcaaatgattatgtatgctaatgcctgcatagctaatggaaacaaagaaagagaagctgccaatatgattgtcattgggttttctggtcaattaaaaggatggtggaataattatttaaatgaaactcaaagacaggagattctttgcgcagttaaaagggatgatcaaggaaggccattgcctgatagagatggcaatgggaatccaactggtaacatttctgatgccttagccactctaatctataacataatttatcactttgccggaaactatcatgatatctatgagaaaaatagagaacaattgataaatttaaaatgtaaaacaatgtcagattttagatggtataaagatactttcttgtcaaaactatataccctaccagaacctaatcaagacttttggaaagaaaaatatatttctggtttacctcctttatttgctgaaaaggttagaaattccctaagaaaagaagggggagggagtataaattatcactatctagatattggaaaaatcacacaaaagatacaattagtaggggttgagctttgcaatgacctaaaaatcaaagatcaactcaaaaaacaaaggattcttggtaaaagagaaatgggagatttttgctatcagtttggttttcaagatccttatgtctatagaaaaagaaaaacccattccaaacccatgacaaaaccaaatgataaaagcaagatgagctttcaagctaccaaaaggaaaccaaaaagaatttacaataagaatataagaacacaagacaccgaaagcaaagaaaccatttgttacaaatgtggcttgaaaggacacatagctaacagatgtttcaaatccaaagttaaaaaagagatccaagccttattagattcagaatcagaagacgttaaagaaaaacttgaagcaatactaaataatatagacaatgactcaagttcagatgaagaaaaaaatgcagagattaattgttgccaagacagtggttgctcttgttatgagccagataattcagaagaagagtctgatgaaaatatactcgttttaaccagtttagaagaatttgttctcgatacttttgaaaccattcaagatccagaagaaaaaagaagagtcctcgaaaaattcctttcaagagtcaagactgataaggataaactaaaaaaggatattcaaaagagtaaattcctctctattgatgaagtgttcaaaaggttagatgaacagaaaaagaagaatgagaaaccagatttgatcagcctattcgaagaccaaagaattatgaaacaagatttagaagaaataagaaagcgtctatacaggttagaatcaaaagaaggattccatatggaagaaaaggacgaaccaattcaagaagatgatcaggttgttggaaccattcaaaaatatatgaagcaaaaatggtacacagaagttatgtatcgttttatagacggatcctactttcagcatattactttaattgattctggtgctgatgtcaattgcattcgagaagtctgcattaaaacatctttcctactcgttaaaaatcttaagcaagatgttattttaggaacaccatttttatcacttattcgtcctttcctagtcacaaacgaagatattcaatttaagataatgggcaaacaggtaagcctaagattttcgtctaacacagatgagattcttgaccagcttgttcagtccaaaagagaacaagttgtgaatacaatatatttacatgacaattctttcccatcatatcttccaaaatctatggacttgccaggtaagacatcatgggaagatagatatttattaaaagctactaaagattttgaatatatatgcagggaaatggcttcacagaagtctgaatggctcacaaatatgagttcatggagactgccccaactacccagaggccatggagaacgatttaatcacaatttcagaataacagagctacaacaagggttattaaaccttttgtggcagacaaaaaacaaaaaagaaaaagctcatgccttaaatggcctggcatattatttcaaaaatttcgtgccctcagatcaaaagataacagaaaaaagggctaaaatacaagatatccctcatcatgaggagaggttactagattatcgcgaggagaaatcccgtgatggccaagataaacttcccatggaagttgaacaatctatggcaacagataagaataccaaggtattctcagataagattttgatctcaacagatcctgcttcaagcatggttgctttccacataaatatcaataacctattgcaatcttttccacataataaaccatcatcatccacaaaaaggcatgataccattccccaaacaccatacatactgcataatcatcccaattcattccttccacaatatatactccggacccagccaaaagcaccatgtagatcttgtgcctacaaagattcttacaaaaagaaacttaaaagccaaaatcccatgagtactacatacgaaaatctccagcccagattaagcttcaaaacggagcaaactttatcctgctttgggcaagacatcctcgatcttgtttggcaaaagtttaaggagagacaaatgaaaatattccttggactccaagattatttctttgatctcttagaagggagagaaagaaacccagccatacgagtaatcatatatatgctccctctcttaaggttagatgatcaggcaatctctgacccatcctatagattcctggttctcaaagctgagataaatcttcaaagattccggaacctacccacgtacaaccatgaagaaatatctctccaaaccattatagatcatggtcttgtgaattccatatatgcaaccctcgatcagatccttcaatctgatttaggaaacgctgtgaaagatgtctgcaggagacttggacatggaagatacaggattatcttctcctcaataccaccaaaattcacaccacctgttcgtccagcaattcattatatatatatcatgaatggacaatttaattttcaagaagacggtcctagcaaactatcggatgaagaggaagaaatatatacaacaattgctaatcatgaaaattggagattattttctgaagctgcagaaattgaagaagctatcaccacagattatgaatatcagctagttttccaaaacaagatcacaaggatttttatcagcaaattctacaaccaaagttatgaatacttcaagggagcagggcgcataattaaaccggattttggaaatgaatgctccaagaaaagttactacagaagcctagctcagtggtttcagaaaacagagccatcagagatcgacacggtgcaatcagcaccaatgataatcaacgaagataatgaataa

SEQ ID NO: 14778 - DNA, 4590 bp, Oryza sativa
  Clone ID: TFbOSC401341j.C1.o21.fg
atggcacagggccggtgtcctgctgctaggggctcagtcctgcctacctgtcccgggggtccggccgtaggtgggattgggtcggtactcttgtctatggctaggatgggttggaaactatgtcacgtcttccgtctgtttaccgtggtgatggccggcagcatcaaccgccgtggtctggacctgactggcttcgttttggagctgcggggcatgtgcgttgtcctggggtatccgcatggagtggactaccagtgcaggcagctcccggagcaggagggtgacgatgcagagcgccacgctgcttgggaggttactgcagtgatcctcactggctcacccgagaggacttcgttggcagtcaccgcaggtggagattctttctccgccgcttgccagaacgccgcactcctcgccatcggcacacttcaccagcgctacccggacgagttgcagcactcgccctaccgctaccaccctcgccgcggaggagcccgcgattacgccatcttccgggatgctagctcggaggatgacgctaccatcatgcacctggcgcgcatggtggaggcgtacgacgcggcccgtatcgacttccatcagatggtgcgccgtgggatggtcaagaacaacatgaagatcctggagctgcgtcaggagaatctgcagctgaagaaagacctagatgcagtggaggcgcagctgcatcagctcaagatcgcccagggagagatggtgacgaccaggagaagtgctaataccggtgatggcaatcaacccaaaggcagcaaccacaacaaccatggcagcccacctccacctcctcccccgcctcctccaccaccaccagacaccaacgccatcctcacccaaatcctagcccagcaggccaacatgatggctgctttcctccaccacatccaaaatccgccacaacataatgctccaccaccacccccacaacactctaaactcgccgagttcctccgcatccgtccaccaaccttctctagctccaataaccccgtggatgcgttggattggttgcatgccgtggggaaaaagttagacaccgtgcagtgcagcgatgaggagaaagtcatcttcgccgcccaccaactgcaggggcccgcgtctctatggtgggaccatttccaggctacgcagccagaggggcagcctattacttgggcccgcttcaccgccgctttccggaggacccatgtgcccgccggagtcatggcccttaagaaaagggaattccgagagttgaagcaaggcaaccgcttcgtgatggagtatttgcatgagtttaacaacttggcccagtacgccccggaggatgttcgtgaagatgaggagaagcaagagaagttcttggcaggtatggaccctgagctgtccgtgcgtctagtctccggggactatcaggatttccaacgtctggtggacaagagcatccgcttggaagccaagcacaaggaactagagtcgcacaagcgtcgcttggcgagtttccgcaaccaacagggggctaaccaaagggtccgctacaccaatccctatccagggggatcctcctcacagcagcagcaacagcagcagcaaccccgctccgcgccccgacctcaattcgtggtgcgcgtcccacagccgcagcaacagcagagtcagcaagggactcgtgcgccccgtcctcctacgccagctgtgcagcctggtcaaggccgcagggacgctccaggtccgcagcgtctgtgcttcaactacttcgagcctgggcactttgcggataaatgcccaaagccgaggcgccagcaaggccaagcgcctccccgccccaacaacggtggtaaggatgtcaatcggggtcgtgtgaaccacgtgacggccgaggacgtgctgacaactccagacgtcatcgttggtacgttcctcattcattccatccctgctaccattttgttcgactctggagcttcccactcgtttatttctgtgccattcgtggggagaaatcagttgggggtagaaaggcttaggaaccctctgatcatcaccacccctggaggggttatgacagcaaagtattatagccctgctgttcctatagaaattcagggaattccttttccctcggatctgatccttctagacaccaagaacttggatgtgatccttgggatgaattggttggctcaattccaaggagtagtggattgtgcaagacgcactgtcactctgtaccgagggccggaacaaccggttgttttctttgcacccccaacctctgtaggcagttcagaacttcatcagataggactgtcagaaatccccatcgtcagagagttcggagacgtgtttccggaagaactacccggtatgccgccgaagcgagagattgagttccggatagatcttgctccaggaaccacccctcagtacaagcgaccctaccgtatggcagcaaatgaactggccgaagttaagaaacagttggaagagttgaaagaaaaggggtatatacggccgagtacctccccctggggtgctcctgtgattttcgtggagaagaaagacaagacgaagaggatgtgcgttgactacagagctctcaatgaagtcactatcaaaaacaagtaccctcttccccggatcgatgatatgttcgatcagcttaaagctgccactgtattctccaagattgatcttcgttccggatatcaccaattacgtattcgtgaagaagatatccctaagaccgcattcaccacgcgatacggactgtatgaattcacggtgatgtcattcggtttaaccaatgctcctgccttcttcatgaacttaatgaacaaagtgttcatggaatacttggataagtttgttgtggttttcattgatgacattctggtgtactcacaatcagaggaagaacatcagcaccatctcagtctggtgttgggaaagttgcgggaacatcaattgtatgccaaacttagcaagtgtgagttctggttgtccgaagtcaaattcttagggcacgtgatatctgctaaaggagtcgctgtggaccccgaaacagtgaccgccgtcactgattggaagcaacccaagacagtcactcaaattcgcagtttcttaggtttggtaggatactaccggaggttcatcgagaacttctccaaaatcgctcgacccatgacacagttgttgaagaaagaagagaaatttgtgtggagcccgcaatgcgagaaggcgttccaaactctcaaagaaaagctggtttcctcgcaagttttaatcttaccagatactcgcaaggacttcatggtgtattgtgatgcttcgcgtcaaggattggggtgcgtgcttatgcaggaaggacatgtggtagcctatgcctcacgccagctacggccccatgaaggcaattaccctacccatgatttggagttagccgctgtggttcatgctctaaagatctggcggcactatctcattgggaatcgctgtgaaatatatactgatcataagagtttgaaatacatcttcactcagtcggacctgaatcttcggcagaggagatggttagaactcatcaaggattatgatgtgggaattcactataatcctggtaaggccaacgtggtcgccgacgctctaagccgaaaaagccattgcaacactcttgacgtccgtggcattccacctgaacttaatcaacagatggaagccctgatcctaagcatagttggtcgtggattcttggctacgttggaagccaagcctaccttgctcgatcaaatccgcgaggctcagaagaatgatccggatatgcgtggactcctcaagaatatgaaacagggtaaagccgctggtttcacagaggatgaacacggaaccctatggaacggaaatcgggtatgcgttccagacgacaaggaacttaaacagctaatacttcaggaagctcacgaaagtccttattccatccaccctggcagtacgaagatgtacttagacttgaaagagaaatactggtgggttagtatgaagcgggaaattgcagagttagtggccctttgtgatgtgtgccagcgtgtcaaggcagagcaccaacgaccggccggacttctccaacctctccaagtaccagaatggaaatgggatgaaattgggatggatttcatcaccggacttccaaaaacccagggcggttatgattctatatgggtagtcgtggatcgactaaccaaggtggctcggtttattcatgtgaagaccacctatggagggaacaaactagccgagctctacttcgctaggatcaaatgccttcgagtgccgcccgagcaggccgactcagagcagattgaagttcgcgaagacttgacctacgtggagagaccagtgagaatcttggacaccatggagcgcaggaccaggaaccgggtaatccgtttttgcaaggtccaatggagcaaccacgccgaggaagaagctacttgggagcgtgaagacgagctgaaggcagcccatcccaatctcttcggcagttcttccgaatctcggggtcgagattccgtttaa

SEQ ID NO: 14779 - DNA, 5561 bp, Oryza sativa
  Clone ID: TFbOSC401344j.C1.o2.np
atggcggccgggtcttccgcgcccgtttccccttcgtccggccgccctctctcaccccccaccctatataaccctccccgagctccccaccaccgtttccgccactcaccgccctctctccccgccggaatcgagctcgcgccgtcgctctctctctccgccgtcgccgccgagctccggtctgccaccgtcgtcgccccggaccacctcccacctcggcgccgcctccttcggcttcgccgcatcctcgccgacctcgtccacctctccgtttcggtcgccgaccgccggagcaccgtcgaccccgtccacccgagccgcgccgccgccttcctccgctccggtcgccgtttccgtcgtcgccgtcgacccggggtgagccgtggaccgccgcttcgtttccccctttccctcccctctctcggccgccgctccgccgtgcctatggccgccgccggcgaccataggggcgcgggcgcgccgcctcccgccgctgcgccggcgtggccgcctccgggcgtgcctagcggctgccgcgtggggcccggctgtcagccgcccgcgcccttaggtgcggctgacgcgtgggacccatggcgccggccggtgtgagccctggtgcgcccggtccaccttggacccacctcggccatataaggaccggtcttcgggcctctgttgcaaagcactaccgtacttccacatgtctagtgggacaaatgaaggctacacgagctgcggcccggtagtcgagatgtcatggcacagggccggtgtcctgctgctaggggctcagtcctgcctacctgtcccgggggtccggccgtaggtgggattgggtcgatgtacacctctgatcagagtataacctattcgaatagccgcgccctcggttatgggcaagccgagcaatgtacccaaatggccggcagcatcaaccgccgtggtctggacctgactggcttcgttttggagctgcggggcatgtgcgttgtcctggggtatccgcatggagtggactaccagggcaggcagctcccggagcaggagggtgacgatgcagagcgccacgctgcttgggaggttactgcagtgatcctcactggctcacccgagaggacttcgttggcagtcaccgcaggtggagattctttctccgccgcttgccagaacgccgcactcctcgccatcggcacacttcaccagcgctacccggacgagttgcagcactcgccctaccgctaccaccctcgccgcggaggagcccgcgattacgccatcttccgggatgctagctcggaggatgacgctaccatcatgcacctggcgcgcatggtggaggcgtacgacgcggcccgtatcgacttccatcagatggtgcgccgtgggatggtcaagaacaacatgaagatcctggagctgcgtcaggagaatctgcagctgaagaaagacctagatgcagtggaggcgcagctgcatcagctcaagatcgcccagggagaggtctgtcgccccaagcgtcgccgcgtctaccgcagccagaagatcaccgcccgcaagagcacctccaggcccgagcttgttcgccagtccttggcatgaaccagcttcgtggagacccctcgtgccgagcccgcgcccgtggttcctcaggagggggaagcctccggcgttggtagcacggaggatgcgctgctgctcaccttccatggtgacgaccaggagaagtgctaataccggtgatggcaatcaacccaaaggcagcaaccacaacaaccatggcagcccacctccacctcctcccccgcctcctccaccaccaccagacaccaacgccatcctcacccaaatcctagcccagcaggccaacatgatggctgctttcctccaccacatccaaaatccgccacaacataatgctccaccaccacccccacaacactctaaactcgccgagttcctccgcatccgtccaccaaccttctctagctccaataaccccgtggatgcgttggattggttgcatgccgtggggaaaaagttagacaccgtgcagtgcagcgatgaggagaaagtcatcttcgccgcccaccaactgcaggggcccgcgtctctatggtgggaccatttccaggctacgcagccagaggggcagcctattacttgggcccgcttcaccgccgctttccggaggacccatgtgcccgccggagtcatggcccttaagaaaagggaattccgagagttgaagcaaggcaaccgcttcgtgatggagtatttgcatgagtttaacaacttggcccagtacgccccggaggatgttcgtgaagatgaggagaagcaagagaagttcttggcaggtatggaccctgagctgtccgtgcgtctagtctccggggactatcaggatttccaacgtctggtggacaagagcatccgcttggaagccaagcacaaggaactagagtcgcacaagcgtcgcttggcgagtttccgcaaccaacagggggctaaccaaagggtccgctacaccaatccctatccagggggatcctcctcacagcagcagcaacagcagcagcaaccccgctccgcgccccgacctcaattcgtggtgcgcgtcccacagccgcagcaacagcagagtcagcaagggactcgtgcgccccgtcctcctacgccagctgtgcagcctggtcaaggccgcagggacgctccaggtccgcagcgtctgtgcttcaactacttcgagcctgggcactttgcggataaatgcccaaagccgaggcgccagcaaggccaagcgcctccccgccccaacaacggtggtaaggatgtcaatcggggtcgtgtgaaccacgtgacggccgaggacgtgctgacaactccagacgtcatcgttggtacgttcctcattcattccatccctgctaccattttgttcgactctggagcttcccactcgtttatttctgtgccattcgtggggagaaatcagttgggggtagaaaggcttaggaaccctctgatcatcaccacccctggaggggttatgacagcaaagtattatagccctgctgttcctatagaaattcagggaattccttttccctcggatctgatccttctagacaccaagaacttggatgtgatccttgggatgaattggttggctcaattccaaggagtagtggattgtgcaagacgcactgtcactctgtaccgagggccggaacaaccggttgttttctttgcacccccaacctctgtaggcagttcagaacttcatcagataggactgtcagaaatccccatcgtcagagagttcggagacgtgtttccggaagaactacccggtatgccgccgaagcgagagattgagttccggatagatcttgctccaggaaccacccctcagtacaagcgaccctaccgtatggcagcaaatgaactggccgaagttaagaaacagttggaagagttgaaagaaaaggggtatatacggccgagtacctccccctggggtgctcctgtgattttcgtggagaagaaagacaagacgaagaggatgtgcgttgactacagagctctcaatgaagtcactatcaaaaacaagtaccctcttccccggatcgatgatatgttcgatcagcttaaagctgccactgtattctccaagattgatcttcgttccggatatcaccaattacgtattcgtgaagaagatatccctaagaccgcattcaccacgcgatacggactgtatgaattcacggtgatgtcattcggtttaaccaatgctcctgccttcttcatgaacttaatgaacaaagtgttcatggaatacttggataagtttgttgtggttttcattgatgacattctggtgtactcacaatcagaggaagaacatcagcaccatctcagtctggtgttgggaaagttgcgggaacatcaattgtatgccaaacttagcaagtgtgagttctggttgtccgaagtcaaattcttagggcacgtgatatctgctaaaggagtcgctgtggaccccgaaacagtgaccgccgtcactgattggaagcaacccaagacagtcactcaaattcgcagtttcttaggtttggtaggatactaccggaggttcatcgagaacttctccaaaatcgctcgacccatgacacagttgttgaagaaagaagagaaatttgtgtggagcccgcaatgcgagaaggcgttccaaactctcaaagaaaagctggtttcctcgcaagttttaatcttaccagatactcgcaaggacttcatggtgtattgtgatgcttcgcgtcaaggattggggtgcgtgcttatgcaggaaggacatgtggtagcctatgcctcacgccagctacggccccatgaaggcaattaccctacccatgatttggagttagccgctgtggttcatgctctaaagatctggcggcactatctcattgggaatcgctgtgaaatatatactgatcataagagtttgaaatacatcttcactcagtcggacctgaatcttcggcagaggagatggttagaactcatcaaggattatgatgtgggaattcactataatcctggtaaggccaacgtggtcgccgacgctctaagccgaaaaagccattgcaacactcttgacgtccgtggcattccacctgaacttaatcaacagatggaagccctgatcctaagcatagttggtcgtggattcttggctacgttggaagccaagcctaccttgctcgatcaaatccgcgaggctcagaagaatgatccggatatgcgtggactcctcaagaatatgaaacagggtaaagccgctggtttcacagaggatgaacacggaaccctatggaacggaaatcggcgtgtcaaggcagagcaccaacgaccggccggacttctccaacctctccaagtaccagaatggaaatgggatgaaattgggatggatttcatcaccggacttccaaaaacccagggcggttatgattctatatgggtagtcgtggatcgactaaccaaggtggctcggtttattcatgtgaagaccacctatggagggaacaaactagccgagctctacttcgctaggatcgtgagtctccatggcgttcctaagaaaattgtatctgataggggaagccaattcacctctcacttttggaagaagctccaagaagagctgggtacgcggagaagttgcttaccagttggagctgcccgcctccttgggcaacgtgcatgatgtgttccatgtgtcgcaactcaagaaatgccttcgagtgccgcccgagcaggccgactcagagcagattgaagttcgcgaagacttgacctacgtggagagaccagtgagaatcttggacaccatggagcgcaggaccaggaaccgggtaatccgtttttgcaaggtccaatggagcaaccacgccgaggaagaagctacttgggagcgtgaagacgagctgaaggcagcccatcccaatctcttcggcagttcttccgaatctcggggtcgagattccgtt

SEQ ID NO: 14780 - DNA, 4164 bp, Oryza sativa
  Clone ID: TFbOSC401549j.C1.o15.fg
atgcgggcccagccgcctaatgggctccagtctaagggccctggcgatggcctctacaagcgacaaccaaaggcgctgcttgccctagctcgtaaacagcgtcgaccaatcaaccccaagcgatcttttgcggaagtggtgcgagcgggtgagatggctggtggtggaggacgatatggcggcggccgtggtaccggcagcggcggcgatggccaggatggtgacggccgtggcggcgtgttcaatccaggcaggggagaagcggctaccgggaatggcagtggtggtgcttccggccgtggtcatcaaggccgtggcggagacagtaacagaggtccggatggtcagttcgctgtgaatctgaatgcagcaacagcatcaggtactgatgttccaagaggagagtctagggttgacatagtgactgcagaggctggcacttcttcaaaggcgtcaaaagggcgttgtttcagatgcaaggagaagagccatgctgtttcagagtgcacaaagattttgtgtgatatttgtgaagcacctgaacatactgcactttcatgcccgcttttactcgctcccaaacccacagcaagcatgtgtggatggggagttgatggtggaggctttttcatgatccccacgccaacaacaggggcagtgaaacccagggaacacaacaaaacagcaattatccgggtggagaatggccacatttctgtggacaacttgatcattgaattgcgaaggttggtgccggttaggttccaatgggatgttaaggagactgctccagacacttatatggttcaatttccctctgtgatcgaattagacaggttgcgtagggttggcagtgttcctagttttgactttaatgtgaacctagtcattgacaagtgggagcaagagattgaagcgaagtttgttctaaagaaaacttggtttaaagtttatggagtgtcatatgagattagagactttctcagtctacatgctgttggttctgtcattggtcaaacaacaactgtggacatgatttatctcaggaaaaatggtgtggttaggatgcaggtggcagttgatgagttagcagatttaccacctagtgtttacgttgttgtccgaaaccatggctatgaaatcttctttgaaccggaattgcctgaggtggatgggaaaggaaagaagaagattgatgatattgaccaggacggagaaagaaaaaatggtggtgatcatgatgttcacatggaagatagggacccaaaacgccaaaagaatggttctgatgggtcgctaaggatggaaataggaggcttagcgccagctaagctgccctcaacgcgcaccaataatatggttctagataatgaagcattttcaccgtctcctagctcagatacgcctgctacaacaacggagttggaagcgtttgcctcatactcctccgtggtgttggaaacgcccatgagtcaattgggagcccaagggacaggaaactccgagtcaaccaaggaggctgtcggtgaggtggtgtactccgacgaggtttcgacacagctagcgaagttggcaacgactaaggtactttctactgaggttgctgtgcagctagcaggaacagatgaggtggttacgaatggcaaagagcaacaacaagaacctgtcagcatggcacaagaattacagcatgtttcagctagcttcttgtctcccgtggagcatgtattggactgcaacgtgcagtctgaattgctccccaagaatagccagcttgcaggcgatggaagagtaacatcgactaagaacttgatggcagtactagcaaccaatgaagaccaacttagtgcctccagtgctgccacatctaaagcccaggatgcagcacaggcagttggagctcgatccccgacaagaaggcgacctcgtcgcccagtggaccctattccaactaggcaaagtgaaagacagaaggcgatggcaaatgcagatgcgccggtggcaaaccgggcagagctgcttaaaaaggttcataacctcgagacgctaacaggggtttctctaggaaagaatgatttagaaataaaggagtccattaaccagattaaaatttcagaagtggatagatttgctactctttatagtagtgctgtagcgtctactagtaatgtagataaaagcaatgatgaattgttaaaattgtcttctctccagcacttatgtagtgactggctagaagaggctgagagtaatgacgatgagtctatggattctcaggccatacctcaaatgaggaagatttcgaccaaagtcaaacataaagtggtcaaaaatgatttggcaaaactgttaagggacgaagagttgtattggtaccagcgatctaagacaaatcatttactccaaggggatagtaatactaaatattatcacttgatagacaatggtaaacatcgtaagcagatgattttccagttggaacaagaggacactataataacgggtgaggggaatctcaaagaatacatcaccaattattataaaggattatttggtcctccagatcataatcatgtatccatgatagagggatggactgatgatattcctcaagtgtccgacttggaaaatgacatccttactgctgaattttcagaaaaggaagtcaaagaggcaatttttcaaatggatcataactcctccctaggtccagatggctttcctgcagagttttatcaggtcttttgggagattgttaagaatgatctcatggctctatttagagaatttcataaagggacattatccctttataacctaaactttgggatcatcgcgctattgccaaaaaaggctgatgcaaatcaaattcaacaatataggcctatttgcctactgaatgtcagctttaaaatttttacaaaagtggacaccaataggattacaacggttgctcacaaagtcattcgcccaacccaaacagcgtttttgccagatagaaatatcatggaaggggtggtgattttgcatgagactgtccatgagttacacacaaagaaaatggatggtatcatattcaaaattgactttgaaaaggcttatgacaaagttaaatggcagttccttcagcagacattacgaatgaaagggttttcacaatcgtggtgcaattggatttccaactgggtggaaggaggaactgtaagtgtcaaagtcaatgataatgtaggaaaaaatttccggacacgcaaaggcttgagacaaggggatccaatgtccccaattctttttaacatagtggctgatatgttagccattcttattgaaaaagtcaaagtcgatggccaaattagaggggtaattccacacttagtggatgatggtttgtccattctccaatatgccgacgatacaataatatttcttgaacatgattttgaacaagcaaaaaacatgaaggccattctttgtgtgtttgaacatctctcggggctgaaaataaactttcataaaagtgaaattttctgctttgggggagccaaggaaatggaggaccaatatagacaactgtttggttgtaattctggttcctttccattcaaatacttaggaatccccatacactatcgaaaactcagaaattttgattggaaatgtgtggaggataggtttcaaagaaaacttagcgcatggaagggcaaaaacagctcctatggtgggagattggttcttcttaacttggttctttcgagtcttcccatgttcatgttatccttttttgaaatacctcgaggtgtacttcaaagactagattactaccgatcgagctttttctggagcagtgatagccagaaaaagaaatataagttaacaaaatgggattatatatgccggccaaaagatcaaggtggactgggtgtcctaaatcttgatatcatgaatagatgtttgttgagcaaatggctattcaagcttcttaatggtgatggcctatggcaaaaccttttgcgcaacaagtacttaaagggttatcttcatgtgttccaattggctccactcttggtgtatgatgctttcacaggaacaacaggatactatgcgcaatggtgctacacgcttggaaatagtagccaaggaacttttatttcattttggatggcgtag

SEQ ID NO: 14781 - DNA, 2914 bp, Oryza sativa
  Clone ID: TFbOSC409046j.C1.o3.np
atggcatgttcagaggataatgatgaggagggtgcgtttcattccccacgcaccaaaggcatcataaaatattttacaaggcaagttaagtagcacaaagaaggacttgatgctgatttgcaggtgacaaatgagaagaatggacaattggagtccacacagatcgccaccaacatcaagcttacagggttggagacatcgatcgcttgcattaacactagccttgctgctcttgtgaggcattttgatgatctcaatgctagaggtaatggtcgacgtaatgaagacggcattgaggatgaatatacgctgacactaaacaagatgatcgagatgctcttgatcgttgacaactacgcaataatcatagaggtatgggtggtcaccgccaacgcaaggtacgcaataatgatgatgtttttttttctaaaattaaatttaagatacctcctattgatggaaaatatgatcccgatgcgtacctttcttgggagattgttgttgaccaaaaatttgcatggcatgattttcctgagaattctaaagttactagttagttcactgatttttcttcggtttggtgaatagaacatggcaagaaaaatcctaataacatgccacaaacttgggatgcttttaaacgggtcatgcgggcatgatctgctccttactttgcgtgtgatttgttgaataggttgcaacaattgagacagggtgtgaaaagtataggggaatattatcaggaattacaaatgggcatgcttcgttgtaatttagaggaaactgaggacgctgctatggctagatttttgggtggtttaaatggtgagatttatgacatcgtagactacaaagattacactaatatgactcgattgtttcatcttgcttgtaaagctgaaagggaagtgcaggtaaatctacattatgataggcaggcaccacttctccggccggccgtactccttcctcatcttccacacccacacccagtcgagcagcacctcctccatccagtaacaagccacgtggccctcctgcaagttcaacgacaaaggctgtttagctagccgcgagtgcttcttcaattgcatccacgggtaaaacaagagatgttcagtgtcaccattgcaagggctttgggcacatgcagcgtgactaccctagcaagcatgttttggtagtcaaaaatgatggtgaatatttgtctactagtgatttcgatgaggatacacttgctttgcttgcagctgaccatgcaaataatgaggagccgccagaagagcatattagggctaatgatgcagagcactatgagaacctcattgtgcagcgtgtcctcagtgcacaaatggagaaggcggagcaaaatcactgacacacattgtccaaacaatgtacgtcatcaaagagcgttcttgctgcatgatcattgatggaggtaactgccacaattgctagcagcgagatggtggagaagcttgcacatagcaccaaacctcacccacatccatagtacatccaatggttgaacaacagtggtaaggcaaaggtaacaaaactggtgcgcgttaattttgcaattggaaattaccatgatgttgttgaatgtgatgttgtgcctatgcaagcatgtaggggtgaaatcgggtcaggttgggtcggatctcacccttcccgtatcctaacccacattttgcaatcggaatcgggtcaaatacgaatagtgtcgaatacggatacaaactcggataatatctggcacaaatatgaaatggatttgtaccaaaacatatatacgctatcggttacgaatgtttatttggatatctagtcaaaaaaacatccctatatatccctatatattcataacgtgactatattaggccattagtatcttacaatcaacgagcttctaatgtgatattgagaaagggaaatgaatcatcggcatccgtctttaactgtcctgtgtgaagtgactagtagttgtctggctgctaaccaatgaagtggggggggggggggtggagacgaggggtatgcagcgcaacgagctcatgagtcacgacggtttccagcggacttccgactgcgggtgcattggggtgtggtgaaccgacgggtgcagtggcaatggcggagactcgacggggcgtgcaggcgacggaggatcgacgtcacgagcgttgtggagcttcaatggacgcggcagcggcatggcgacaacggtgcgtagcggcagcggagctgtgtggctatgctacctatgtgttctgtgcatgcttgggttaggctgcctggctggtggctcgtgggccatttgggcctggtggctggctctattgtgttttcgaaagttgatttgcgtagtcgatgccaccaaattcacatgaaactaggggatgaatggaaaactgctttcaaaaccaagttcaggtgatatgagtggttagtcatgccttttgggttaactaatgcacctagtactttcataagattaacaaatgaggttttgcgtgctttcattgggaaatttgtggtggtatactttgatgatttattgatttacaacaagtctatgggtgaacatcttcatcatttacgtgatgtttttaatactcttcgtgatgcacgtttatttggtaaccttgagaagtgcaccttttgcacagatcgagtttctttgcttgtctatgttgtcactttgcaggggattgaggttgatcaagccaaggtggaagccatacaagaatgccctgttccaataactatcacacaagtgcgaagtttttttaggccttgctagatcttaccattgctttgtgaaggatttcagcaccattgttgcgccattgaatgagcttactaagaagaatgttgccaccatctggaattaaaatactgccaatga

SEQ ID NO: 14782 - DNA, 4251 bp, Oryza sativa
  Clone ID: TFbOSC419191j.C1.o2.fg
atgacaactttagcaccttgtgccaaacattatacaccaaaaggcctaaccactctccttcaaaccaatcctaataatagatgtactacccccaaaaccctaaaatgggatgagatcaccctgccagagaaatgggttttatctcaagctgttgaacctaagtctatggatcaatcggaagtcgaatccttgattgaaacaccagacggagatgttgagataacatttgcttcaaaacaaaaagcctttctccagtctagaccttctgtcagtctagattctaggcctaggacaaaacctcaaaatgttgtctatgctacctatgaagacaactccgacgaaccttcaatctcagacttcgatatcaatgttatcgagcttgatgttggctttgttattgccatagaagaggatgagtttgaaattgataaagatttgcttaaaaaagaactcaggcttcaaaagaaccgacccaagatgaaaagatactttgaaagggtcgatgaaccatttagactaaagataagagaactttggcacaaagaaatgagagaacaaaggaagaacatctttttctttgattggaatgaaagtagccaagtcagacacttcgaagaattcttcaaagaaaaaaacatgatgaaaaaagagcaaaaatccgaagcagaagatttaactgttatcaagaaggtttctacagaatgggaaacaaccagtggaaacaaggtagactctgttcatcctccatttgaatccattcaattatctcataatggaggaaaagcttgtccactaaaaagtatttctaaaaatacatatggagaaacagcaaaggttgaacacataggacatttggtagaacaacaaaattatgcaaatatatctctacgttctcttggtcaacaaacagatcgaatagagacaatccttatggaaggctacaaaacaggaagacctgaggtaaagataaatattccctctaattctcagtcttctagttctcagtctgttagtcctatgtttgtcccaacaattgatcctaacatcaaacttggaaaacaaaaggcttttggatccgcaatttctgaagaactagtcagtgagctagccttaaaactaaataatttaaaagtaaataaaaatatcaatgagatttctgataatgaaaaatatgatatggtcaataagatttttaaaccttctactcttacttccacaactaggaattattaccctcgaccaacttatgcagacctacagtttgaggaaatgcctcagattcaaaatatgacttactacaatggcaaagaaattgtagaatggaacttagatggctttactgaatatcaaatctttactttatgtcatcaaatgattatgtatgctaatgactgcatagctaatggaaataaagaaaaatatatttctggtttacctcctttatttgctgaaaaggttagaaattccctaagaaaagaagggggagggagtataaattatcactatctagatattggaaaaatcacacaaaagatacaattggtgggggctgagctttgcaatgacctaaaaatcaaagatcaactcaaaaaacaaaggattcttggtaaaagagaaatgggagatttttgctatcagtttggttttcaagatccttatgtccatagaaaaagaaaaacccattccaaaccaatgacaaaatcaaatgataaaagcaagatgagctttcaagctaccaaaagaaaaccaaaaagaatttacaataagaatataagaacaaaagacactgaaagcaaagaaaccatttgttacaaatgtggcttgaaaggacacatagctaacagatgtttcaaatctaaagttaaaaaagagatccaagccttgttagattcagaatcagaagatgttaaagaaaaacttgaagcaatactaaataatatagacaatgactcaagttcagatgaagaaaaaaatgcagagattaattgctgccaagacagtggttgctcttgttatgagccagataattcagaagaagagtctgatgaaaatatactcgttctaaccagtttagaagaatttgttctcgatacttttgaaaccattcaagatccagaagaaaaaagaagagttctcgaaaaattcctttcaagagtcaagactgataaggataaactaaaaaaggatattcaaaagagcaaattcctctctattgatgaagtgttcaaaagattagatgaacagaaaaagaagaatgagaaaccagatttgatcagcctattcgaagaacaaaaaattatgaaacaagatttagaagaaataagaaagcgtctatacatgttagaattaaaagagggattccatatggaagaaaaggacgaaccaattcaagaagatgatcagcatatcactttaattgattctggtgctgatgtcaattgcattcgagaaggtattatccctcataaatatttccgtaaagccgcccacagaattcgtggggcagatggaggacttttaacagtagaatatcaaatccctgatacctatatttgcatatctgaagtttgcattaaaacatcttttctaatcgttaaaaatcttaagcaagatgttattttaggaacaccgtttttatcactcattcgtcccttccttgtcacaaacgaagatattcaatttgagataatgggcaagcaggtgagcctaagattttcgtctaacatagatgagattcttgaccagcttgttcagaccaaaagagaacaaattgtgaatacaatatatttacatgacaattctttcccatcatatcttccaaaatctatggacttgacaggtaagacatcatgggaagatagatatttattaaaagctactaaaaattttgaatatatatgcaaggaaatggcttcacagaagtctgaatggttcacgaatatgagttcatggagactgccccaactgcccagaggccatgaagaacgatttaatcacaatttcagagtaacagagctacaacaagggttattaaacctcttgtggcagacaaaaaacaaaaaagaaaaagctcatgccttaaatggcctagcatattatttcaaaaactttgtgacctcagatcaaaagataacagaaaaaagggctaaactacaagatatccctcatcatgaggagaggttactagattatcgcgaggagaaatcccgtgatggccaagataaacttcccatggaagttgaacaatctatggcaacagataagaataccaagccaaaagcaccatgtagatcttgtgcctacaaagattcttgccaaaagaaacttaaaagccaaaatcccatgagttctacatacgaaaatctccaacctagattaagcttcaagacggagcaaactttatcctgctttgggcaagacatcttcaatcttgtttggcaaaagtttaaggagagacaaatgaaaatattccttggactccaagattatttctttgatctcttagaaggaagagaaagaaacccagccataagagtaatcatatatatgctccctctcttaaggctagatgaccaggcaatctctgacccatcctatagattcctggttctcaaagctgagataaatctccaaagattctggaatctacccacatacaaccatgaagaaatatctctccaaaccattatagatcatggtcttgtgaattccatctatgcaaccctcgatcagatccttcaatctgatttaggaagcgctgtgaaagatgtctacaggagacttggacatggaagatacaggattatcttctcctccataccaccaaaattcacaccacctgttcgtccagcaattcattatatatatatcatgaatggacaatttaattttcaagaagacggtactagcaaactatcggatgaagaggaagaaatatatacaacaattgctaatcatgaaaattggagattattttctgaagctgcagaaattgaagaagctatcaccacagattatgaatatcagccggttttccaaaacaagatcacaaggatttttattagcaaatattacaaccaaagttatgaatacttcaagggagcagggcgcataattaaaccagattttgaaaatgaatgctccaagaaaagttactacagaagcctggctcagtggtttcagaaaacagagccgtcagagatcgacacggtgcaatcagcacccataataatcaacgaagataatgaataa

SEQ ID NO: 14783 - DNA, 3828 bp, Oryza sativa
  Clone ID: TFbOSC421500j.C1.o1.fg
atgtcgataaagaatgcttcatctatatcttttgaggatattgagaaaagtatttccaactggaagatccctaaggttaatattaaggaaatatatcatgtagaaagagaaatcaattctataagagctaaacatcaatatcactaccttcactttggtcttatacaagttgctatcagatccttgactagaaagggtttgaacgtctctgttctggcttgtctaagagattgcagaaataaaaggttcaaagattccttacttggcatggtggaagccagcctcagtaatggtcctgtttattttaacacctttcccgatttttctgtatccctctcagacacaaatatccataaagttctcactctcaacttacaaacatctggttatgatctagaaccagggagtgaaaacatctccgttacctacagagtttactacaaagccatgacaactttagcaccttgtgccaaacattatacaccaaaaggcctaaccactctccttcaaaccaatcctaataacagacatactatccccaaaaccctgaaatgggatgagatcaccctgcctgagaaatgggttttatctcaagctgttgaacctaagtctatggatcagtcggaagtcgaatccttgattgaaacaccagacggagatgttgagataacatttgcttcaaaacaaaaagcctttctccagtctagaccttctgtcagtctagattctaggcctaggacaaaacctcaaaatgttgtctatgctacctatgaagacaactccgacgaaccttcaatctcagacttcgatatcaatgttatcgagcttgatgttggctttgttattgctatagaagaagatgagtttgaaattgataaagatttgcttaaaagagaactcaggcttcaaaagaaccgacccaagatgaaaagatactttgaaagggtcgatgaaccatttagactaaagataagagaactttggcataaagaaatgagagaacaaaggaagaacatctttttctttgattggtatgaaagtagccaagtcagacacttcgaagaattcttcaaaagaaaaaacatgataaaaaaagagcaaaaatccgaagcagaagatttaactgttatcaagaaggtttctacagaatgggagacagccagtggaaacaaggtagactctgttcatcctccatttgaatccgttcaattatctcataatggaggaaaagcttgtccactaaaaagtatttctaaaaatacatatggagaaacagcaaaggttgaacacataggacatttggtagaacaacaaaattatgcaaatatatctctacgttctcttggtcaacaaacaaatcgaatagagacaatccttatggaaggctacaaaacaggaagacctgagaaatatgatatggtcaacaagatttttaaaccctctactcttacttccacaactaggaattattaccctcgaccaacttatgcagacctacagtttgaggaaatgcctcagattcaaaatatgatttattacaatggcaaagaaattgtagaatggaacctagatggctttactgaatatcaaatctttactttatgtcatcaaatgattatgtatgctaatgcctgcatagctaatggaaacaaagaaagagaagctgccaatatgattgtcattgggttttctggtcaattaaaaggatggtggaataattatttaaatgaaactcaaagacaggagattctttgcgcagttaagagggatgatcaaggaaggccattacctgatagagatggtaatgggaatccaaccggtaacatttctgatgccttagccactctaatctataacataatttatcactttgccggaaactatcatgatatctatgaaaaaaatagagaacaattgataaatttaaaatgtaaaacaatgtcagattttagatggtataaagatactttcttgtcaaaactatataccctaccagaacctaatcaagacttttggaaagaaaaatatatttctggtttacctcctttatttgctgaaaaggttagaaattccctaagaaaagaagggggagggagtataaattatcactatctagatattggaaaaatcacacaaaagatacaattagtaggggctgagctttgcaatgacctaaaaatcaaagatcaactcaaaaaacaaaggattcttggtaaaagagaaatgggagatttttgctatcagtttggttttcaagatccttatgtccatagaaaaagaaaaacccattccaaacccatgacaaaaccaaatgataaaagcaagatgagctttcaagctaccaaaaggaaaccaaaaagaatttacaataagaatataagaacacaagacactgaaagcaaagaaaccatttgttacaaatgtggcttgaaaggacacatagctaacagatgtttcaaatctaaagttaaaaaagagatccaagccttgttagattcagaatcagaagacgttaaagaaaaacttgaagcaatactaaataatatagacaatgactcaagttcagatgaagaaaaaaatgcagaaattaattgttgccaagacagtggttgctcttgttgtgagccagataattcagaagaagagtctgatgaaaatatactcgttttaaccagtttagaagaatttgttctcgatacttttgaaaccattcaagatccagaagaaaaaagaagagtcctcgaaaaattcctttcaagagtcaaaactgataaggataaactaaaaaaggatattcaaaagagcaaattcctctctattgatgaagtgtttaaaaggttagatgaacagaaaaagaagaatgagcaaccagatttgatcagcctattcgaagaccaaaaaattatgaaacaagatttagaagaaataagaaagcgtctatacatgttagaatcaaaagaaggattccatatggaagaaaaggacgaaccaattcaagaagatgatcatgttgttggaaccattcaaaaatatatgaagcaaaaatggtacacagaagttatgtatcgttttatagacggatcctacttccagcatattactttaattgattctggtgctgatgtcaattgcattcgagaaggtattatccctcataaatatttctataaagccgcccacagaattcgtggggcagatggaggacttttaacagtagaatatcaaatccctgaaatctatatttgcataactgaagtttgcattaaaacatctttcctacttgttaaaaatcttaagcaagatgttattttaggaacaccatttttatcacttattcgtcctttcctagtcacaaacgaagatattcaatttaagataatgggcaaacaggtgagcctaagattttcgtctaacacagatgagattcttgaccagcttgttcagaccaaaagagaacaagttgtgaatacaatatatttacacgacaattctttcccatcatatcttccgaaatctatggacttgccaggtaagacatcatgggaagatagatatttattaaaagctactaaagatcttgaatatatatgcagggaaatggcttcacagaagtctgaatggctcacaaatatgagttcatggagactgccccaattgcccagaggccatggagaacgatttaatcacaatttcagaataacagagctacaacaagggttattaaacctcttgtggcaaacaaaaaacaaaaaagaaaaagctcatgccttaaatggcctggcatattatttcaaaaatttcgtgcccacagatcaaaagataacataa

SEQ ID NO: 14784 - DNA, 4027 bp, Oryza sativa
  Clone ID: TFbOSC4434j.C1.o1.np
tatataatcgttccccgtgctccgctcctccgtttccgcctctcgccgctcactctccccgtcggaatcgagcccgcgccgtcgcaccttctctccgccgtcgccgccgagctccggttcgccgccgtcgtcgccccggacctcctcccgcttcggcatcgcccccttcggcttcgccgcgtcctcgccgacctcgtccgctcctccgtttcgcccgccgaccgccggaacgccgccgtcctcgtcgacccgagccgcgccgccgtcttcctccgctccgctcgtcgtttccgccgccctcgtcgtcccgtggtgagccgtggaccgctccgttcgcttcccccttccctcctctctctcgggggccgctccgccgcgccgttggtcgccggcggcgaccatcggggcgcgggtgcgccgcctcccgtcggccgtgccggcgaggccgccttcgggcgcgccccgcggctgccaggtggggcccggccatcagccgcccgcgcccgcgggtgcggctgacgcgtgggacccacggcgccggccggtgcgagcccgcgtgcgcccggtccaccgtggacccacctcggccatataaggatcagtcttcgggcctctgttgcaaagcactaccgtacttccacatgtctagtgggacaaatgacggctacacgagctgcggcccggtagtcgagatgtcatggcacagggctggtgtcctgctgctaggggctcagtcctgcctacctgtccggggggttccggccgtaggtggggttgggtcgatgtacacctctgatcagagtataatctgttcgaatagccgcgccctcggttatgggcaagccgagcaatgtacccaaatggccggcagcatcaaccatcgtggtttggacctgactggcttcgttttggagctacggggcatgtgcgttgtcctggggtatccgcctggagtggactaccaggccaggccgcttccggagcaggagggtgacgatgcagagccccacgctgcgtgggaggttactgcagtgatcctcactggctctcccgagcggacttcgctggcagtcaccgcgggtggagattccttccccgccgcttgccagaacgccgctctcctcgccatcggcactcttcaccagcgctacccggacgagttgcagcactcgccctaccgctaccaccctcgctgcggaggagcccgcgacttcgccaccttccgggatgctagctcggaggatgacgctaccatcgtgcacctggcgcgcatggtggaggcgtacgacgcggctcgtatcgacttccatcagatggtgcgccgtgggatggtcgagaacaacatgaagatcctggagctacgtcaggagaatctgcagctgaagaaggacctagacgcaggggaggcgcagctgtgtcagctcaagatcgcctagggagaggtctgtcgccccaagcgctgccgcgtctgccgcagcctgaagatcaccgcccgcaagagtacctccaggcccgagcttgttcgtcagtccttggcatggacctgcttcgtcgagacccctcgtgacgagcccgcgcccttggtttctcaggatgagggagcctctggcgttggtagcacggaggatgcactgctgctcaccttccatggtgacaaccaggagaagtgctgctaccggtgaaggcagtcaccccgaaggcagcaactacaacaaccatggcagcccacctccacctcctcacccgcctccaccaccaccaccagacaccaactctatcctcacccaaatcctcgcccagcaggccaacatgatggctgctttcctccatcacatccaaaatccgccacagcataatgctccacctccaccaccacccccgcaacattctaaacttgccgagttcctccgcatccgtccgcctaccttctctagctccaataaccccgtggatgctttggattggttgcatgccgtggggaaaaagttagacaccgtgcagtgcaacgatgaggagaaagtcatctttgccgctcaccaactgcaggggcccgcatctctatggtgggaccacttctaggctacgcagccagaaggacagcctattacttgggcccgcttcaccgccgctttccggaggacccatgtgcccgccggagtcatgacccttaagaaaagggaattccgagagttgaagcaaggcaactgctctgtgatggagtatttgcatgagtttaacaacctggcccggtacgccccggaggatgttcgtgaagatgaggagaagcaggagaagttcttggcaggaatggaccctgagctgtccgtgcatatggtctccggggattatccggatttccagcgtttggcggacaagagcatccgcttggaagccaagcacaaggaactggagtcacacaagcgtcgcttggcaaatttccgcaatcaacagggggctaaccaaaggatccgctacaccaatccctatccagggggatcctcctcgtagcagcagcagcagcaaccacgctccgcgctccgacctcaattcgtggtgcgcgtcccacagccgcagcaacagcagagccagcaagggacccgtgcgccccgtcctcctacgccagccgtgcagcctggacaaggccgcagagacgttcatggtcagcagcgtctgtgcttcaactacttcgagcccgggcactttgcggataaatgcccaaagccgaggcgccagcaaggccaagcgcctccccgccccaacaacggtggtaaggatgtcattcggggtcgtgtgaaccacgtgactgccgaggatatgctgacaactccaggcgttatcgtgggtacgttcctcattcattccatccctgctaccattttgttcgactctggagcttcccactcgtttatatctgtgccattcgtggggagaaatcagttgggggtagaaaggcttaggaaccctctgctcatcaccacccctggaggggttatgacagcaaagtattatagccctgccgttcctatagaaatccagggaatcctttttccctcagatttgattcttctggacaccaagaacttggatgtgatccttgggatgaaatggttggctcaattccaaggagtagtggattgcgcaagacgcactgtcactctgtaccgagggccggaacaaccggttgttttctttgcgcccccaacctctgtcagtagttcagaacttcatcagataggactgtcagaaatccccatcgtcagagagttcggagacgtgtttccggaagaactactcggtatgccgcccaagcgagagattgagttccggatagatcttgctccaggaaccactcctctgtacaagcgaccctaccgtatggcagcaaatgaactggccgaagtcaagaaatagttggaagagttaaaagaaaaggggtatatacggccgagcacttccccctagagtgctcccgtgatttttgtggagaagaaagacaagacaaagcggatgtgcgttgactacagagctctcaatgaagttactatcaaaaacaagtaccctcttccccggatcgatgatctcttcgatcagcttaaaggtgccactgtcttttctaaaattgatcttcgttccggatatcaccaattgcgtatccgtgaagaagatattccgaagaccgcattcacctcgcgttatggactgtatgaattcacggtgatgtcgttcggtctgaccaatgctcctgccttcttcatgaacttaatggacaaagtgttcatggaaaacttggataagtttgtggtggtctttattgacgacatcctgatgtactcacaatcagaggaagaccatcagcagcatctccgtctggtgttgggaaagttgcgggaacatcaattgtatgccaagcttagcaagtgtgagttctggttgtccgaagtcaaattcttagggcacgtgatatccgctaaaggagttgctgtggaccccgaaacggtgaccgccgtcactaattggaagcaaccca

SEQ ID NO: 14785 - DNA, 3471 bp, Oryza sativa
  Clone ID: TFbOSC900176j.C1.o7.fg
atggtgacaaccaggagaagtgctgctaccggtgaaggcagtcaccccgaaggcagcaactacaacaaccatggcagcccacctccacctcctcacccgcctccaccaccaccaccagacaccaactctatcctcacccaaatcctcgcccagcaggccaacatgatggctgctttcctccatcacatccaaaatccgccacagcataatgctccacctccaccaccacccccgcaacattctaaacttgccgagttcctccgcatccgtccgcctaccttctctagctccaataaccccgtggatgctttggattggttgcatgccgtggggaaaaagttagacaccgtgcagtgcaacgatgaggagaaagctacgcagccagaaggacagcctattacttgggcccgcttcaccgccgctttccggaggacccatgtgcccgccggagtcatgacccttaagaaaagggaattccgagagttgaagcaaggcaactgctctgtgatggagtatttgcatgagtttaacaacctggcccggtacgccccggaggatgttcgtgaagatgaggagaagcaggagaagttcttggcaggaatggaccctgagctgtccgtgcatatgcagcagcagcaaccacgctccgcgctccgacctcaattcgtggtgcgcgtcccacagccgcagcaacagcagagccagcaagggacccgtgcgccccgtcctcctacgccagccgtgcagcctggacaaggccgcagagacgttcatggtcagcagcgtctgtgcttcaactacttcgagcccgggcactttgcggataaatgcccaaagccgaggcgccagcaaggccaagcgcctccccgccccaacaacggtggtaaggatgtcattcggggtcgtgtgaaccacgtgactgccgaggatatgctgacaactccaggcgttatcgtgggtacgttcctcattcattccatccctgctaccattttgttcgactctggagcttcccactcgtttatatctgtgccattcgtggggagaaatcagttgggggtagaaaggcttaggaaccctctgctcatcaccacccctggaggggttatgacagcaaagtattatagccctgccgttcctatagaaatccagggaatcctttttccctcagatttgattcttctggacaccaagaacttggatgtgatccttgggatgaaatggttggctcaattccaaggagtagtggattgcgcaagacgcactgtcactctgtaccgagggccggaacaaccggttgttttctttgcgcccccaacctctgccagtagttcagaacttcatcagataggactgtcagaaatccccatcgtcagagagttcggagacgtgtttccggaagaactactcggtatgccgcccaagcgagagattgagttccggatagatcttgctccaggaaccactcctctgtacaagcgaccctaccgtatggcagcaaatgaactggccgaaaagaaagacaagacaaagcggatgtgcgttgactacagagctctcaatgaagttactatcaaaaacaagtaccctcttccccggatcgatgatctcttcgatcagcttaaaggtgccactgtcttttctaaaattgatcttcgttccggatatcaccaattgcgtatccgtgaagaagatattccgaagaccgcattcacctcgcgttatggactgtatgaattcacggtgatgtcgttcggtctgaccaatgctcctgccttcttcatgaacttaatggacaaagtgttcatggaaaacttggataagtttgtggtggtctttattgacgacatcctgatgtactcacaatcagaggaagaccatcagcagcatctccgtctggtgttgggaaagttgcgggaacatcaattgtatgccaagcttagcaagtgtgagttctggttgtccgaagtcaaattcttagggcacgtgatatccgctaaaggagttgctgtggaccccgaaacggtgaccgccgtcactaattggaagcaacccaagacagttactcaggttcgcagctttttgagtatggcaggatactaccgaagattcatcgagaatttctccaaaattgccagacccgtgacgcagttgctgaagaaggaagaaaaatttgtgtggagcccgcaatgcgagaaagcattccaaactctcaaagaaaagctggtttcctcgccagtgttaatcttaccggatactcgtaaggacttcctggtgtactgtgacgcttcgcgccgaggattggggtgcgtattaatgcaggaaggtcatgtggtagcctatgcctcacgccagctacggccccatgaaggcaactaccctacccatgatttggagttatccgctgtgagaagatggttagaactcatcaaggattatgatgtgggaatccactatcatcctagtaaggccaacgtggtcgccgacgctctaagtcgaaaaagccattgcaacactcttggcgtccgtggcattccaccgaaacttaatcaacagatggaagccctgaacctaagcatagttggtcgtggattcttggctacactggaagccaagcctaccttgctcgatcaaatccacgaggctcagaagaatgatccggatatgcgtggactcctcaagaatatgaaacaaggtaaagccactggtttcacagaggatgaacatggaacccaatggaacggaaatcgggtatgcgttccagacgacagggaacttaaaacagttgatacttcaggaagctcacgaaagtccttattccatccatcctggcagtacgaagatgtacttagacttgaaagaaaaatactgcatgtcaaggcagagcaccaacgaccggccggacttctccaacctctccaagtaccagaatggaaatgggatgaaattgggatggatttcatcaccggacttccaaaaacccaaggcggatatgattctatgtgggtagtcgtggaccgactaaccaaggtagctcggtttattcctatgaagaccacctatggaggaaacaaattagctgaactctacttcgctaggatcgtgagtctccatggcgttcccaagaaaattgtatctgatcagggaagccagttcacctctcatttctggaagaaactccaagaagagttgggtacccgattaaatttcagcaccgcgtatcacccgcagacagatggacagaccgagcgtctgaaccagatcctcgaagatatgcttcacgcatgtgtcctagattttgggaagacctggggtaagagtctcccttatgccgagttctcctacaataacagctaccaagccagcatacaaatggcaccctatgaagcgcgttgtatggccgcaaatgccggacaccgctattgtgggaccaagttggggaaagccaagtgttcgggaccgatatactga

SEQ ID NO: 14786 - DNA, 2145 bp, Oryza sativa
  Clone ID: TFbOSC401120j.C1.o11.fg
atggctaacaagactctccgcgagttcgctgctccatctactgacaatgtggccaattggccgcagatcaacatgggagacgtggatttcgacttgaagtctagcctcatcactatggtgcaggcttgcccgttctgtgccaagcctaatgaggatgccaacgctcatctgcaacagttcctagggatctgtagcacgtacaccatcaagggcgttagtccagacgccgtcaggctaaggctgtttccgttctcccttctcgggagagcgaaacagtggttctatgccaaccgtgctactgtcaatacctgggacaagtgctctacggcattcctctcgaaattcttcccgatgggcaaaaccaatgcccttcgtgggaggatttctagtttccagcagacaagggacgagtccattccggaagcatgggaacaactgcaggagtatgtggccgcctgtcctcatcatgggatggacgactggctgatcctgcagaacttctacaatggactcacccctatgtcccgcgatcacttggacgcggcagctgggggagctttcttctctaaaacggttcaaggagccgttgatctaatagagaagatggtctccaatatgagttggagcaaggaacgactccagacccgtcagcgaggcatgcacaccgtcaaggagacggaattacttgctgccaagctggacctcctcatgaaacgcttcgacgaccacgagaaacggccacaaggcactgtcaaggccttggactctcacatcacatgtgaagtctgcggcggcatagatcactctaagaatgactgcccggaaacccgtgaggaggcgatgcacatgggcaacaacgggtaccttccacgaggaggtcaggggtggaaccaaccacgcccatattatcaagaagctaaaaccactgatgcgctaagcaaaaagcttgctgccaatgataagaacctagaaaatatgaacgtcaagttagatggctttgcttctgcttttcaaaaccagctgagcttcaataaaatgatagaaacccaactagctcagtttgcatccttagtccatgcaaatgaaactgggaggattccggggcaacccgacttctccattgaaaatgtcaaggtgatcacgacaaggggaggaactactgggataaccaaagaagcgccatctagtgactcggctgacaaggaagttcagccagagaagaccgtgccgcagaaaccgttagtggacgagcaatctgctcattttgttgatgtaatccggaaaatccacatcaacgtgccactgttggacgctatgcaagtgccaacatatactcgttatctcaaggacatactcaacaacaagagaccgctcccaacaacagagatggtcaagctgacagaacaatgcagcaacgtgatactctacaagctcccggagaagaagaaagatccgggctgtcctacgatcacctgctcaatcggggcacaacagttagaccaggccttgtgcgaccttggagccagtgtcagcgtcatgccaaaagacgtcttcgacaagctcaacttcacggtgttggcaccaacaccgatgtgccttcagctggctgattcatcagtccgttacctgacagggataccggaggatgttccagtcaagatacgggatttcttcatccaggttgacttcgtggtgctggatatggacacaggaaaggagacgccgcttatcctagggtgtccgttccttagcaccgcgggagccaacattgacgtgggaacggggagtatccgtttccacataaataggaaggaagaaaagtttgaggttcaactgaggacggaacaatgctccatggtcaggataaagtacgggccgaattcgcagaatattcaagtggtcgaagtggagccacccaagacagacagcctggtgaagttcatgcagaatttcctggagaaggaaacaacgatgcccaggaaccattattggaggacgccggtaaaaccacccataccggctaagctagagcagccggctcagaggaagccgtctttcgcaccaaagcaaaggaaggtgtggaaggaaaaaccaaagatgcccgctccatcacctacggagacgggtagaaaatccgcaaactga

SEQ ID NO: 14787 - DNA, 1824 bp, Oryza sativa
  Clone ID: TFbOSC401845j.C1.o8.fg
atggccagcaagactcttcacgagttcgctgctcccactgctgacaatgtggctgtcgggccgcaagtcaacataggagatgtggatttcaacttgaagtccagcctcgtcacgttggcccaggctagcccgttctgtggcaagcctaatgaggatgccaacgctcatctgcaacaattcctggagatatgtagcatgtacaccattaagggagtcagtcctgacgccgtcaggctgcggctgtttccgttctcccttctcgggagagcgaagcagtggttctatgccaaccgtgctgctatcaacacctgggataaatgctctacggcattcctctcgaagttcttcccgatgggcaaaaccaacaccctttgtggacgaatttccagcttccagcagacaagggacgagtccattccggaagcatgggaacgactgcaggagtacgtggccgcctgtcctcatcatgggatggacgactggatgatcctgcagaacttttacaatggggtcaccccgatgtcccgcgatcacctggacgcggcagctggaggagccttcttctctaaaacgatggtctccaatatgggttggagcgtggaacgactccagacccgtcagcgaggcatgcacaccgtcaaggagacggaattactcgctaccaagctggacctcctcatgaaacgcttggacgaccacgagaaaaggccacaaggcaccgtcaaggccttggactcacacgtcacgtgtgaggtctgcggcggcacgggtcattctgggaacgactgccggaaacacatgaggaggcgatgtacatgggcaacaacaacgggtcccatccacaaggaggttaggggtggaaccaaccacgcccatattttcaaggaggaaataacaaagtccctgcaaatgaaactgggaggattttggggcaacccgaggggaggtaagtccacctgtgatccgttgtaccctaaccctgcaggaactaatgggatgtcaaaaggaacgccatctaatgactcggctgacaaggagattcagccagaaaagacagtgccgcaaggatactgcgacacatggttgctgccatttcctcaacggagtaggaaaccgtcagtggacgagcagttcgctcattttgttgcagtgatccagaagattcacattaacgtgccattgttagacgcaatgcaagtgccaacatatgcctgttgtctcaaggacatactcaacaacaagagaccgctcccaacagcggaggtggtcaagctgacggaacactgcagcaacgtcatactccacaagctcccggagaagaagaaagatccggggtgtcccacgatcacctgctcgatcggggcacaacaattcgaccaggccttttgtgatcttggagctagcgttagcgtcatgccaaaagacgtctttgacaagctcaacttcacggtgttggcaccaacaccgatgcgcctccaagcggctgattcatcagttcgttatccggcagggatagtggaggatgtgccagtcaagatacgggatttctttatcccggttgattttgtggtgctagacatggacacggggaaggagacgccgctcatcctggggcgtccgttccttagcaccacaggagccaacattgacgtgggaacggggagcatccgtttccatatcaacaggaaggaggaaaactttgagtttcaaccaaggacggaacaatgctccatggtcagaatcaagtacgggccgaatccgcagaatattcaagtggtcgaagtggagccacccaagacggatagcctggtaaggtttatgtag

SEQ ID NO: 14788 - DNA, 4353 bp, Oryza sativa
  Clone ID: TFbOSC400003j.C1.o3.np
ccagcgggcggagcggcgatgggtgggtggcgggcccgcgcggcagcgaagcggcggcgggcgggcagagcaaccccgtcctcttcgtgctccgccccttcgtcggaagcgagcggaaggcgaagcaggtagggggcagcggtagagcggcgacgggcgagcgcgacaacgggcggaaggcggtcacgggcggcgggcggagtggcagagggctggtgcttaggcgcgtggtcaaggaggtggggggctcagccaactatccgatcctcacgaagacgaactacagcgactggtccctcttgatgagggtaatgctccaggcgcgcggcctctgggaagctgtcgagacgggtgacgtcgacttccaggaggataggatggcgttggaggccgtcctcaaggcggtccccgctgatctgctgccggtactcgctgtcaaggagacggcgaaagacgcctgggatgccatcaagacgatgcgcgtcggcgtcgaccgcgtccgcaagtccaaagcgcaggagttgcgcaagcagttcgacgcgaatgagttcaaggaaggcgagtccgtggagttctccgtccggctgagtgggctcgtcaacaaccttgccgtactcgggttccagctcgaggaatcaaaggtctgtgaaaagtttcttcatgttgttcctgatcatcttgagcagattgctttgtccatcgagactcgtctgagaaatgcggaggaacgccgtcccaagaagaagtccggtgatgagggcggcaaactgtatctcattgaagaacagtgggctgctcgcgccaaggaacggcagtccggtgagggatcgttgggcaagaaggcgggcaacaaccgtcgccgccgcggtggccggaagaaatccaaggccgctgcggatggcgagcgtggcgcgcgcgacacgcacgatcaagggcgtgataagtgcaagaactgtggctgtctcggtcactaggcgaaagactgtcgtcagcccaagaaacaagtcgcggcgcacatcgcccatggtgaagaggaggatgatgagccagcgttgctgatggctcatgccattgagttggcgccacctccgtcggcgtccccgcctccagcggggttgctcgaccttgatgaacccaaggtgttcgctcccctgcatcgccaggaacacgttgacaccggtgtgtggcaccttgacaccggtggtaccaatcacatgcccggcgtgcgtgatatcttcgccgagctcgacactgctgtgcgcggcaaagtccgtttcggcaacggctccgtggtcgccattgaaggccaaggtaaaattatcttcgagtgcaggaacggtgaacaccgcgcactcacaggggtgtactacatccccaagctcaacgcgaacctcgtcagtctcgggcagctggatgaaaatggctgcaacgtccgcatctttcatggcgtctgcacgatccgcgacaccgcgcgacagctcctcgctcgcgtgcagcgtacgcgcaatcagctgtacctgatcaagatcaccgtcgctcggcctatgtgcctctcagcacgcacgcaggaggccgcgtggctgtggcatgctcgcttcggccacctctacttcgacgcgctccggcgactcgctcgacaggacatggttcgtggtcttccccaaattgatcaagttgagcaactgtgtgactgctgcgtcatcaccaagcaacgacgttcaccgtttccctggcggtccctgttctgcgcggaggatcgtttggagctggtccatggtgacctctgtggtcccatttcgcctgcgacgcccggcggcaagaaacactttctgctgttggtcgatgacgcgagccgctacatgtggctcgcactgcttcagaacaagagggaggcggcagtggcgatcaaacgcttccaagcccgcagcgaagctgagtctggctgccgtctcaagctccttcgcaccgacaatgggggcgagttcacctccgccgagttcgccgcgcattgcgccgagagcggcgtcaagcgacagctcaccgcgccgtattccccccagcaaaacagggtggtcgagcgccgcaaccagacgattctggggatggcgcagagtcttctcaaggccaagtcagtgccggcgtgctactggggggaggcagtcactacggctgtgttcttgctcaatcgcgcgccgaccaaatgcttggacaacaagactccgtatgaagcttggtttgggcggaagccggccgttgggcacctgcgcacgttcgggtgtctcgcgtacgtcaaggatgttcggccgcatgtcaccaagctccaggaccgcaacaagcccacggtcttcctcgctacgttgagggatccaaagcctacaagttgttcgacccgaagtcgggtcgtgttcaagtgacgcgcgacgtggtgttcgacgagggcgccagctgggattgggatgccactgatggtatgcattcccctccctcgtctgacttctctgttgaatacattgtcactcaggagccggaacgtgcggagttgtccacgccgacgctggccacaccgagacatggcgcggttgcgcacgacgcgccgtcactgacggcctcactgctcaatgcgaggtcaccgagattcgtcagcccgccgcaggacggcgacgacaacctcgacgccgacgccgacgactgtccgccccggtaccgctccatcgatgggattctgggggagcgtacacgccgggtctagcaacaagggacctggcggacggcgagctttacttgctggcggcggaggaacctaccaccttcggcgaggccgagcatcaccaagagtggcggcgtgccatgctgcaggagatttcctccatcgaggacaacaagacctggcgccttgtcgacttgccacccggtcatcgcgccatcggactcaaatgggtctacaagatcaagaaggacgcgcgtggcatgatcaccaagcacaaggctcgtcttgtggcgaagggatacatgcaacagccaggggtggacttcaacgaggtgtttgctccagtggcacggctggagtcggtgagaatgctactcgcgcgggcggcgcaagtaggctggcctgtccaccacatggacgtcaagtcggcgttcctcaacggggagctcaccgaggaggtctacgtcaagcaacctcctgggttcattgtggacggacgcgaacatcaagtgcttcgcctggacaaggccttgtatggtcttcggcaggctccacgcgtgtggaacgcgaagctggacgcgagcctgctgtcgctggggttccggcgcaatgactgcgagcacgcggtctacgggcggggcagtggcgacagccgactgctcgttggcgtgtacgtcgacgacttgatcatcaccggcaacgtggcgatggagatcgaccgtttcaaagctgagatgatgtccctattcaagatgagtgatcttggtcccctctcgttctacttggggatcgaggtcgaacaggtggcggacggcattcgactatcgcagaaatcgtatgcacaacgcatacttgagcgagccgggatgcagggatgtaattcctgcttgacgccgatggagcctcgtctcaagttgaccaaggcaagcacggcggcgccggtggatgccacccagtaccgcagcatcgtcggctgcctgtggtatctggttcacacgcggccggacctcgcgttctctgttgggtacgtgagccacttcatggaagctccaaccaccgagcatgacgcggcggtgaaacgcatcttgcgttatgttgccggcacggttgatttcggctgctactacaaaaggatggaaacgccacctgagctcgtcggatactgtgatgcagacatggcgggtgatgtcgacactcgcaaaagcaccagcggggtcgtcttcttcctgggcgccaacccggtcagttggcagtccatcaagcaaaaggttgtcgcgctctcatcttgtgaggcggagtacatagcggcgacgacggcggcgtgttagggaatttggctggcgcagctgctgggagaaatcaagcaagaggagccagaaagcttcaagctcctcgtcgacaataaatcggcgatcgccctcagcaaaaatccagtgtttcatgacaggagtaaacacatcgccacgcgctaccacttcatccgtgagtgcgtggaggacgggagagctcaggttgagttcattggcattgatgggcagattgcagacatcctgaccaaggcactcgggcgggttcgttttcaagaattgcgagctcgcatcagcgtcgtcgaggtcagttcacggtgccaggcttagggggagaat

SEQ ID NO: 14789 - DNA, 3846 bp, Oryza sativa
  Clone ID: TFbOSC400044j.C1.o102.fg
atggctactcctgctaggttttcaactaagcctcatgttttcgacggaacggatttttctcattggtgtagtaggatgcaatcttatattatgactgaagattatgatatttggagaaaagtttcttatccttatgtgattcctgaagctattaatactgccgctgaaaaaactgcttttgagcaaaattgcaaagctcgcaacattcttttgagtggtatttctcgttcggattatgatcgtgttgcgcactttcgaactgctcatgaaatttggaatgctttgagtaacttttatcaaggaacaaataacattaaagaacttcgtcgtgatattttcaaaaaggagtatattaaatttgagatgaaacctggagaagcgttggatgactatcttttagttatatctattcaggagtctgttgacatgtctactttgactttggattcactttatataaaattgaaaacacatgagatgaatgttctttctcgaaaagttgattctaagtcgagtgctttggtttcttcttcttcctctttggatgctgatgcttcttcatctaagtcttcttttcttgctgtttttaatgccacatccgatgatcaactcgaacaaatcgaggaggaggatttggctttggttgctaacagaattgctcgagctatgaataatgccaggaacaggaaaagaggtggtccaaatcgttgctttgaatgtggttcaattgatcatcttcgttcgtattgtcctaagcttgggagaggcaaaagagaagacaaagatggtgagaagaccaacaacaacaagccgaagggttcatcccaagggaggaagctggagaatctcaggaaggcttttcaacaagtttgcgccgccttcgagccactaagtgatagagatggtgaaagtggagatgatgataagggaaagaacatctccgatgtttgcttcatggcgcgtggtgaatctgacacagagtatgaagataatgagttaaaacaacctcatgatgttttggattgctcaacatgtaatttgaataagttgaaattgagggatgctttaggtcgtgttgagtacatggaagatgttgtgaaaaacaatgaagtgctttcttgccctaaatgtcgtaaaagcaaaggtgtcatggtagatagtgaaaattgtgctaatttggaaaaagagatttcttatttgaaaagttctttgctaagattttatgatggtaaaaagaacctcaacatgattttggatcaatcaaaggtgctggtgctagaagtggcttttgtggcaaggaaggagaatgtgtggatcatggattccggttgttcgcggcacatgaccggtgataaaaattggttctcctcactcaagaaggcatccaagactgaatctattatctttggtgatgcttctacaagtgtcgttctcgctataggtttggttaaggtaaaggaaaaatttgaattgaagaatgtagctttggttgagaacttaaagtacaatttgctttcggtttcacaaattgttgatgaaaattttgaggtccactttaagaaaactggaagtaaagtttttgattcttgtggtgattctgtgttgaatatttctcgctatggaagagtgtttaaagccgattttgaaaatcctgtttcacctgtgataacatgtttggttgctaagtttgataaagatgtgatgttttggcatcgtagacttggacatgttggttttgatcatctcactaggttaagtggtttggatcttgttcgtggtttgcctaaacttaagaaagatcttgatttggtttgtacaccgtgtcgtcatgctaagatgattgctttttcacatgctcctattgtttctgtgatgacggatgcaccgggacagctattacatatggacactgttggtccagctggagtgcaatctgttggaggaaagtggtatgtgttggttattgttgacgatttttctcgatattcttgggttttctttatggcaactaaggacgaagcttttcaacactttcgtggtttgtttcttcgatttgagcttgaatttcctgacgagagcgatgacaacgacgacgacgaggtcggctcagctggtcagaccgggcgccaggccggtccgaccgccggcacacctccggacagaccggcccatgaggagcggtcaaactggccaggttcgtcgggttccggtactgttgatgctgatcgagatggacctccagagattacaacttcgaccagtactaatacagaacatggatcaacttcagaagtcgctgctcctttgcacattcaacgacgacatccaccggaacaaatcattggtaatataggtgagcggactacaaggtctaaggtaatgactcatgatgtttgtgcaaattctgcatttgttgcttcttttgaacccaaagatgtgtcacatgcattaattgatgaatcgtggattaacgccatgcatgaagaacttgaaaattttgagagaaacaaagtttggactttagttgaaccaccttctggacataatattattggaaccaagtgggttttcaaaaataaacaaaatgaggatggtttgattgtgagaaataaagctagacttattgctcaaggttttactcaaaatgagggtttggattttgatgaaacttttgctcctgttgctagaattgaggcaattagacttttgttggcttttgctgcttcaaaaggttttaaattgtatcaaatggatgtgaaaattgcttttctaaatggttttatacaggaggaagtttatgtcaaacaaccaccaggttttgaaaatcctgattttcccaaccatgttttgaaattgtctaaagctttgtatggtttgaaacaaactcctagggtatggtatgataggcttaagaactttttgcttgcaaaaggttttacaatgggaaaggttgacaacacactttttgttcttaagcatggtgataatcaactttttgttcagatttatgtggatgatatcatctttggttgttcgactcacgctttggttgtagattttgctgagactatgtgcagggaatttgagatgagcatgatgggtgagttatcgtactttttgggattgcaaattaagcaaacacctcaaggtacttttgtgcatcaaacgaagtatacgaaggatcttttgagacggtttaagatggagaattgcaagccaatttcaacaccaattggttctacagctgtgttggatcctgatgaagatggtgaagctgttgatcaaaaggaatatagaagaatgattggatctttgttgtatctaactgcttctagaccagacatacaatttgctgtgtatttgtgtgcacgctttcaagcttctcctcgtgcttcacatcgtcaagcggtcaagcgaataatgaggtatttgaatcatacacttgagtttggaatttggtattctacttcatcttctatatgcttaagtggatattccgatgctgatttcggtggttgtagaattgatagaaaaagtactagtggaacatgtcattttcttggtacatcgttgattgcaaggtcttctaggaaacaatttagtgttgctcaatcaactgctgaatctgaatatgttgctgctgctagttgttgttcacagattctttggcttttatctattttaaaagattatggtcttacttttgagaaagtacctctattttgtgataatactagtgctatcaatattgctaagaatcctgttcaacactcacgcacaaagcacattgatattcgttttcactttttgagggatcatgttgagaagggagatgttgaattgtag

SEQ ID NO: 14790 - DNA, 3823 bp, Oryza sativa
  Clone ID: TFbOSC25045j.C1.o5.np
atggctggttttgccgatgcactgaggccggataaattcaccggtgtgcactttaagagatggcagatcagggtcactctgtggttgacggctatgaaatgcttctgggtgagtactggcaaacctgaaggaattcttactgttgatcagcagaagcaattcgaggaagccactactctctttgtgggatgcattcttagcgttgttggcgatcgtctggtcgaggtgtatatgcatatgaccgacgctaaggagttgtgggatgcactgaatactaaattcggtgctaccgttgctagcaatgatctgtatatcatggagcagtttcatgactacaagatggctgacaaccgttctgtagtcgaacaggctcatgagatacaaaccatggctaatgaactcgaactccttaaatgtgtcttacccgacaaatttgtggccggttgcattattgcgaaagtacctccatcatggaaaagtttcggtactgcactcaaacacaagaaacaggaatactccgtggaggggttgatagcgtctcttgatgttgaggagaaagctcgggaaaaagacgccgcgtctaagggcgatggtgggcggtccagtgccaatgttgtgcacaaggcccagaacaagagcaaggggaaatacaaagctcaacctggtgtgtgggcaacctggtcatctggctaggaagtgtccacagcgtaaggggataaaggcacctgtagggcagacttctaagtctgctaatgcgaccattggcaacactggagatggaagcgggtatggtaatttaccaactgttttttcagttaatcagtctactaattggtgggttgatactggggccaatgtacatgtttgtgctgacatctcattgttttcttcttatcaggtcgcacggggttccactgtcctaatggggaatgggtcacatgcttctgtccatggtgttggcacggtagatctgaagtttacttcgggaaagaacgtgcagcatgtcccttctatcgacaggaatcttgttagtggctcccgtctgaatagagacagatttaagttggtttttgagtctaataaagtagtcatgtctaaacatggatattttattggtaaaggttatgagtgcggaggcctgttccgcttttccctttctgatttctgcaataagtctgtgaaccatatttgtggcagtgtggatgatgaggctaatgtttggcactcacgtttatgtcatattaattttggcttgatgtctcggttttccagcatgtatttaattcctaagttttccattgtcaaaggttctaagtgccatagttgtatgcaatcgaagcaatctcgcaagcctcacaaggctgccgaggagagaaacttggcaccactagaactcctacattcagatctttgtgaaatgaatggggtgttgacgaagggtggaaaatgatatttcatgacgctgattgatgatgctactagattttgctatgtgtacttgttgaaaacgaaagacgaggctctagactattttaaaatttataatgcagaagttgaaaatcaacttgatagaaagataaaaaggcttaggtctgatcgtggtggagagtttttctcaaacgagtttgacttattctgtgagaaacatggcatcatacatgagaggacgccttcctattctctcgagtctaatgggattgctgaaaggaagaaccgcacactgactgacttggtgaatgccatgttggacaccacgggactacctaaggcatggtggggggaggcattgttgacctcgaatcatgtgttaaacagagttcctaatagaaataaggacagaacaccatatgagatatggattgggagaaaaccatcactttcttatttgcgcacatgggagtgcttggcgaaagtcaatgtaccaataacgaagaagcgcaaactgggacctaagactgtggactgtctttctgggatatgctcatcatagcattgcctatagatttttaataattaaatctgaggtacctgacatgcatgttggtacaattatggagtctcgtgatgctaccttctttgagagctttttcccaatgaaggatacacatagtagttcgagccaaccctctgaagtaattcccaattcaatcacaccaccagaacaaactgaacatacacatgaacatgtcactgaggaggatgtcagtgaagctcctcgaaggagtaagagacaaaggacggctaagtcctttggtgatgatttcactgtgtacctcgtggatgacactcctaagtcaatttcagaagcatatgcatctcctgatgcagacaactagaaggaggttgtctgtagtgaaatggattccattatcgctaacgggacttgggaggtgactgagcgaccatatgggtgtaaacctgtggggtgcaagtgggtgttcaagaagaagcttaggcctgacggtactattgaaaagtacaaggctcggcttgttgctaaaggctatattcagaaagaaggcgaagatttctttgaaacttactcacctgttgctagattgaccacaattcgtgtgctacttttcctagcagcctcacatggtcttctcgttcatcaaatggacgttaagacagcttttcttaatggagagctggatgatgagatctatatggatcaacctgatgggtttgtagttgaaggtcaagaaggcaaagtgtgcaaattgttgaagtctttgtatggtctgaaacaagctcctaagcaatggcatgagaaatttgacaaaacattgacatctgcaggctttgcagtcaatgaggcagataaatgtgtgtactatcgccatggtgggggtgagggagttattctgtgcttgtatgttgttgacatactgatatttgggacaaaccttaggtgacaaatgaggttaaatcattcttgtcttaaaattttgatatgaaggatttgggagtagctgatgttatctaaaacattaagctaattagaggtgagaatgggattacgctcttgcagtcccattatgtggagaagatcttgaatcgtttttgctacattgatagtaagccttctccaacaccttatgatcctagcttgttgattcgcaagaacaagaaaattgctaggaatcaactagaatactcccaaatcattggctcgctgatgtacctggctagtgcaactaggcctgatatctcctttgctgtgagcaagttgagtcggtttaccactaatccggaagatgatcactggcgtgcgcttgagcgagtaatgtgttatctgaaaggtactatggaatcggggcttcactatactgggtatcctgcggtactggagggttatagtgattctaactagatctctgacgtggatgagatcaaagccactagtggatatgtcttcacactgggtggtggtgctgtttcatggaggtcttgcaaacagaccattttgacgaggtcaaccatggaagcagaactgacagcactggatactgctactgttgaggcagaatggctacgtgatctattaatggatctgcctattgtagaaaaaccggtgccggctatccttatgaattgtgacaatcaaacggtaattgtcaaagtgaatagttctaaggataatatgaaatcgtctagacatgtgaaaagacgattgaagtctgtcaggaaattgagaaactccggagttataacgttggattacatccaaacagctagaaacctggcagatcccttcacgaagggactatcacgaaatgtgatagacaatgcatcgaaggagatgggtttgagacccatg

SEQ ID NO: 14791 - DNA, 3171 bp, Oryza sativa
  Clone ID: TFbOSC29329j.C1.o1.fg
atggccggtagcatcaaccgtcgtggtctggacctgactggcttcgttttggagctgcggggcatgtgcgttgtcctggggtatccgcatggagtggactaccagggcaggcagctcccggagcaggagggtgacgatgcagagctccacgctgcttgggaggttactgcagtgatcctcactggctcacccgagaggacttcgttgacagtcaccgcgggtggagattctttcttcgctgcttgccagaacgccgcactcctcgccatcggcactcttcaccagcgctacccggacgagttgcagcactcgccctaccgctaccaccctcgtcgcggaggagcccgcgactacgccaccttccgggatgctagctcggaggatgacactaccatcatgcatctggcgcgcatggtggaggcgtacgacgcggctcgtatcgacttccatcagatggtgcgccgtgggatggtcgagaacaacatgaagatcctggagctgcgtcaggagaatctgcagctgaagaaggatctagacgcagtggaggcgcagctgcatcagctcaagatcgcccagggagaggtctgtcgccccaagcgtcgccgcgtctgccgcagccagaagatcaccacccgcaagagcacctccaggcccgagcttgttcgccagtccttggcatggacctgcttcgtggagacccctcgtgccgagcccgcgcccgtggttcctcaggagggggaagcctccggcgttggtagcacggaggatgcgctgctgctcaccttccgtcctggcccgtcgcagcggagaaatgctaatacaggtgatggcaaccaacccgaaggcagcaaccacaacaaccatggcagcccacctctacctcctcctccgcctccaccaccaccaccagacaccaacgccattctcacccaaatcctcgcccagcaggccaacatgatggctgctttcctccaccacatccaacatccgccacaacataatgctccaccaccacccccacaacactccaaactcgccgagttcctccgcatccgtccaccaaccttctctagctccaataaccccgtggatgcgttggattggttgcatgccgtggggaaaaagttagacaccgtgcagtgcagcgatgaggagaaagtcatcttcgccgcccaccaactgcaggggcccgcatctctatggtgggaccatttccaggctacgctgccagaggggcagcctattacttgggcccgcttcaccgccgctttccggaggacccatgtgcccgccggagtcatggcccttaagaaaagggaattccgagagttgaagcaaggcaaccgcttcgtgatggagtatttgcatgagtttaacaacctggcccggtacgccccggaggatgtacgggaagatgaggaaaagcaggagaagttcttggcaggaatggatcctgagctgtccgtccgtctagtctccggggactatccggatttccaacgtctggtggacaagagcatccgcttggaagccaagcacaaggaactggagtcgcacaagcgtcgcttggcgagtttccgcaaccaacagggggctaaccaaagggtccgctacaccaatccctatccagggggatcctcttcacagcagcagcaacctcgctccgcgccccgacctcaattcgtggtgcgcgtcccacagccgcagcaacagcagagtcagcaagggacttgtgcgccccgtcctccaacgccagccgcgcagcttggtcaaggccgcagggacgttcaaggtccgcagcgtctgtgcttcaactgcttcgagcctgggcactttgcggataaatacccaaagccgaggcgccagcaaggccaagcgcctccccgctccaacaacggtggtaaggatgtcattcggggtcgtgtgaaccacgtgacggccgaggacgtgctgacaactccagacgtcatcgttggtacgttcctcattcattccatccctgctaccattttgttcgactctggagcttctaactcgtttatatctgtgccattcgtggggagaaatcagttgggggtagaaaggcttaggaaccctctgctcatcaccacccctggaggggttatgacagcaaaccgcctgtgccgcctcgaccgtgcgccggccggccgcgccgtcgcctcctccagcgtcgccgccacctcctccaccccggcctgccctccgtttcgcgcggtgaccatcggaggcgcactcccgccgtcgcccttctcattcctccttgccggccacctccagccgcacctcccgcctcgcccgtgcaccctccggccgcgccgccacctctcccggcgtcgcagccgcctcctctttcccggcttcgcctccgtttcgcggggaaatcaccggagacgcgtcctcgccggcgtccagtggcgtcgccaccacttctccgcctccggccgcctctgccgcgtccccggtgcgccggccgacgtcgccgtctcctccgttgacgtcgcagtgccgtcctctctcccggccaggccacggcgtcgcccgaatttcgccggaacgccgtcgtctccgcgccggcctctccttcctcctcgtcggctcgccaccccgctgcaccaccaccttcaccaacatcgcagcggcgtgttccacgccgtcccctcctccgctcagccgctgctgcctgccatcatcgtttcatcgtcgtctccgatcgttctcgtcgtcgacgtcccatcggtcgcccggctcgtcgtctcgcggcgccgcctccgtcgtcggcatcgtagcggcgtgttcctcgccgtcctcgtccccgtgcagccgctgccggctgtcctcgtcgcctcctcgccggtcccggtcgtcgtcgtcgtcgtcgtcctctcgtcgttcccggtcatcgtggcgttcgtccctccgtcgagccgttctcgtccgtcgtccgcgtccgtcaagcaagccgcggcagccccgtcgtcgtcttcgtcctcggctccgcgtcgtcaagcctcgtgccggccgcgtctcgccttcgcccaaggatcgccaccgaagccgtcccctcgccgttcgtctccgttgtgcccgtctgtctccgccgcgcccgttcgtcgttgtcgttcccacgcctcgtcgcgtggtggcttgtag

SEQ ID NO: 14792 - DNA, 5583 bp, Oryza sativa
  Clone ID: TFbOSC401672j.C1.o1.np
atggacgaagtcgggggtcaatggacatctctagggcaaatgaaggctacacgagctgcggcccggtagtcgagatgtcatggcacagggccggtgtcctgctgctaggggctcagtcctgcctacctgtcccgggggttccggccgtaggtggggttgggtcgttgtacacctctgatcagagtataatctatccgaatagccgtgccctcggttatgggcaagctgagcaatgtacccaaatggccggcagcatcaaccgtcgtggtctggacctgactggcttcgttttggagctgcggggcatgtgcgttgtcttggggtatctgcatggagtggactaccagggcaagcagctcccggaataggagggtgacgatgcagagccccacgctgcttgggaggtcactgcagtgattctcactggctcacccgagaggacttcgttggcagtcaccgcgggtggagattctttctccgccgcttgccagaacgccgctctcctcaccatcggcactcttcaccagcgctacccggacgagttgcagcactcgccctaccactaccgccctcgtcgcggaggagcccgtgactacgccaccttcagggatgctagctcggaggatgacgctaccatcatgcacctggcgcgcatggtggaggcgtacgacgcggctcgtatcgacttccatcagatggtgcgtcgtgggttggtcgagaacaacatgaagatcctggagctacgacaggagaatctgcagctgaagaaggacctagacgcagtggaggcgcagctgtgtcagctcaagatcgcccagggagaggtctgtcgccccaagcgccgtcgcgtctgccgcagcctgaagatcactgcccgcaagagtacctctaggcccgagctggttcgtcagtccctggcgtggacctgcttcgtcgagacccctcgtgccgggcccgcgcccttggttcctcaggaggagggagcctctagcgttggtagcacggaggatgtgttgttgctcaccttccgccctggcccgtcacagaagtagacgagcagttagtaggcttgcgcatggtgacaaccaggagaagtgctactaccggtgatggcaaccaacccgaaggtagcaaccacaacaaccatggcagcccacctccacctcctcccccgcctccaccaccaccaccagacaccaactccattctcacccaaatcttcgcccagcaggccaacatgatggctgccttcctccatcacatccaaaatccgtcacaacataatgctccacctccaccaccacccccgcaacattctaaactcgcagagttcctccgcatccgtccacctaccttctctagctccaataaccccgtggatgctttggattggttgcatgccgtggggaaaaagttagacaccgtgcagtgcaacgatgaggagaaagtcatctttgccgctcaccaactgcaggggcccgcatctctatggtgggaccactttcaggctacgcagctagaggggcagcctattacttgggcccgcttcaccgccgctttccagaggacccatgtgcccgccgaagtcatggcccttcagaaaagggaattccgagagttgaagcaaggcaactgctctgtgatagagtatttgcatgagtttaacaacctggcccggtacgccccggaggatgttcgtgaagatgaggaaaagcaggagaagttcttagcaggaatggaccctgagctgtccgtgcgtctagtctccggggactatccgaatttccagcgtttggtggacaagagcatccgcttggaagccaaacacaaggaactggagtcgcagaagcgtcgcctggcgaatttccgcaaccaacagggggctaaccaaaggatccgctacaccaatccctatccagggggatcctcctcgcagcagcagcaacagcagcagcaacctcgctccgcgccccaacctcaattcgtggtgcgcgtcccacagccgcagcagcagcagagtcagcaagggacccatgcaccccgttctcctacgtcagccgtgcagcctggacaaggccgcagaaacgttcaaggtcagcagcgtctgtgcttcaactgcttcgagcccgggcactttgcggataaatacccaaagccgaggcgccagcaaggccaagcgcctccccgccccaacaacggtggtaaggatgtcattcggggtcgggtgaaccacgtgactgccgaggatgtgctgacaactccagacgtcatcgttggtacgttcctcattcattccatccctgctaccattttgttcgactctggagcttcccactcgtttatatctgtgccattcgtggggagaaatcagttgggggtagaaaggcttaggaaccctctgctcatcaccacccctggaggggttatgacagcaaagtattatagccctgccgttcctatagaaatccagggaattccttttccctcggatctgattcttctagacaccaagaacttggatgtgatccttgggatgaattgattggctcaattccaaggagtaatggattgtgcaagacgcactgtcactctgtaccgagggccggaacaaccggttgttttctttgcacccccaacctctgtcggcagttccgaacttcatcagataggactgtcaaaaatcccgatcgtcagtgagttcggagatgtgtttccggaagaactacccggtatgccgcccaagcgagagattaagttccggatagatcttgctccaggaaccactcctctgtacaagcgaccctaccgtatggcagcaaatgaactggccgaagtcaagaaactgttggaagagttaaaagaaaaggggtacatacggccgagcacttccccctagggtgctcccgtgatttttgtggaaaagaaggacaagacaaagaggatgtgtgttgactacagagctctcaatgaagttactatcaaaaacaagtaccctcttccccggatcgatgatctgttcgatcagcttaaaggtgccactgtcttttcaaaaatcgatcttcgctccggatatcaccaattgcttattcgtgaagaagatatcccgaaggccgcgttcaccacgcgatatgggctgtatgaattcacggtgatgtcgttcggtctgactaatgctcctgccttcttcatgaatttagtgaacaaagtgttcatggaatacttggataagtttgttgtggtcttcatcgacgacatcctggtgtactcgcaatcagagatctccgtttggtgttgggaaagttgcgggaacatcaattgtatgccaagcttagcaagtgtgagttctggttgtccgaagtcaaattcttagggcacgtgatatctgctaaaggagttgctgtggaccccaaaacagtgaccgccgtcactgattggaagcgacccaagacagtcactcaagtccgcagctttttgggtttggccgggtactaccgaagattcatcgagaacttctccaaaatcgctcgacccatgacatagttgctgaagaaagaagaaaaatttgtgtggagcccacaatgcgagaaagcgttccaaactctcaaagaaaagctggtttcctcgccagtgttgatcttaccggatactcgtaaggacttcctggtgtactgtgacgcttcgcgccaaggattggggtgcgtattaatgcaggaaggtcatgtggtagcctatgccacacgccagcttcggcctcatgaaggcaactaccctacccatgatttggagttagccgctgtggttcatgctctaaagatctggcggcactatctcattgggaattgctgtgaaatatgtactgatcataagagtttgaaatacatcttcactcagtcggatctgaatcttcggcagagaagatggttagaactcatcaaggattatgatgtgggaatccactatcatcctggtaaggccaacgtggtcgccgacgctctaagtcgaaaaagccattgcaacactcttggcgtccgtggcattccaccggaacttaatcaacagatggatgccctgaacctaagcatagttggtcgtggattcttggctacgctggaagccaagcctaccttgctcgatcgaatccgtgaggctcagaagaatgatccagatatgcatgggatcctcaaaaatatgaaacaatgtaaagccgctggtttcatagaagatgaacatggaaccctatggaacggaaatcgtgtatgcgttccggacgacaaggaacttaaacacctgatacttcaggaagctcacgaaagtccttattccatccaccctagcagtacgaagatgtacttagacttgaaagggaaatactggtgggttagtatgaagcgggaaattgcagagttcatggccctttgtgatgtgtgccagtgtgtcaaggcagagcaccagcgaccggccggacttctccaacctctccaagtaccagaatggaaatgggatgaaattgggatggatttcatcaccggacttccaaaaacccaaggaggatatgattctatatgggttgttgtggaccgactaaccaaggtagctcggtttattcctgtgaagaccacctatggagggaacaaactagccgaactctacttcgctaggatcgtgagtctccatggcgttcctaagaaaattgtatctgatcggggaaaccagttcacctctcacttttggaagaaactccaagaagagttgggtacccgattaaatttcagcaccgcgtatcacccgcagacagatggacagaccgagcgtctaaataagatcctagaagatatgctccgtgcttgtgttctagatttcgggaagacctgggataagagtctcccctatgccgagttctcctacaataacagctaccaagccagcatacaaatggcaccctatgaagcgttgtatggacgcaaatgctggacaccactattgtgggaccaagttggggaaagccaagtgttcgggactgataacttgagagaagctgaagcgaaagtcagaaccattcgggagaatctaaagttggcccagtctcggtagaagagttatgcagacaaccgacgccgtgacctggaattcgcagtggatgactttgtctatcttcgggtcacgccgttgcgaggcgtacgtcggtttcagacgaaagggaagctcgcacctcggttcgtgggtcctttccgtatcattgctcgacgcggagaagtcgcttaccagttggagctgcccgcatcattgggcaacgtgcatgatgtgttccatgtgtcgcaactcaagaaatgtcttcgagtgccatccgagcaggccgactcagagcaaattgaagttcgcgaagacttgacctacgtggagagaccagtgaaaatcttggacaccatggagcgcaggaccaagaaccgggtaatccgtttttgcaaggtccaatggagcaaccacgccaaggaagaagctacttgggaacgtgaagacgagctaaagtcagcccatcccgatctcttcgccagttcttccgaatctcggggtcgagattccgtt

SEQ ID NO: 14793 - DNA, 6037 bp, Oryza sativa
  Clone ID: TFbOSC405120j.C1.o28.np
atggagcccgagagcgccgcgccggtttccttctcctccggccgccctctctcactaccaaccctatataaaccctccccgcacctcctccgtccgtttccgccactcgccgcccttcctcctcgccggaatcgagctcgcgccgtcgctctctctctccgccgtcaccgccgagctccggtccgccgccgtcgtcgccccggaccacctcccacctcggcgccgcctccttcggcttcgccgcattctcgccgacctcgtccacccctccgtttcggtcgccatccgccggaacgccgtcgaccccatcgacccgagccgcgccgccgccttccttcgctccggtcgccgtttccgtcgtcgccgtcgacccggggtgagccgtggaccgccgcttcgtttccccctttccctcccctctctcggccgccgctccgccgtgcctatggccgccgccggcgaccataggggcgcgggcgcgccacctcccgccgctgcgccggcgtggtcgccttcgggtgcaccgagcggctgccgcgtggggcctggctgccagccgcccgcgcccttaggtgcggctgacgcgtgggacacacggcgccggccggtgcgcgcccgggtgcgcccggttcaccgtggacccaccacggccatataaggaccggtcttcgggcctctgttgcaaagcactaccgtacttccacatgtctagtgggtaaggcttagtttgtggctcagtctggttataaacaaaagtacacggagcaatgtacccaagttagtgttttcattcttaaaacctgcttaacaactaaaacgtggaacggttggccatggttggcttgggacgagctgggacccagggtcgggttgccagttcggtctgaatcatcgtaggccttgggttaaggcagtgtttgtagatggccggtagcatcaaccgtcgtggtctggacctgactggcttcgttttggagctgcggggcatgtgcgttgtcctggggtatccgcatggagtggactaccagggcaggcagctcccggagcaggagggtgacgatgcagagctccacgctgcttgggaggttactgcagtgatcctcactggctcacccgagaggacttcgttgacagtcaccgcgggtggagattctttcttcgctgcttgccagaacgccgcactcctcgccatcggcactcttcaccagcgctacccggacgagttgcagcactcgccctaccgctaccaccctcgtcgcggaggagcccgcgactacgccaccttccgggatgctagctcggaggatgacactaccatcatgcatctggcgcgcatggtggaggcgtacgacgcggctcgtatcgacttccatcagatggtgcgccgtgggatggtcgagaacaacatgaagatcctggagctgcgtcaggagaatctgcagctgaagaaggatctagacgcagtggaggcgcagctgcatcagctcaagatcgcccagggagaggtctgtcgccccaagcgtcgccgcgtctgccgcagccagaagatcaccacccgcaagagcacctccaggcccgagcttgttcgccagtccttggcatggacctgcttcgtggagacccctcgtgccgagcccgcgcccgtggttcctcaggagggggaagcctccggcgttggtagcacggaggatgcgctgctgctcaccttccatggtgacgaccaggagaaatgctaatacaggtgatggcaaccaacccgaaggcagcaaccacaacaaccatggcagcccacctctacctcctcctccgcctccaccaccaccaccagacaccaacgccattctcacccaaatcctcgcccagcaggccaacatgatggctgctttcctccaccacatccaacatccgccacaacataatgctccaccaccacccccacaacactccaaactcgccgagttcctccgcatccgtccaccaaccttctctagctccaataaccccgtggatgcgttggattggttgcatgccgtggggaaaaagttagacaccgtgcagtgcagcgatgaggagaaagtcatcttcgccgcccaccaactgcaggggcccgcatctctatggtgggaccatttccaggctacgctgccagaggggcagcctattacttgggcccgcttcaccgccgctttccggaggacccatgtgcccgccggagtcatggcccttaagaaaagggaattccgagagttgaagcaaggcaaccgcttcgtgatggagtatttgcatgagtttaacaacctggcccggtacgccccggaggatgtacgggaagatgaggaaaagcaggagaagttcttggcaggaatggatcctgagctgtccgtccgtctagtctccggggactatccggatttccaacgtctggtggacaagagcatccgcttggaagccaagcacaaggaactggagtcgcacaagcgtcgcttggcgagtttccgcaaccaacagggggctaaccaaagggtccgctacaccaatccctatccagggggatcctcttcacagcagcagcaacctcgctccgcgccccgacctcaattcgtggtgcgcgtcccacagccgcagcaacagcagagtcagcaagggacttgtgcgccccgtcctccaacgccagccgcgcagcttggtcaaggccgcagggacgttcaaggtccgcagcgtctgtgcttcaactgcttcgagcctgggcactttgcggataaatacccaaagccgaggcgccagcaaggccaagcgcctccccgctccaacaacggtggtaaggatgtcattcggggtcgtgtgaaccacgtgacggccgaggacgtgctgacaactccagacgtcatcgttggtacgttcctcattcattccatccctgctaccattttgttcgactctggagcttctaactcgtttatatctgtgccattcgtggggagaaatcagttgggggtagaaaggcttaggaaccctctgctcatcaccacccctggaggggttatgacagcaaagtattatagccctgccgtccctatagaaattcaggggattccttttcctcggatctgattcttctagacaccaagaacttggatgtgatccttgggatgaattggttggctcaattccaaggagtagtggattgtgcaagacgcactgtcactctgtaccgagggccggaacaaccggttgttttctttgcacccccaacctctgtcagtagttctgaacttcatcagataggacagtcaaaaatccccatcgtcagagagttcggagacgtgtttccggaagaactacccggtatgccgcccaagcgagagattgagttccggatagatcttgctccaggaaccactcctctgtacaagcgaccctaccgtatggcagcaaatgaactggccgaagttaagaaatagttggaagagttgaaagaaaaggggtacatacgtccgagtacttctccctggggtgctcctgtgatttttgtggagaagaaagacaagacgaagaggatgtgcgttgactacagagctttcaatgaagtcaccatcaaaaacaagtaccctcttccccggatcgatgatctgttcgatcagcttaaaggtgccacggtattctccaagattgatcttcgttccggatatcaccagttgcgcatccgtgaagcaaatatcctgaagaccgcattcaccacgcgatacggactgtatgaattcacggtgatctcattcggtttaaccaatgctcctgccttcttcatgaacttaatgaacaaagtgttcatggaatacttggataagtttgttgtggttttcattgatgacattttggtatactcacaatcagaggaagaccatcagcaccatctccgtctggtgttgggaaagttgcgggaacatcaattgtatgccaaacttagcaagtgtgagttctggttgtccgaagtcaaattcttagggcacgtgatatctgctaaatgagttgctgtggaccccgaaacagtgaccgccgtcaccgattggaagcaacccaagacagtcactcaaattcgcagtttcttaggtttggcaggatactactggaggttcatcgagaacttctccaaaatcgctcgacccatgacacagttgttgaagaaagaagagaaatttgtgtggagcccgcaatgcgagaaggcgttccaaactctcaaggaaaagctggtttcctcgccggttttaatcttaccggatactcgcaaggacttcatggtgtattgtgacgcttcgcgccaaggattggggtgcgtgctcatgcaggaaggtcatgtggtggcctatgcctcacgccagctacggcctcatgaaggcaactaccctacccatgatttggagttagccgcgatggttcatgctctaaaaatctggcggcactatctcattgggaatcgctgtgaaatatatactgatcataagagtttgaaatacatcttcactcagtcggatctgaatcttcggcagagaagatggttagaactcatcaaggattatgatgtgggaattcactatcatcctggtaaggccaacgtggtcgccgatgctctaagtcgaaaaagccattgcaacactcttgaagtccgtggcattccacccaaacttaatcaacagataaaagccctgaacctaagcatagttagtcgtggattcttggctacgctggaagccaagcctaccttgctcgatcaaatccgcgaggctcagaagaacgatccggacatgcgtggactcctcaagaatatgaaacagggtaaagccgctggtttcacagaggatgaacacggaaccctatggaacggaaatcggcgtgtcaaggcagagcaccaacgaccggccggacttctccaacctctccaagtaccagaatggaaatgggatgaaattgggatggatttcatcaccggacttccaaaaacccaaggtggatatgattctatatgggtagttgtggaccgattaaccaaggtagctcggtttattcctgtgaagaccacctatggagggaacaaactagccgagctctacttcgctaggatcgtgagtctccatggcgttcctaataaaattgtatctgataggggaagccaattcacctctcacttttggaagaagctccaagaagagctaggtacccgattaaatttcagcaccgcgtatcacccgcagacagatggacagaccgagcgtctaaatcagatcctagaagatatgctccgtgcatgtgtcctagatttcgggaagacctgggataagagtctcccctatgccgagttctcctacaataacagctaccaagccagcatacaaatggcaccttatgaagcgttgtatgggcgcaaatgccggacaccgctcttgtgggaccaagttggggaaagccaagtgttcgggactgatatactgagagaagctgaagcgaaggtcagaaccattcgggataatctaaaggtggcacagtcccggcagaaaagttatgcagataaccgtcgccgtaacctggaattcgcagtggacgattttgtgtaccttcgggtcaagccattgcgaggtgtacacaggtttcagacgaaagggaagctcgcacctcggttcgtgggtcctttccgtatcattgctcggcgcggagaagtcgcttaccagttggagctgcccgcctccttgggcaacgtgcatgatgtgttccatgtgtcgcaactcaagaaatgccttcgagtgccgtccgagcaggccgactcagagcagattgaagttcgcgaagacttgacctacgtggagaggccagtgaaaatcctggacactatggagcgaggagcaggaaccgggtaatccgtttttgcaaggtccaatggagcaaccacgccgaggaagaagctacttgggagcgtgaagacgagctgaaggcagcccatcctgatctcttcgccagttcctccgaatctcggggtcgagattccgtt

SEQ ID NO: 14794 - DNA, 4056 bp, Oryza sativa
  Clone ID: TFbOSC414257j.C1.o1.np
atggagcccgagagcgccgcgccggtttccttctcctccggccgccctctctcactaccaaccctatataaaccctccccgcacctcctccgtccgtttccgccactcgccgcccttcctcctcgccggaatcgagctcgcgccgtcgctctctctctccgccgtcaccgccgagctccggtccgccgccgtcgtcgccccggaccacctcccacctcggcgccgcctccttcggcttcgccgcattctcgccgacctcgtccacccctccgtttcggtcgccatccgccggaacgccgtcgaccccatcgacccgagccgcgccgccgccttccttcgctccggtcgccgtttccgtcgtcgccgtcgacccggggtgagccgtggaccgccgcttcgtttccccctttccctcccctctctcggccgccgctccgccgtgcctatggccgccgccggcgaccataggggcgcgggcgcgccacctcccgccgctgcgccggcgtggtcgccttcgggtgcaccgagcggctgccgcgtggggcctggctgccagccgcccgcgcccttaggtgcggctgacgcgtgggacacacggcgccggccggtgcgcgcccgggtgcgcccggttcaccgtggacccaccacggccatataaggaccggtcttcgggcctctgttgcaaagcactaccgtacttccacatgtctagtgggtaaggcttagtttgtggctcagtctggttataaacaaaagtacacggagcaatgtacccaagttagtgttttcattcttaaaacctgcttaacaactaaaacgtggaacggttggccatggttggcttgggacgagctgggacccagggtcgggttgccagttcggtctgaatcatcgtaggccttgggttaaggcagtgtttgtagatggccggtagcatcaaccgtcgtggtctggacctgactggcttcgttttggagctgcggggcatgtgcgttgtcctggggtatccgcatggagtggactaccagggcaggcagctcccggagcaggagggtgacgatgcagagctccacgctgcttgggaggttactgcagtgatcctcactggctcacccgagaggacttcgttgacagtcaccgcgggtggagattctttcttcgctgcttgccagaacgccgcactcctcgccatcggcactcttcaccagcgctacccggacgagttgcagcactcgccctaccgctaccaccctcgtcgcggaggagcccgcgactacgccaccttccgggatgctagctcggaggatgacactaccatcatgcatctggcgcgcatggtggaggcgtacgacgcggctcgtatcgacttccatcagatggtgcgccgtgggatggtcgagaacaacatgaagatcctggagctgcgtcaggagaatctgcagctgaagaaggatctagacgcagtggaggcgcagctgcatcagctcaagatcgcccagggagaggtctgtcgccccaagcgtcgccgcgtctgccgcagccagaagatcaccacccgcaagagcacctccaggcccgagcttgttcgccagtccttggcatggacctgcttcgtggagacccctcgtgccgagcccgcgcccgtggttcctcaggagggggaagcctccggcgttggtagcacggaggatgcgctgctgctcaccttccatggtgacgaccaggagaaatgctaatacaggtgatggcaaccaacccgaaggcagcaaccacaacaaccatggcagcccacctctacctcctcctccgcctccaccaccaccaccagacaccaacgccattctcacccaaatcctcgcccagcaggccaacatgatggctgctttcctccaccacatccaacatccgccacaacataatgctccaccaccacccccacaacactccaaactcgccgagttcctccgcatccgtccaccaaccttctctagctccaataaccccgtggatgcgttggattggttgcatgccgtggggaaaaagttagacaccgtgcagtgcagcgatgaggagaaagtcatcttcgccgcccaccaactgcaggggcccgcatctctatggtgggaccatttccaggctacgctgccagaggggcagcctattacttgggcccgcttcaccgccgctttccggaggacccatgtgcccgccggagtcatggcccttaagaaaagggaattccgagagttgaagcaaggcaaccgcttcgtgatggagtatttgcatgagtttaacaacctggcccggtacgccccggaggatgtacgggaagatgaggaaaagcaggagaagttcttggcaggaatggatcctgagctgtccgtccgtctagtctccggggactatccggatttccaacgtctggtggacaagagcatccgcttggaagccaagcacaaggaactggagtcgcacaagcgtcgcttggcgagtttccgcaaccaacagggggctaaccaaagggtccgctacaccaatccctatccagggggatcctcttcacagcagcagcaacctcgctccgcgccccgacctcaattcgtggtgcgcgtcccacagccgcagcaacagcagagtcagcaagggacttgtgcgccccgtcctccaacgccagccgcgcagcttggtcaaggccgcagggacgttcaaggtccgcagcgtctgtgcttcaactgcttcgagcctgggcactttgcggataaatacccaaagccgaggcgccagcaaggccaagcgcctccccgctccaacaacggtggtaaggatgtcattcggggtcgtgtgaaccacgtgacggccgaggacgtgctgacaactccagacgtcatcgttggtacgttcctcattcattccatccctgctaccattttgttcgactctggagcttctaactcgtttatatctgtgccattcgtggggagaaatcagttgggggtagaaaggcttaggaaccctctgctcatcaccacccctggaggggttatgacagcaaagtattatagccctgccgtccctatagaaattcaggggattccttttcctcggatctgattcttctagacaccaagaacttggatgtgatccttgggatgaattggttggctcaattccaaggagtagtggattgtgcaagacgcactgtcactctgtaccgagggccggaacaaccggttgttttctttgcacccccaacctctgtcagtagttctgaacttcatcagataggacagtcaaaaatccccatcgtcagagagttcggagacgtgtttccggaagaactacccggtatgccgcccaagcgagagattgagttccggatagatcttgctccaggaaccactcctctgtacaagcgaccctaccgtatggcagcaaatgaactggccgaagttaagaaatagttggaagagttgaaagaaaaggggtacatacgtccgagtacttctccctggggtgctcctgtgatttttgtggagaagaaagacaagacgaagaggatgtgcgttgactacagagctttcaatgaagtcaccatcaaaaacaagtaccctcttccccggatcgatgatctgttcgatcagcttaaaggtgccacggtattctccaagattgatcttcgttccggatatcaccagttgcgcatccgtgaagcaaatatcctgaagaccgcattcaccacgcgatacggactgtatgaattcacggtgatctcattcggtttaaccaatgctcctgccttcttcatgaacttaatgaacaaagtgttcatggaatacttggataagtttgttgtggttttcattgatgacattttggtatactcacaatcagaggaagaccatcagcaccatctccgtctggtgttgggaaagttgcgggaacatcaattgtatgccaaacttagcaagtgtgagttctggttgtccgaagtcaaattcttagggcacgtgatatctgctaaatgagttgctgtggaccccgaaacagtgaccgccg

SEQ ID NO: 14795 - DNA, 1638 bp, Oryza sativa
  Clone ID: TFbOSC418607j.C1.o24.fg
atgaacaacctgaacaggaccttggcagaattgcatgggatgctaaagactgccgaggaaagcattaagaaaaactccaaccatgtgatggttatgcataagcgcaagcctaacaacaagaagagtggtcaaaagagaaagttaaactctgatgagatcacgagtactagcaactctaagaccaaggttcaaaagacagggcccgctaaggatgcagagtgcttcttttacaaggagacaggtcattggaagagaaactgtaagaaatacctagagcagctcaagcagaagcagcaggatggaaagagttccacctcagtctataacattaatgcaaaaaggcaacttcctaatgatttaaatcccacttttatttggcattgtcgcttgggtcatataaatgagaaacgcatgaagaagcttcatagagatggacttctacactcgtttgattttgaatcatttgagacatgcgaatcttgtttacttggcaaaatgacaaaggcacctttcacgggtcaaagtgaaagggcaagtgaactattgggactagtacatactgatgtatgtggaccaatgagctcaactgccaggggtggttttgggtactttattacctttaccgatgactttagtagatatggttatgtctacttaatgaggcataagtctgagtcctttgaaaagttcaagaaatttcagaatgaggaaacgaaaggatattatttttataatcgggaagagggcaaagtgtttgtcgcccgacacggtgttttcttggaaaaagagtttatttcaagaaaggatagtgggagcatgttgtggaagcaccggtttcacgaaggtccgaaaggatacggcgtacacctgcgagacgatgatgaacctactacctatgtggaagcaatggtgggaccagactctgagaaatggcttggagccatgaaatccgaaatagaatctatgcatgtcaatcaagtttggaacttggttgatccacctgatggtgtaaaagccattgagtgcaaatgggtctttaagaaaaagacagatgtagatggaaatgttcacatctacaaggcacgattggtggcgaaaggtttcagacaaattcaaggtgttgattatgatgaaactttctcaccattcgccatgctaaaatctattaggattgttttagcgattgctgcctatttcaattatgagatatggcaaatggatgtcaaaacaactttcctcaatggaaatctcgatgaggatgtgtacatgacacaacccaagggatttgttgatccacaatcagctaaaaagatatgcaaattacagaaatccatttatgggttgaagcaagcatctcggagttggaatattcgttttgacgaagtagtcaaggcgttgcgctttgtcaaaaacgaagaagagccttgtgtatacaagaagattagtgggagcgcattggtgtttctaatcctatatgtagatgacatattattgattgggaatgatattcttatgcttgaatctgttaagacatcgttgaaaaatagattttcaatgaaggacttaggggaagcagcatatattctgggtataaggatctatagagatagatcaaagaggctaattggattaagctag

SEQ ID NO: 14796 - DNA, 1296 bp, Oryza sativa
  Clone ID: TFbOSC900047j.C1.o16.fg
atgcactgtcccaggctcccagctggcatgaaaagcgtcgtcactttttggagtactttgcaatttcacattaaaaaacggtttcttgaaaatgaacggtttcttgaaaatgaaagtgaactgccacttttcccatgcatgcaccatgttcagtataagggcatttccaacccaataactaggatggtgtccatagcattaaataagttgccacctaggataaaaaatgatatgatcatggtagctcctgcaccatccagttttaacttgcggtctattcttgagaaagagaagttgactggaacaaacttcatggactggtatcgcaacctgagaattgttctcaggcaagagcacaaagagtttgtgcttacagagtcttttccagctaacttgcccaacaatgctcttgctgctcaacgtagggagcatgaaaagcgatgcaatgattatcttgacataagctgtctcatgcttgctactatgtcccctgagcttcaaaggcaatatgaggcattggatgctcatacgataatcacgggactacgtaacatgtttgaggaccaagcaagagctgagaggtttaatacctcaaagtccttgtttgcgtgcaggcttgcagaaggtaatccagtgagcccacatgtgatcaaaataattggttacaccgagagtctggataagcttggctttccccttagccgagagttggctactgatttgattctccagtcgctccctcccagctttgagccattcataatgaatttcaacatgaacaacctgaacaggaccttggcagaattgcatgggatgctaaagactgccgaggaaagcattaagaaaaactccaaccatgtgatggttatgcataagcgcaagcctaacaacaagaagagtggtcaaaagagaaagttaaactctgatgagatcacgagtactagcaactctaagaccaaggttcaaaagacagggcccgctaaggatgcagagtgcttcttttacaaggagacaggtcattggaagagaaactgtaagaaatacctagagcagctcaagcagaagcagcaggatggaaagagttccacctcaggtattaatgttatagaaattaatcttgctacttcctttactgattcttgggtatttgataccgggtcagttgctcacatatgcaaatcgttgcaggggctgaaaagtaggagcttagcaagaggcgaagtggacattcgcgtgggcaatggagcaagagttgctgctgttgcggtcggcactatgccattatctttaccgtga

SEQ ID NO: 14797 - DNA, 2330 bp, Oryza sativa
  Clone ID: TFbOSC27895j.C1.o2.np
atccgattcgaactcggatccataacgcggcaacattcgaatgatttaatgcaggggctacatttgccaggctagtgtacagggtcttgggatcacaattggggccaaacgtcgaagcctatgttgatgacattgtcataaaaagtcgcaaggccttcgaccacgcatcagacttgcaagagacttttgacaacctccgcgcaaccagcatgaagctaaatccagagaaatgtgtgtttggcgttcgtgctggtaagtagttgggattccttgtgtccgaacgggggatcaaagcaaacctcgaaaaaatcgatgccattcagcaaatgaagccaccatcgagcgttcggcaagtacaaaagctcgaggggcgaattgcggcacttagtcgattcttgtcaaaggcggccgaaaggggcttgccattcttcaagacccttcgaggggcaggaaagttcagttggatgccaaagtgccaagcagccttcgatgagcttaagcggtatctccaaagcccacaagctctggttagcccattggcagggattgaactgtggctctatctagcagcttcgcccgtggctgtcagcatagctttggtgcaagaaaccaaagcaggccagaaactagtatacttcgtctccgaagctctccagggggcgaaagttagatacattgaaatggaaaaacttgcttacgccctagtaatggcttcaacaaagctcaaacactacttccaagcccacagaatcatggtaccttcgcagtatcctttggacgaagtgcttcgaggaaaagaaatcacggggtgcctaagtaaatgggccgctgagctatcacctttcgacctacactttgtcgctctcactgcaatcaagtccctagtcctcactgatttcgtggccgaatggacacgcttcgacacaaccaacaacgcagcagaatatgaagcagtgttaatgggcctgaggaaagcgaaagctttgggcgttcggcgtttcctagtccggacggacccaaagcttgtcgccagccaggttgacaaatcctttaaagcgaaattagaaggaacgagaaaatatctagaagccgtttagtatatgggtaaatgtttcgccggcataacggtcgaacacttgccctgaggccagaatgaagaggctgatgcgctagcgaaatcagctgcttgtggagggccgcattcgccaataatctttttcaaagtcctgtatacaccaagtgtgccagcagatagccaagacatcatggcaattgaccaagtctagttgggcgaagacccaaatgactggcgaacgcctttcgtcaagcaccttaaagagggatggctgctagatgaagaatctatggcgaaacagttgcaactcagagctatgaattacaagctaatctccaggcaattgtatcgaaccggaatactgcagcccatgcttcgttgtgtctctttctccgaaggtgaggagatggtgaaggaaatacactaggggatatgcgaagcgcaccaggcagcaaggaccgtcgcatcaaaagtattttgctaaggcatatattggccaaccgtacttaaagtacgtgttgaacatgtcaaaaaatgtgaaagctgtcagcgacacggccgaagtcaaacagcaccacagtacgaactacagctaatcgcaccaatctagccagtcgcaagatggggcttagacatcaacggcccattcctagtggcgcggaacaattacaagttcgccattgaagccattgagtacttctctcgctgggttgaagccgaaccacttggcacaataactgcagctgcggttcagaagtttgtatggaaaaacattgtttgccgattcggggtaccgaaggagttcatcactgacaatggcaagcagttcgattctggaaagttcaaggaaatgtgcgaggggctaaacctgcaaatcagattcgcttcggtcgcacacccgcagttgaacggggcggccgaatgagcgaatggaaagatcctcgaggctctaaagaagagactggaggtggcggcgaagggaaaatggccagatgaaatgctatccattctctgagcccttcggacgacccccacaaggccaacaaagttcagccctttcatgctcctctgtggagatgaggcgatgatgccggcagaactaggggctaactcaccaagggtgatgttctccgggggcgaagatgggcgtgaagtatcgcttgaactcctagaaggggtgagagtcgaagcactagaacacatgcgcaagtacgtggcaggtacttcggtaacctacaacaaaatggttcgaccg

SEQ ID NO: 14798 - DNA, 3924 bp, Oryza sativa
  Clone ID: TFbOSC24701j.C1.o4.fg
atgacggaaccgccatcatccaaggcggaggtggagccggccattgtgataccaatcacattgaatgatttcgaaggagaagaccgcaagtccatggaggagtacatcaaggagctcacacaagaggcgttgatgagggcgtctactaggactcgtcaagatgcaacttttgaggataaatttgatgagtttttaagatttaaagtcggccctctcttggccgattttgtgggtaaaaataaagcctctaccactgctagccaagcccctatagatcaaacaaatagtagaaccgatggagtggcgcacacagccggtccgaccgggcctgatggccggccaaacggccggtccgaccgggtattaccccggcggtcagaccgggacttaggccagtctgatcgcgcctctggatgtcgatcagaccgggccctggaccgaacatttgatcctcctgtatctagtgctgcaactaatccccaagttcccccacatgttcctaatgcttataatgatgttggtagggggtatcctcccgatactaggcaagtccaatataaccatattgcgccgcaaacacaacctattaggccaccaaatccaccaccaaatcaacataggcctgataatatggaggaaataattggtgggattattagggataaattcgggattgaaactaggaatcttgctaaggtttaccaaaagccgtatcctgactattatgataatatgccgtttcctcgtaattatagagttcccaaatttaccaagtttagtggtgaagatggtaggaccacatgggagcatgaaagccgggttaaggataataaaaaaattgttagaccatatgagaaaaagcctaatgttaatgtgattgattaccctgaggctagtgatagtgaagatgagggtgatcatgatatgtatgttgctgaatggtcatggactaacaaaaacaagccttttgtttgttctaacctaatgccgactcctcgcaaagatcggcaaagtgaggttaaatatagttttgatgtggccaagtatgataagatttttgattatcttttacaagaaaaacaaattagattacctaaaggccatatcataccatctcaagaagaattgaaacgtcgagcttattgtaaatggcatgattctcattctcattccactaatgattgcaatgtgtttcgacgacaggttcaattggccatagatgaaggacgattgaagttcaccgatggctccaagatgaagcttgatcatgatccttttccggtgaatacaattaatttcaatgacaagaaggtgttgattcggccggagcaagccgaatctactaaaggaaaaggagtaatcattggtgaaccaaggccaaagataatagtgccaaagaacccagaggtttgtgtttgtaaagagaataaaagtgaagcttcaacttctaaagctcctaggaagaccaaagtgacccttgatatgcttttggagaaatatgaaaagcaaggtagtgagagagctcgcaacaaggggaaaatacagagatcacctcctagggagcgatttggtcactcgccaagacggtcgcattcacctccatatcatcattcacaagacataccatggggtccctatccaatgccgccgccgggttatccttatccttattacatgccatggggggcaacgccgccaatgttcaatcatatgcctccaatgcaattcaatcaagggtggggaggaccaaggaggccaattcatgagcgtttgtcttcaccaaacaacggccggttttatggtaagaaccgggccaatgaggaaagcgcatctggctggtctgaccggtggtctacgtccggtctgaccaggctccagcgccggtttgataggaggtttgcaaagggcgatgtgagggcttcatcgtcatcaactagacctaatagggggcattatttacctcctggaacagagccgaaacctaggaggatgcctaagtatttaacggctactcaaaggagaaggttgcaatgtcttcgggcccaagaaataagagagaaaaaggctgaagagcaaagggataaaaggttcaatgagttgcgaccaccaccggtatggaggcgtaaaaccatagagaaggaagaaccggttgttgtagagaagaaggaagaacaatcgattgctaaagatgagtcatctccaaaagaagacatggatatcaacaaggtatgtatgttgcctatggagttttgtgctatggatgaagccgaggttgctcaattttcactaggtcctaaagatgtggtttttgagaagcccgatgaatcaaaccgtcatatgaagcctctctatctcaaatgtcatactgatggaaagccggtatctaggatgcttgtggatggaggtgccgctgtgaatttgatgccatactcgttgttcaagaagttggggcgtgaagatgatgagttgaagaagactaacatgattctcaatggcttcaatggtgaaccaacggaggcgaagggtatcttttcggcggagcttaccgtggggaacaagacgttaccaaccgctttcttcatcgtcgatgtgcaagaggctaatttagagtggttacaaaagagggtgcaagaatatcggtctacaaagaacgatattggtgaaactattgaagattttgatgaagtggagaagcttggacaagggtttacatcggccgatccattggaggaagtagacatagttgatggaaccaaaccaaggccgacttttgtaaacaaaaatatgagagccgattataaggttaatataatcgagctacttacagagtatgttgattgctttgcatgggagtaccatgagatgccgggtcttagccgtgagcttgttgagcatcggcttccaattaaaccgggttttaggccttataaacaaccacctcgtcgttttaatcctttgctatatgaccgagtcaaagaggagattgatcggttgttgaaggcggggtttattgggccatgtcgttatgcggagtgggtttcttgtatagtcctggtggagaagaaggggagtgccacggccatcgtgctgttggcatggagatatatcaaaccgtcaacgcgagaacgagcggctgcatgggaggatcagtccagcaccatcatcgttctgtttccagcaccatcatcttcctgctactaccgtctcctctttgctacttacatcggaaagttgtgccgcctcttctttgctacggttgcacatacaccatcaagggcgtcagtcccgacgccgtcaggctacgactatttccgttctctgttcttcagagagcgaagcagtggttctatgccaaccttgctgctgtcaatacctgggacaaaatgctctacggcattcctctcgaaattcttcccgatgggcaaaaccaatgcccttcgtggaaggatttcaagtttccagcaaacaagggatgagtctattccggaagcatgggaacgactgcaggagtacgtagctgcatgtcctcatcttgggatggacgactggctgatcctgcaaaacttttattatggactcaccccgatgtcccacgatcacctggacgcggcagctggaggagcgttcttctctaaaacggttcaaggagccgttgatctaatagagaagatggtctccaatatgggttggagggaggaacgactccagacccgtcagcgaggcatgctacttgctgctaagctggacctcctcatgaaacgattggacgaccatgagaaacggccacaaggcaccctcaaggccttggacactcacgccacatgtgaggtctgcggcaacacgggtcattctgggaatgactgcccggaaacccgtgaggaggcgatgtacatgggcaacaacaacaacgggtatcatccataa

SEQ ID NO: 14799 - DNA, 1458 bp, Oryza sativa
  Clone ID: TFbOSC401095j.C1.o8.fg
atgaaacctggagaagctttggatgactatctttcgaggtttaataaaattttgagtgatcttagatctgttgattcttcttatgatgctaattatccacaatctaagatttctcgccactttttgaatggtcttgacatgtctatttgggagatgaaagttacatctattcaggagtctgtgaacatgtctactttgactttggattcactttacacaaaactaaaaactcatgagatgaatattctttctcgaaaaggtgattctaagtctagtgcttcggttttgtcttcaacttctttggatgttggtgcttcttcatcgaagtcttctgttcttgctttatttaatgccatgtccgatgatcaactcgaacagttcaaggaggaggacttggttttgttatctaataaattttctcgagctatgaaaaatgttaggaacaggaaaagaggagaaccgaatcgttgttttgagtgtggtgcaattgatcatcttcgctcgtattgtcctaagcttgggagaggcaagaaggaagatgatgataaagtcaaagaggatgacatcaacaagaagaagaacacaaaggagaagaagaaacattgcatgcagtggttaatccaagaaatcatagcagcttttgatgaatcggaaggtgaagatgagagcaaaggtaagcaaattgttgatctagcttttattgctcgtaatgcaagttgtgatgttgatgaatctgaagatgataatgaagaaaagcttagttataatcaattagaatatgctgcttacagatttgctaagaaagttcaaacatgttctattgtgcttgatgagaaggataacactattgagattttaaatgctgaaattgatagattaaaatcttcgattcgtgacgatgataattgtcaatcttgtgaagttttattttctgaaattaatgctctgcgagatgtcaattctgttaattgcaaaaaattggaatttgagattgaaaaatctaaaagacttgcccataaacacaaaaaggaaagcgaaattgcttttgcaaaacgacgttggcaaaaatcgggttttaattcgaggaccacggttagaccgacactgatcagtcggtcagaccggctagcggttagaccgcagttgaaccggcggttagaccggttgccaggcccggtcagagcgcaggcacaacggcggtcagaccggcctcggggtgattttgcacgaaattcaaatcggacttttgtgaagcaaaaagagattatcgtcgaagtggttttggagataatcaattttcaggagatgaacagggtttgctgttttgtcgggaccggtgactcgatgccccgggagagtatttgcgatgggccgggagtcggcttggtggtaagacgatgtccgtggtggtcagatatcatgcgggatactaaggctagagttgatgcacatggttga

SEQ ID NO: 14800 - DNA, 863 bp, Oryza sativa
  Clone ID: TFbOSC403480j.C1.o1.fg
atggtgctactcggggtggccgatacagagccgacggagccgtattcggtcagaccgaggcgatggcggtctgaccgagccaagaagtgcattgctctccaagccgaagttgaagataagagcaagggcaaggtgaatgaagtcaatgaggacttggaggaagagattgcccttcttgctagaaggttcaatgatctcttgggaaggagaaaggagagaggaaggggctccaactcaaataggagtagaaatagaagacccaacaagactctctccaacttgaggtgttttgagtgtggtgagaagggacactttgtttccaagtgccctttcaaggatgatgatggagacaagtcatccaagaagaagagtggaggctacaagctcatgaagaagctcaagaaggaatgcaagaagattgaggcattcatcggggaatgggactcaaatgaggagagctccgcctcatccgggtccgaggaagaaggtggtgatgatgcaagctccaagaagaagaagatgaccgttgttgccatcaaggaggctccatcactcttcgctccactttgtctcatggcaaagggttcctctaaggtaacatctcttagtgatagtgagagtgatgatgattgtgatgatgtttcctatgatgagcttgtgagtatgtttgaggagctccatgcttatagtgagaaggagattgtcaagttcaaggctctaaagaaggatcatgcttctttggaggtcttgtatgaggagctaaagacctcttatgagagactcaccatttctcatgagaagcttgcatgcctgcaggtcgactctagaggatccccgggtaccgagctcgaattcgccctata

SEQ ID NO: 14801 - DNA, 2181 bp, Oryza sativa
  Clone ID: TFbOSC900207j.C1.o16.fg
atggtaatgccggcaccgccgaggggttgggacttctcccctggtgatgcagttcgagaggaagttcgtcttcgatttcgttctccggtgcatttctctttgaagttcagccctatgcactaccggttagctgttgatctcctgagagctaatttccggttaaccaattcttctgtggctttggctttaagagccgccattggtggttctcctgcggatctcaatgtccagcatttgttagaccggagtttttcttttgatgttttctctaagcaagttggtctatggatttatcgtcttagatctttttcctgtgatgatttttcccttcgcttttatctctggagaaatgggggtcctaattggcagtgggaatttgagtcttggagccgtgattgtgctgaggagtgggcattggtgccttctaagaagaggtcagtgcacaaaagttctaaggttcagaaagacaaatcttatgcccaagctgttcaacaaagagacgtctcggttaaattcgtgtttcaatgtttgaaggcccttctccaggagagaagatcggttttcacgagacttcaagggttgaaggttcctattgccggtgaaactctggcgaccaagacggtggagccaatcacgaaggatgatcctatttctctgcgttacttgaattcaaatttcttgccttcctgtgtgcgttgtttggataagggccatattgcttctaattgctctgggcctgttcggtgtcattcctgcctggaggctggtcatatgtcctgcttctgtgccactaggcccactaaggcccatcaacctgtggggaagtttccgaaactgagttctgaggataacttagtttggagatctaaatcttctccggccaaaaagacggcggtttctccccatataccttcctctcccaggaacactgttcaatctaatccgcaaaatttcccctcgcttgcaatggctgatctcaaccctaccccgcaatgttttcttcgtcaagcgcaagtggttcatcaaggtggtaacttgcgtgtgccgcgtgttgatctcaccatcccacagcatccgcctcgaagacatgaggatgtttgcatcaccattgtagagccggccatccctgagcatgaatgggatcatcaccgggcgcttatctcggattatatctttgaagtacacatgtatgaggttcgtactgcttaccgtcacccttcgacagttggtatgttccagcttcgttcagtcatgcatagagatgccttagtaaactctccccctgctgcatatgatgggatgcatactgttgagcttgtgaagcatgaccaagggcagaactggcgtgcttgccactttaatcgagaaggctggtttcttctcttggatttcccgctagattttgttgatcgtcaccatataaatctagcgcttgatagagatcagatgttgggaagagtgtttgtgagagcaaagtatagggatcttgactctgtcccccgaaagatagtgttacaggaacctttgggtaatggtggtggagatggagattttgcaaacatcccacctgaagatgatttacctcctgctggaccacagcctgggcctaatgatgataatgccgatgacccagatgatggaaatatttggcaactaggacatcctggtaatcaggggggaggtggtgtttgggatgatctcgtgcaacagcaacaggctgcggaagcagaaatagaggatgcttggggtcaggatcacccaatgggccaggtcgaagaaaactcggggcaattgattatcttgcctaatcaagaggagcaggagcttaatctgattgatcaagagcaacaagtgcagctgtttctggccaggctcaaggatatagctgacagggaaggaccaaagcacccatctttttatcctatggcaggattgctggagaaaattgaccatctatgcaaagctaaagaaatcatgcaggcagctcaaattcctagccccacatctctgccattcagttcccctttcatgaccctggtactcctaaagcggaaggcaatgtttgatcatgctcctcctgtagtaaaaagagcacattctagctgggctttattgtcttccccctctgatgatgggcattctgatcaggagattttagatgttgcacctttgcaagcctag

SEQ ID NO: 14802 - DNA, 4536 bp, Oryza sativa
  Clone ID: TFbOSC407447j.C1.o1.fg
atggctactcctgttaggttttcaactaagcctcatgttttcgatggaacggatttttctcattggtgtagtaggatgcaatcttatattatggctgaagattatgatatttggagaaaagtttctcatccttatgttattcctgaagctattaatacagctgctgaaaaaactgcttttgaacaaaattgcaaagctcgcaacattcttttgagcggtatttctcgttcggattatgatcgtgttgcacatcttcaaactgctcatgaaatttggaatgctttgagtaactttcatcaaggaacaaataacataaaagaacttcgtcgtgatattttcaaaaaggagtatattaaatttgagatgaaacctggagaagctttggatgactatctttctaggtttaataaaattttgagtgatcttagatctgttgattcttcttatgatgctaattatccacaatctgagatttctcgtcactttttgaatggtcttaatatgtctatttggaagatgaaagttacatctattcaggagtttgttgacatgtctactttgactttggattcactttacacaaaattgaaaacacatgagatgaatgttctttctcgaaaagttgattctaagtcgactgctttggtttcttctacttcctctttggatgttgatgcttcttcatctaaaccttcttttcttgctgtttttaatgccacatccgatgatcaactcgaacaaatcgaggaggaggatttggctttgtttgctaaccatattgctcgagctatgaataatgctaggaacaggaaaagaggtggtccaaatcggtgctttgaatgtggttcaattgatcatctccgttcgcattgtcctaatcttaggagaggcaaaagagaagacaaagatgttgagaggacaagcaacaacaagcccaacaacaacaagccgcaaggttcatctcaagcgaggaagttcaaggagaatcttagaagagcttttgatcaagtctatgctgcttttgagccatcaagtgatgtagatggtgagagtggagatgatggtaagggaaagaacatctccggtgtttgcttcatggcgcgtggtgaatcggatattgagtatgaagatcatgaggtaagtgcttttgaagaagctattaatattttgagtgcaaaaaatatgaagtgtgagaagatgtatagaaaacaggaatttatcattgaatctcttaaatctgaaattgatagattaaaatctcttattcctaatgatgatgattgctcaaattgtgaggttttaatgaatgagatttcaaaaattagagatattaatgctgcacatgatttgaaaaatagatcttctcttgcttgtagttttgctttgcatacacgcactttggatgagttgtttttaactaaaaagttgttgcaaaaatatcaaattgcttttcatgctagtttgatgtttaacatgatttctgctaaaaagtttaaacaacctcatgatgttttggattgcttaacatattgtgaaaattgtgctaatttggaaaaagaggtttcttatttgaaaaattctttgcaaagattttctgatggtaaaaagaacctcaacatgattttgaatcaatctaaggtgttggtgctagaagtggttttggtggcaaggaaggagaacgtgtggatcgtggattccggatgttcgcggcacatgaccggtgataaaaattggttctcctccctcaaaaaggcatccaagactgaatcgattatctttggtgatgcttctacaagtgccgttctcgctacaggtttggtaaaggtaaatgaaaaatttgaattgaagaatgtagctttggttgagaacttaaagtacaatttgttttctgtttcacaaattgttgatgaagagtttgaggttcactttaagaaaactggaagtaaagtttttgattctcgtggtgattctgtgctgaatatttctcgctatggaagagtgtttaaagctgattttgaaaatcctgtttcacctgtgataacatgtttggttgctaagtttgataaagatgtgatgttttggcatcgtagacttggacatgttggttttgatcatctcactaggttaagtggtttggatcttgttcgtggtttgcctaaacttaagaaagatcttgatttggtttgtacaccgtgtcgtcatgctaagatggtttctacttcacatgctcctattgtttctatgatgacggatgcaccgggacaactattacataaggacaccattggtccggctagagtgcaatctgttggaggaaagtggtatgtgtttgttattgttgatgatttctctatatattcttgcgttttctttatggcaactaaggatgaagcttttcaacactttcgtggtttgtttcttcgactgaatcttgaatttcctggttctttgaaaagaattcgaagtgataatggtggtgagtttaaaaatgcttcttttgaacaattttgcaatgaaagaggtcttgaacatgaattttcttctcctcgtgttcctcaacaaaacggtgttgttgaaaggaaaaaccgtgttttggctgagatgactagaacgatgttggatgaatataaaactcctagaaaattttgggctgaggctattaacactgctttctatatttcaaatcgagttttcttgcgttctaaacttggaaaaacgtcttatgaacttcgatttggtcatcaacccaaagtttcacatttgcgtgtttttggttgcaaatgctttgtcttgaaatctggaaatttggacaagtttgaggcacgttctactgatggattgtttcttggttaccccgcacatactcgtggctatcgtgtacttattttagggactaacaatattgttgagacttgcgaagtttcttttgatgaggctagtccaggaactagaccagaaattgcaggtacactgtcacaggttcagggggaggatggtcgtatttttgaagacgagagcgactacgacgacgacgacgaggatgtgtggtcagaccggccagggtcgtcggctgagggttctgttgatgctgatcgagatggtcctccagaaattactacttcgaccagtactgatacagaacatggatcaacttcagaagtcaccgctcctttgcacattcaacgacgacatccgccggaacaaattattggtaatataggtgagcggactacaaggtctaaggtaacgactcatgatgtttgtacaaattctgcatttgttgcttcttttgaacccaaagatgtgtcacatgcattaactgatgaatcgtggattaacgccatgcatgaagaacttgaaaattttgagagaaacaaagtttggactttagttgaaccaccttctggacataatattattggaaccaagtgggttttcaaaaataaacaaaatgaggatggtttgattgtgagaaacaaagctagacttattgctcaaggttttacccaggtggagggtttggattttgatgaaacttttgctcctgttgctagaattgaggcaattagacttttgttggcttttgctgcttcaaaaggttttaaattgtatcaaatggatgttaaaagtgcttttctaaatggttttatacaggaggaagtttatgtcaaacaaccaccaggttttgaaaatccttattttcccaaccatgtttttaaattgtctaaagctttgtatggtttgaaacaagctcctagggcatggtatgatagacttaagaactttttgcttgcaaaaggttttacaatgggaaaggttgacaaaacgctttttgttcttaagcatggtgataatcaactgttcgttcagatttatgtggatgatatcatctttggttgttcaactcacgctttggttgtagattttgctgagactatgagcagggaatttgagatgagcatgatgggtgagttatcgtactttttgggattgcaaattaagcaaacacctcaaggtacttttgtgcatcaaacgaagtatacgaaggatcttttgagacggttcaagatggagaatagcaagccaatttcaacaccaattggttctacagctgcgttggatcctgatgaagatggtgaagctgttgatcaaaaggagtatagaagtatgattggatttttgttgtatctaactgcttctaggccagacatacaatttgctgtgtgtttgtgtgcgtgctttcaagcttctcctcgtgcttcacatcgtcaagcggtcaagcgaataatgaggtatttgaatcatacacttgagtttggaatttggtattctacttcatcttctatatgcttaagtggatatttcgatgctgattttggtggttgtagaattgataggaaaagtactagtggaacatgtcattttcctggtacatcattgattgcatggtcttctaggaaacaatctagtgttgctcaatcaactgctgaatctgaatatgttgctgctgctatttgttgttcacagattctttga

SEQ ID NO: 14803 - DNA, 2085 bp, Oryza sativa
  Clone ID: TFbOSC32096j.C1.o1.fg
atggaggaaaaatactctgcgaaaccatttgttttcgatggacacaattttgtcatttggaaggcacgaatggaggcctacctccagtcgcaagggcataatgtgtggaataaggttaaatctccttatactgtgcccgatgatgctgacatcacgcctgcaaatatggctcaggttgattttaattatcgtgcaagaaatgcaatcattggtggaatttcttctggtgaatttaatcgtgttcaacaccacaagtccgctcatgacatgtggactgctctgtgcaatttccatgagggaaacaatgatattcaattggttcgtcagaatcaatttcataaagaatatcaaagatttgagatgcacccaggagagtccattgattcttatttcaaacgttttggagaaattatttcgaagttgagatctgttggaaaagaattttctgataatgataatgctcgccatcttttgaattgtcttgattatggtgtttgggaaatgaaagttacttccatcacagagagtgcacctctgagtgaccttaccatggacaagctttactcaaagctaaaaacccatgagatggatgttttccatcggaaaggcctcaaacactcgatggctttggtagctgatccctctggtagtacttcttctaatgactcagcctttgtgtatggtggcttctctcttgccgctttacactcagtcactgaggagcaattagagaagatccctgaagatgatcttgctctttttgctagaaaattctcaagagcttacaaaaatgtgagagatagaaaaagaggaaaaaccaatgaaccatttgtgtgttttgagtgtggagagcctaaccacaaaagagtgaattgtcccaagttgaagaagaagagtgacaagacgaccaagaagcccgagggacaagggcgaaaggggaagaaggatttgatgaagaaggcgatccacaaggtcttggcggctcttgaggaggtgcagcttagcgacatcgactccgacgacgatgatcaagaaaagggggacaaggacttctccgggatgtgctgtctcgccaacaacgaggacttcatcaacctgtgtctcatggcgcttgaggataaggatgactcatcggagcatcctgaggtatgtcttgatgatatcccttccttggatggttctctttgtgatgattcttgctcagataatgactctgttgatgatgaactaagcaaagaaagaatggcacacttgatgattgaaattagtgataagtataggtcttctaagtataaaattgagaaactaaaatctgaaaatgatggaatggcgctagaaattgctaggcttcgatccatgattcctgaggaggatacctgttctacttgtgcttcatatctttctgaaattaatctcctcaaggataagttgaaatcatgtgctttaggagctgggaatccttctagtgctagtgctgcttgctctacttgctatgaaatgaaagttgatatgggtttgcttgagatggaattgaaagaactaaaagaaaaatttgttcatgataggattggtaggtgtgaaaattgtcccattctcactagtgacaatgatgaattaagacaacaagttgccatgcttaggaccaagaatgatttgttagaatcttttgctactaaggaacctattcattcttcatgtgctaattgtgctatcctggaaactgaactaaaagatgctaaaactgtcattgattctatcaaatctattgattcttgttcttcatgcatttctctgaaagttgatcttgagtctgctaagaaagagaactcatacctacaacaatctttagagaggtttgctcaaggaaagaaaaagttgaacatgatcctagaccaatccaaagtgtccataaacaatcaaggtataggctatgattttgctgagtctttgaggataggtacccatgagattttaggtgtcacagatgggatgatagaactagctcaaaaacctataaccttcaagtctgcaggtttcattggaaacactagttctagtacacccaaaacctcagaaccaaagatg

SEQ ID NO: 14804 - DNA, 6438 bp, Oryza sativa
  Clone ID: TFbOSC400300j.C1.o25.fg
atggaggaaaaatactctgcgaaaccatttgttttcgatggacacaattttgtcatttggaaggcacgaatggaggcctacctccagtcgcaagggcataatgtgtggaataaggttaaatctccttatactgtgcccgatgatgctgacatcacgcctgcaaatatggctcaggttgattttaattatcgtgcaagaaatgcaatcattggtggaatttcttctggtgaatttaatcgtgttcaacaccacaagtccgctcatgacatgtggactgctctatgcaatttccatgagggaaacaatgatattcaattggttcgtcagaatcaatttcataaagaatatcaaagatttgagatgcacccaggagagtccattgattcttatttcaaacgttttggagaaattatttcgaagttgagatctgttggaaaagaattttctgataatgataatgctcgccatcttttgaattgtcttgattatggtgtttgggaaatgaaagttacttccatcacagagagtgcacctctgagtgaccttaccatggacaagctttactcaaagctaaaaacccatgagatggatgttttccatcggaaaggcctcaaacactcgatggctttggtagctgatccctctggtagtacttcttctaatgactcagcctttgtgtatggtggcttctctcttgccgctttacactcagtcactgaggagcaattagagaagatccctgaagatgatcttgctctttttgctagaaaattctcaagagcttacaaaaatgtgagagatagaaaaagaggaaaaaccaatgaaccatttgtgtgttttgagtgtggagagcctaaccacaaaagagtgaattgtcccaagttgaagaagaagagtgacaagacgaccaagaagcccgagggacaagggcgaaaggggaagaaggatttgatgaagaaggcgatccacaaggtcttggcggctcttgaggaggtgcagcttagcgacatcgactccgacgacgatgatcaagaaaagggggacaaggacttctccgggatgtgctgtctcgccaacaacgaggacttcatcaacctgtgtctcatggcgcttgaggataaggatgactcatcggagcatcctgaggtatgtcttgatgatatcccttccttggatggttctctttgtgatgattcttgctcagataatgactctgttgatgatgaactaagcaaagaaagaatggcacacttgatgattgaaattagtgataagtataggtcttctaagtataaaattgagaaactaaaatctgaaaatgatggaatggcgctagaaattgctaggcttcgatccatgattcctgaggaggatacctgttctacttgtgcttcatatctttctgaaattaatctcctcaaggataagttgaaatcatgtgctttaggagctgggaatccttctagtgctagtgctgcttgctctacttgctatgaaatgaaagttgatatgggtttgcttgagatggaattgaaagaactaaaagaaaaatttgttcatgataggattggtaggtgtgaaaattgtcccattctcactagtgacaatgatgaattaagacaacaagttgccatgcttaggaccaagaatgatttgttagaatcttttgctactaaggaacctattcattcttcatgtgctaattgtgctatcctggaaactgaactaaaagatgctaaaactgtcattgattctatcaaatctattgattcttgttcttcatgcatttctctgaaagttgatcttgagtctgctaagaaagagaactcatacctacaacaatctttagagaggtttgctcaaggaaagaaaaagttgaacatgatcctagaccaatccaaagtgtccataaacaatcaaggtataggctatgattttgctgagtctttgaggataggtacccatgagattttaggtgtcacagatgggatgatagaactagctcaaaaacctataaccttcaagtctgcaggtttcattggaaacactagttctagtacacccaaaacctcagaaccaaagatggtacctatgactagcaagtctaagcctgtagagttacctagacccaaaaatccaaaacaagttgagcacaagcaaaaccagagacaaaccaagcctgtagagaaaaccaagtatgagtgcacctattgtgggaaagctggtcatttggattttggagtagggagaagtaattcttggcttgtggactccggttgctcacgccacatgaccggtgaagccaagtggtttacttctctcactcgtgcatccagtgatgagaccatcacttttggggatgcgagcagtggacgcgtgatggctaaaggaacaatcaaggtcaatgacaaattcatgctgaaagatgtggcactagtaagtaagcttaagtacaatttgctctctgtttcacaactctgtgatgaaaatctggaagttcgtttcaaaaaggacaggtctcgagttcttgatgcttctgaatctcctgtttttgacatttctcgagttggtcgagttttctttgctaacttcgactcttctgctcctggtccttctcgttgtctcattgcctcagagaatagggatttgtttttctggcatcgacgtcttggtcatattggctttgaccacttgtctcgcattagtggtatggatttgattcggggtttgcctaagttgaaagttccgaaagatcttgtgtgtgcaccatgtcgtcatgggaaaatgacatcttcttcccacaagcctgttacaatggttatgacagatggaccgggacaactgcttcacatggatacggttggtcctgctcgggtccagtcagttggggggaagtggtatgtcttggttgttgtggatgatttctctcgctactcttgggtctattttcttgaatcaaaggaggaaacatttggcttctttcagtctcttgctcgtagtttggctttggagtttcctggtgctcttcgagccattcgcagtgataatggctctgaattcaaaaattctgcatttgaatctttctgtgattcttctggagtcgaacaccagttttcttcgccatatgtcccacaacagaatggggtggttgagaggaagaaccgcacccttgtggagatggcacgaactatgcttgatgagtttacgactccaagaaaattctggactgaagctatttctgctgcttgttttatctccaatcgtgtgtttttgagaactatcttgcacaagacgccatatgagctcagatttggtcgtcgaccaaaagtttcacatctcagggtcttcggttgcaaatgctttgttcttaaatctggaaatttggacaagtttgaatctcgatcattggatggcattttccttggctatgctactcattctcgggcttatcgagtttatgttctttcaaccaacaaaattgtggagacttgtgaagtcacttttgatgaggctagcccaggagctagaccagaaatttcaggtgttccagatgaaagcatctttgtggatgaggattcagatgatgatgacgatgattctattcctccacctctagacagtacaccaccagtgcaagaaaccggttctccttcgactacatcaccttcaggagatgcaccaactacatcatcttcagcagctgaggagattgatggtggcacatcaggaccgacagctccccgacacatccagaaccgacatccgcctgactcgatgatcggaggcctgggtgaaagggtaactagaaatcggtcttatgaacttgtcaattcagcttttgttgcctcttttgagcccaaaaatgtttgtcatgctttatctgatgagaattgggttaatgccatgcatgaagagttagaaaattttgaaagaaacaaagtttggtctttggtagaacctcccttgggttttaatgtgattggaacaaaatgggttttcaaaaacaaactaggtgaagatggttcaattgttcgaaacaaagccagactggttgcacagggtttcacccaagttgagggcttggactttgaagaaacttttgcaccagttgctagattagaagctattcgaattcttttggcttttgctgcttcaaaaggtttcaagctttttcaaatggatgtgaaaagtgcttttctgaatggagttattgaggaagaggtctatgtcaaacaacctcctggttttgaaaatccaaaatttccaaatcatgtgttcaaacttgaaaaagctctttatggtttaaaacaagctcccagagcctggtatgaaagattgaaaacctttttgcttcaaaatggttttgaaatgggggctgttgataaaactctttttactcttcatagtggtattgattttcttcttgtccagatatatgttgatgacatcatatttggtggctcctctcatgcacttgttgcccagttttctgatgtgatgagcagggaatttgaaatgagcatgatgggagagctgactttcttccttggacttcaaatcaagcaaaccaaggaaggaatctttgtacatcagaccaagtactccaaagagctcctgaagaagttcgacatggccgactgcaagccaatcgccactcccatggcaactacttcatcgcttggtcctgatgaggacggtgaagaagttgaccagcgcgagtacagaagcatgatcggctccctcctctacctgactgcgtcaaggccggacatccacttctccgtgtgcctgtgcgcgaggtttcaggcttctccaagaacatcacatcgccaagcagtcaagcgcatgttccgctacatcaagtctacacttgagtacggtatttggtactcctgctcttctgccctttcagttcgagctttttcagatgctgattttgctgggtgtaagattgatcgcaaaagtacttctggcacttgtcattttcttggcacttctttggtctcttggtcctctcgtaagcagtcttctgttgctcaatcaacagctgaggctgagtacgtagctgctgctagtgcatgtagtcaagttctttggatgatttcaactctgaaagattatggtctgtctttctctggtgttcctctgctttgtgataatacaagtgcaatcaatattgcaaaaaatccagttcaacactccaggaccaagcacattgagatacggtaccactttctccgagacaatgttgagaaaggtaccattgtgctagaatttgttgaatctgaaaaacaattggcagacatttttacaaaaccacttgatcgctctcgttttgagttcttgcggagtgagttaggggtgatcggggtcgatcttggtcaacggcggatcgggactagactcagggaggagttgaggtccaaagcgatcaaggatgccggggaggccaagccaatccagccgttccacgtggcccaagatggtgaatggctcggctcggcaggcctgcatcgtccaagcagcgacggcccaagacggcggcccatggcgcatgggctcaggagatccggcttctctaatagccgcgattctatgtttgagttagctcgtaacaataaagaagttcacttaaacatcaatgggatttcagatctctttccaggtgaaagtcatattggaatatcagtagctgatgccactgattacaccaaaaccgtgcaaatcagtagggaaatttgtcagatgatgaagggctatatgatctacactgtctcatcaactgtccatcttttcggtgtccatgccattttacttttatggaacttcgacttaccaagtttcttgactctggtgattgctgcttttaattactgctgtggacagtgcaaaattgaacataaatcactgatggacaccgatgaggaaattagagctgctttgttccttcagatgagcattgtgaatcaggctgttgcactgtttgcttattcagatgattgctgccatatcagatgtcctggacctgttgtaacatttgcctttatttttacccagatggtggcaacccgtaaagctgtaggaggtgacttggattttgctattgcaaagggtgttggttggctcaaggctggattgatatggctgtacaactttgtcctgctctttgtccctgttgatttgtcagatatggaagcatgcaaagatgactggagaaaaattgttgacgaagcgttcagccatcctacatacaattctgctctgaattctggaggcgacagcagttataacaaggcggccacaaacttcagcatgcgtgcgtcatcatgtaaaagaatgcagctttaccctctgagttgtcattcaggcatgtatgacctagttggctgggaggctatccaactagatgcatcaactggtgtctgcctggctgcctga

SEQ ID NO: 14805 - DNA, 6774 bp, Oryza sativa
  Clone ID: TFbOSC401249j.C1.o19.fg
atggaggaaaaatactctgcgaaaccatttgttttcgatggacacaattttgtcatttggaaggcacgaatggaggcctacctccagtcgcaagggcataatgtgtggaataaggttaaatctccttatactgtgcccgatgatgctgacatcacgcctgcaaatatggctcaggttgattttaattatcgtgcaagaaatgcaatcattggtggaatttcttctggtgaatttaatcgtgttcaacaccacaagtccgctcatgacatgtggactgctctgtgcaatttccatgagggaaacaatgatattcaattggttcgtcagaatcaatttcataaagaatatcaaagatttgagatgcacccaggagagtccattgattcttatttcaaacgttttggagaaattatttcgaagttgagatctgttggaaaagaattttctgataatgataatgctcgccatcttttgaattgtcttgattatggtgtttgggaaatgaaagttacttccatcacagagagtgcacctctgagtgaccttaccatggacaagctttactcaaagctaaaaacccatgagatggatgttttccatcggaaaggcctcaaacactcgatggctttggtagctgatccctctggtagtacttcttctaatgactcagcctttgtgtatggtggcttctctcttgccgctttacactcagtcactgaggagcaattagagaagatccctgaagatgatcttgctctttttgctagaaaattctcaagagcttacaaaaatgtgagagatagaaaaagaggaaaaaccaatgaaccatttgtgtgttttgagtgtggagagcctaaccacaaaagagtgaattgtcccaagttgaagaagaagagtgacaagacgaccaagaagcccgagggacaagggcgaaaggggaagaaggatttgatgaagaaggcgatccacaaggtcttggcggctcttgaggaggtgcagcttagcgacatcgactccgacgacgatgatcaagaaaagggggacaaggacttctccgggatgtgctgtctcgccaacaacgaggacttcatcaacctgtgtctcatggcgcttgaggataaggatgactcatcggagcatcctgaggtatgtcttgatgatatcccttccttggatggttctctttgtgatgattcttgctcagataatgactctgttgatgatgaactaagcaaagaaagaatggcacacttgatgattgaaattagtgataagtataggtcttctaagtataaaattgagaaactaaaatctgaaaatgatggaatggcgctagaaattgctaggcttcgatccatgattcctgaggaggatacctgttctacttgtgcttcatatctttctgaaattaatctcctcaaggataagttgaaatcatgtgctttaggagctgggaatccttctagtgctagtgctgcttgctctacttgctatgaaatgaaagttgatatgggtttgcttgagatggaattgaaagaactaaaagaaaaatttgttcatgataggattggtaggtgtgaaaattgtcccattctcactagtgacaatgatgaattaagacaacaagttgccatgcttaggaccaagaatgatttgttagaatcttttgctactaaggaacctattcattcttcatgtgctaattgtgctatcctggaaactgaactaaaagatgctaaaactgtcattgattctatcaaatctattgattcttgttcttcatgcatttctctgaaagttgatcttgagtctgctaagaaagagaactcatacctacaacaatctttagagaggtttgctcaaggaaagaaaaagttgaacatgatcctagaccaatccaaagtgtccataaacaatcaaggtataggctatgattttgctgagtctttgaggataggtacccatgagattttaggtgtcacagatgggatgatagaactagctcaaaaacctataaccttcaagtctgcaggtttcattggaaacactagttctagtacacccaaaacctcagaaccaaagatggtacctatgactagcaagtctaagcctgtagagttacctagacccaaaaatccaaaacaagttgagcacaagcaaaaccagagacaaaccaagcctgtagagaaaaccaagtatgagtgcacctattgtgggaaagctggtcatttggattttggagtagggagaagtaattcttggcttgtggactccggttgctcacgccacatgaccggtgaagccaagtggtttacttctctcactcgtgcatccagtgatgagaccatcacttttggggatgcgagcagtggacgcgtgatggctaaaggaacaatcaaggtcaatgacaaattcatgctgaaagatgtggcactagtaagtaagcttaagtacaatttgctctctgtttcacaactctgtgatgaaaatctggaagttcgtttcaaaaaggacaggtctcgagttcttgatgcttctgaatctcctgtttttgacatttctcgagttggtcgagttttctttgctaacttcgactcttctgctcctggtccttctcgttgtctcattgcctcagagaatagggatttgtttttctggcatcgacgtcttggtcatattggctttgaccacttgtctcgcattagtggtatggatttgattcggggtttgcctaagttgaaagttccgaaagatcttgtgtgtgcaccatgtcgtcatgggaaaatgacatcttcttcccacaagcctgttacaatggttatgacagatggaccgggacaactgcttcacatggatacggttggtcctgctcgggtccagtcagttggggggaagtggtatgtcttggttgttgtggatgatttctctcgctactcttgggtctattttcttgaatcaaaggaggaaacatttggcttctttcagtctcttgctcgtagtttggctttggagtttcctggtgctcttcgagccattcgcagtgataatggctctgaattcaaaaattctgcatttgaatctttctgtgattcttctggagtcgaacaccagttttcttcgccatatgtcccacaacagaatggggtggttgagaggaagaaccgcacccttgtggagatggcacgaactatgcttgatgagtttacgactccaagaaaattctggactgaagctatttctgctgcttgttttatctccaatcgtgtgtttttgagaactatcttgcacaagacgccatatgagctcagatttggtcgtcgaccaaaagtttcacatctcagggtcttcggttgcaaatgctttgttcttaaatctggaaatttggacaagtttgaatctcgatcattggatggcattttccttggctatgctactcattctcgggcttatcgagtttatgttctttcaaccaacaaaattgtggagacttgtgaagtcacttttgatgaggctagcccaggagctagaccagaaatttcaggtgttccagatgaaagcatctttgtggatgaggattcagatgatgatgacgatgattctattcctccacctctagacagtacaccaccagtgcaagaaaccggttctccttcgactacatcaccttcaggagatgcaccaactacatcatcttcagcagctgaggagattgatggtggcacatcaggaccgacagctccccgacacatccagaaccgacatccgcctgactcgatgatcggaggcctgggtgaaagggtaactagaaatcggtcttatgaacttgtcaattcagcttttgttgcctcttttgagcccaaaaatgtttgtcatgctttatctgatgagaattgggttaatgccatgcatgaagagttagaaaattttgaaagaaacaaagtttggtctttggtagaacctcccttgggttttaatgtgattggaacaaaatgggttttcaaaaacaaactaggtgaagatggttcaattgttcgaaacaaagccagactggttgcacagggtttcacccaagttgagggcttggactttgaagaaacttttgcaccagttgctagattagaagctattcgaattcttttggcttttgctgcttcaaaaggtttcaagctttttcaaatggatgtgaaaagtgcttttctgaatggagttattgaggaagaggtctatgtcaaacaacctcctggttttgaaaatccaaaatttccaaatcatgtgttcaaacttgaaaaagctctttatggtttaaaacaagctcccagagcctggtatgaaagattgaaaacctttttgcttcaaaatggttttgaaatgggggctgttgataaaactctttttactcttcatagtggtattgattttcttcttgtccagatatatgttgatgacatcatatttggtggctcctctcatgcacttgttgcccagttttctgatgtgatgagcagggaatttgaaatgagcatgatgggagagctgactttcttccttggacttcaaatcaagcaaaccaaggaaggaatctttgtacatcagaccaagtactccaaagagctcctgaagaagttcgacatggccgactgcaagccaatcgccactcccatggcaactacttcatcgcttggtcctgatgaggacggtgaagaagttgaccagcgcgagtacagaagcatgatcggctccctcctctacctgactgcgtcaaggccggacatccacttctccgtgtgcctgtgcgcgaggtttcaggcttctccaagaacatcacatcgccaagcagtcaagcgcatgttccgctacatcaagtctacacttgagtacggtatttggtactcctgctcttctgccctttcagttcgagctttttcagatgctgattttgctgggtgtaagattgatcgcaaaagtacttctggcacttgtcattttcttggcacttctttggtctcttggtcctctcgtaagcagtcttctgttgctcaatcaacagctgaggctgagtacgtagctgctgctagtgcatgtagtcaagttctttggatgatttcaactctgaaagattatggtctgtctttctctggtgttcctctgctttgtgataatacaagtgcaatcaatattgcaaaaaatccagttcaacactccaggaccaagcacattgagatacggtaccactttctccgagacaatgttgagaaaggtaccattgtgctagaatttgttgaatctgaaaaacaattggcagacatttttacaaaaccacttgatcgctctcgttttgagttcttgcggagtgagttaggggtgatcggggtcgatcttggtcaacggcggatcgggactagactcagggaggagttgaggtccaaagcgatcaaggatgccggggaggccaagccaatccagccgttccacgtggcccaagatggtgaatggctcggctcggcaggcctgcatcgtccaagcagcgacggcccaagacggcggcccatggcgcatgggctcaggaggtgcaggcagcttgcatgcgcaaggacgcgcgcggaaaaaccgtacgcggcaacccccgtttcgcgtgactcgatcggaggcgggtgcaggagcgcgggacccacacgcgattttgcaagcgcgcgcgggagcggctcagcgggacgcgtggcggcttcgggctggttgggcgctggcgagcgcgcgctgaggaaaaggagacggaacgcgcacgacgcggctgggcaacgtggcaagtttggattcgtcaagacggagagcacgcggattcatcagcaagaagaccatgctttgccggtgcacttcatgacagttcttcaattgcctaagtgggcggtgaaagacatagagcgtaagtgtcgcggtttcctttggaaaggccaagaaaaagtcaatggtggtcactgtctggtctcctggcgcaagctctgtatgcccattgagaaaggcggcctcggggtgatggacctagatctgttcgggcaagcgttgaggttgaaatggcatgccaagagccttgagcagaaaggaaggccgtggactctggtgggttcgttgtctgctgcggccctatgcgagttctttcagctctgggacgaggtcagaaacaccacgctgcagaatggtgatgactctatccgatggaaggtctctcccgacgggcaattctcagcatcggcaacttacaacttctttttcacgaccaaagaggactgtcctgtgggcgacctcttgtggcactcaagagcaccttccagggttcgattcttcatgtggctagctctcaaaggaaaatgcttaacggccgacaatcttgctaaaagaaattggccccacgaggatcactgcgttctttgccaaagagaagaggaagattgccagcacctgtttgctgactgcagctttacctctgcggtctggggattgatcaggagcagagtgaatttcaacttcccgattcccaccgaggaaaactgcccactaatgtgctggtggcttcagccgagagcccgttgccggcagctagccaacagaacggtttacacttcagctgcacaaattacagttattcgaagaggatctatcacctatggcatctgtcaacagagttacctgggcgtcgtcatgctggatgctacccgtgcagatcagacaaacaacaagaacaggctacaagatacgcaacatgtccatacatatgagtaa

SEQ ID NO: 14806 - DNA, 4914 bp, Oryza sativa
  Clone ID: TFbOSC412801j.C1.o4.fg
atggctcaggttgattttaattatcgtgcaagaaatgcaatcattggtggaatttcttctggtgaatttaatcgtgttcaacaccacaagtccgctcatgacatgtggactgctctgtgcaatttccatgagggaaacaatgatattcaattggttcgtcagaatcaatttcataaagaatatcaaagatttgagatgcactcaggagagtccattgattcttatttcaaacgttttggagaaattatttcgaagttgagatctgttggaaaagaattttctgataatgataatgctcgccatcttttgaattgtcttgattatggtgtttgggaaatgaaagttacttccatcacagagagtgcacctctgagtgaccttaccatggacaagctttactcaaagctaaaaacccatgagatggatgttttccatcggaaaggcctcaaacactcgatggctttggtagctgatccctctggtagtacttcttctaatgactcagcttttgtgtatggtggcttctctcttgccgctttacactcagtcactgaggagcaattagagaagatccctgaagatgatcttgctctttttgctagaaaattctcaagagcttacaaaaatgtgagagataaaaaaagaggaaaaaccaatgaaccatttgtgtgttttgagtgtggagagcctaaccacaaaagagtgaattgtcccaagttgaagaagaagagtgacaagacgaccaagaagcccgagggacaagggcgaaaggggaagaaggatttgatgaagaaggcgatccacaaggtcttggcggctcttgaggaggtgcagcttagcgacatcgactccgacgacgatgatcaagaaaagggggacaaggacttctccgggatgtgctgtctcgccaacaacgaggacttcatcaacctgtgtctcatggcgcttgaggataaggatgactcatcggagcatcctgaggtatgtcttgatgatatcccttccttggatggttctctttgtgatgattcttgctcagataatgactctgttgatgatgaactaagcaaagaaagaatggcacacttgatgattgaaattagtgataagtataggtcttctaagtataaaattgagaaactaaaatctgaaaatgatggaatggcgctagaaattgctaggcttcgatccatgattcctgaggaggatacctgttctacttgtgcttcatatctttctgaaattaatctcctcaaggataagttgaaatcatgtgctttaggagctaggaatccttctagtgctagtgctgcttgctctacttgctatgaaatgaaagttgatatgggtttgcttgagatggaattgaaagaactaaaagaaaaatttgttcatgataggattgagaggtttgctcaaggaaagaaaaagttgaacatgatcctagaccaatccaaagtgtccataaacaatcaaggtataggctatgattttgctgagtctttgaggataggtacccatgagattttaggtgtcacagatgggatgatagaactagctcaaaaacctataaccttcaagtctgcaggtttcattggaaacactagttctagtacacccaaaacctcagaaccaaagatggtttctgctttagaaaggctagaaaagagcgacaagaacgtcttaggactagaagagctactagagtccctgagaggttcgagtgattttggagtagggagaagtaattcttggcttgtggactccggttgctcacgccacatgaccggtgaagccaagtggtttacttctctcactcgtgcatccggtgatgagaccatcacttttggggatgcgagcagtggacgcatgatggctaaaggaacaatcaaggtcaatgacaaattcatgctgaaagatgtggcactagtaagtaagcttaagtacaatttgctctctgtttcacaactctgtgatgaaaatctggaagttcgtttcaaaaaggacaggtctcgagttcttgatgcttctgaatctcctgtttttgacatttctcgagttggtcgagttttctttgctaacttcgactcttctgctcctggtccttctcgttgtctcattgccacagagaatagggatttgtttttctggcatcgacgtcttggtcatattggctttgaccacttgtctcgcattagtggtatggatttgattcggggtttgcctaagttgaaagttccgaaagatcttgtgtgtgcaccatgtcgtcatgggaaaatgacatcttcctcccacaagcctgttacaatggttatgacagatggaccgggacaactgcttcacatggatacggttggtcctgctcgggtccagtcagttggggggaagtggtatgtcttggttgttgtggatgatttctctcgctactcttgggtctattttcttgaatcaaaggaggaaacatttggcttctttcagtctcttgctcgtagtttggctttggagtttcctggtgctcttcgagccattcgcagtgataatggctctgaattcaaaaattctgcatttgaatctttctgtgattcttctggagttgaacaccagttttcttcgccatatgtcccacaacagaatggggtggttgagaggaagaaccgcacccttgtggagatggcacgaactatgcttgatgagtttacgactccaagaaaattctggactgaagctatttctgctgcttgttttatctccaatcgtgtgtttttgagaactatcttgcacaagacgccatatgagctcagatttggtcgtcgaccaaaagtttcacatctcagggtcttcggttgcaaatgctttgttcttaaatctggaaatttggacaagtttgaatctcgatcattggatggcattttccttggctatgctactcattctcgggcttatcgagtttatgttctttcaactaacaaaattgtggagacttgtgaagtcacttttgatgaggctagcccaggagctagaccagaaatttcaggtgttccagatgaaagcatctttgtggatgtggattcagatgatgatgatgatgattctattcctccacctctagacagtacaccaccagtgcaagaaaccggttctccttcgactacatcaccttcaggagatgcaccaactacatcatcttcagcagctgaggagattgatggtggcacattaggaccgacagctccccgacacatccagaaccgacatccgcctgactcgatgatcggaggcctgggtgaaagggtaactagaaatcggtcttatgaacttgtcaattcagcttttgttgcctcttttgagcccaaaaatgtttgtcatgctttatctgatgagaattgggttaatgccatgcatgaagagttagaaaattttgaaagaaacaaagtttggtctttggtagaacctcccttgggttttaatgtgattggaacaaaatgggttttcaaaaacaaactaggtgaagatggttcaattgttcgaaacaaagccagactggttgcacagggtttcacccaagttgagggcttggactttgaagaaacttttgcaccagttgctagattagaagctattcgaattcttttggcttttgctgcttcaaaaggtttcaagctttttcaaatggatgtgaaaagtgcttttctgaatggagttattgaggaagaggtctatgtcaaacaacctcctggttttgaaaatccaaaattttcaaatcatgtgttcaaacttgaaaaagctctttatggtttaaaacaagctcccagagcctggtatgaaagattgaaaacctttttgcttcaaaatggttttgaaatgggggctgttgataaaactctttttactcttcatagtggtattgattttcttcttgtccagatatatgttgatgacatcatatttggtggctcctctcatgcacttgttgcccagttttctgatgtgatgagcagggaatttgaaatgagcatgatgggagagctgactttcttccttggacttcaaatcaagcaaaccaaggaaggaatctttgtacatcagaccaagtactccaaagagctcctgaagaagttcgacatggccgactgcaagccaatcgctactcccatggcaactacttcatcgcttggtcctgatgaggacgatgaagaagttgaccagcgcgagtacagaagcatgatcggctccctcctctacttgactgcgtcaaggccggacatccacttctccgtgtgcctgtgcgcgaggtttcaggcttctccaagaacatcacatcgccaagcagtcaagcgcatcttccgctacatcaagtctacacttgagtacggtatttggtactcctgctcttctgccctttcagttcgagctttttcagatgctgattttgctgggtgtaagattgatcgcaaaagtacttctagcacttgtcattttcttggcacttctttggtctcttggtcctctcgtaagcagtcttctgttgctcaatcaacagctgaggctgagtacgtagctgctgctagtgcttgtagtcaagttctttggatgatttcaactctgaaagattatggtctgtctttctctggtgttcctctgctttgtgataatacaagtgcaatcaatattgcaaaaaatccagttcaacactccaggaccaagcacattgagatacggtaccactttctccgagacaatgttgagaaaggtaccattgtgctagaatttgttgaatctgaaaaacaattggcagacatttttacaaaaccacttgatcgctctcgttttgagttcttgcggactttcatttgcttaagtagcttgtgtgatcatgttatgctgttcaagcgtgttgaaacctgcttaaattaa

SEQ ID NO: 14807 - DNA, 1815 bp, Oryza sativa
  Clone ID: TFbOSC7033j.C1.o1.fg
atggctttggtagctgatccctctggtagtacttcttctaatgactcagcctttgtgtatggtggcttctctcttgccgctttacactcggtcactgaggagcaattagagaagatccctgaagatgatcttgctctttttgctagaaaattctcaagagcttacaaaaatgtgagagatagaaaaagaggaaaaaccaatgaaccatttgtgtgttttgagtgtggagagcctaaccacaaaagagtgaattgtcccaagttgaagaagaagagtgacaagacgatcaagaagcccgagggacaagggcgaaaggggaagaaggatttgatgaagaaggcgatccacaaggtcttggcggctcttgaggaggtgcagcttagcgacatcgactccgacgacgatgatcaagaaaagggggacaaggacttctccgggatgtgctgtctcgccaacaacgaggacttcatcaacctgtgtctcatggcgcttgaggataaggatgactcatcggagcatcctgaggtatgtcttgatgatatcccttccttggatggttctctttgtgatgattcttgctcagataatgactctgttgatgatgaactaagcaaagaaagaatggcacacttgatgattgaaattagtgataagtataggtcttctaagtataaaattgagaaactaaaatctgaaaatgatggaatggcgctagaaattgctaggcttcgatccatgattcctgaggaggatacctgttctacttgtgcttcatatctttctgaaattaatctcctcaaggataagttgaaatcatgtgctttaggagctgggaatccttctagtgctagtgctgcttgctctacttgctatgaaatgaaagttgatatgggtttgcttgagatggaattgaaagaactaaaagaaaaatttgttcatgataggattggtaggtgtgaaaattgtcccattctcactagtgacaatgatgaattaagacaacaagttgccatgcttaggaccaagaatgatttgttagaatcttttgctactaaggaacctattcattcttcatgtgctaattgtgctatcctggaaactgaactaaaagatgctaaaactgtcattgattctatcaaatctattgattcttgttcttcatgcatttctctgaaagttgatcttgagtctgctaagaaagagaactcatacctacaacaatctttagagaggtttgctcaaggaaagaaaaagttgaacatgatcctagaccaatccaaagtgtccataaacaatcaaggtataggctatgattttgctgagtctttgaggataggtacccatgagattttaggtgtcacagatgggatgatagaactagctcaaaaacctataaccttcaagtctgcaggtttcattggaaacactagttctagtacacccaaaacctcagaaccaaagatggtacctatgactagcaagtctaagcctgtagagttacctagacccaaaaatccaaaacaagttgagcacaagcaaaaccagagacaaaccaagcctgtagagaaaaccaagtatgagtgcacctattgtgggaaagctggtcatttggattttggagtagggagaagtaattcttggcttgtggactccggttgctcacgccacatgaccggtgaagccaagtggtttacttctctcactcgtgcatccagtgatgagaccatcacttttggggatgcgagcagtggacgcgtgatggctaaaggaacaatcaaggtcaatgacaaattcatgctgaaagatgtggcacta

SEQ ID NO: 14808 - DNA, 704 bp, Oryza sativa
  Clone ID: TFbOSC19190j.C1.o1.np
aggtttaacaaaattttgagtgatcttagatctgttgattcttcttatgatgttaattatacacaatctgagatttctcgccactttttgaatggttttgacatgtctatttgggagatgaaagttacatctattcaggaatccgttgatatgtctactttgactttggattcgctttacacaaaactgaaaacacatgagatgagcattctttctcgtaaagttgattttaagtcgagtgctttggtttcttcctcaacttctttggatgttgattcttcttcatcgaagtttccgcaattgctttgtgtaatgccatgtccgatgatcaactctaacaattcgaggaggaggacctggttttgttatctaacagactttctcaagctgtgactaatgttaggtacaggaaaagaggtggtccaaatctttgctttgaatgtggtggtacggatcactttcgttcgcgttgtcctaagcttgggagagcaaggagggaagataatggtgatgagaagaccaatgataacaagccgaagggtacagtcaaagggaggaagatcaaggagactctcaagaaggcttttgatcaagtctacgccgtgtttgagccactaagcgatcgtagatggtgagagtggagatgaagataagggaaagaacatctccggtgtttgcttcatggcgcgtggggctgcaggaat

SEQ ID NO: 14809 - DNA, 465 bp, Oryza sativa
  Clone ID: TFbOSC23526j.C1.o1.fg
atggccgtgactagaccaccgctaggccgccgcctaccgcgcgattccggcgggcccggttgcgccgtgcccgtggaggccgggcgcaaggaggaggaggagcagaagcagcgcggaaggaggcacccgaggctgaaccggccgccatcgaggagtagggcataccaagatattttgatcctgggagataccttgctgaggagggaggatcatgtagttgtgagctatccaatgaaaaggcggaagaagccttgctttgtttgtgggttgtttggacacaattcaaagcagtgcatgcaggttgactgttttggtgtgttttatgaagcaaggtcgaatacaagaatcaataggatgaaaattatcaatgcagtatccaaatctgttcctcaacctcacaaggttgaccttaacagtccaaacaggattattattgtgcagattgagaagtgtaatggtccataa

SEQ ID NO: 14810 - DNA, 4989 bp, Oryza sativa
  Clone ID: TFbOSC400151j.C1.o49.fg
atggcatcccatgaagatccgcgcgatcgtcatcgtgatgaaggtggtgcaacaaccgatgaggaaccgattgaagatctgggcggggcttcggaggaggaagacgatgaagatgcaattgtggtagactttgatgaggctaaaaagcatattgatacacagtatgtggccattgggaagttcttctcaaggaggactttcagcgcaaagggactgtttgaagccatgcaaaaggcatggggcttgagacaaggcatggagtacaaacgcctgcatgataaccgatttctactggaattccaatctgcaggggatttcaggtttgcgactggaggcggtccttggatctatcaaggggatgctttcctgatcacggagtatgatggcaagtctagaccttcggatgtgaaactgaactcgctaccagtttgggtgagaatttacgatctacccctgtctatgatgactgaaacaatgggtaaattgattggtgcaaggctgggtgaggttcgtaaggtggcggtggatgatcagggaagagcatgggatgattttatgagagttcgggcggagcaccctgtggataaaccactgacgtgttggctgaaactgaaagacaaggagtcatcttcggtggttcagaggtatgatgtcaagtatgagaggatccctcggttttgcttttactgtggccacattggtcacatggagagggaatgtgatttaccctcggataagcaaacggtgaggtttggccttaatctcagggcgtcaccttataagcagtttgaacatcgtagctgggctctgcctggtaaagttgacaacaacgcgaagagaaatctatggttcccaggtgagaaccagtccaagccagctcctgcgggaagccaaaataaagatggcccatcaggcaaggaagataggaagaagaactcgccagaggaaaatgctccagtaaaggaaaattttgctaaccgggatgagatagaggcagagatccctacggtgcaggaagagttgaagggtttaaatgctaggaacccaggaaaatccagggaggatggtgaggtcaggaagctagctgaacagtgggagcatatggggaaaactcaagaagatcagcctaccttccacgcagcttcacagcaagctaaggagggacaaataaggagtgagactgcaggggagacttgggtgtctagcaaagattcaatcaatcagtacgaacagcttgatgaaggtgctgggaatggccgtgaggaggtggacgaacatgttccacccctatcaacgatccatgaagatatctctcttataaaccagcttagagatgaggaacttggtgagggacataaggaaaatatcgatgatggggtaaaacctgtgctaggaaagaggagtatggataaatctctccttggcccaggatatgatggaccttcgtttgatgttctagttggaggtgataagattggggctgcggaattgtgtagcagtgcctggagaaggaacggggaggggggggatggactagccctcttttgggatgacacagtacaagtggatcttctatcctacaacttcagatatattgatgtgctcattaaggacgaaagctgccctgtgcaatggcgatgcacctttgtgtatggtgagcccaaagctagcgaaaggcataacatgtggactcttcttcgtcgcatcaaatcaaattctactgctccatggtgcttagtgggcgactttaatgaagctatgtggcagtttgagcatttttctgaccacaagagaagggagaagcagattatggatttccgggaagtcttgtcgcactgcgatgtgtttgatttaggtttcacgggtgccccctggacttttgataacaagcaaaaaggaaggaataatgtgcgagttcgactggatcgtgcagtagcaagccagagttggtcttctctctttcctgctgcagaagtgattcaccttactgtgtccagttctgatcacagtcctattcttctccaagcctcccgagtggatcgcatcaagaaaggggatcggtgtctgcgacttggagccgtgataaatttggttaagttagcaaagatattaaagaaacaaggaatcgattggcagagcttcagatggcaggcaggtgtgctagtgatcaagactatctcgatatatccaggaagctggatactcttgtatagggaggaaatgcaatggctgcagagatcaagaatctcttggttgaaggaaggtgaccgaaacacatccttttttcataggaaagcggcttggcgccacaagaaaaacaagattaataggctgcagagaagtgatggaacctggtgtgataagagggaggagatggaagatatgacatcaaatttcttcaaagagctttacactaatgacccttctgtcgagccagaaccattacttgatttggtacagcccagagtcacgtcggagatgaataagctgctttgtaaagaattctctgatgacgaaatttcaaatgctttgttccagatgggtccgttaaaagcgccggggccagatggttttccggcaaggttctttcagaagaattgggatgtattgaaacgggacattattgcggctgttaagctgttctttgaacagagaagaatgccacaaggtgtaaatgacactgccattgtgttaattccgaaaaagaaagagccaaaggatttgaaagattacagaccaataagcctttgtaatgtgatttacaaggtgattgctaagtgtttggtgaataggatgcggccgttacttcaggatgttatcgtgccagcgcaaagcgccttcattcccggccagatgttcactgacaatgctctcatagcttttgagtgcttccatgccatcaatcggtgtaaatcggttgagtctcaattctgtgcttacaagttggaccttacaaaggcgtatgatagggtggattggagatacctagagggagctcttcttaaggttggtttttgttctcaatgggttcagctattgatgacatgtgttacctctgttagctatgctgttcgcttcaacggatctatgcttgaatccttcaaaccgaccagaggcctccgacagggtgatcccctgtcgccctatttgttcctctttgtggcagacggtttatcaacggcgctgagtgaagctgaaagatcaggacggttacaacctctaaaagtctgcaggagagcccctggaatttcccatctcttgtttgcagatgatagcctgttgttctttaaatcaaatatggaacagactaatgtggttaagagtgctcttactttgtatgagcaaagcacaggccaactcctgagcccggccaaatgttctttgatgtttggaaagcattgtggggatgctctgcagtctgacatcagatcccttttgcaagttcaacacacttcctttgaagataaatatcttggtctgcctacaccgatgggtagactgaaggcaggaagacaccaatctttgaaggagagatttgagaaaagattaacggattggaatgagaaatacctctctatgggagggaaggaagttttaattaaatcagtcctacaggccattccgacctatgtgatgagtgtgtttaagcttccagcagggctctgtgaggaatatatgcagctgatccggaaattttgggacttaaagctttttaaccaggctctgctagcttggcaagcatggcggctgatccagtttcccaacagtttgtgtgctcaaattttaaaggcaaaatattaccccaatggggacttgtgtgatactactttccttgtggactcttcagaaacttggaagggggtggtccacgggttagagctgctgaaacaaggtctaatttggtggattggatcaggaagcaaagttagaatctggagggataactggataccgagagagcataccctaagggttttgggaaagactgttagattgagaatcaaatgggtctcggatcttatggttccacatcagcaaatttggaatgaagagctagttcgtcgaatcttctatcccccggatgctgaggaaattttgaggatccaattgccacatagccctgaagaggacttcattgcttggcactatgataaggtgggtatgttcactgttttttctgcttacaaattagccctacaggcccagatcagagctgacgaagaggttgcacaatgctcaaatggcgatggtgataggaagttgtggaagaacatttggaatgtgcaagtgccgcagaaaataaggatttttgcctggagagtatcaagagattgtctagccacacaacataataaacatcgacgacagattgtacaaaagccaaactgtgagatatgtggggcagaagtggaagatgcgtttcatgctacggttgcatgcacgaaagcagctgcgctgagggcagagatgcggcagaatcggtggctaccgggggaacaggagttctctcagttaggacctgactggctgctacatcttataaaccgtgccgacgatcagacgagggcgttaatattcctgctgttatggaattcgaggggcgaagttctgttgtcttcttggaagtttctcaggcgatgtgtgtcagcggaggaagcagagctgcttgcgtgctatgaagggctgaagctagctgctgaatggattcccatgccagttatgcttgaatatgactgtgccacagcgattgcgaggttgttgtccactactgaagagagatcaagatggtcttttctgctgcgagcagcaagatcagttatagggttaattaaggaagtgcgtttgatgcactgtaatagagagtgtaatagggtcgcacatgaacttgctcagattgctatccgttcggggcaaagcgcggtttggcgtaataatgcaccgaattgtgttatgcaatgtctgcagcatgactgtaatcctgttacgtaa

SEQ ID NO: 14811 - DNA, 3960 bp, Oryza sativa
  Clone ID: TFbOSC403264j.C1.o7.fg
atgagtgcatctccttcggtggcggcttcttcttcctcaggacaagagcaaggaagtctgaaggtctatggacggcgccatgactcccaccgacgtcggctaaccctagcaccaattccttcgccgaatctgattgcaaccatggctgccacaacttctgctcctgattctcccgctcaagttcatcacaacggctcaacggctctcgccggcatggaggttataggactgaaaacgcatgactctcaatcaggagagtccgatctctccctaatccaagggttctgggacgagattggttttcccactcctgcttctcgttggtgggaacaaaaaagcccgatagtgtcaggggtgactccgactgccccacctatcaccgaggacgatcagtggaccagagtctcatcaaaacagaagacaaaatccactgagtgccatcgccgtggatgggtaatgcgtccatggaagcggccaccggttttcccgaggttcgggggcaaccatgccggtgggtctgggactgggggatcgggagggcgttggcatggaggcgccgggcagtctcaatgcaatagcaacagatggtttcctcagggaaacaatgctgggggtcatcacaggcgagaccatgatgatctcccgtgtccggaccagcaagatcagaagcccaaacctcgggggaaggggatggcggcgcaaggccagcaaacggagaaactggaccaaacaacagatggtgggcagccacatcctactgtacaagcaactaaggccaagaagccgaggccacctcactgtcaccagtgcaaaacgagtggtcacatagcgcaggtatgtaaagcggacatcgattgctatgtatgtaacaagaaagagtcacatctagctgtcaagtgcccgctgctcaaattgccgaaacctacatgctctctttttggatttgggaaaaccgagttcggttttatccaaatcagtgattttgggatgaatgtacaggaggcttcattggttccaacagctttggtctctattcgtggcggctccttgacgcctgaaatagttcagactgagttagctcatcgaatcagaccggattggaagtgggaggcagtccttcatgctgagaattccttccttgtcgcttttccttccattgaggaattgaagaggatggatgatgtggaattccgtctaaaaaatcatggtgtgtcaatgacaataatcgagtggaaaacgactgatgagctgattccggcatatgagttggatgaagtgtgggtgcatgtgtcgggtgtgcctagcccatggcatcattacttggctttttgggcacttggttgtgttattggagctactcaggaagtagatatgctcacctacaggcggacgggagtgattcgtgtgaaggaggatcatgaaaactcgtcaaaggatggctctcatgatcaggcacacaagagggctaagaattcagcttctccaacaatatcaaaggaacaaaaatcagatgttacagccatgcaactagttctaacaccgtttggaaattgtcggcctccaccaccacctcgtctggtgatcgcaaatgggatagcttacaccattgttcacaccaaatcaggtgcaacagtggtgggtgaggtaataacagcagcagaaaaggtggatgaaatttatttgtctcaaccagtggacagtcctacacccgatcaaccttgtttgctgccaccggagttggaacgttggtccttgctgtcctctcagccggctgcagctgccaagatcaccggcgaggcctctttggcagctaccactgctgcactctccctagctgtacctcagatggctacacctacctcaaccgatgtcaatcgcagcaaggaccaactgagcaagacatcttctacacctcgttgtcgtagtgtgagatccaatgttgagaacatggatggcatcgctgcgggggatgatgactcactgctcaaggcaatgaagaggaaagcattgcgcaatttggatgacagctttgttggacgggagaaaaatccaaatcttcttcaaaaagaaaagagcgaaaggctcgttcccaaaatccaaaagcctctaaatctgtttcctcatgaaagaggggtatcagaccacacgcctttgctccttgacacaggggaagcggccttcacgggaaacattaaacagtttaaattggaactgggttggtttctacgtgatgacttctatgatcgtgttctcgagatatggaacaaactagtcaagggtcgtaatgcggtccaaagatggaataacaagatgagcgctttacgtcgccatcttagaggttgggctgctcataccagtggcgtctttaagcagaaaaaggcaaatttgcaaaacacaattgattctctagacatcgcagtagaggtacgactcctttcggatcaagaaagaattcttcttgatcaatcgagggattctttggcaagtctactccgtgaggaggagattaaatggaagaagaggatctttttcctagaccaggatgaagggaaaattgagggggttgaggccttgaaaacttatattacgagtttttataggaaactttttggaccaccagaggagaactcgttttcgcttgatgagtccataattggtgatatggctcaagtttcacaagctgaaaatgattttcttactgctcctttttcggaagaagaagtgaaagaagccatctttgcgatggagcataataaagctcctggactagatggtttcccagctgaattttaccaaaaattttgggatgttattaagcatgacctgatgaacctttttaatgaattccatactggtagcctcccaattttcggactaaattttggggtacttactctagttccaaaagttaaagaagcaaatcaaatccaacaatacagacccatatgcttgttaaatgtcagctataaaatattcactaaggtggctacaaaccgaattagctcggttgctaaccatttagtgaacccgacccaaacagttttcatgcgtggacgaaacattttagatggagttgtcatcatacatgaaacagttcatgaactacataggaagaagttgagtggggtgatattcaaaattgacttcgaaaagacgtatgacaaggttaaatggccttttctgctacaaactctgcgtatgaaagataaaaagggccttcggcaaggagaccctctctccccaatcctattcaactttatcgctgatatgctagccacattgataaacagagccaaaacacaagggcaaattgatggagtcataccacatttgattgatgggggactctccattctacaatatgctgatgacacagtgctgtttgtgaatcatgaccttgaaaaagctcagaacatgaagtcagtgcttctagctttcgagcagttgtcgggtcttaagatcaattttcataaaagtgaactgtattgttttggtgaagcacttgattatagtgatcaatacaaccagctctttggctgccaggtcggcaacttcccattccgttatctgggcattctgatccattataggaagttgagaaatgcggaatggaaagaagtggtcgagagatttgagaagaaattgagtagctggaaaggaaaacttctttcgttgggaggacgacttactttgattaactcggggatggacataagaagaaataccggcttgctaagtgggacattatttgtcgtcccaaagaacaatggggggctaggaattcatgacctcgagataaagaataaagtgttgattagttatcaccttagttacccggtggctacgtacctgggctatcctccaccaaccgggattgcgggatactattatggtggtatctcgacgtttggaccaggtggcacaggagttttttacccaggagcatgggtggcgatctag

SEQ ID NO: 14812 - DNA, 3669 bp, Oryza sativa
  Clone ID: TFbOSC419806j.C1.o3.fg
atggcgaggacgacggccggcggagtggaacagggcatcggctacggcgtagcggagctggcggccgaagcaggtgggcgagcgcgcggtggccggcggggtggagttgggcgcgtcggcgacggcgggcgatcgcacggcggctggcggggcggggcggagtggagcggcgtcgggagaacgggggatgaggccggcgggagaggggggatagatgtcggacatctatatgcagagattattggtttacttgacaagatcatggcagctcctgcagcatccaattttaacttgcggtctattattgagaaagagaagttgactggaacaaacttcatggattgggagcatgaaaagcgatgcaatgattatcttgatataagctgtctcatgcttgctactatgtcccctaagcttcaaaggcaatatgaggcattggatgctcatacgataatcacgggactacgtaacatgtctgaagaccaagcaagagctgagaggtctaatacctcaaagtccttgtttgcgtgcaggcttgcagaaggtaatccagtgagcccacatgtgatcaaaatgattggttacaccgagagtctggataagcttggctttccccttaaccgagagttggttactgatttgattctccagtcgcttcctcccagctttgagccgttcataatgaatttcaatatgaacaacctgaacaggaccttggcagaattgcatgggatgctaaagactgccgaggaaagcattaagaaaaactccaaccatgtgatggttatgcataagcgcaagcccaacaacaagaagagtggtcaaaagagaaagctaaactctgatgagatcacgagtactagcaactctaagaccaaggttcaaaagacagggcccgctaaggatgcagagtgcttcttttgcaaggagacaggtcattggaagagaaactataagaaatacctagagcagctcaagcagaagcagcaggatggaaagagttccacctcaggtattaatgttatagaaattaatcttgctacttcctctactgattcttgggtatttgatactgagtcagttgctcacatatgcaaatcgttgcaggggctgaaaagaagtaggagcttagcaagaggcgaagtggacattcgtgtgggcaatggagcaagagttgctgctgttgcggtcggcactatgccattatctttaccatcaggaatagttttggagttaaataattgttattgcattcgagctttgtgtaagaacgttatctctgcttcttgtttgcaagcagagggttatggttttagatctgtggacaatggttgttcagtctattataatgacattttctatttccatgtacccatgatgaatggcttatatattgtgaatcttgatggatgttcagtctataacattaatgcaaaaaggcaatgtcctaattatttgaatcccacttttatttggcattgtcgcttgggtcatataaatgagaaacgcatggagaagcttcatagagatggacttctacactcttttgattttgaatcatttaagacatacgaatcttgtttacttggcaaaatgacaaagggacctttcacgggtcaaagtgaaagggcaagtgaactattgggactagtacatactgatgtatgtggaccaatgagctcaactgccagaggtggttttgggtactttattacctttaccgatgactttagtaaatatggttatgtctacttaatgaggcataagtctgaatcctttgaaaagttcaaggaatttcagaatgaggtacaaaatcatttgggcaagacaatcaagtatctacgatctgatcgtggtggagagtacttgagcctagaatttggcaatcatcgaaaggaatgtggaattgttccacaactcactccgccaggaacgcctcagtggaatgcggtgtctgaacggaggaatcgtacattgttggacatggtgcgatcaatgatgagccaaactaatctaccgctaagcttttcgggttacgctctagagacaactgcgttcacactaaactgggttccatcaaaatcagtggataagacaccatatgagatatggactgggaatcgtcctagtttgtctttcctaaagatttggggctatgagataaatgcttctttgtgggggtatcctaaggaaacgaaaggatattatttttataatcgggaagagggcaaagtgtttgtcgcccgacacggtgttttcttggaaaaagagtttatttcaagaaaggatagtgggagcatggtgcgacttgaagaaattcagaaaacaccggaaaatgcttcaacgtccatacaaccacaacaagctgagcaagatgttgttcaacaggttgaacaagttgttgttgaaccagttgtggaagcaccggcttcacgaaggcccgaaagaattcggcgtacacctgcgaggtatacgttgttaactataggacaacgtgatatattgttgttagacaacgatgaacctactacctatgaggaagcaatgaaaaagacagatgtagatggaaatgttcacatctacaaggcacgattggtggcgaaaggtttcagacaaattcaaggtgttgattatgatgaaactttcttgccagtcgccatgctaaaatctattcggattgttttagcgattgctgcctatttcgattatgagatatggcaaatggatgtcaaaacagctttcctcaatggaaatctcgatgaggatgtgtacatgacacaacccaagggttttgttgatccacaatcagctaaaaagatatgcaaattgcagaaatccatttatgggttgaagcaagcatctcggagttggaatattcgttttgacgaagtagttaaggcgttgggctttgtcaaaaatgaagaagtgccttgtgtatacaagaagattagtgggagcgcactggtgtttctaatcctatatgtagatgacatattattgattgggaacgatattcctatgcttgaatccgttaacatatcgttgaaaaatagtttttcaatgaaggacttaggggaagcagcatatattctgggcataaggatctatagagatggatcaaagaggctaattggattaagcgagagtacatacattgacaaggtgttgaagatgttcaacatgcaagattctaagaaaggtttcttaccgatgtcacatggcattaatcttaacaagaatcagtgtcttcaaacgactaatgagcaaaacaagatgagtgtgattccatatgcctcggcaatcggatccatcatgtatgctatgctatgtacacgtccagatgtttcatatgtacttagtgcaacaagccgataccaatcagatccaagtgagagtcactggatagctgtaaagaatatcctgaagtacttgagaagaactaaggatatgtttctagtctatggaggacaggaagagctcgttgtaaatggttacaccgacgcaagcttccaaaccgacaaagatgattttagatcgcagtctggatttgtgttctgcctgaatggaagcgctgtgagttggaagagttccaagcaagatacagcggctaattctacaacagaagccgaatacattgccgcttctaaagcagcaaaggaagctgtttag

SEQ ID NO: 14813 - DNA, 2550 bp, Oryza sativa
  Clone ID: TFbOSC900099j.C1.o2.fg
atggccagctcttcctctgccgtctccaatccactcttcggcttccaaatctctgagaaactaggggaacagaaccatgcgctttggagtgcgcagatcgagcgcaagaagggcgagaagggcgacaaggtgatggtggtcacaaatccagcgtaccaggagtggtttgccacggaccagcaggtcctcggcttcctcttctcatctctgtcgtgtgacgtcctcacccaggtcgccacatccaagacggcgcgtgatgcatggcgcgccatagagagcatgttcatgtctcagacacgagcacgctctctcaacatcaagctttctctctgcacaacacagaaagatgatgaatatgaacctgctatctctggactggtgacaagagtagaacctgttaccgtcgcagaattgtactctattttgttgaactatgagaacaggggcagcaacaatcagcagcgcgtcgacaacagacccgtgtgccaagtttgctacaaaatgggtcacgttgcctctgaatgctggcattgtttcgatgactcctacgtgcctgatgaaaggcatgttgctgctgctacccatgctgcctatggagtggataccaactggtatcttgacacgggcgcaacagatcacatcaccggcgaactagacaagctggcggttcgagagagatacaaggggaacaatcaaattcatgcggcaaatggcgcagtttttgataagttccatgaatttcagaatttggttgagagactctttgatcgcaaaattatagctgttcaaactgactggggtgattggtatatcccatcacatttcttgtccctatgcctaatgaatctaatgaagaaaacgcaggagaaattgatgcctcagggggagacgtacgcactggagattgagccgccaacatcctctgcgccgactcgtcctcacactcggctgagcagtggtatctggaaagaaaagaaagggagaaatgtaaatgactgcaagtgggtctacaagatcaagagaaaagcagatggaacactggatagatacaagggtcgattggtggcaaaaggcttcaagcaaaggtatggcatagattatgaggacacttttagtcctgttgttaaagctgttactatcagaacagtcctatctattgttgtatctagaggatggagtctaagacaactagatgtacaaaatgccttccttcatggagtcttagaagaagaggtatatatgagacaacctccagggtatgagaaatcctccttacctaattatgtttgcaagttagataaggctttgtatgggttgaaacaggctcctagagcatggtactcaaggttaagtactaaattacaggagttaggtttcaaagcctcaaaggcagatacatctctatttttctatagtaaaggaggagttacaatgtttctgcttattcatgttgatgacattattgtagccagttatgtgcctagtgcggttccagccttgctacaggatcttggaaaggagtttgctctgaaggatttaggtgagctccactattttcttggtattgaggtaaagaagatgactaatggcattctgttaagtcaagaaaagtatgcaacatatgtgattcgcaaggtaggaatgaatgattgtaaaccagttactactccattatctacctctgaaaaattgtcagtaaatgagggaagtctattaggaccaaatgatgccacacaacatagaagtgttgttggggctttacagtatttaacactgacaagacctgatatttctttcccagtgaataagactttgttaaaagagtcagagatacaagcccctgcagcagccaagattttgtgcgataatattggagcaaagtatatgtcatcaaatctagtggttcatgtaagcacaaagcatatagaagttgattatcattttgttagagaaagggtagcaaggaagctactagagattgagtacatctcaactaaagatcaaatagctgatggtttcaccaaggctcttgcgatattattagtcaaagtggcatctcagagactgtaccgaagtccaaaaatatttatattttgggatggagggagtattaggacactcaaagattgtggtctttgctgtgagacacccgaagatcgtgtatttgctcgtggacactgtaaaaaagtggcgtggtggcagacttccgtgaggcggccggcagaggagcagggggcggcggcgctggagagagggagagagatggccgacgcgatggcgagcacgttcttgtcctccagcaacgccggcgtgccgacgtcggaccacgaccaggccacgttcttcttgtcccggaagtccagcaggatgatgaaggaggtgtctcatgtctgtccgtggtggcaacatggtcgctgccatgagcgtgctcgtgccatcgagccattggagcttgtcggcgtcgccgagtgcacagcccggcggctcgtagaagaagtcggcctactcgccggtggtgcagtcccagacgccgatgccacctatagctga

SEQ ID NO: 14814 - DNA, 1761 bp, Oryza sativa
  Clone ID: TFbOSC900367j.C1.o13.fg
atggccgtgactagaccaccgctaggccgccgcctaccgcgcgattccggcgggcccggttgcgccgtgcccgtggaggccgggcgcaaggaggaggaggagcagaagcagcgcggaaggaggcacccgaggctgaaccggccgccatcgaggagtagggcataccaagatattttgatcctgggagataccttgctgaggagggaggatcatgtagttgtgagctatccaatgaaaaggcggaagaagccttgctttgtttgtgggttgtttggacacaattcaaagcagtgcatgcaggttgactgttttggtgtgttttatgaagcaaggtcgaatacaagaatcaataggatgaaaattatcaatgcagtatccaaatctgttcctcaacctcacaaggttgaccttaacagtccaaacaggattattattgtgcagattgagaagttcatgactacttcgtttcacaatattatatgtatggttggagtgatcgagagttcttctcttcaagcaaagaatatgctggaccgaccaaacgtggcgacctccgtccctcgatgctacaccgacctcgggctccggagacgtcccaacaacctcgacgacgcagcgccgccaagcccgccgacgagggccctcgctgccaaacgcctagaccacccgcgcctgttgtccctttgcggtcgcccgtctctcgctcgagagatggaaagagaaacggaagagagcgagaggaatggaatagagtttttacttccaaggccagtacgcgacttcatgatggctggtgctgccaatgatgagtggcgtggagtattatttcattgctttgattctgctggcgctttggaatattctatggcaaatgcgggttctaggttctcttttgctactgaagtatgtgccaaactaatgaacggagcaagatatgcagttgctgatcccccattggactccgaggaccacaaagagtttgaaaatatcgtagtctctgatgcggtaatcatacttgacctgatttttgatgttgtgcatgatgatgcggtgctaaatgtgatgatgatcaacaatggagctgatgcaactggttggcgtttctatactgatgacgatttgaccaggacaccagagaacaatgtgcaatcgcttgtcttgcctaatggcattgcattgcctactttcgagatcaatggtgggattcgattcagacgccgtgtcgtcttgccgccggtgcttatggaagaagatggggtaatatatcatttcctgcagtacaaattcctaccaaacgttagagccaccgttagggctagcattctgtcaggccttgctcatggtgaagctctcgaagaactagccatagatgctcgggcccaacactttgcagccattgccggtcctgaaggacatgatctagaccctgaacagtgggctgctcttctcttgcctgagccagcagatggaggggaggggcacttggatggtgaagctgctgtaggaggggaggggcagttggacggtgaagctgctgtagaggtaggggaggaggttcttgaggtggctgtggaggtaggggacgaggtggttcttccagccctttatggatttgtcgatgatgatgagtatcggtctaccgaagatgatgactatgttccagatgaagaggagtctcattcttcggatgatgattttgttccagatgaaagtgatgatgactatgtgccacatcatgaggggtacgaatcaagtgattaa

SEQ ID NO: 14815 - DNA, 1275 bp, Oryza sativa
  Clone ID: TFbOSC24698j.C1.o2.fg
atggcccgcacaacggcaaatgcgacggcgtcgatggcacggctcggcgcggcggctagtggcgaccagagcagcggcggcggcggcggagaggagggcgacggcgctagggtgatagagagcatgggaggactcagcgaaatggggaaaaagagaaaggggatggcggtgcaattggtcagcatgagggacaatttcatcggatcaggatctcaacagtttcatggatcaactcagcacaactctatgagcttcccatgtcaacctttcgaagatcagcctcaatccaaagtcatggctaatcagactcagacagtggaagaattgttgcgacagatgcgacgtcggtaccagatataccagatgcagcagatgcaacggcaatgtcaggagccgcgtcaaggccaccagccacaaatgcaagtccaggtgccaacccggaacctgaatcagagtcagagtcaggagttcccaatatcggcacctaagacccctgtcaaaatgttgtccagatccccgaagataacttcagccaactcaccgtcggaccaaaggaaaataagtgctacctgttatgactgtggtgagcaaggtcattatcccaactctggagcgaacaggacagtaaaatggaagatggataatggcaggaccatgttcatcaccagttcagaatttactcctgaagatgtagcaaggatacccaagcgtcagagaggaagaaataccttccgaggagcgcgtcagctaacccggcatctcataaagtacggtccgcccagacccgaagatgatgaatcaggagagcggttctctgctgacgacgacgatgatgatgatgatgatgatgatgacgatgatgatgcgacccttaacagtttcatggaaagaggattggagttcaaagcatgtactagatgtgggatagtcggacacactgctagtttatgcctccccacatgccgttgtggtgaatacacccattactcagatgcatgccctttgaggaaggtcacatgtttcttgtgtgaaggaacagatcatgtgcctaaggactgtcagttgaacgcggtcatagctaagaccaagaaagaacaagggacaaccgtgcaacccattcgtcaaccaatggcagtcgacaacaacagtcacaacccttctgctcttcctccaactccagctccagtggaaaccaaccatggaagaagcaacgtcaccaaggatgttcataagtcactacttgttccagtttcagctgtcaatgtgcataactag

SEQ ID NO: 14816 - DNA, 1161 bp, Oryza sativa
  Clone ID: TFbOSC900368j.C1.o18.fg
atggcacctcaaccaacctgtcagacttgtgtccgcaactaccttggttctaaggaagacccagctttgtcagaaaatccaaatcaactagctgaacaagtcaccaaccaagttgccaagactgataatactgttcctggaccaaacaaggaagttgcaaccagaaatcaacactcctcaatggatatttatcagattctagccaatcagactcagatgctacaagaaatagctcaaaatttggcttctatacaacaacaactgctactaccacagcccaaggtgaatccagacaagagtaagaatgaggccgcagaaatacaaggaacacaatcagtagaaggcactgatacccataaagagaagaacaaagaattcttaaatgtgatgattacagggatgaaaaccccacttcaagctaataattgccccaaccttcagaactcaatcaataaatccgtatcgcgagaaaatagcatgattaaagaaggaagttgtcacaaaagaaagaccttgccatcagaagttgacatgcaagatgtcccacaatgtcagacaatgcaatcttgccaaaacctacccaagtcccccaccctcaaatcaaagaagatcagacacgttcccggattcatatgcttcatttgccacaaaattggccattacatgagacactgcccccaaaaaccctatatggatgcaccactacaagctaatatgagcacctcaaggatgcccttctatccccaaggaagcccaaattcgccaaatgttaatgcagtacgttcaaccttccctgatgacaaaagagcaaaagcatcctgcgacatgtgccaagacatccaagaaaagaaagagatgcaagaatacaagagatgcaaagtaatgtccctagagattcaagcaaaagaagatttgtgtcgaaaaacaaactcgccagcacaatactatcagaaagcatctcagcattcaactagttccggttctacgtctcgttcgactatgtcagaacctggtcagcaagccacaatgatcaacagtaatagccatgaaggaagcaactccgtaccatgccctacaccttcaaaaagacgtggttataaggcaggagtcgaatgtttcatctgccatgagatgggacactattcatggtgctgcccttag

SEQ ID NO: 14817 - DNA, 5079 bp, Oryza sativa
  Clone ID: TFbOSC900114j.C1.o4.np
attccgtcgtttccgagagtccgtttttgccggagaagagtttgaagagttccaaggccagcaggcaagctcctggtttggaatggtatattcctggtttggagatagaactgtgagccggggtggttgttcagaatggttgggcctatgcaacaggatgccgcgctacaagcctgagtacttgttggtgttgagggttttgtccaggagttgcgtacaatgtcctttgtcatggatttgggactgcccctttttatgcccagattcctcatgatcgtcatgagagaagtgccgagtcaaagtcaccttgaacagtaatagtgaagatatccctcagtgatgttcaaagctggaggaagaaactacatccatgcatgtcagaagtggcaaggatcgccataggagagcttcgcgatcgctacagtgatcattggccgacactgagtatcgctaccatcctcgtcaaccacagggaagtaccgtggcagttaccttgagactgaaggaattgagaatgatgctaccacaggcatttggtggagatgctgtgggctatggatgaaagtcgtgcggagatgtgttagcagctcaagatcgtgaagaccggaatcgtggtaagatttgcagctagaagacaaagtggatcgtttggagaaggaactagctgtattgaaggagaagcaccaccgcagaaggccaggattcgtctcaccgcaaggaagaagctctatttgtccctcgctatcaattggcgccaaagatggtgaacactccagcaacgggaatggccccagtaacaataacaacggagagaatcccactttgctcaagttcttgctcaacagacacagctaatgaacatgatgatgcacaactccagaaccagcaaaaccaaggaaataaccatgcacctccccagacaagttagcagaatttcttcgtgtgaggccgcctgttttctctagcaccctaatcctgttgaagctggtgattggctgcatgccatagagaagaagttgatttgcttcagtgcactgatcaggagaaggtctcatttgcatcacatcgttgcatggccctgcctctgaatggtgggatcacttccgtctgaacaggctactgctgaacctatcacttggcttgaattcaccgctgctttccggaaacgcatataccatcgggagtggtgtctctcaagaagaaggaattcaggtgctcactcagggatctcgctctgttacggagtatttgcacgagttcaatgtcttgctcgttatgctccggaagatgtgcgcaatgatgaagagcgccagagaagttcttggaaggacttaatgatgagctttcttacccactcatgatggggattatcatgatttccagaagttagtggataaagctattcgccagaggaaaagtacaatcgtatggagcaaaagaaacgccggattgctcaattaagacacaacaggggaataatcagaagccgcgtcttactttaggaccccgtctatgccacagggaggttcttcgtctgttgttcgtccgcagcgtcagtcttcaacaacaatgctggcaacaacatccgtaatcaagctccacatccgttgcagctccagcacagcaacaacctgccaagagggagcaaggcagcagcccgtggtgtgtttcaactgtggagacccaggacattatgctaacaaggtccgaagccccgacgcgtgaaagttgtccctgtccagagcaactctacgtaccagcatcaaaggcccgtgttaatcatgttgctgctgcagaagctcagatgctccagatgtgattttgggtacgttccttgttaacttagttcctcaacagtgcttttcgattctggtgctacacattcattcttatctatgagtttgcgggaaatcatgggatggaagtagaagatcttagacgtcctttgaggttagtaccccaagtaatcaagcactctctttgcaacgtagcccctcttcagaatagaaattcaaggagtaccattcctggccaatcttatcttgttgaatccaaagaccttgatgtcatcctagggatggactggttagccagactaaaggtgtgatagactgtgctaacagaaaagtaactctcaccagcaatatggtcgagttgtaactgttcatgcattgtcttctgagtctttaaggtcagactgaaccagataactttggaagagatttctatagtccgggagtatccgatgtgttcccatatgatttacctggtatgccgcccaaaagggatataagttcagaatagatttggtacctggaacaactccgatccataagagacctatagaatggcagccaatgagttggcagaagtcaagaggcaagtagatgtttgcttcagaaaggatacatcagaccgagttcatcaccatggggagctcggttatttttgtggaaaagaaagaccatacccagagaatgtgtgtggatatcgtgcactaaatgatgtgactatcaagaataagtatccactacccaaattgatgatttgtttgatcagcttaaaggtgctactgttttctccaagtagatcttcgatcagggtatcaccagttaagaatcaaagaggaagatatcctaagacagcttttaccactaggtatgggttgttcgaatgtactgttagtcttttggacttaccaatgcccccgctttcttcatgaacttgatgaataggtgtttatggaatacctagacaagtttgtggcggtctttattgatgaattcttatctactctcgaaccaaagaagagcatgaagaacatcttcgcctgcactagagaagttacgagaacatcaactgtatgctaagtttagcaaggtgaattttggttgtctgaagtgaagttccttggtcacgtcatctcagcggaggagttgccgttgatcctagtaatgtggaatccgtaaccaactggaacaaccgaagacagtttcagagatccgcagtttcctaggcctcgcaggaattatcggaggtttatagagaatttttccaagattgctaagcccatgaccgactgcttcagaaagatgtgaagtacaagtggtcggaagaatgtgagcgagttttcaagagttgaaaagtcgcttgatatcagctcctattttgatttacctgatccaaagaagggtttccaagtgtattgcgatgcatccaaactgggttaggttgtcttctaatgcaagatggaaaggtggttgcctatgcattcgtcagttacgtccgcatgagaagaactaccctactcatgatcttgagtagctgtagtagttcatgcgttgaaaatttggcgtcattatcttttcggactcgtacagaggtatataccgatcacaagagtttaaagtatatctttatcagccggatctgaacatgagacaacggagatggttggaactaattaagattatgacataggaattcattatcacccgggaaaggctaatgttgtagcgacgctcttagtagaaaaggctattgcaatgctacggaaggacgacagcgccattggaattatgcaaggaatttgaaagattaaatttgggaattgtcgtagaggtttcgttgcagccttagaagcgaagcccactctaattgatcagttagagaagcccaaattaatgatcctgatattcaagagatcaagaagatatgagaagaggaaaagctatcggtttcttggaggatgagcacggaacttatggttgggtgagagaatctgtgtccccgacaacaaagatttaaaagagcaattctgaaagaagctcatgatactttatactccattcaccctggtatactaagatgtaccaggatctcaaggaaagattttggtgggcaagtatgagcgtgaaatcgcagaatacgtagcagtatgtgatgtttgtcagcgagtaaggcagaacatcagaaacccgccggtttgttgcaggctttgaagattctgaatggaagtgggaagaaatcggtatggattttatcactggtttacccgaacgtcatcaggtcatgactctatttgggtgatagtcgacagacttacaaagtagctcatttcattccggtaaagacaacctattccggaagtcgctagcggaattgtacatggcaaggattgtgtgtttgcatggcgtccctaagaaatagtgtctgatcgaggcagtcagtttacctcaaatttttggaagaacttcaggaagagatgggttctaagctgaactttagtactgcttatcatcgtagacagacggacaaaccgaaagggtgaatcagattttagaagacatgtgagagcttgtgctttagatttcgatggaagttgggataagaatctacctatgcagaattttcgtacaacaacagttatcaagctagtcttcagatggtccttacgaagcactgtatggtcggaagtgtcgcactccgcttttgtggatcaaacgggagaacgtcaggttttcgggacggatatcctaagggaagcgaagaaaaggtaaagatcattcaagaaagattgcgagtggctcaatctctcataagagttatgccgacaatcgccgcagagatctaagttttgaaggaattatgtgtatcttcgtgtcacgcctcttagaggagttcatcgtttccaaccaaaggaaaattggcaccgcgttttgtgggaccttataagattgtcataaaagaggagaggttgcttatcagttggagttacctcaatctttggcagagtccataatgtgttccatgtgtcgcaattgaaaaagtgtttaagggtcctaccgaagaagctaatctcgaacagatagaagtccaagaggatctgtctatgttgagaaaccaatccgtattttggaaacagatgagagaagaaccggaatcgagttatccgcttttgcaaagtccaatggagtaatcactcggagaagaatcaacttgggaacgagaagatgaattgaagtcagctcatccgctctgttcgccagttcttccgaatctcgaggacgagattctgtt

SEQ ID NO: 14818 - DNA, 1236 bp, Oryza sativa
  Clone ID: TFbOSC417493j.C1.o3.np
atggatgaagtcgggtgtcgatggacattctccagggcaaatgaaggctacacgagctgcggcccggtagtcgagatgtcatatggcagagggttggtgccctgctgctaggggctcagttctgcctgcctgtcccgggtatcccggccgtaggtgggattgggtcggtactcttgtctaaggctaggatgggttggaaactatgtcacgtcttccgtccgtataccgtggtggtagattgcttaacaactaaaatgtggaatggttggcctgggttggcttgggacgagctgggacccagggtcgggttgccagttcggtctaaatcatcgtaggccttgggttaaggcagtactagatggtcaggtcagtgaagaagaagacatcgtcagttgtttgtcgaaactccagaaggctgttggatccgtcagcgcagcgaaggaagcagtgaagccagctgtgaagcaggacaaaagacttagatctgttaaggtcctatccttagtttctaatctgtctctcccctttgttttccctctctccctctccaaatctttgcaacagatggctgacaatgagaaaggcaataaggtcagaagtcaggacattggtaccttaagctcccgagtgaatgaagcaccagacaccagttgtgtgacactggtccaacacctgattaaccagaaccgattgcttatagagatactacagcagcatcagacgccaattctgaacctgagtcaaatacaacctcaagtgcagttggaggcagtccaagcactcacaccacaagtcagcatgccgccagcatcccgaaggacccatggtgacgtgccacatgttgacccaaaagaagcaagtaacatttgctttatgtgtgatgagcaagggcactatgcaagggagcgtcctcagcagaaaagaaaaacaccaatgcgaaccgaagatgaagtccgtaagatgatcattactagcacagaatggcctccaccaggaatgaccagacgtcagagaagaaataccttccgaggtgcaccacagttgacagagcatcttttagctaatggaggtagagtgtctgatagtgaagattcagatcaagtctcctcagatgatgaagatgaaatggaatgtaaggcatgctctcgttgtggagaaatcggtcattgtcgcgacacatgtggaagtacggtagtgctttgcaacgaggacgacgaacgagaacggcttgacgga

SEQ ID NO: 14819 - DNA, 3849 bp, Oryza sativa
  Clone ID: TFbOSC10615j.C1.o9.fg
atggctggttttgccgatgcactgaggccggataaattcaccggtgtgcattttaagagatggcagatcagggtcactctgtggctgacagctattaaatgcttctgggtgagtactggcaaacctgaaggagttcttactgctgaacagcagaagcaattcgaggaagccactactctctttgtgggatgcattcttagcgttcttggcgatcgtctggtcgaggtgtatatgcatatgaccgacgctaaggagttgtgggatgcactgaatactaaattcggtgctactgatgctagcaatgatctgtatatcatggagcagtttcatgactacaagatggctgacaaccgctctgtagtcgaacaggctcatgagatacaaaccatggctaaggaactcgaactccttaagtgtgtcttacccgacaaatttgtggctgggtgcattattgcgaaactacctccatcttggagaagtttcggtactgcactcaaacacaagagacaggaatactccgttgaggggttgatagcgtctcttgatgttgaggagaaagctcgggaaaaagatgccgcgtctaagggcgatggtgggcagtccagtgccaatgttgtgcacaaggcccagaacaagagcaaggggaaatacaaagctcagcagaccaccaacttcaagaagcagaagaagaacaacaataatcctaatcaggatgagaggatttgctttgtgtgtggtcaagttggtcatctggctaggaagtgtccacagcgcaaggggatgaaggcacctgcagggcagacttctaagtctgctaatgtgaccattggcaacactggagatggaagcgggtatggtaatttacctactgttttttcagttaatcaatctactaattggtgggttgatactggggccaatgtcgcacggggttccaccgtcctaatggggaatgggtcacatgcttctgttcatggtgttggcacggtagatctgaagtttacttcgggaaagatcgtgcagctgaagaacgtgcagcatgtcccttctatcgacaggaatcttgttagtggctcccgtctgactagagacggatttaagttggtttttgagtctaataaagtagtcgtgtctaaacatggatattttattggtaaagcaacccgcaagcctcacaaggctgccgaggagagaaacttggcaccactagaactcctacattcatatctttgtgaaatgaatggggtgttgacgaagggtggaaaacgatatttcatgacattcattgatgatgctactagattttgctatgtgtacttgttgaaaatgaaagacgaggctctagactattttaaaatttataaggcagaagttgaaaatcaacttgacagaaagataaaaaggcttaggtctgatcgtggtggaaagtttttctcgaacgagtttgacttattctgtgaggaacatggcatcatacatgagaggacgcctccctattctcccgagtctaatgggattgctgaaaggaagaaccgcacactgactgacttggtgaatgccatgttggacaccgcgggactgcctaaggcatggtggggggaggcattgttgacctcaaatcatgtgttaaacagagttcctaacagaaataaggacaaaacaccatatgagatatggattggtagaaaaaccatcactttcttatttgcgcacatgggggtgcttggcgaaagtcaatttaaatccgaggtaccggacatgcatgttggtacaattatggagtctcgtgatgctatcttctttgagagctttttcccaatgaaggatacacatagtggttcgaaccaaccatctgaaataattcccagttcaatcacaccaccagaacaaactgaacatacacatgaacttgtctctgaggaggatgttagtgaagctcctcgaaggagtaagagacaaaggacggctaagtcttttggtgatgatttcactgtgtacctcgtggatgacactcctaagtcaatttcagaagcatatgcatctcctgatgcagactactggaaggaggctgtccgtagtgaaatggattccattgtcgctaacgggacttgggaggtgacagagcgaccctatgggtgtaaacctgtggggtgcaagtgggtgttcaagaagaagcttaggcctgacggtactattgaaaagtacaaggctcggcttgttgctaagggctatactcagaaagaaggcgaagatttctttgacacttactcacctgttgctagattgaccacaattcgtgtgctactttccctagcagcctcacatggtcttctcgttcatcaaatggacgttaagacagcttttcttaatggagagctggatgaggagatctatatggatcaacctgatgggtttgtagttgaaggtcaagaaggaaaagtgtgcaaattgttgaagtctttgtatggtctgaaacaagctcctaagcaatggcatgagaaatttgacaaaacattgacatctacaggctttgcagtcaatgaggcagataaatgtgtgtactatcgccatggtgggggtgagggagttattttgtgcttgtatgttgacgacatactgatatttgggacaaaccttgaggtgataaatgatgttaaatcattcttatctcaaaattttgatatgaaggatttgggagtagctgatgttatcttaaacattaagctaattagaggtgagaatgggattacactcttgcagtcccattatgtggagaagatcttgaatcgctttggctacattgatagtaagccttctccaacaccttatgatcctagcttgttgcttcgcaagaacaagagaattgctaggaatcaactggaatactcccaaatcattggctcgttgatgtacctggctagtgcaactaggcctgatatctcctttgctgtgagcaagttgagccgatttacctctaatccgggagatgatcactggcgtgcgcttgagcgagtaatgcgctatctgaaaggtactgtggaattggggcttcactatactgggtatcctgcggtactggagggttatagtgattctaactggatctctggtgtggatgagatcaaagccactagtggatatgttttcacactgggtggtggtgctgtttcatggaggtcttgcaaacagaccattttgacgaggtcaaccatggaagcagagctaacggcactggatactgctactgttgaggcagaatggctgcgtgatctattaatggatctgcctgttgttgaaaaaccggtgccggctatccttatgaactgtgacaatcaaacgacatgtgaaaagacgattgaagtctgtcaggaaattaagaaactccggagttataacgttggattacatccaaacagcgagaaacctggcagatcccttcacgaagggactatcacgaaatgtgatagacaatgcatcgaaggagatgggtttgagacccatagcattcttgaaagaactcacctttgtgagcttgactgttggtcgcagtctatgaagattttgggtgaatcttctaggaagcttactaaagacctaggaattaaatcattatatgtctataatctcaacaaaaaccacttaatcttaagtgtgcactgcaatgattggaaggcctactcttgtaccacaatgatattcagccagtgtgctagaaaccagaaaagcagcgctattccgagtgtcacagtgattggtcgacgcaaggccataacaatatgtatctctacatcgagccagagacctatcccgctgataatcgagcaaaatgattggtcaatgttctcctga

SEQ ID NO: 14820 - DNA, 2061 bp, Oryza sativa
  Clone ID: TFbOSC14490j.C1.o1.fg
atgaagtccaatagaggagtgtctttcagcacaaagaatgcagcaagtggaagcaaattcacatcaagaggtagtggaaatagaggtgcattttctagctcaagtggtggtgcacgatctagcaattatggtacttccagtgggaaagatttggctgctccaaatgagaggaaaaatgcagcaaacacatcatctacttcagtgggttcttccaccaagagtagtggaattcaatgcttcaaatgtggtggtcgtggtcatgttgctagagagtgtccaaacaatagaaccatcgttgtgaatgatcaaggagagtatgaatctactagtgaggaagaacaagaagatagtgaagaggagaataatcttgagaaggatatctgtgaatttgaatctggtgctgctcttgttgtaactcaaattttgagtgtacaaatgagtgatgctgaaaatggacagcggcacaatctttttcaaactagagctaaagtgcaagataaagttgtcaaggtgatcattgatggtggaagttgccacaatcttgctagcaaagaaatggttgaaaagcttggtttgaagctgctaaaacatcctcatccatatcatgtgcaatggcttaataattcaggttctattaagattgcacaaagagtaaaagttcctttcaagattggtgaatatattgacaccatggagtgtgatgtggcacctatgacagtgtgtcacatgctgttgggaagaccatggcaatatgatcggtcatctctacattgtggtagaaccaatcaatacaccatcaagtggaagggcaaggagttgattcttaaacccatgacaccgcagcaaattctagctgagcacttgcaaaagagctctgaagtgaggaatgagagtgcaaaagaaggacagaaaaataatttgagtgccccccacaaatcggaatatgaagatgtctttccagaggaaacacctgttggacttcctccattgcgtggcattgaacatcaaattgatctcatccctggagctacacttccaaaccgtccagcataccgcaccaaccctgaagaaactaaggaaattcaaaggcaagtacaagcacttttagataaaggttatgttcgagaaagtttaagtccttgtgctgtccctgtgattttggtgccaaagaaagatggttcatggaggatgtgtgtagattgtagagccataaataacatcactgttcgctatcgtcatcctattcctaggctagatgatatgctagatgaattgagtgggtctatgatattttcgaaaattgatttgagaagtggtttccatcaaattagaatgaaaattggagacgaatggaaaactgcttttaaaacaaagtttgggttgtatgaatggttagttatgccttttggtttgactaatgcacctagtacattcatgagattaatgaaccatgtcttaagagcatttattggaaaatttgttgttgtgtactttgatgatatcctaatttacagcaagacattggaggaacatgttgctcatattcagcaagttttggatgtactcaggaaagaacaattatatgctaaccttgagaagtgcacattttgtacagatcaggttgtgtttcttggttttgttgtttcaggtttaggaattcaggttgatgaatcaaaggtgaaagcaataaaggattggccaactcctgaaaatgtaagccaggtgaaaagttttcgtggacttgctggtttttacaggagatttgtcagaggtttcagcaccatagctgcaccattgaacgagttgacaaagaaaggtgttgccttccaatggggagaaccgcaagagaaagctttccaagaattgaagaaaagattgtccgaaggccccttgcttgtgttgccggatttcactaaaaccttcgaggttgaatgtgatgcaagtgggattggtattggaggcgttctcatgcaaaatggacagcccgttgcatatttcagtgagaagttgggggatcctctagagtcgacctgcaggcatgcaagcttgagtattctatag

SEQ ID NO: 14821 - DNA, 4212 bp, Oryza sativa
  Clone ID: TFbOSC400860j.C1.o8.fg
atgtcggctccaacgccgcgtgtgtcgcggtcccgtgaaccgcaccagcgacgtatctcccgttcacctccacaccgtcgtggtcgccggcggcctggcgaagaccgtgaacttattccggtccagtgtgtggtgaaggaggtgggcggctcagccaactatccactgctgacgaagactaactacggagattgggctctcatgatgaaggtcatgctgcaagcgcgcggcctgtgggatgccgttgagcatggtgatgccgatttccaggcggatcgaatggcgatggaggccatactccgggcgatgccgccggagatgttagcttcactcgccgtcaagccctcggccaaggaggcgtgggacgcgatcaagacgatgcgagttggcgtcgatcgtgtccgcaagtcgaaggcgcaaatgctgcagaagcagtatgatgcgatggagttcaaggacggggagaccgtcgaggaattctcgttgcgcctcaacggactcgtcaccaacctcgccacgcttggagtccatcttgaagaaggaaaggtggttgaaaaattccttaactctgttccagatcatctctcgcagatcgctttgtccattgagacgttgcttgacctcgatgagctcacgctcgaggaggtcaccggccggctccgaaacgctgaggagaagctgcctgccaagagctctgctgccggtgggaaactgtttctcactgaggagcagtggactgcccggtggaaggagaaacaggccgcggaaagttcctctgggaaggcgaagtccggcggtggcaaccgtcgtcggcgtggtggcaagaagaaagctgaagctgctgcgcacgatggagatcgtgccgggcgcgacacgcaggaagggcgggaaccaaaccgcgacaagtgccgcaattgcggccgcacggggcactgggctaaggactgccggcagcccaagcggcctgccgaggcctaccaggccctggcggatgaggacgatgacgagccggccctcctcatggcccatgtcgtcgacgctgctcctgtgtctgcgtcgtcttcatctgcgccacctgcttcttcgccgccatcgcagcctgacaagacgatcgagctcgtcgagccaaaggtgttcgcgcaccttctcacggagaaacaaaccgacggcggcgtctggcatctcgacaccggagcaacaaaccacatgacgggcattcgcgaagttttcgctgagctcgacctgtctgtgcggggctcggtgcgattcggcgacggctccgtcgtcggaattgagggtcgtggcaagatcatttttgagtgcaggaatcaggagcaccgagcgttgacgggggtgtattacatccctaaactcaacgccaacttgataagtttgggccagctcgatgaaaatgggtgcgacgtccgtatctaccacggtgtttgcacgatacgggacccggcggcccagctgctcgcacgcgttcagcggacgcggaatcgcctgtacttgatcaagctcaccattgggcaaccggtgtgcctcgcggccaaggcgcaggagtgcgcctggctgtggcatgcgcgctacggccacctccacttcgacgctctgcgacgactggcgagccgcgacatggtgcgcggcatgcccgacatcgatcatgtcgagcagctgtgcgacagctgcgtcatatctaagcagcgacgcaccccgtttccacgccgctccatgtttcgtgctgaggatcgccttgagctggtgcatggcgatctgtgtggtcccatctcgccggcaacccctggaggcaagactcatttcctcctgcttgatgatgcgagcaggtacatgtggatcactctgctgggatgcaagagcgaggcggctgatgccatcaagcgctttcaggcgcgagccgaggcggaatccaagcagaaactgcgcatcctccgcaccgacaacggtggcgagttcacctcggtggaattcgccacctactgcgccgaacagggagtctcacgccacttctccgcgccctactcgccccaacagaatggcgtggtggagcgccgcaaccaaaccatccttgggatggctcgcagcttgttgaaagccaagaacatgccggcacgctattggggggaggctgtcacgacggcagtttttctgctcaatcgcgcgccgacaaagagcttggccaacatgacaccttatgaggcgtggcatgggaagaagccggcggtgggttacctgcgcacgttcgggtgcctggcctatgtcaaggacgtgcggcctcacctccccaagctctctgaccgcagcaagccgatggttctcatcggatacgccgacggagccaaggcgtacaaggtgttcgatccggtgtctggacgagtgcaggtctcgcgcgacgtgattttcgacgagggcgctgggtgggactgggatgcggcgggcgctgcagccgtccccggcggcggaggttgctcagacttcaccgtcgagtacctgacaacgggcacatcaccgtcggcttcgacctcggctccatcatctgcatcttcgggcgcttccgctatgggtgatctactgggcgacgcacttacgcctgggttcgcaacccgggatccggaggagggggagcttcatctccttgcggccgaggaaccagcctcgttcactgaggctgaacagcggcaggagtggaggcgggctatgctggatgaaatcgcctcaattgaggagaacaacacatggcgccttgtcgatctcccgtccggccatcgtgcaattggcctcaagtgggtcttcaagctcaagaaggatgcagaaggcagagtggcaaagcacaaggctcgcctcatcgcgaaaggctatgtgcagcaacccggcatcgactttgaggaagtgttcaccccggttgcacggctggaatctgttcggttgttgctcgctcaggccgcgcaggcaggctggacagtgcaccatatggacgtcaagtccgcgttcctcaacggtgagctagccgaggaggtctacgtcaagcagccgcccggtttcgtcaaggaaggccgtgaacaccaagtccttcggcttgacaaggcgctgtacgggctgcgccaagcgccccgtgcgtggaactccaagctcgaagccaccctgctgtctctcggcttccggcggaacgactgcgaacatgcggtctatgttcgaggtaacaccagtgcacggttgctcgttggtgtttatgtcgacgatctaatcatcacagggacaaaggaggatgagatcgttcgattcaagggcgaaatgaaggcgttgttcaagatgagtgacctcgggcttctcagtttctacctgggtatcgaggtcgagcaggtggcgggcagcatacggctgtcacaggcagcatacgcacgccgtatccttgagcgagcagggatgctgggatgcaacccgagcgccacgccaatggaacaacgcctcaagctcagcaaaaccagtgctgcggcgtcggtgaaccccacctggtaccgtggcatcgttggctgtttgcggtatctggtacatacgaggccggatatcgcgttctcggtgggctacgtgagccgcttcatggaggcgcccaccaccgagcacgaagcggcggtgaagcgcatactgcgctatatcgccggcacgacggagttcgggtgtcactaccaccagtccagcagccccgttcagttggtgggatacagtgacgcggacatggccggcgacccagacacgcgcaagagtacgaccggtgttgtcttcttcctcgggacaagcccggtcagctggcaatccgtcaagcaaaaggttgtcgcgctttcgtcttgcgaggcggagtacatcgctgcgacaacggctgcatgccaaggcgtctggctctctcagttgctaggagagatcaatcaagaagagccggacgcgttcaagcttctcattgataacaaatcagcaattgccctcagcaaaaatccggtgttccacgagaggagcaagcacatcgctacccgctaccactacattcgagaacgggtggaagatggctccgttcatgtcgagttcgtcgggactgaggggcagattgcagacattttgaccaaggcacttgggcgcacacgttttcaggagcttcgctcccgcattggcgttgccgacgtcaaattcaggtgcaagacttag

SEQ ID NO: 14822 - DNA, 3030 bp, Oryza sativa
  Clone ID: TFbOSC401810j.C1.o53.gm
atggctggttttgccgatgcactgaggccggataaattcaccggtgtgcattttaagagatggcagatcagggtcactctgtggctgacagctattaaatgcttctgggtgagtactggcaaacctgaaggagttcttactgctgaacagcagaagcaattcgaggaagccactactctctttgtgggatgcattcttagcgttcttggcgatcgtctggtcgaggtgtatatgcatatgaccgacgctaaggagttgtgggatgcactgaatactaaattcggtgctactgatgctagcaatgatctgtatatcatggagcagtttcatgactacaagatggctgacaaccgctctgtagtcgaacaggctcatgagatacaaaccatggctaaggaactcgaactccttaagtgtgtcttacccgacaaatttgtggctgggtgcattattgcgaaactacctccatcttggagaagtttcggtactgcactcaaacacaagagacaggaatactccgttgaggggttgatagcgtctcttgatgttgaggagaaagctcgggaaaaagatgccgcgtctaagggcgatggtgggcagtccagtgccaatgttgtgcacaaggcccagaacaagagcaaggggaaatacaaagctcagcagaccaccaacttcaagaagcagaagaagaacaacaataatcctaatcaggatgagaggatttgctttgtgtgtggtcaagttggtcatctggctaggaagtgtccacagcgcaaggggatgaaggcacctgcagggcagacttctaagtctgctaatgtgaccattggcaacactggagatggaagcgggtatggtaatttacctactgtcgcacggggttccaccgtcctaatggggaatgggtcacatgcttctgttcatggtgttggcacggtagatctgaagtttacttcgggaaagatcgtgcagctgaagaacgtgcagcatgtcccttctatcgacaggaatcttgatacacatagtggttcgaaccaaccatctgaaataattcccagttcaatcacaccaccagaacaaactgaacatacacatgaacttgtctctgaggaggatgttagtgaagctcctcgaaggagtaagagacaaaggacggctaagtcttttggtgatgatttcactgtgtacctcgtggatgacactcctaagtcaatttcagaagcatatgcatctcctgatgcagactactggaaggaggctgtccgtagtgaaatggattccattgtcgctaacgggacttgggaggtgacagagcgaccctatgggtgtaaacctgtggggtgcaagtgggtgttcaagaagaagcttaggcctgacgcctcacatggtcttctcgttcatcaaatggacgttaagacagcttttcttaatggagagctggatgaggagatctatatggatcaacctgatgggtttgtagttgaaggctttgcagtcaatgaggcagataaatgtgtgtactatcgccatggtgggggtgagggagttattttgtgcttgtatgttgacgacatactgatatttgggacaaaccttgagtcccattatgtggagaagatcttgaatcgctttggctacattgatagtaagccttctccaacaccttatgatcctagcttgttgcttcgcaagaacaagagaattgctaggaatcaactggaatactcccaaatcattggctcgttgatgtacctggctagtgcaactaggcctgatatctcctttgctgtgagcaagttgagccgatttacctctaatccgggagatgatcactggcgtgcgcttgagcgagtaatgcgctatctgaaaggtactgtggaattggggcttcactatactgggtatcctgcggtactggagggttatagtgattctaactggatctctggtgtggatgagatcaaagccactagtggatatgttttcacactgggtggtggtgctgtttcatggaggtcttgcaaacagaccattttgacgaggtcaaccatggaagcagagctaacggcactggatactgctactgttgaggcagaatggctgcgtgatctattaatggatctgcctgttgttgaaaaaccggtgccggctatccttatgaactgtgacaatcaaacggaaattaagaaactccggagttataacgttggattacatccaaacagcgagaaacctggcagatcccttcacgaagggactatcacgaaatactactccatctcgctcgccggcgtgcaccggcgatcgggagagcaggtctccggaacctctgccttcgacgttctgcaccgggagaaggcggcaataagggacctgctgctgctgctccaacgacatgcctatactgctatcgcggcggctgccgtcgactcgcacttcccgcaagattacctcaaaaatattactccgatgccgtcatggctttacaaccaactgttcgacgtcggggcctgtagatcgcacggacgcccacatagaaggtgtaaagttctaaccggcagctttttagtggctgaagggggagagagggagagagggtcgccggtgctccggtggccgggaggtggcgacgccggcggcaaagcggcaaaaggcggtgatgcaaggcggttccagaggagaagatcgaggagaacttcgcgacggcgccgtggaaaagaagaagtcggcgccagctctgtgctcccattggatgtcgacggcggcgcgagcacgtggcagctgctgctgtgttgggtggcggaggaggagcagcacggcacggcgacggtggcggcgcgacttggtggcgacggcaagacggcggcgacggcgcacaaagccgtgggcggcggcggcgctgtggcttgggcgccgagtgcgcccacagagaggagaaagggcggctcagctggttgggccggcttgggccgtgcgagtgagaggaggaaaggagaaatgcggcccaaactcaaaagggagaaagtctaa

SEQ ID NO: 14823 - DNA, 3180 bp, Oryza sativa
  Clone ID: TFbOSC411095j.C1.o6.gm
atgaagccggagaacgcgttcgtgacggtgcaggaggggacgctgtgcttggcgatcgtggtgacgacgaagcagcagccggtgcccatcctcgggaacctcgcgcagcagaacatccacgtcggctcgccgccgccgactgcgcagggagcggctggccagcggagcatacgagcggcgggcaggcgcgctgcgggagaggaagatggcgccgacggggagcgggacgaggagagcgaggatgccgccgccgtcatcgtccatttgcacagatctcgcgcccgcgccgtcagcggcgtcgccggcgggagtgtgagcgcgggggcagcggcgggtggagcgggcggggacagcttgttcccgcgtcggcgccgtcggccacctctccggctctcccttctcaagcgtcccaaccgccgccgcctcccttctcccgtgtcgtcgtcatcgccgccggcttccgggcctctccgacggtccaaccccgaggtcgcacgcgccaccgcagccaccaccggccgccggacctcctccccacccgccagctgccctgctggctgctgtagagagaagagaactgcgggcgcggccagcggctccgcgcagccagcggcatgtgacgaggaacggcaggctcgcagcggcgtgcgcgcggcggcggacgaccaccccccacccggatccggtagaggcagcagacgatcgccccccgctcggatctggcggcggtggccgtcccccacctggatccggcggtggtggcggcgtgcgggcgggctcggacggtggggagttagcggatccggctaccgcgacggcgacagcaactacggagaccacgacgacgacgacaatgacgaccgcgaggagggcagcgacaatagctttaggatcaaggtcactctgtggctgacagctatgaaatgcttctgggtgagtactggcaaaccagaaggagttcttactgctgaacagctgaagcaattcgaggaagccactactctctttgtaggatgcattcttagcgttcttggcgatcgtctggtcgaggtgtatatgcatatgaccgacgctaaggagttgtgggatgcactaaatactaaattcggtgctactgatgctagcaatgatctgtatatcatggagcagtttcatgactacaagatggctgacaaccgttctgttgtcgaacaggctcatgagatacaaaccatggctaaggaactcgaactccttaagtgtgtcttacccgacaaatttgtggccgggtgcattattgcgaaactacctccatcttggagaagtttcggtactgcactcaaacataagagacaggaatactccgttaaggggttgatagcgtctcttgatgttgaggagaaagctcgggaaaaagatgccgcgtctaaaggcgatggtgcgcagtccagtgccaatgttgtgcacaaggcccagagcaagagcaaagggaaatacaaagctcagcagaccaccaacttcaagaagcagaagaagaacaacaacaatcctaatcaggatgagaagacttgctttgtgtgtggccaacttggtcatctggctaggaagtgtccacagcgcaaggggatgaaggcacctgtagggcagacttctaagtctgctaagtctgctaatgtgactattggcaacactggagatggaagcgggtatggtaatttacctactgacgcacggggttccaccgtcctaatggggaatgggtcacatgcttctgttcatggtgttggcacggtatatctgaagtttacttcgggaaagattgtgcagctgaagaacatgcagcatgtcccttctatcgacaggaatcttgttagtggctcccgtctaactagagacggatttaagttggtttttgagtctaataaagtagtcatttctaaacatagatattttattggtaaaggttatgagtacggaggcctgttccgcttttccctttctgatttcggcaataattctgtgaaccatattagtggcagtgtggatgatgagcctaatgtttggcactcaccctcacatggtcttctcgtttatcaaatggacgttaagacaacttttcttaatggagagctggatgaggagatctatatggatcagcctgattggtttgtagttgaaggtcaagaaggcaaggtgtgcaaattgttgaagtctttgtatggtctgaaacaagctcctaagcaatggcatgagaaatttgacaagacattgacatctgcaggcttcgcagtcaatgaggcaggtaaatgtgtgtactatagccatggtgggggtgagggagttattttatgccagtatgtcgatgacatactgatatttgggacaaaccttgaggtgataaatgagtcccattatgtggagaagatcttgaattgctttgactacattgatagtaagccttctccaacaccttatgatcctagcttgttgcttcgcaagaacaagagaatagctaggaatcaactggaatactcccaaatcattggctcattgatgtacctggctagtgcaactaggcctgatatctcctttgctgtgagcaagttgagccgatttacctctaatccgggagatgatcactggcgtgcgcttgagcgagtaatgcgctatctgaaaggtactgtggaattggggcttcactatactgggtatcctgcggtactggagggttatagtgattctaactggatctctgatgtggatgagatcaaagccactagtggatatatcttcacactgggtggtggtgctgtttcatggaggtcttgcaaacagaccattttgatgaggtcaaccatggaagcagagctgacggcactggatactgctactgttgaggcaaaatggctgcgtgatctattaatggatctgcctattgttgaaaaaccgagcattcttgaaagaactcatctttgtgagcttgactgttggtcgcagtctatggagatttttgattactccatcccgctcaccagcgtgcacctgcgatcgggagagcaggtctccggaacttctaccttcgacgttctgcaccggaagaaggcgacaataaggtttttggaaagcgctttgcgcgactgctccctgttcatccgcgacggctcgtcttcctctttgctcgcgtgctgcgtgccttcgtag

SEQ ID NO: 14824 - DNA, 2892 bp, Oryza sativa
  Clone ID: TFbOSC416211j.C1.o4.fg
atggtggtgcggatcggagaagaagtcgggagtggagcggggaaggcggtggcgtggccaggaaggaggagggcgatgcgtgcgcgaccatgggaggaagtggcggcgcggccgggggaggaggccgatacgcgtgcagctagggaaggagaagattactccatcccgctcgccggcgtgcacctgcgatcgggagagcaggtctccggaacctctgccttcgacgtcctgcaccgggagaaggcggcaataagaaaaatccggttaaatcattatatgcctataatctcaacaatccaaaaaccttattataggcactgtgattttactatggctggttttgccgatgcactgaggccggataaattcaccggtgtgcattttaagagatggcagattagagtcactctgtggctgacagctatgaaatgcttctgggtgagtactggcaaacctgaaggagttcttactgctgaacagcagaacattcttggcgatcgtctggtcgaggtgtatatgcatatgaccgacgctaaggagttgtgggatgcactgaatactaaattcggtgctactgatgctagcaatgatctgtatatcatggagcagtttcatgactacaagatatctaacaaccgttctgtagtcgaacagactcatgagatacaaaccatggctaaggaactcgaactccttaagtgtgtcttacccgacaaatttgtggccgggtgcattattgcgaaactacatccatcttggagaagtttcggtactacactcaaacacaagagacaggaatactccgttaaggggttgatagcgtctcttgatgttgaggagaaagctcgggaaaaagatgccgcgtctaagggcgatggtgggcagtccagtgccaatgttgtgcacaaggcccagaacaagagcaaggggaaatacaaagctcagcagaccaccaacttgaagaagcagaagaagaacaacaacaatcctaatcaggatgagaagacttgctttgtgtgtggccaacttggtcatctggctaggaagtgtccacagcacaaggggaagaaggcacctgtagggcagacttctaagtctgctaatgtgaccattggcaacactggagatggaagcgggtatggtaatttacctactgttttttcagttaatcagtctactaattggtgggttgatactggggccaatgtacatgtttgtgctgacatctcattgttttcttcttatcaggtcgcacggggttccaccgtcctaatggggaatgggtcacatacttctgtttatagtgttggcacggtagatctgaagtttacttcgggaaagatcgtgcagctgaagaacgtgcagcatgtcccttctatcgacaggaatcttgttagtggctcccgtctgactagagacgaatttaagttggtttttgagtctaataaagtagtcgtgtctaaacatggaaattttattggtaaaggttatgagtgcggaggcctgttccgcttttccctttctgatttctgcaataattctgtgaaccatatttgtggcagtgtggatgatgaggctaatgtttggcactcacgtttatgtcatagtaattttggcttgatgtctcggctttccagcatgtgtttaattcctaagttttccattgtcaaaggttctaagtgccatagttgtgtgcaatcgaagcaacctcgcaagcctcacaaggctgccgaggaaagaaacttggcaccactagaattcctacattcagatctttgtgaaatgaatggggtgttgacaaagggtggaaaacgatatttcatgactttgattgatgatgctactagattttgctatgtgtacttgttgaaaacgaaagacgaagctctagactattttaaaatttataaggcagaagttgaaaatctacttgacagaaagataaaaagacttagagttcctaacagaaataagggcaaaacaccatatgaaatatggattggaagaaaaccatcactttcttacttgagcacatgggggtgcttggcgaaagtcaatgtaccaataacgaagaagcgcaaacttggacctaagactgtggactgtgtctttctgggatatgcttatcacagtattgcctatagatttttaatagttaaatctgaggtacctgacatgcatgttggtacaattatggagtctcgtgatgctaccttctttgagagcttttttccaatgaaggatacacatagtagttcgagccaaccatctgaaataattcccagttcaatcacatcaccagaacaaactgaacatacacatgaacatgtcactgaggaggatgacagtgaagctcctcgaaggagtaagagacaaaggacggctaagtcttttggtgatgatttcactgtgtacctcgtggatgacactcctaagtcaatttcagaagcatatgcatctcctgatgcagactactggaaggaggctattcgtagtgaaatggattctattatcgctaacgggacttgggagtgggtgttcaaaaagaagcttaggcctaacggtactattgaaaagtacaaggctcggcttgttgctaagggctatactcagaaagaaggcgaagatttctttgacacttactcacctattgctagattgaccacaatttgtgtgctactttccctagcagcctcacatggtcttctcgttcatcaaatggacgttaagacagcttttcttaatggagagctggatgaggagatctatatggatcagcctgatgggtttgtagttgaaggtcaagaaggcaaggctttaattagcgaagatgttgtcctgcagagcattcttgaaagaactcacctttgtgagcttgactgttggtcgtag

SEQ ID NO: 14825 - DNA, 4365 bp, Oryza sativa
  Clone ID: TFbOSC420023j.C1.o3.fg
atgtcggctccaacgccgcgtgtgtcgcggtcccgtgaaccgcaccagcgacgtatctcccgttcacctccacaccgtcgtggtcgccggcggcctggcgaagaccgtgaacttattccggtccagcgtgtggtgaaggaggtgggcggctcagccaactatccactgctgacgaagactaactacggagattgggctctcatgatgaaggtcatgctgcaagcgcgcggcctgtgggatgccgttgagcatggtgacgccgatttccaggcagatcgaatggcgatggaggccatactccgggcggtgccgccggagatgttagcttcactcgccgtcaagccctcggccaaggaggcgtgggacgcgatcaagacgatgcgagttggcgtcgatcgtgtccgcaagtcgaaggcgcaaatgctgcagaagcagtatgatgcgatggagttcaaggacggggagaccgtcgaggaattctcgttgcgcctcaacggactcgtcaccaacctcgccacgcttggagtccatcttgaagaaggaaaggtggttgaaaaatcccttaactctgttccagatcatctctcgcagatcgctttgtccattgagacgttgcttgacctcgatgagctcacgctcgaggaggtcaccggccggctccgaaacgctgaggagaagctgcctgcgaagagctctgctgccggtgggaaactgtttctcactgaggagcagtggactgcccggtggaaggagaaacaggccgcggaaagttcctctgggaaggcgaagtccggcggtggcaaccgtcgtcggcgtggtggtaagaagaaagctgaagctgctgcgcgcgatggagatcgtgccgggcgcgacacgcaggaagggcgggaaccaaaccgcgacaagtgccgcaattgcggccgcacggggcactgggctaaggactgccggcagcccaagcggcctgccgaggcccaccaggccctggcggatgaggacgatgacgagccggccctcctcatggcccatgtcgtcgacgctgctcttgtgtctgcgtcgtcttcatctgcgccacctgcttcttcgccgccatcgcagcctgacaagacgatcgagctcgtcgagccaaaggtgttcgcgcaccttctcacggagaaacaaaccgacggcggcgtctggcatctcgacaccggagcaacaaaccacatgacgggcattcgcgaagttttcgctgagctcgacctgtctgtgcggggctcggtgcgattcggcgacggctccgtcgtcggaattgagggtcgtggcaagatcatttttgagtgcaggaatcaggagcaccgagcgttgacgggggtgtattacatccctaaactcaacgccaacttgataagtttgggccagctcgatgaaaatgggtgcgacgtccgtatctaccacggtgtttgcacgatacgggacccggcggcccagctgctcgcacgcgttcggcggacgcggaatcgcctgtacttgatcaagctcaccattgggcaaccggtgtgcctcgcggccaaggcgcaggagtgcgcctggctgtggcatgcgcgctacggccacctccacttcgacgctctgcgacgactggcgagccgccacatggtgcgcggcatgcgcgacatcgatcatgtcgagcagctgtgcgacagctgcgtcatctctaagcagcgacgcacctcgtttccacgccgctccatgtttcgtgctaaggatcgccttgagctggtgcatggcgatctgtgtggtcccatctcgctggcaacccctggaggcaagactcatttcctcctgcttgttgatgatgcgagcaggtacatgtggatcactctgctgggacgcaagagcgaggcggctgatgccatcaagcgctttcaggcgcgagccgaggcggaatccaagcagaaactgcgcatcctccgcaccgacaacggtggcgagttcacctctgtggaattcgccacctactgcgctgaacagggagtctcacgccacttctccgcgccctactcgccacaacagaatggcgtggtggagcgccgcaaccaaaccatccttgggatggctcacagcttgttgaaagccaagaacatgccggcacgctattggggggaggctgtcactacggcagtttttctgctcaatcgcgcgccgacaaagagcttggccaacatgacaccttatgaggcgtggcatgggaagaagccggcggtgagttacctgcgcacgttcgggtgcctggcctatgtcaaggacgtgcggcctcacctccccaagctctctgactgcagcaagccgatggttctcatcggatacgccgacggagccaaggcgtacaaggtgttcgatccggtgtctggacgagtgcaggtctcgcgcgacgtgattttcgacgagggcgctgggtgggactgggatgcggcgggcgctgcagccgtccccggcggcggaggttgctcagacttcaccgtcgagtacctgacaacggccacatcaccgtcgcctttgacctcggcgccatcatctgcatcttcgggcgcttccgcgtcaagggcagtcacgccgtcgtccgcctcgacacccgccaccttggcgtcggcctcaacgcccgctacaccgacgttcgtctcaccgccaccaggcgtcgacgagaacctggacgcggagcaggatgattgtccactgcgttatcgcagtatgggtgatctactgggcaacgcacgtacgcctgggttcgcaacccgggatccggagaagggggagcttcatctccttgcggccgaggaaccagcctcgttcactgaggctgaacagcggcaggagtggaggcgggctatgctggatgaaatcgcctcaattgaggagaacaacacatggcgccttgtcgatctcccgtccggccatcgtgcaattggcctcaagtgggtcttcaagctcaagaaggatgcagaaggcagagtggcaaagcacaaggctcgcctcgtcgcgaaaggctatgtgcagcaacccggcatcgactttgaggaagtgttcgccctggttgcacggctggaatctgttcggctgttgctcgctcaggccgcgcaggcaggctggacagtgcaccatatggacgtcaagtccgcgttcctcaacggtgagctagccgaggaggtctacgtcaagcagccgcccggtttcgtcgaggaaggccgtgaacaccaagtccttcggcttgacaaggcgctgtacgggctgcgccaagcgccccgtgcgtggaactccaagctcgacgccaccctgctgtctctcggcttccggcagaacgactgcgaacatgcggtctatgttcgaggtaacaccagtgcacggttgctcgttggtgtttatgtcgacgatctaatcatcacagggacaaaggaggatgagatcgttcgattcaagggcgaaatgaaggcgttgttcaagatgagtgacctcgggcttctcagtttctacctgggtatcgaggtcgagcaggtggcgggcagcatacggctgtcacaggcagcgtacgcacgccgtatccttgagcgagcagggatgctgggatgcaacccgagcgccacgccaatggaacaacgcctcaagctcagcaaaaccagtgctgcggcgccggtgaaccccaactggtaccgtggcatcgttggctgtttgcggtatctggtacatacgaggccggatatcgcgttctcggtgggctacgtgagccgcttcatggaggcgcccaccaccgagcacgaagcggcggtgaagcgcatactgcgctatatcgccggcacgacggagttcgggtgtcactaccaccagtccagcagccccgttcagttggtgggatacagtgatgcggacatggccggcgacccagacacgcgcaagagtacgaccggtgttgtcttcttcctcgggacaagcccggtcagctggcaatccgtcaagcaaaaggttgtcgcgctttcgtcttgcgaggcggagtacatcgctgcgacaacggctgcatgccaaggcgtctggctctctcagttgctaggagaggtcaatcaagaagagccggacgcgttcaagcttctcattgataacaaatcagcaattgccctcagcaaaaatccggtgttccacgagaggagcaagcacatcgctacccgctaccactacattcgagaacgggtgggagatggctccgttcatgtcgagttcgtcaggactgaagggcagattgcagacattttgaccaaggcacttgggcgcacacgttttcaggagcttcgctcccgcattggcgttgccgacgtcaaattcaggtgcaagacttag

SEQ ID NO: 14826 - DNA, 3699 bp, Oryza sativa
  Clone ID: TFbOSC6395j.C1.o2.fg
atgtggggcctacataaatcatatcctccccctctctttctcttcgtgagcgttggacgggagctagcggcggtggccggcgcctcctccaactccatccacagcctcctcctcccctttcccgcggcgtcgttgctggcggcggcggtgcatcagcccgcaagcggcggagacccgggagtggcactggagcggcgacagcgacgtgcgcgcgagggccatagcggcggcggcggcggagatcgaggccgccgtggaaggttggctgttggaaggaagaaaacgagccatgagaacggccgcgtcctcgccaccctcggccccgccaccgcactatccaccgctgcgctcgacgccctctctgccggccacgacgcacctgcctccgcagttctcccgccgtgcccacgaacacgtaagggccgcctgcgtctcgccaccgcgactcacgtcggcatcctctcgaagatggcggcattcggcggtggcttcttctgcacctgcggcggcagcgttgaaggttccggcggccgcgcctcgggcagcggcgggagcgaccgcgggctggtgatccaccgcgtggtcaaggaagcaggaggtgcagcgaactacccgctgttgacaagaaccaactacaacgattggtctttgctgatgaagatcaaactgcaagcccggtgcctgtggggcgccatcgatccaggcggcgtcgagcttcatgaggataggatggcgcttgacgccatttgcagcgcggtgccccccgagatgatctcgaccttggccaccaaggcctcggccaaggaggcatgggattgcatcaggatcctgcgagtcggcgacgaccgaattcgcaaagcaagcgcacagaaggtgcgcatggagtacgagtcgctcgtccttcgcgacggtgagaccgtggaggacttcgccatgcgcctgacctccaccgtcaatcaactcgcgacgctcggcgatcccgagccggcagacaaggtcgtcgagaagtacctgcgcgtcgcccgtcccaggttcacccaactcgtcctttccattgaaactctccttgatatctctacactgtccctggaggaggtgaccggcagactcaaggcagctgaggacgccatgccattgccatcttcgtcctcagacaacgccggcaagctctacctcaccgaggaagaatggctagagcgccacaataaaaaggagcaggaggcaaagaagaactcaggcagcccaagcaaccgtggcaagcggcgaggcggcaaaggccgcaacggcggcggcgctggagtcggcggcgcgaagaatacgaactccggagcggcccgtcgtgaagacaaatgccgcaactgtggcaaatacggccactgggccaaggattgcaggagcaagcccaagcgggatgaacaggcccacgtggcacaagacgacgagcccaccttgcttctcctcacaggaggagtaatcacacatgcatgtgaacaggagcatgcaccagcgccgtctgcgccaactccgtcatccgatcccatctacctggaggaaaagaagctgttcgcggcgctcgacgacgccgcgaagcgtgatccgggccgctggattgtggactccggcgcctccaaccacatgaccggctgccggacggccttctccgacattgacacaggcatcaccggcaacgtccgactaggagacggctccgtcgtccgaatcgaagggcgaggcaccgtgctcttctcctgtaagaatggggagcatcgaaccctctccaacacctacctcattccacgcctcgctgctaacatcattagtgtcgggcagctagacgagaccggtttcaaggtggaggccgaggatggcgttatgcggatatgggatgagcagcggcgcctgcttgcccgtattcaccgcaatcctggacgtctctacgtcctcgacgtcgagctcgcgcgcccggtctgccttacggcacgcatcggcgacgaagcatggaagtggcatgcacggttcggccacattaacttcactgcgctgcggaaaatgggcagagagcagctagtgcgcggtcttccggctgtgtcgcaagttgaccagctttgcgaggcttgcctcgccggcaagcaccgtcggacgccgttcccacagcaggctcaacagcgctccctggagccgctccaactactccacggcgacctctgcggcccgatctcgccaccaactccgagcgacaaccggtcgtcatccaaaagtattggtgggaagacaccatacgagctgtggaacggatcgccgccggccgtccaccacctgcggacgttcgggtgtttggcacacgtcaagaccaccacgccgaatgtcaagaagctcgacgacaggagtaaacccatgatctttgtgggttatgagccggggtcgaaggcgtatcgctgctacgaccctgcctctcggcgcgtgcacatctcacgtgacgtcgcattcgacgaagaggcgcaatggaggtgggacggcgagacggcgagtgagctggacttcaccatcgagtacaccactgtgtaccacccagctgtggtgaacgcgccacgagctgactcggagcagccagagctgccgactccgtccgcgacatcgacaagtccatgcacacctgccgccacggcgggcacaactgcgacatcggcggaattcgcgactccaccaaccatcgccgcggacgacctcgacgccgatcatgatgatgctccgcttcggttccgccgcgtcgacgagatattaggaccggcgaccccgccgggactggctgtgcgcgagttcgatgacgaactcatgatggcaagtgctgaagagccagcgtctctcgccgaggcgcaacagcaagactgttggcgtcaagctatgctggatgagatgaaatcaattgaagaaaacggaacctggctgctcgtcgatcccccacctcgccagcggcccataggactcaagtgggtcttcaagacgaagaaagacgctgccggcaacatcaccaagcacaaagcgcggctcgtcgcaaaaggatacgtgcagcggcagggaatcgactacgacgaagtgtttgccccagttgcacggctcgagtcggttcgcttgctgctggcgtacgcggcgagcgaaggttgggccgtccatcatatggacgtgaaatcagcgttcctcaacggcgagctcaaggaggaagtctacgtcgcgcagccgcccggtttcgtcgtcgacggcaaggaacagaaggtgctgcgcctggtgaaggcgttgtatggacttcgtcaagccccgcgtgcatggtacaccaagctcgacgcgtcgctgctgtcacttgggttccatcgcagtgcctcagagcacgctgtgtacatgcgcggagctaacgcacgtcgactggtggtcggggtgtacgtcgacgaccttgtcatcaccggcggcaaccactccgagcttgatcaattcaagaaggagatgcgggagacgttccagatgagcgacctcgggctacttcggtactatcttggcctggaggtgagtcagaccgacgagggcatcaccctgagccagggtgcgtacgccaagaagatacttgaggcagcaggcatggttggatgcaacccgagccagactccaatggagccacgcctcaaactcacttgtttgtcgatcacttag

SEQ ID NO: 14827 - DNA, 4857 bp, Oryza sativa
  Clone ID: TFbOSC900286j.C1.o13.fg
atgtggggcctacataaatcatatcctccccctctctttctcttcgtgagcgttggacgggagctagcggcggtggccggcgcctcctccaactccatccacagcctcctcctcccctttcccgcggcgtcgttgctggcggcggcggtgcatcagcccgcaagcggcggagacccgggagtggcactggagcggcgacagcgacgtgcgcgcgagggccagagcggcggcggcggcggagatcgaggccgccgtggaaggttggctgttggaaggaagaaaacgagccatgagaacggccgcgtcctcgccaccctcggccccgccaccgcactatccaccgctgcgctcgacgccctctctgccggccacgacgcacctgcctccgcagttctcccgccgtgcccacgaacacgtaagggccgcctgcgtctcgccaccgcgactcacgtcggcatcctctcgaagatggcggcattcggcggtggcttcttctgcacctgcggcggcagcgttgaaggtgggaggagcagcgcgggtgagggaggcggcggtaccaccgatggacgtggtcagcatgccgagccggccgacaacggcactgttggaaataaaccttacacgatgtatctaggaaacctgacaagtggtatcagagctcggttcagagcgtggacgcgagatcgcgctcttgagggtgtcttcatgcctcgaggacgcacgcactccccgcgccggcggtcggcgtcaccgtccgtgcatgtttcaggttccggcggccgcgcctcgggcagcggcgggagcgaccgcgggctggtgatccaccgcgtggtcaaggaagcaggaggtgcagcgaactacccgctgttgacaagaaccaactacaacgattggtctttgctgatgaagatcaaactgcaagcccggtgcctgtggggcgccatcgatccaggcggcgtcgagcttcatgaggataggatggcgcttgacgccatttgcagcgcggtgccccccgagatgatctcgaccttggccaccaaggcctcggccaaggaggcatgggattgcatcaggatcctgcgagtcggcgacgaccgaattcgcaaagcaagcgcacagaaggtgcgcatggagtacgagtcgctcgtccttcgcgacggtgagaccgtggaggacttcgccatgcgcctgacctccaccgtcaatcaactcgcgacgctcggcgatcccgagccggcagacaaggtcgtcgagaagtacctgcgcgtcgcccgtcccaggttcacccaactcgtcctttccattgaaactctccttgatatctctacactgtccctggaggaggtgaccggcagactcaaggcagctgaggacgccatgccattgccatcttcgtcctcagacaacgccggcaagctctacctcaccgaggaagaatggctagagcgccacaataaaaaggagcaggaggcaaagaagaactcaggcagcccaagcaaccgtggcaagcggcgaggcggcaaaggccgcaacggcggcggcgctggagtcggcggcgcgaagaatacgaactccggagcggcccgtcgtgaagacaaatgccgcaactgtggcaaatacggccactgggccaaggattgcaggagcaagcccaagcgggatgaacaggcccacgtggcacaagacgacgagcccaccttgcttctcctcacaggaggagtaatcacacatgcatgtgaacaggagcatgcaccagcgccgtctgcgccaactccgtcatccgatcccatctacctggaggaaaagaagctgttcgcggcgctcgacgacgccgcgaagcgtgatccgggccgctggattgtggactccggcgcctccaaccacatgaccggctgccggacggccttctccgacattgacacaggcatcaccggcaacgtccgactaggagacggctccgtcgtccgaatcgaagggcgaggcaccgtgctcttctcctgtaagaatggggagcatcgaaccctctccaacacctacctcattccacgcctcgctgctaacatcattagtgtcgggcagctagacgagaccggtttcaaggtggaggccgaggatggcgttatgcggatatgggatgagcagcggcgcctgcttgcccgtattcaccgcaatcctggacgtctctacgtcctcgacgtcgagctcgcgcgcccggtctgccttacggcacgcatcggcgacgaagcatggaagtggcatgcacggttcggccacattaacttcactgcgctgcggaaaatgggcagagagcagctagtgcgcggtcttccggctgtgtcgcaagttgaccagctttgcgaggcttgcctcgccggcaagcaccgtcggacgccgttcccacagcaggctcaacagcgctccctggagccgctccaactactccacggcgacctctgcggcccgatctcgccaccaactccgagcgacaaccggtactttctccttctcgtcgatgattacagctgtttcatgtggttgtcactgctcccctccaaggatggggcggcggcagccatcaagcgcatccaagccgcggctgaacgcaagagcggcaagaagctacgtgctcttcgcacggataggggggagagttcctggtccaccacttcgcggattactgcgccgagctgggagtccgacgcgagacgacggcgccctactcgccgcaacaaaacggcgtcgtggaacgtcgcaaccaatcggtggtcgggacggcgcggagcatgctcaaagccaaagggctgccagaccaccacgccgaatgtcaagaagctcgacgacaggagtaaacccatgatctttgtgggttatgagccggggtcgaaggcgtatcgctgctacgaccctgcctctcggcgcgtgcacatctcacgtgacgtcgcattcgacgaagaggcgcaatggaggtgggacggcgagacggcgagtgagctggacttcaccatcgagtacaccactgtgtaccacccagctgtggtgaacgcgccacgagctgactcggagcagccagagctgccgactccgtccgcgacatcgacaagtccatgcacacctgccgccacggcgggcacaactgcgacatcggcggaattcgcgactccaccaaccatcgccgcggacgacctcgacgccgatcatgatgatgctccgcttcggttccgccgcgtcgacgagatattaggaccggcgaccccgccgggactggctgtgcgcgagttcgatgacgaactcatgatggcaagtgctgaagagccagcgtctctcgccgaggcgcaacagcaagactgttggcgtcaagctatgctggatgagatgaaatcaattgaagaaaacggaacctggctgctcgtcgatcccccacctcgccagcggcccataggactcaagtgggtcttcaagacgaagaaagacgctgccggcaacatcaccaagcacaaagcgcggctcgtcgcaaaaggatacgtgcagcggcagggaatcgactacgacgaagtgtttgccccagttgcacggctcgagtcggttcgcttgctgctggcgtacgcggcgagcgaaggttgggccgtccatcatatggacgtgaaatcagcgttcctcaacggcgagctcaaggaggaagtctacgtcgcgcagccgcccggtttcgtcgtcgacggcaaggaacagaaggtgctgcgcctggtgaaggcgttgtatggacttcgtcaagccccgcgtgcatggtacaccaagctcgacgcgtcgctgctgtcacttgggttccatcgcagtgcctcagagcacgctgtgtacatgcgcggagctaacgcacgtcgactggtggtcggggtgtacgtcgacgaccttgtcatcaccggcggcaaccactccgagcttgatcaattcaagaaggagatgcgggagacgttccagatgagcgacctcgggctacttcggtactatcttggcctggaggtgagtcagaccgacgagggcatcaccctgagccagggtgcgtacgccaagaagatacttgaggcagcaggcatggttggatgcaacccgagccagactccaatggagccacgcctcaaactcagtaagttgagcacatctccttgcgtggatgcaactgattacaggaaaattgttgggtcgctgcgctatttggtgaactcgagaccggacttggcgttctcagtgggttatgtgagtagattcatggagaaacccactaccgagcatctggcagccgtgaaacgtgtgctgcgctatgtcgccggcaccatcaatcgcggctgtagctaccggaggaagaaaggagctgttcatctagttggattcagtgacagcgatctcgccggcgacgtcgacacgcggaaaagcaccaccggtgtcttcttcttcctcggtgacaacttgattacctggcaatctcagaagcagaaggttgttgccttatcatcctgtgaagcggagtacattgcggcgacaacagctgcttgccagggtgtgtggctggcgcgtcttcttgccgagctcaagggagaagaagccgacgccgtcacactcaatgtcgacaatcagtcggcaattcaactcagcaaaaaccctgttttccacgatcgcagcaagcatatagagaccagatatcactacatcagagaatgcattgaggaggacagggtgaagatcgagttcgtcagtacaaacgatcaactggcggacattctgacgaagtcacttgggcgtgatcggttcaatgaactgtgcacaaggattggcctcgtcgaagttaaagggacgtgcaaggtttag

SEQ ID NO: 14828 - DNA, 3861 bp, Oryza sativa
  Clone ID: TFbOSC400275j.C1.o2.fg
atggcttctactggagagaacagaggagacaacatcaacggaggcaatacgactacctcaaaatccagcggtgggacgttctcggggtatattttcattctcccgattctattagatgtttctttgttaatactcttcgcaatggcagcattgcgttactatgtaaatgttgatgcttatttcatattaagcatgctcaagttgtatacatctagcactgtcactagatttactcatattgcaaatgtcatgtttattgtcttaatattttggattaaaatatgccgaattataaccaaatttccaacaatccaaaaacttgataggtcttttttggtagttagctttgctgcatcactaaaaccacatgctttcgatggttcaaattataaaaaatggaaagcacgtgcacttttgtggttgacggtgatgcaatgtttctttgtttcacggggcaaaccgagtgaaccgcctctcttccctgaggaggaggctaagttcgaggctacggattgcttgttccgtggagcattgatcagtgtgctcgccgatagtattgtggatgtgtatatgcacatgccttcagggaaggacatgtgggatgctcttgaggccaagttcggggtttccgacgtcgacagcgagctgtatgtcatggagcagttctatgactacaagatggtcgatgactgttctgtagtgggacaggctcatgagaatcagatgttggcaaaggaacttgagaacaacaactgtgagttgccggacaagtttgtggcaggtggcattattgccaaattgccaccttcttggacggactttgctacttctctaaaacacaagaggcaagagttcagtgttactgatcttattggctctttgagtgttgaggagaaggcgagggcacaggacaaccggggcaaaaagatcgagggaggttctagcgccaatttggtgcagaagaagaaccctcacgcatcccacaacaacaacaagaaagtcaaacctgacgtcaaacccaaggctacaaccaattttaagaagaaaggcaagggaaaggcaaaaggagattgctttgtgtgtggcaagcctgggcattgggccaaggattgtcctgagcgcaaggacaagaagtctgcaaacatggttattagtgagggcggaggaacattggggtatggtaaatttttacctacagttctctctgtctgtcactcacttgattggtgggttgatactggtgctaatattcatgtgtttgcggacatttccctattttcttcttatcaagttgggagaggttcctccttgttgatgggaaacggatcgcttgtggctgttcatggtgttggtacggtcgatctgaagtttacttcgggaaagatcgtgcagctgaagaacgtgcagcatgtcccttcaataaagaagaatctagttagcggctctctactgtgtagagatggttttagacttgtgtttgaatccaataaatgtgtcgtatctaaatatggaacgtttattggaaaaggttatgatagcggaggtttgtttcgcttttccttggatgatatgtgtaataaagttgtgaaccatgtaagcgatgatgatgatgagtccaatgtgtggcattcgcaactttgccatgtgaattttggttgtatgacacgcttagccaacatgagtttaattccaaaattcactttagtcaaaggctctaagtgccatacttgtgttcaaacgaaacaacctcgcaagcctcacaagtcatctgaggcgaggaagttggcaccactagaaattgttcattccaatctgtgcgaaatgaacggcgtgttgactaaagggggaaagaaatatttcatgacactgatagatgattgcactagattctgctacgtgtacctattgaaaacaaaggatgaagtattacattactttaagatctataaggctgaggtagaaaaccaactggaaaggaaaatcaaacggttaaggtctgataggggtggagagtatttttccaatgagtttacttctttctgcaaagagtatggaattattcatgagaggacgcattcctattcaccccagtcaaacggggtagccgaaagaaagaaccgcactctaactgagatggtgaatgccatgttagacactgcaggactttccaaggaatggtggggtgaggcaatattgactgcgtgtcatgtcctgaatagaattcctactaagcataaggaagtaacatcattcgaggaatgggaaaggaagaaattaaatctctctcacctgcgcacatggggctgtttggccaagagatgccacatttttgagaatgaatttcctatgaaaaatgcacctagcacttctagtcaagaacctattttatcccctgagcactttgtgctgatagaacacattgatcaaacgcttgaggaaaattctgaggagaataacattgtagcaactcgaaagagtaagagacaaaggactgcaaagtcttttggagatgactacattgtatatcttgtggatgatactccaagaaccattgaagaggcatattcatctcctgacgttgactattggaaggaagcggtacgcagtgaaatggactcaattatgtctaatggtacttgggaagtcatcgagtgtccatatgggtgcaagcctgtaggatgcaaatgggttttcaagaaaaagcttaggcctgacgcctctcatggtctactcgtccatcagatggatgttaagacagctttcctcaatggagagttggaggaggagatctatatggatcaaccagatgggtatgtactagaaggtcaggagggaatggtatgcaagctgttgaagtccttgtatggtctcaaacaagcgcctaagcaatggtatgagaagtttgacaatacacttacatctactggctttgttgtgaacgaagctgacaaatgtgtgtactatcgtaatggtgggggagagggagtgatcttgtgtttatatgtcaatgacatattgatctttgggaccagcctcaatgtgattgaagaggtcaaggactttctgtccaaaagctttgaaaagaaggatttgggagtggctgatgttattcttaacattaaactactgagaggagatgagggtcggattacacttgtgcaatctcactatgtggacaaggtcttgagtcgctttggttatagtgactgcaaggcagctcctactccttatgatcctagtgtgctattaaggaaaaaccgaagaatagcaagggatcaattgagatactcccagatcattggttcattgatgtacttagctagtgcaacgaggcctgacatctcatttgctgtgagcaagttgagccggtttgtttcaaatccgggagatgatcattggcatgctcttgaaagagtaatgcgctatctaaaagggacaatgagctatggaattcactatgccgggtacccaaaagtgctggagggctatagtgattcaaactggatatctgatgctgatgagataaaggccacaagtgggtatgtgttcacacttggaggtggcgctgtttcctggaagtcttgcaagcagatcatcttaacgaggtcaacaatggaaacagagctcacagctttagatactgccacagttgaggccgaatggcttcgtgagctcctgatggacttgccggtggttgaaaaaccaataccagcaatcctgatgaactgtgataatcaaacagtgattattaaagtaaacagttcgaaggacaacatgaagtcatccaggcatgttaaaagaagactgaagtctgtcagaaagcagaaaaactccagagtgatagcattggactatgtctag

SEQ ID NO: 14829 - DNA, 2073 bp, Oryza sativa
  Clone ID: TFbOSC400888j.C1.o10.gm
atggaggatgtagcagaagtggaccttgcggaccctaacccggacatactgctcctccgaaattccgtccgcttgagaacttgcacgggtaggcgggcgatcaagtttctgttcacctgcgcgcacagcgcttcaagcgcgactgctcctgttcttcgtgactactactactgcatcgacgccttcgtcaacatgtcgacggagattggagacaaggaggaggaagataagttcgaggctacggattacttgttccgtgaagcattgatcagtgtgctcgccaataatattgtggatgtgtatatgcacataccttcagggaaggacatgtggggtgttcttgaggccaagttcgaggctcatgagattcagatgctgataaaggaacttgagaacaaccactgtgagttgccggacaagtttgtggctggaggcattattgccaaattgccaccttcttggtcggactttgctacttctctaaaacacaaaaggcaagagttcagtgttactgatctcattggctctttgggtattgaggagaaggcgagggcaaaggacaaccggggcaaaaagatcgagggaggttctagcgccaatttggtgcagaagaataaccctcacgcatcccacaacaacaacaagaaagtcaaacctgacgtcaaacccaaggctacaaccaattttaagaagaaaggcaagggaaaggcaaaaggagattgctttgtgtgtggcaagcctgggcattgggccaaagattgtcctgagcgcaaggacaagaagtctgcaaacatggttattagtgaggaaggaggaacattggggtatgcctctcatggtctactcatccatcagatggatgttaagacagctttcctcaatggagagttggaggaggagatctatatggatcaaccagatgggtatgtactagaaagtcaggagggaatggtgtgcaagctgttgaagtctttgtatggtctcaaacaagcgcctaagcaatggcatgagaagtttgacaatacacttacatctgctggctttgttgtgaacgaagctgacaaatgtgtgtactatcgttgtggtgggggagagggagtgatcttgtgtttatatgtcgatgacatattgatctttgggaccagcctcaatgtgattgaggaggtcaaggactttttgtccaaaagctttgaaatgacggatttgagagtggctgatgttattcttaacattaaactactgagaggagatgagggtgggattacacttgtgcaatctcactatgtggacaaggtcttgagtcgctttggttatagtgactgcaaggcagctcctactccttatgatcctaggacaatgagctatggaattcactacgccgggtacccaaaagtgctggagggctatagtgattcaaactggatatctgatgctgatgagataaaggccacaagtgggtatgtgttcacacttggagaatccttccctggttctgttcacctgcgcgcacaggtgtatgggacgagcaggtgcctccgaaactccgtccgcttgagaacttgcacgggtaggcgggcgatcaagtttttgggtagcgcttcaagtgcgactgctcctgttcttcgcgactactattattgcatcgacgccttcgtcaacatgtcgatggagattggagacaaggaggtgaacgacatcaacggaggcaatactgcctcaaaatccagcggtgggacgttcttaggggagatcttgctctccggacgcaaatttacttgggccaactctatgccgagcccaacttacaaaaacgccgcctccgcgtcagcccgtgcgccgccgtcgctgccgcgagtccagccaagcgccgccgctgctccagtcaccgccgtcgctccggaaggccatcgccaggttcgcaaggtcgccaccgtcctcatcccgtcctccgtttctgccaaagactgccggagcgccgccgccatcgacgacccgaagaccgccgccgcctcgacctcgctgccgtcgtcgtccaagccaccggtgagttgtcgcgtcgcgctttacgcgtag

SEQ ID NO: 14830 - DNA, 2820 bp, Oryza sativa
  Clone ID: TFbOSC400977j.C1.o5.fg
atgtcgacggagattggagacaagatgatgaacgacatcaacggaggcaatactgcatcaaaatccggcggtgggacgttctcggggtatactttcattctcccgattctattagatgtttctttgttaatactcttcgcaatggcagcattgcgttactatgtaaatgttgatgcttatttgatattaagcatactcaagttgtatacatctagcactgtcactagatctactcatattgcaattgtcatgtttattgtcttaatattttggattaaaatatgccgaattgtgaccaaatttccaacaatccaaaaacttgataggtctttttcggtagttggctttgctgcatcactaaaaccacatgctttcgatggttcaaattataaaagatggaaagcacgtgcacttttgtggttgacggtgatgcattgtttctttgtctcacggggcaaaccgagtgaaccgcctttctctcctgaggaggaggctaagttcgaggctacggattgcttattccatggagcattgatcagtgtgctcgccgataatattgtggatgtgtatatgcacataccttcagggaaggacatgtgggatgctcttgaggccaagttcggggtttccgacgccggcagcgagctgtatgtcatggagcggttttatgactacaagatggtcgatgaccgttctgtagtggaacaggctcatgagattcagatgctggtaaaggaacttgagaacaacaactgcgagttgccggacaagtttgtggctggaggcattattgccaaattgccaccttcttggtcggactttgctactcctctaaaacacaagaagcaagagttcagtgttgctgatcttattagctctttaggtattgaggagaaggcaagggcaaaggacaaccggggcaaaaagatcgagggaggttctagtgccaatttggtgcagaagaagaaccctcacgcatcccacaacaacaagaagaaagtcaaacctgacgtcaaacccaaggctacaaccaattttaagaagaaaggcaagggaaaggcaaaaggagattgctttgtgtgtggcaagcctgggcattgggccaaggattgtcctgagcgcaaggacaagaagtctgcaaacatggttattagtgagggcgaagaaacattggggtatggtaaatttttacctatagttctctctgtctgtcactcacctgattggtgggttgatactggtgctaatattcatgagtgtgcggacatttccctgttttcttcttatcaagtcgggagaggttcctccctgttgatgggaaacggatcgcttgcggctgttcatggtgttggtacggtcgatctgaagtttacttcgggaaagatcgtacagctgaagaacgtgcagcatgtcccttcaataaagaagaatctagttagcggctctctactgtgtagagatggttttagacttgtgtttgaatccaataaatgtgtcgtatctaaatatggaatgtttattggaaaaggttatgatagtggagggggaaagaaatatttcatgacactgatagatgattgcactagattctgctatgtgtacctattgaaaacaaagaatgaagcattacattactttaagatccataaggctgaggtagaaaaccaactggtaaatgtacctatagccaaaaagcgtaaacttggaccaaagatcgtagattgcgtgttccttggttacgctatccacagtatgggatataggttcttaatagtaaattctggagttcccgacatgcgtgttggtacaattactgagtccagagatgccacattttttgagaatgaatttcctatgaaaaatgcacctagcacttctagtcaagaacctattttatcccctgagcactttgtgccgatagaacacattgatcaaacgcttgaggaaaatcctgaagaggataacattgtagcaactcgaaagagtaagagacaaaggactgcaaaatcttttggagatgactacattgtatatcttgtggatgatactccaagaaccattgaagaggcatattcatctcctgacgctgactattggaaagaagcgatacgcagtgagatggactctatgtctaatggtatttgggaagtcgtcgagcgtccatatgggtgcaaacctataggatgcaaatgggttttcaagaaaaagcttaggcctgatgcctctcatggtctactcatccatcagatggatgttaagacagcttttctcaatggagagttggaggaggagatctatatggatcaaccagatggatatgtactaaaaggtcaagagggaatggtgtgcaagctgttgaagtccttgtatggtttcaaacaagcgcctaagcaatgtcatgagaagtttgacaatacacttacatttgctggctttgttgtgaacgaagctgacaaatgtgtgtactatcgctatggtgggggagagggagtgatcttgtgtttatatgtcgatgacatattgatctttgggaccagcctcaatgtgattgaggaggtcaaggactttctgtccaaaagctttgaaatgaaggatttgggagtggctaatgttattcttaacattaaactactgagaggagatgagggtgggattacacttgtgcaatctcactatgtggacaaggtcttgagtcgctttggttatagtgactgcaaggcagctcctactccttatgatcctagtgtgctattaaggaaaaacagaagaatagtaagggatcaattgagatactcccagatcattggttcattgatgtag

SEQ ID NO: 14831 - DNA, 1488 bp, Oryza sativa
  Clone ID: TFbOSC401614j.C1.o8.gm
atggtgaaacaatttgtgtcgaatgccttggttgccacaaggagggcattaacagagggaatggtgtacaggacgagcaggtacctccggaactccgtccgcttgagaacttgcacgggtaggcgggcgatcaagtttttgggtagcgcttcaagcgcgactgctcttgttcttcgcggctactgctgctgcatcagcgccgtcaccaagatgtcaacggagattggagacaagaagatgaacgacatcaatggaggcaatactgcctcaaaatccagcaatgggactttctcgggtgtgctcgccgataatattgtggatgtgtatatgcacataccttcagggaaggacatgtgggatgctcttgaggccaagttcagggtttccgacgccggcagcgagctgtatgtcatggagcagttctatgactacaagatggtcgatgaccgttctgcagtggaacaggctcatgagattcagatgctggtaaaggaacttgagaacaacaactgcgagttgccggacaagtttgtggctggaggcattattgccaaattgccaccttcttggtcggactttgctacttctctaaaacacaagaggcaagagttcagtgttactgatctcattggctctttgggtattgaggagaaggcgagggcaaaggacaaccggggcaaaaagatcgagggaggttctagcgccaatttggtgcagaagaagaaccctcacgcatcccacaacaacaacaagaaagtcaaacctgacgtcaaacccaaggctacaaccaattttaagaagaaaggcaagggaaaggcaaaaggagattgctttgtgtgtggcaagcctgggcattgggccaaggattgtcctgagcgcaaggacaagaagtctacaaacatggttataagtgagggcggaggaacattggggtatgtcgtcgagcgtccatatgggtgcaagcctataggatgcaaatgggttttcaagaaaaagcttaggcctgatggtacaattgaaaagtacaaggcaaggcttgtggccaaggtctctcatggtctactcgtccatcagatggatgttaagacagctttcctcaatggagagttggaggaggagatctatatggatcaaccagatgggtatgtactagaaggtcaggagggaatggtgtgcaagctgttgaagtccttgtatggtctcaaacaagcgcctaagcaatggcatgagaagtttgacaatacacttacatctgctggctttgttgtgaacgaagctgacaaatgtgtgtactatcgctatggtgggggagagggagtgatcttgtgtttatatgtcgatgacatattgatctttggaaccagcctcaatgtgattgaggaggtcaaggactttctgtccaaaagctttgaaatgatggatttgggagtggctgatgttattcttaacattaaactactgagagtcactatgtggacaaggtcttga

SEQ ID NO: 14832 - DNA, 3962 bp, Oryza sativa
  Clone ID: TFbOSC401949j.C1.o16.np
cgacaacaccaacggaggcagttctgcctcacaatccagcggagggacctttacagggtcattttcggtagttgactttgctgcaacactgaaaccgcatgcttttgatggttcaaattataagaggtggaaagcacgtgcactattgtggttgacagcgatgcaatgtttctatgtttcacggggtaaacgaagtgaaccacctctctctcctgaggaagaggttaagttcgaggcttcggattgcctgttccgtggagcattgatcagtgtactcgctgacaatatagtggatgtgtatatgcacatgccttcagggaaggacatgtgggatgcacttgaggccaagttcggagttttcgacaccggcagcgagctgtatgtcatggagcagttctatgactataagatggtcgatgaccgttctgtagtggaacaagctcatgagattcagatgctggctaaggaacttgagaacaacaactgtgagttgccggacaagtttgtggcgggtggcattattgccaaattgccaccttcttggtcggactttgccacttctctaaagcacaagagacaagagttcagtgttattgatctcattggctctttgggtgttgaggagaaggcgagggcaaaggacatctggggcaaaaaggtttagggaggttctagtgccaatatggtacagaagaagaaccctcacgcatcccacaacaacaagaaagtcaagcatgatgtcaaacccaaggctacaaccaattttaagaagaaaggcaagggaaaggcaaagggagactgctttgtgtgtggcaagcctgggcattgggccaaggattgtcctgagcacaaagacaggaagtctgccaacatggtcattagcgagggcggaggaacatcggggtacggtaaaattttacctacagttctctctgtttttcattcacctgattggtgggttgatacgggtgctaatattcatgtatgtgctgatattttcctgttttcttcttatcaggtcgggagaggttcctccttgttgatgggaaacgggtcgcttgcggctgttcatggtgttagtatggtcgatctgaagtttacttcgggaaagactgtgcagctgaagaacgtgcagcatgtcccttcaataaagaagaatctagttagtggctctctactgtgtagagaaggttttaaacttgtgtttgaatccaataaatgtgtcgtatctaaatatggaacttttattggaaaaggttatgacagcggaggcttgttccgcttttctttggatgacatgtgtaataataataatgttgtgaaccatattaacgagaatgatgagtccaatgtgtggcattcacgactttgtcatgtgaatttcggttgtatgacgcgcttggctaacatgagtttaaatccaaaattcactttggtcaaaggttccaagtgccatacttgtgttcaatcgaaacaacctcgcaagcctcacaaggcatctgaggcgaggaatttgcacctctagaacttgttcattccgatctgtgcgaaatgaatggcgtgttgactaaagggggaaagaaatatttcatgacactaatagatgattgcactagattttgttatgtgtatctattgaaaacaaaggatgaagcattgcattactttaagacctataaagctgaggtagaaaagcaacttaaaaggaaaatcaaacggttgaggtctgatagggatggagagtatttttctaatgagtttacatccttttgcgaagagtttggaattattcatgaaaggatgcctccctattcaccccaatcaaatggggtagccgaaagaaagaaccgtactctaactgagatggtgaatgccatgttagacactacgggactttccaaggaatggtggggtgagacagttttgactgcttgtcatgtcctaaataaaattccaatgaagcataaggaagtaacaccattcgaggaatgagaaaggaagaaattaaatctctcatacctacgaacatggggctgtttggccaaggtaaatgtacctatagccaaaaagcgtaaacttggaccgaatactgttgattgtgtgttccttggttatgctattcacaacgtgggttatagattcttaatagtaaactctggagtacccgacatgcgagttggtacaattattgagtccagagatgccacattctttgagaatgaatttcccatgaaaatacacctagcacttctagtcaagaaactgtcataccccatgagcactttgcaccgatagaacacaatgatcaaacgcctgagggaaatcttgaggaggataacattgtagatactcgtaagagtaagagacaaagggttgcaaaatcctttggagatgactacattatataactcatggatgacactccaaaaaccatagaagaggcatacttatctcctgacgctgactactggaaggaagcaatacgcagtgagatggactcaattatgtctaatggtacttaggaagtcgttgagcgtccatatgggtgcaaacttgtaggatgcaaatgggttttcaagaaaaagcttaggcttgatggtacaattgaaaagtacaaggcaaggcttgtggctaagggttatacccaaaaagaaggcgatgattttttcgacacctactcacccgttgcccgtttgaccacgattcgagtactacttgtcctggcagcctcttatggtcttctcgtccatcagatgggcgttaagacagcttttctaaatggagagcttgaggaggagatctatatggatcaaccagacgggtatgtactagaaggtcaggagggaatggtgtgtaaattgttgaaatccttgtatggccttaagcaagcacctaagcaatggcatgagaagtttgacaccacacttacatctgctggctttgttgtgaacgaagctgacaaatgtgtgtactatcgctatggtgagggagaaggagtgatattgtgtttatatgtcgatgacatattaatctttgggaccagcctcaatgtgattgaggaggtcaaggactttctgtccaagagctttgaaataaaggatttgggagaggctgatgttattcttaacattaagctactgagatgagatgagggtgggattacacttgtgcaatcccactatgtagataaggttttgagtcgctttggctacagtgactgtaagccagctcctactccttatgatcccagcgtgctattaaggaaaaaccgaagaatagcaagggatcaactgagatactcacaaatcattggttcattgatgtacttggctagtgcaacgaggcctgacatctcatttgctgtaagcaagctgagccggtttgtctcaaatccgggagatgatcattggcaggctctggaaagagtaatgcgctatctaaagggcactatgagctatggaattcactataccggttacccaaaagtactggaagggtatagtgactcaaactggatatctggtgctgatgagataaagaccacaagtggatatgtgttcacacttggaggtggcgctgtttcctggaagtcttgcaagcagaccatcttaacgaggtcaacaatggaagcagagcttacaacaccagatactgcgacagttgaggccgagtggcttcgtgaactcctgatggatttgccggtagttgaaaaaccagtgccagctatcctaatgaactgtgataatcaaacagtgattattaaagtgaacagttcaaaggacaacatgaagtcatctaggcatatcaaaagaagactgaaatctgtcagaaagcagaaaaactccggagtaatagcattggactatgtccaaacggctaaaaatctggcagatcagtttaccaaggggctaccacgtaatgtgatagacagtgcatcaagagaaatgggcttgatacccacc

SEQ ID NO: 14833 - DNA, 3138 bp, Oryza sativa
  Clone ID: TFbOSC413551j.C1.o1.fg
atgttggcaaaggaacttgagaacaacaactgtgagttgccggacaagtttgtggcaggtggcattattgccaaattgccaccttcttggacggactttgctacttctctaaaacacaagaggcaagagttcagtgttactgatcttattggctctttgagtgttgaggagaaggcgagggcacaggacaaccggggcaaaaagatcgagggaggttctagcgccaatttggtgcagaagaagaaccctcacgcatcccacaacaacaacaagaaagtcaaacctgacgtcaaacccaaggctacaaccaattttaagaagaaaggcaagggaaaggcaaaaggagattgctttgtgtgtggcaagcctgggcattgggccaaggattgtcctgagcgcaaggacaagaagtctgcaaacatggttattagtgagggcggaggaacattggggtatggtaaatttttacctacagttctctctgtctgtcactcacttgattggtgggttgatactggtgctaatattcatgtgtttgcggacatttccctattttcttcttatcaagttgggagaggttcctccttgttgatgggaaacggatcgcttgtggctgttcatggtgttggtacggtcgatctgaagtttacttcgggaaagatcgtgcagctgaagaacgtgcagcatgtcccttcaataaagaagaatctagttagcggctctctactgtgtagagatggttttagacttgtgtttgaatccaataaatgtgtcgtatctaaatatggaacgtttattggaaaaggttatgatagcggaggtttgtttcgcttttccttggatgatatgtgtaataaagttgtgaaccatgtaagcgatgatgatgatgagtccaatgtgtggcattcgcaactttgccatgtgaattttggttgtatgacacgcttagccaacatgagtttaattccaaaattcactttagtcaaaggctctaagtgccatacttgtgttcaaacgaaacaacctcgcaagcctcacaagtcatctgaggcgaggaagttggcaccactagaaattgttcattccaatctgtgcgaaatgaacggcgtgttgactaaagggggaaagaaatatttcatgacactgatagatgattgcactagattctgctacgtgtacctattgaaaacaaaggatgaagtattacattactttaagatctataaggctgaggtagaaaaccaactggaaaggaaaatcaaacggttaaggtctgataggggtggagagtatttttccaatgagtttacttctttctgcaaagagtatggaattattcatgagaggacgcattcctattcaccccagtcaaacggggtagccgaaagaaagaaccgcactctaactgagatggtgaatgccatgttagacactgcaggactttccaaggaatggtggggtgaggcaatattgactgcgtgtcatgtcctgaatagaattcctactaagcataaggaagtaacatcattcgaggaatgggaaaggaagaaattaaatctctctcacctgcgcacatggggctgtttggccaagagatgccacatttttgagaatgaatttcctatgaaaaatgcacctagcacttctagtcaagaacctattttatcccctgagcactttgtgctgatagaacacattgatcaaacgcttgaggaaaattctgaggagaataacattgtagcaactcgaaagagtaagagacaaaggactgcaaagtcttttggagatgactacattgtatatcttgtggatgatactccaagaaccattgaagaggcatattcatctcctgacgttgactattggaaggaagcggtacgcagtgaaatggactcaattatgtctaatggtacttgggaagtcatcgagtgtccatatgggtgcaagcctgtaggatgcaaatgggttttcaagaaaaagcttaggcctgacgcctctcatggtctactcgtccatcagatggatgttaagacagctttcctcaatggagagttggaggaggagatctatatggatcaaccagatgggtatgtactagaaggtcaggagggaatggtatgcaagctgttgaagtccttgtatggtctcaaacaagcgcctaagcaatggtatgagaagtttgacaatacacttacatctactggctttgttgtgaacgaagctgacaaatgtgtgtactatcgtaatggtgggggagagggagtgatcttgtgtttatatgtcaatgacatattgatctttgggaccagcctcaatgtgattgaagaggtcaaggactttctgtccaaaagctttgaaaagaaggatttgggagtggctgatgttattcttaacattaaactactgagaggagatgagggtcggattacacttgtgcaatctcactatgtggacaaggtcttgagtcgctttggttatagtgactgcaaggcagctcctactccttatgatcctagtgtgctattaaggaaaaaccgaagaatagcaagggatcaattgagatactcccagatcattggttcattgatgtacttagctagtgcaacgaggcctgacatctcatttgctgtgagcaagttgagccggtttgtttcaaatccgggagatgatcattggcatgctcttgaaagagtaatgcgctatctaaaagggacaatgagctatggaattcactatgccgggtacccaaaagtgctggagggctatagtgattcaaactggatatctgatgctgatgagataaaggccacaagtgggtatgtgttcacacttggaggtggcgctgtttcctggaagtcttgcaagcagatcatcttaacgaggtcaacaatggaaacagagctcacagctttagatactgccacagttgaggccgaatggcttcgtgagctcctgatggacttgccggtggttgaaaaaccaataccagcaatcctgatgaactgtgataatcaaacagtgattattaaagtaaacagttcgaaggacaacatgaagtcatccaggcatgttaaaagaagactgaagtctgtcagaaagcagaaaaactccagagtgatagcattggactatgtctag

SEQ ID NO: 14834 - DNA, 3564 bp, Oryza sativa
  Clone ID: TFbOSC421667j.C1.o33.gm
atggacacttatcctttcagcaatgttgagatagacaatagtggatttcatgtttgtgatcttatatacagctttcggccttcaccgagagaatccttccccggttctgttcacctgcgcgcacaggtgtacgggacgagcaggtgcctccggaactccgtccgcttgagaacttgcacgggtaggcgggcgatcaagttttttggtagcgcttcaagcgcgactgctcttgttcttcgcggctactgctgctgcatcggcgccttcaccaagatgtcaacggagattggagacaataagatgaacgacatcaacggaggcaatactgcctcaaatccagcgatgggacgttctcgggggaaggacatgtgggatgctcttgaggtcaagttcggggtttccgacgccggcagcgagctgtatgtcatggagcagttctatgactacaagatggtcgattaccgttctgtagtggaacaggcttatgagattcagatgctggtaaaggaacttgagaacaacaactgcgagttgccggacaagtttgtggctggaggcattattgccaaattgccaccttcttggtcggactttgctacttctctaaaacacaagaggcaaaagttcagtgttactgatctcattggctctttgggtattgaggagaaggtgagggcaaaggacaaccagggcaaaaagatcgagggaggttctagcgctaatttggtgcagaagaagaacactcacgcatcccacaacaacaacaagaaagtcaaacctgacatcaaatccaaggctacaaccaattttaagaagaaaggcaaaggaaaggcaaaaggagattgctttgtgtgtggcaagcctgggcattgggccaaggattgtcctgagcgcaaggacaagaagtctgcaaacatggttattagtgagggcggaggaacattgtgtgtgggacataggttcttaatagtaaattctggagtacccgacatgcgtgttggtacaattactgagttcagagatgccacattttttgagaatgaatttcctgtgaaaaatgcacatagcacttctagtcaagaacctattttatcccctgagcactttatgccgatagaacacattgatcaaacgcttgaggaaaatcctgaggaggataacattgtggcaactcgaaagagtaagagacaaaggactgcaaagtcttttggagatgactatattgtatatcttgtggatgatactccaagaaccattgaagaggcatattcatctcctgatgtgactattggaaaggaaagaagcggatgcaaatgggttttcaagaaaaagcttaggcctgatggtacaattgaaaagtacaagatggatgttaagacagctttcctcaatggagagttggaggaggagatctatatggatcaaccagatgggtatgtactagaaggtcaggagggaatggtgtgcaagctgttgaagtccttatatggtctcaaacaagcgcctaagcaatggcatgagaagtttgacaatacacttacatctgttggctttgttgtgaaagaagctgacaaatgtgtgtactatcgctatggtgggggagagggagtgatcttgtgtttatatgtcgatgacatattgatctttgggaacagcctcaatgtgattgaggaggtcaaggactttctgtccaaaagctttaaaatgaaggatttgggagtggctgatgttattcttaacattaaactactgagaggagatgagggtgagattacacttgtgcaatctcactatgtggacaaagtcttgagtcgctttggttatagtgactgcaaggcagctcctactccttatgatcctagtgtgctattaaggaaaaaccgaagaatagcaagggatcaattgagatactcccagatcattggttcattgatgtacttagctagtgcaacgaggcctgacatctcatttgctgtgagcaagttgagccagtttgtttcaaatccgggagatgatcattggcatgctcttgaaagagtaatacactatctaaaagggacaatgagctatggaattcactatgccgggtacccaaaagtgctggagggctatagtgattcaaactggatatctgatgctgataagataaaggccacaagagggtatgtgttcacacttggaggtggcgctgtttcctggaagtcttgcaagcagaccatcttaacgaggtcaacaatggaagcagagctcacagctttagatactgccacagttgaggccgaacggcttcgtgagctcctgatggacttgctggtggttgaaaaaccagtaccggcaatcctgatgaactgtgataatcaaacagtgattattaaagtgaacagttcgaaggacaacatgaagtcatccaggcatgttaaaagaagactgaagtctgtcagtaagcagaaaaactccggagtgatagcattggactatgtccagacggctaaaaatctggcagatcagtttaccaaggggctaccacgtaatgcgggcgatcaagtttttggtagcgcttcaagcgcgactgctcttgttcttcgcggctactgctgctgcatcggcgccttcaccaagatgtcaacggagattggagacaagaagatgaacgacatcaacggaggcaatactgcctcaaaatccagcgatgggacgttctcgggcagcagcagcagcaacgcgaacaccctcgcctacatggcagagggcacctacaagaccaacctgctcaacctcgccaaagacctgatcgccaatgtcaccaagacggggtcgcactcggccgccggcgccacggctgggacgacaggtcccgacatcgtctacggcgccgtactctgccggggagactccaccaactgcagcagccgcttacagagagtgctcgacacagccagcatcagtaataatggatctaccagtagtgagagtgactcccagtcccagtcgcacaagagtactgtaaccttgtacgaccatgagttccaggcgctgctaagcttctctgacacggacttcatctccagcttcagcaacgcgccggcgtgcatagtgagcaattacctgaaccctgctgtccctcagagggatgctgatcgcacgcggttcagcgagcttttctctgagctcatggagaggatctccgacgccatggtgagtagtcgggccagctacttgacgggcaaggggaaggggtggttcgacggccaggagagtcagccagtagtatacgggctggcgcagtgcatggacggcatgccgccggagcgttgccggagttgcctgggcggcatcaccgaccaagggaaggagatggtcagcaatggcctgacggaaggcatggtgctcggggtgcgctgcagtctgtggtaccactaccagacggacggagaattcttcgccggcgagccaggggtgttagcgttcctaaacatgccttcttctagagacgaaagcaagttcgggctctgggctacaattggatcgttcttcctcatgaagcaagatttaaactacgactga

SEQ ID NO: 14835 - DNA, 3063 bp, Oryza sativa
  unsure (1)..(3063): unsure at all n locations
  Clone ID: TFbOSC900407j.C1.o4.gm
atggacacttatcctttcagcaatgttgagatagacaatagtggatttcatgtttgtgatcttatatacagctttcggccttcaccgagagaatccttccccggttctgttcacctgcgcgcacaggtgtacgggacgagcaggtgcctccggaactccgtccgcttgagaacttgcacgggtaggcgggcgatcaagttttttggtagcgcttcaagcgcgactgctcttgttcttcgcggctactgctgctgcatcggcgccttcaccaagatgtcaacggagattggagacaataagatgaacgacatcaacggaggcaatactgcctcaaatccagcgatgggacgttctcgggggaaggacatgtgggatgctcttgaggtcaagttcggggtttccgacgccggcagcgagctgtatgtcatggagcagttctatgactacaagatggtcgattaccgttctgtagtggaacaggcttatgagattcagatgctggtaaaggaacttgagaacaacaactgcgagttgccggacaagtttgtggctggaggcattattgccaaattgccaccttcttggtcggactttgctacttctctaaaacacaagaggcaaaagttcagtgttactgatctcattggctctttgggtattgaggagaaggtgagggcaaaggacaaccagggcaaaaagatcgagggaggttctagcgctaatttggtgcagaagaagaacactcacgcatcccacaacaacaacaagaaagtcaaacctgacatcaaatccaaggctacaaccaattttaagaagaaaggcaaaggaaaggcaaaaggagattgctttgtgtgtggcaagcctgggcattgggccaaggattgtcctgagcgcaaggacaagaagtctgcaaacatggttattagtgagggcggaggaacattgtggcctgatggtacaattgaaaagtacaagatggatgttaagacagctttcctcaatggagagttggaggaggagatctatatggatcaaccagatgggtatgtactagaaggtcaggagggaatggtgtgcaagctgttgaagtccttatatggtctcaaacaagcgcctaagcaatggcatgagaagtttgacaatacacttacatctgttggctttgttgtgaaagaagctgacaaatgtgtgtactatcgctatggtgggggagagggagtgatcttgtgtttatatgtcgatgacatattgatctttgggaacagcctcaatgtgattgaggaggtcaaggactttctgtccaaaagctttaaaatgaaggatttgggagtggctgatgttattcttaacattaaactactgagaggagatgagggtgagattacacttgtgcaatctcactatgtggacaaagtcttgagtcgctttggttatagtgactgcaaggcagctcctactccttatgatcctagtgtgctattaaggaaaaaccgaagaatagcaagggatcaattgagatactcccagatcattggttcattgatgtacttagctagtgcaacgaggcctgacatctcatttgctgtgagcaagttgagccagtttgtttcaaatccgggagatgatcattggcatgctcttgaaagagtaatacactatctaaaagggacaatgagctatggaattcactatgccgggtacccaaaagtgctggagggctatagtgattcaaactggatatctgatgctgataagataaaggccacaagagggtatgtgttcacacttggaggtggcgctgtttcctggaagtcttgcaagcagaccatcttaacgaggtcaacaatggaagcagagctcacagctttagatactgccacagttgaggccgaacggcttcgtgagctcctgatggacttgctggcgggcgatcaagtttttggtagcgcttcaagcgcgactgctcttgttcttcgcggctactgctgctgcatcggcgccttcaccaagatgtcaacggagattggagacaagaagatgaacgacatcaacggaggcaatactgcctcaaaatccagcggtgggacgttctcgagcagcagcagcagcaacgcgaacaccctcgcctacatggcagagggcacctacaagaccaacctgctcaacctcgccaaagacctgatcgccaatgtcaccaagacggggtcgcactcggccgccggcgccacggctgggacgacaggtcccgacatcgtctacggcgccgtactctgccggggagactccaccaactgcagcagccgcttacagagagtgctcgacacagccagcatcagtaataatggatctaccagtagtgagagtgactcccagtcccagtcgcacaagagtactgtaaccttgtacgaccatgagttccaggcgctgctaagcttctctgacacggacttcatctccagcttcagcaacgcgccggcgtgcatagtgagcaattacctgaaccctgctgtccctcagagggatgctgatcgcacgcggttcagcgagcttttctctgagctcatggagaggatctccgacgccatggtgagtagtcgggccagctacttgacgggcaaggggaaggggtggttcgacggccaggagagtcagccagtagtatacgggctggcgcagtgcatggacggcatgccgccggagcgttgccggagttgcctgggcggcatcaccgaccaagggaaggagatggtcagcaatggcctgacggaaggcatggtgctcggggtgcgctgcagtctgtggtaccactaccagacggacggagaattcttcgccggcgagccaggggtgttagcgttcctaaacatgccttcttctagagacgcggcggcctcgccgacggcggcgttggacgcgacggtcgcctaccgccctctgggagggcgatttttaaaaatcgccctctccgagggcggcgaaaatgacgtggcagacggccgttcgctctcgggcgacggccgtcaacgaaatttgcagggcggnccccttgccgccctccgctag

SEQ ID NO: 14836 - DNA, 1915 bp, Oryza sativa
  Clone ID: TFbOSC412814j.C1.o3.np
ccccttcagtaagaaaagatttggagaagaagtcttaggttctggtctattctttcctggcttgtttcctctctcacctcaatccctgtaacagatgtttaacagagaaaaaggaaagaatgtcagcgggtatgcctccagtaactcaagttttcaactcaatccaccactagcctcaagagagttaacaagggcacacccttggtccattccaagcatgctgcttagtccacagctaccattggttggaagtcaagaccaaaatcagtatgtgtttgatcgagcatttgccacccaggtcgatgagcttccaataccagaagaggatgtccccttttgtcacgattgtagagagcaaggacactatgccctgaattgtccatgggtatatgccaaagaagctccttcccttggtttaacagtgcagacatcgctaaaccagcctcttcgcaccaagtcaagcttgcagcctagtgtgcaaagcagagagcccaatgaagagaatccattgaatcccgggaattgctttcctcctagcccttcgtaccacgtggggtcacgtactaagcaagccaaaggcaagaagagtaagaatcagaggagaaaagcaccgatgcgaactgaagaagaagtacgtaagatgaccattaccagcacagaatggcctccaccaggaatgacaaaacgtcagagaagaaataccttccggggtgcaccacagttgacagagcatcttttagctaatggaggtagagtgtctgatagtgaagattcagatcaagtctcatcagatgatgaagatcagaagtctccccaaggtttcaaccagaacaaaatggaacgtaaggcatgctctcgttgtggagaaatcggtcatgttgccagctcgtgtgccactacatgcgttcattgtgaggaagaccatccacccgacaggtgtccaatgagcaggatcacttgtttcttttgtcaaggaactgatcatgtaccaaaagattgtcaattcagttttctgctgacgaagaggatggccagccaacccgccagttccaacggagagcagcatcaaggcaacacaaatcctcgccaagattacagtttcagcctaacttcagtgccaggacagaggaatcaaaatgaggaaagaaaatgccgagtccgagaagatatctgttgcttcaattgtcaaggaatgggtcatttcgccgacaagtggccaaaaccgagaaacatagctgccggcacgtcagtccacgcaactccctgcaatcagaagcttgctcctcagcgaattgtcatccatgcatcccgaagcagtcctatagcccccgttgcaacagctccaactccagcgagtacattaccacaaggtgtcaatgctcaatttcagccccagccaccagttgacaagacagcggcattgtacctttggatgttccagcacagcagccaaaaaaaaaatcaagtacaagatgaagaacccgagcaagaccacccaccaggggagtgtcccacccgcaagatcacatgttttctgtgcgaaggtacaaaccatgtgcccaaggattgccaacttagtgtgttgttgaccaagaccgcagaaatccaacgaaccaccctacgattgtctcatcagctagtgagctccaacagcaacatcgacgatatcatccatagcaccaatgctcctcctgctgcacctgactctgcaatcaatcatagcaataataccttcagcaccaaccattctctgcgccgacagcctcagcagagaattgtcgtcgatggaagaagttgtttctctccccgacctactccaggccgagcaaagggcaatcaacctccggagggcgataccaagcagaagaccgtcctccgcttcaaacagcaatcagacggaagcttctcctgtgaa

SEQ ID NO: 14837 - DNA, 1362 bp, Oryza sativa
  Clone ID: TFbOSC23512j.C1.o3.fg
atggctgacaatgagaaaggcaataaggtcaggagtcaggacattggtacctcaagctcccgagtgaatgaagcacaagacaccagttgtgcggcagtggtccaacacctgattaaccagaacaaattgcttatagagatactacagcagcatcggatgccaattttgaacccgagtcagatgcaacctcaggtgcagttggaggcagtccaagcactcacaccacaagtcagcgcaccgccaacatcccagaaggcccctcatgccatgccacatgttgacccaaaagaagcaagtatcatctgttttatgtgtgatgagcaagggcactacgcaaggaactgtcctcagcagaaaagaaaagcaccaatgcgaaccgaaggtgaagttcgtaagatgatcattaccagcacagaatggcctccaccaggaatgacaagacgtcagagaagaaacaccttccgaggtgcaccacagttgacagagcatcttttagctaatggaggtagagtgtctgatagtgaagattcagatcaagtctcctcagaagatgaagatgagaaatctccccaaggtttcaaccaggataaaatggaacgtaaggcatgctctcgttgtggagaaatcggacatgttgccagctcgtgtgcctctacatgcgttcattgtgaggaagaccatccacccgacaggtgtccaacgagcaggatcacttgtttcttttgtgaaggaactgatcatgtaccaaaagattgtcaattcagttttctgctgacgaagaagatggctaaccaacccgccggtttcaacggagagaagcatcaaggcaacaccaatcctcgccaagattacagtttcagcctaactccagtgccaggacagaggaatcaaaatgagaaaagaaaatgccgagtccgggaagatatctgttgcttcaattgtcaaggaatgggtcatttcgccgacaagtgcccaaaaccgagaaacatagctgccggcacgtcagtccacgcaactccctgcaatcagaagcttgctcctcaacgaatggtcatccatgcatcccgaagcagtcctatagcccgcgttgcaacagctccaattccaatgagtgcactaccacaaggtgtcaatgctcaatttcagccccagccaccagctgacaagacagatgccagtatctgcgttgtacctttagaagctccaatacagcagctgagaaatcaagtacaagatgaagaacccgagttggagaagggcattactccaaaaactgtccccgacctccacattttcgccaatttacacgaagcagacattccaatcgtattgtggtcactggagcaaacgccgtacccgtaa

SEQ ID NO: 14838 - DNA, 2169 bp, Oryza sativa
  Clone ID: TFbOSC400750j.C1.o67.np
atctatcacaaaaccacatcatgccctagcgccgccgccgccgcggattgcgccgcatcccgccgtccccgcgcgcattaaagagaggggaatcactccccgtgattccctctcccgtttcccccgatttcccctctctctctccctcggatccgtccggattcatcccgtaatcctcgccggcgacatctatggagcccgagatccccgcgcccgtttccttcctctccggccgcgttctccccctctcggtgctatataattgctccccgagctccgctcttccgtttccgccgctcgccgctcgctctcgccgtcggatccgtgctcgcgccgtgctcctctctctccgccgtcgccgccgaccttcggctcgccgccgacgtcgctccggtcctcctcccggctcggcgccacctccctcggcatcgccgcatcgccgtcgacctcgtccgcgcctccgtttcgctcgccgaccgtcggagcgccgccgtcatcgtcatcccgagccgcgccgccgtctccctccgctccgtccgccgttctcgtcgtcgtcgttgtcccggggtgagccgtggaccgtccccttcgtttcccccttccctcctctctctcgggtgccgctccgccgcgccgttggtcgccggcggcgaccatcggggcgcgggtgcgccgctcccgtcggccgtgccggcgaggccgccttcgggcgcgccctcgcggctgccaagtgggcccggccgtcagccgcccgcgcccgcgggtgcggctgacgcgtgggacccacggcgccgaccgccgccagccgcgtgctcccggtccaccgtggaccgagaggctgacgcgtgggccccactcccgtggacccgggcaaatgaaggctacacgagctgcggcccgatggctgacaatgagaaaggcaataaggtcagaagtcaggacattggtacctcaagctcccgagtgaatgaagcaccagacaccagttgtgtggcagtggtccaacacctgattaaccagaaccaattgcttatagagatactacagcagcatcggatgccaattttgaacccgagtcagatgcaacctcaagtgcagttggaggcagtccaagcactcacaccacaagtcagcgcaccgccaacatcccagaaggcccctcatgccatgccacatgttgacccaaaagaagcaagtatcatctgttttatgtgtgatgagcaagggcactacgcaaggaactgtcctcagcagaaaagaaaagcaccaatgcgaaccgaagatgaagtccgtaagatgatcattaccagcacagaatggcctccaccaggaatgacagaacatcagagaagaaattccttccgaggtgcacaacagttgacagagcatcttttagctaatggaggtagagtgtctgatagtgaagattcagatcaagtctcctcagatgatgaagataaaatagaacttaaggcatgctctcgttgtggagaaatcggtcatgttgccagctcgtgtgcctctacatgcgttcattgtgaggaagaccatccacccgacaggtgtccaacgagcaggatcacttgtttcttttgtgaaggaactgatcatgtaccaaaagattgtcaattcagttttctgctgacgaagaagatggccaaccaacccgccagttccaacggagagaagcatcaaggcaacacaaatcctcgccaagattccagcttcagcctaactccagtgccaggatagaggaaacaaaatgagaaaagaaaatgccgagtccgggaagatatctgttgcttcaattgtcaaggaatgggtcatttcgccgacaagtgcccaaaaccgagaaacgtagctgccagcacgtcagtccacgcaaacccccgcaatcagaagcttgctcctcaacgaattgtcatccatgcatcccgaagcagtcctataacccgcgttgcaacagctccaattccaatgagtgcactaccacaaggtgtcaatgctcaatttcagccccagcaaagaattgtcgtagatggaagaagttgtgtctctccccgacctactccaggccgagccaagggcaatcaacctccggagggcgataccaagcagaagaccgtcatccgcttcaaccagcaatcagaaggaagcttctcctgtgaa

SEQ ID NO: 14839 - DNA, 1685 bp, Oryza sativa
  Clone ID: TFbOSC400773j.C1.o15.np
atggctgacaatgagaaaggcaataaggtcagaagtcaggacattggtacctcaagctcccgagtgaatgaagcaccagacaccagttgtgtggcagtggtccaacacctgattaaccagaaccaattgcttatagagatactacagcagcatcggatgccaattttgaacccgagtcagatgcaacctcaagtgcagttggaggcagtccaagcactcacaccacaagtcagcgcaccgccaacatcccagaaggcccctcatgccatgccacatgttgacccaaaagaagcaagtatcatctgttttatgtgtgatgagcaagggcactacgcaaggaactgtcctcagcagaaaagaaaagcaccaatgcgaaccgaagatgaagtccgtaagatgatcattaccagcacagaatggcctccaccaggaatgacagaacatcagagaagaaattccttccgaggtgcacaacagttgacagagcatcttttagctaatggaggtagagtgtctgatagtgaagattcagatcaagtctcctcagatgatgaaggtgcgaagcctccccaaggttttaaccagaataaaatagaacttaaggcatgctctcgttgtggagaaatcggtcatgttgccagctcgtgtgcctctacatgcgttcattgtgaggaagaccatccacccgacaggtgtccaacgagcaggatcacttgtttcttttgtgaaggaactgatcatgtaccaaaagattgtcaattcagttttctgctgacgaagaagatggccaaccaacccgccagttccaacggagagaagcatcaaggcaacacaaatcctcgccaagattccagcttcagcctaactccagtgccaggatagaggaaacaaaatgagaaaagaaaatgccgagtccgggaagatatctgttgcttcaattgtcaaggaatgggtcatttcgccgacaagtgcccaaaaccgagaaacgtagctgccagcacgtcagtccacgcaaacccccgcaatcagaagcttgctcctcaacgaattgtcatccatgcatcccgaagcagtcctataacccgcgttgcaacagctccaattccaatgagtgcactaccacaaggtgtcaatgctcaatttcagccccagccaccagctgacaagacagaggccagtatctgcgttgtacctttggaagttccaatacagcagctgagaaatcaagtacaagatgaagaacccgagaagaagggcattactccaaaaactgtccccaaccaaggcaaaatcgacctccacattaccgccaatttacacgaagcagacattccaatcgtattgtggtcactggagcaaacgccgtaccaaggagtgaaatcttcaactcggtatcagatgctacacggagtgaaaagtgcaagcaccagttaccaggttgactccaaagagatgaactatgcaaagctctggaactgaagccccatcttcaagtgccgcaacccagtcgaagtcagctaaaggttcaaccagggacaagtcaggtgaagagaagattccatctgcaacaggagatcgagccaagcagtccagagtggagaagttgtgctaggcaagtttgttataagaagacggagcggaagaagtcagacaagaagagaagaccgcccaacctatcttcttgc

SEQ ID NO: 14840 - DNA, 1632 bp, Oryza sativa
  Clone ID: TFbOSC421503j.C1.o4.fg
atggctgacaatgagaaaggcaataaggtcagaagtcaggacattggtacctcaagctcccgagtgaatgaagcaccagacaccagttgtgtggcagtggtccaacacctgattaaccagaacaaattgcttatagagatactacagcagcatcggatgccaattttgaacccgagtcagatgcaacctcaagtgcagttggaggcagtccaagcactcacaccacaagtcagcgcaccgccaacatcccagaaggcccctcatgccatgccgcatgttgacccaaaagaagcaagtatcatctgttttatgtgtgatgagcaagggcactacgcaaggaactgtcctcagcagaaaagaaaagcaccaatgcgaaccgaagatgaagtccgtaagatgatcattaccagcacagaatggcctccaccaggaatgacaaaacatcagagaagaaattccttccgaggtgcacaacagttgacagagcatcttttagctaatggaggtagagtgtctggtagtgaagattcagatcaagtctcctcagatgatgaagatgagaagtctccccaaggttttaaccagaataaaatagaacttaaggcatgctctcgttgtggagaaatcggtcatgttgccagctcgtgtgcctctacatgcgttcattgtgaggaagaccatccacccgacaggtgtccaacgagcaggatcacttgtttcttttgtgaaggaactgatcatgtaccaaaagattgtcaattcagttttctgctgacgaagaagatggccaaccaacccgccagttccaacggagagaagcatcaaggcaacacaaatccccgccaagatcaccgtttcagcctaactccagtgccaggacagaggaatcgaaatgagaaaagaaaatgccgagtccgggaagacatctgttgcttcaattgtcaaggaatgggtcatttcgccgacaagtgcccaaaaccaagaaacatagctgccggcacgtcagtccacgcaactccctgcaatcagaagctcgctcctcaacgaattgtcatccatgcatcccgaagcagtcctataacccgcgttgcaacagctccaattccaatgagtgcactaccacaaggtgtcaatgctcaatttcagccccagccaccagctgacaagacagaggccagtatctgcgttgtacctttggaagttccaatacagcagctgagaaatcaagtacaagatgaagaacccgagttgaagaagggcattactccaaaaactgtccccaaccaaggcaaaatcgacctccacattaccgccaatttacacgaagcagacattccaatcgtattgtggtcactggagcaaacgccgtaccctggtaacttgtctgaggttgactccgaagatatgaatcatgagaagttctgggacggaagcatcactgcactaccgcaacctagtctgagtcagccaaaaggtgcaccctggtccaagtcaggtgaagagaagattccatccgcaacaggaggtcaagccaagcagttccgagtggtgaagttttgctggaagtttgtcaagacgcaacggaagaagtcagacaagaagagaagaccgcccaacctatcttcttgctag

SEQ ID NO: 14841 - DNA, 1284 bp, Oryza sativa
  Clone ID: TFbOSC900156j.C1.o3.fg
atggctgacaatgagaaaggcaataaggtcagaagtcaggacattggtacttcaagctcccgagtgaatgaagcaccagacaccagttgtgtgacactagtccaacacctggttaaccagaaccgattgcttatagagatactacagcagcaccagacgccaattctgaacttgagtcaaatacaacctcaagtgcagttggaggcagtccaagcactcacaccacaagtcagcgcaccgccaacatcccagaaggcccctcatgccatgccacatgttgacccaaaagaagcaagtatcatctgttttatgtgtgatgagcaagggcactacgcaaggaactgtcctcagcagaaaagaaaagcaccaatgcgaaccgaagatgaagtccgtaagatgatcattaccagcacagaatggcctccaccaggaatgacaagacgtcagagaagaaataccttccgaggtgcaacacagttgacagagcatcttttagctaatggaggtagagtgtctggtagtgaagattcagatcaagtctcctccgatgatgaagatgagaagtctccccaaggttttaaccagaataaaatagaacttaaggcatgctctcgttgtggagaaatcggtcatgttgccagctcgtgtgcctctacatgcgttcattgtgaggaagaccatccacccgacaggtgtccaacgagcaggatcacttgtttcttttgtgaaggaactgatcatgtaccaaaagattgtcaattcagttttctgctgacgaagaagatggctaaccaacccgccagttccaacggagagaagcatcaaggcaacaccaatcctcgccaagattacagtttcagcctaactccagtgccaggacagaggaatcgaaatgagaaaagaaaatgccgagtccgggaagacatctgttgcttcaattgtcaaggaatgggtcatttcgccgacaagtgcccaaaaccgagaaacatagctgccagcacgtcagtccacgcaactccctgcaatcagaagcttgctcctcaacgaattgtcatccatgcatcccgaagcagtcctatagcccgcgttgcaacagctccaactccagcgagtgcattaccacaaggtgtcaatgctcaatttcagccccagccatcagttgacaagacagaggccagtatcggcattgtacctttggatgttccagcacagcagccaagaaatcaagtacaggatgaagaacccaagcgtaagaaagttatttacaacggtagtacctgttaa

SEQ ID NO: 14842 - DNA, 2229 bp, Oryza sativa
  Clone ID: TFbOSC29453j.C1.o1.fg
atggctgacaatgagaagggcaataaggtcagaagtcaggacattggtacctcaagctcccgagtgaatgaagcaccagacaccagttgtgtagcagtggtccaacacctgattaaccagaacaaattgcttatagagatactacagcagcatcggatgccaattttgaacccgagtcggatgcaacctcaagtacagttggaggcagtccaagcactcacaccacaagtcagcgcaccgccaacatcccagaaggcccctcatgccatgccacatgttgacccaaaagaagcaagtatcatctgttttatgtgtgatgagcaagggcactacgcaaggaactgtcctcagcagaaaagaaaagcaccaatgcgaaccgaagatgaagtccgtaagatgatcattaccagcacagaatggcctccaccaggaatgaccagacgtcagagaagaaataccttccgaggtgcaccacagttgacagaacatcttttagctaatggaggtagagtgtctgatagtgaagattcagatcaagtctcctcagatgatgaagatgaaatggaacgtaaggcatgctctcgttgtggagaaatcggtcatgtcgccagctcatgtgccactatatgcgttcattgcgaggaagaccatccacccgacaggtgtccaacgagcaggatcacttgtttcttttgtgaaggaactgatcatgtaccaaaagattgtcaattcagttttctgctgacgaagaagatggctaaccaacccgccagttccaacggagagaagcatcaaggcaacaccaatcctcgccaagattacagttccagcctaactccagtgccaggacagaggaatcgaaatgagaaaagaaaatgccgagtccgggaagacatctgttgcttcaattgtcaaggaatgggtcatttcgccgacaagtgcccaaaaccgagaaacatagctgccggcacgacagtccacgcaactccctgcaatcagaagcttgctcctcaacgaattgtcatccatgcatcccgaagcagtcctatagcccgcgttgcaacagctccaattccaatgaatgcactaccacaaggtgtcaatgctcaatttcagccccagccaccagctgacaagacagaggccagtatctgcgttgtacctttggaagttccaatacagcagctgagaaatcaagtacaagatgaagaacccgagtgtaagaaagttattgtttgttacaactgcagtgaagaagggcattactccgaaaactgtccccaaccaaggcaaaatcgacctccacattaccgccaatttacacgaagcagacattccaatcgtattgtggtcactggagcaaacgccgtacccgttcggatatacctgcaaacagttaagaagatccaggaagacatcaatattctagaacataatagtcgatggttggtaattagtcgatcaggtatcagaaaacggtcaaaggtgatatggcagaagaacaatatggatgctccccatctcgaggaagcactaaaccctagtggcatagatacagatagcaagcaatgtatttccctgaaggcagcaagccaaaggacctcatcgtccccagaagcgtccgcaatccacattaaagaataccacctgttagagataagccgaaagatgattgataaaaagagattggcaaagatgttctctagcatgaaagaagtaggccgaaaggtgattgataaacagaaacatgctctgcatcgctcaaggaagacccctgattgtaattgccccgcaacagtcaccttgtcattaagtcagcaagatgacctaggtaaaagtgtttctatgaaggcaaagagtgaaatcttccactcggtatcagatgctacacggagtgaaaaatgcaagcaccggttaccaggcgacgccacgtcctgggagatgatccaacgggaaagaactcatcaagttgataacttgtccgaggttgactccgaagatatgaatcatgagaagttctggaacggaagcatcactgaactaccgcaacctagtctgagtcagccaaaaggtgcaccctggtccaagtcaggtgaagagaagattccatccgcaacaggaggtcaagccaagcagttccgagtggtaaagttttgctggaagtttgtcaagacgcaacggaagaagtcagacaagaagagaagaccgcccaacctatcctcttgctag

SEQ ID NO: 14843 - DNA, 5158 bp, Oryza sativa
  Clone ID: TFbOSC1646j.C1.o1.np
ccttttactttgattttctaaactttatgcaaattaatccaaaaagttgtgctattaattggataaatgtcttaactccctcctttcacttgtctttagatgccgcgctacaagcctgagtacttgtttggtgttgagggatttgtccaggagttgcgtacgatgtcctttgtcataggatttgggactgctcctttttatgcccagattcctcatgatcgtcatgaagagaagtgccgagtcaaagtcaccttgaacagtaatagtgaagatatcccctcagtgatgttcgaagctggaggaagaaactacatccatgtatgtcaggaggtggcaaggatcaccataggagagcttcgtgatcgctatagtgatcagttggccgacactgagtatcgttaccatcctcgccaaccacagggaagtgaccgtggcagttaccttgagactgagggaattgagaatgatgctaccacaaggcatttggttgagatgctgtgggctatggatgaaacccgtgcggagactgtgttagcagctcaagatcgtgaagaccggaatcgtggtaagatttgcaagctagaggacaaggtggatcgtttggagaaggaactagccgcgttaaagggagaagcaccaccgcagaaggccagaattcgtcttaccgcaaggaagagagctctatttgtccctcgctaccaattggcgccaaagttttccccggtttctcttcttgtgctcttgtccctgccagatggtgctcactcgcagcaacgggaatggccccaacaataacaataacaacaacaatggagagaatcccacacttgcccaggttctggctcaacagacacagcttatgaacatgatgatgcagcaactccagaaccagcagaaccagctcaaccaagggaacaacaatgctccaccgccgcagaacaagttagcagaatttcttcgtgtgaggccgcccactttctctagcaccactaatcctgttgaagctggtgattggttgcacgccatagagaagaagttggatttgcttcagtgcactgatcaggagaatgtctcatttgcatcacaccagctgcatggccctgcctctgagtggtgagatcacttccgccttaataggactactgctgaacctatcacttggcttgaattcaccgctgctttccggaagacgcatataccatcgggagtagtgtctctcaagaagaaggaattcaggtcgctcacccagggatctcgctctgttacggagtatctgcacgagttcaatcgtctggctcgttatgctccggaagatgtgcgcaatgatgaagagcgccaggagaagttcttggaaggacttaatgatgagctttcttacccactcatgactcgggattatcctgatttccagaagttagtggataaggctattcgtcaggaggacaagtacaaccgcatggagcagaagaaacgccggattgctcaattcaagacacaacaggggaataatcagaggccgcgtcttactttaggaccccagtccatgccacagggaggttcttcgtctgttgttcatccgcagcgtcagttcttcaacaacaatgctggcaacaacatccgcaatcaagctccacaacctgccaagaaggagcaaggcagcaagctcgtggtgtgtttcaactgtggagaaccaggacattatgctgacaagtgtccgaagccccgacgcgtgaaggttgtccctgtccagagcaactctaccgtacccgcatcaaaggcccgtgtcaatcatgttgctgctgcagaagctcaagatgctccagatgtgattttgggtacgtttcttgttaactcagttcctgcaacagtgcttttcgattctggtgctacacattcattcttatctatgagttttgcgggaaatcatgggatggaagtagaagatcttagacgtcctatgatggttagtaccccaagtaatcaagcactctctttgcaacgtagcccctctgtcagaatagaaattaaaggagtaccgtttctggccaatcttatcctgttagaatccaaagaccttgatgtcatcctagggatggactggttagccagacataaaggtgtgatagactgtgctaacagaaaagtaactctcaccagtaatggtggtcgagttgtaactgttcatgcattgtcttctgagtctttaaggtcaagactgaaccaaataactttggaagagattcctatagttcgggagtatcctgatgtgttcccagacgatttacctggtatgccgcctaaaagggatatagagttcagaatagatttggtaccaggaacaactccgatccataagagaccttatagaatggcagccaatgagttggcagaagtcaagaggcaagtagacgatttgcttcagaaaggatacatcagaccgagttcatctccatggggagctccggttatttttgtggaaaagaaagatcatacccagaggatgtgtgtggactatcgtgcactaaatgatgtgactatcaagaataagtatccgctgcccagaattgatgatttgtttgatcagcttaaaggtgccaccgttttctccaagatagatcttcgatcagggtatcaccagttgagaatcaaagaggaagatatacctaagacagcttttaccactaggtatggattgttcgaatgtactgttatgtcttttggacttaccaatgcctccgctttcttcatgaacttgatgaataaggtgtttatggaatacctagacaagttcgtggtggtctttattgatgacattcttatctactcccgaaccaaagaagagcatgaagaacatcttcgccttgcactagagaagctacgagagcatcaattttatgccaagtttagcaagtgtgaattttggttgtctgaagtaaagttccttggtcacatcatctcagcaggaggagttgccgttgatcctagtaatgtggaatccgtaaccaattggaaacaaccaaagacagtttcagagattcgcagtttcctaggcttcacaggatattatcggaggtttatagataattttttcaagattgctaagcccatgacacggctgcttcagaaagatgtgaagtacaagtggtcagaagaatgtgagcagagtttccaagagttgaagaatcgcttaatatccgctcctattttgattttgcctgatccaaagaagggtttccaagtgtattgcgatgcatccaaacttgggttaggttgtgttctgatgcaagatgggaaggtggttgcctatgcatctcgtcagatacgtccgcatgagaagaactaccctactcatgatcttgagttagctgcagtggttcatgcgttgaaaatttggcgtcattatcttttcggtactcgtatagaggtgtataccgatcataagagtttaaaatatatctttactcagccggatctgaacatgagacaacggagatggttggaattaattaaagattatgacatgggaattcattatcacccagggaaggctaatgttgtagcagacgctcttagcaggaaaggctattgcaatgctacggaaggacgacagttgccgttggagttatgcaaggaatttgaaagattaaatttgggaattgtcagtagaggttttgttgcagtcttagaagcgaagcccactctaattgatcaagttagagaagcccaaattaatgatcctgatattcaagaaatcaagaagaatatgagaagaggaaaggctatcggtttcttggaggatgagcaaggaactgtatggttgggtgagagaatctgcgtccccgacaacaaagatttaaaagatgcaattctgaaagaagctcatgataccttatactccattcaccctggtagtaccaaaatgtaccaggatctcaaggaaagattttggtgggcaaatatgaaacgtgaaatcgcagaatacgtagcagtatgtgatgtttgtcagcgagtcaaggcagaacatcagaaacccgccgatttgctgtagcctttgaagattcctgaatggaaatgggaggaaatcggtatggatttcatcactggtttacccagaacgtcatcgggccatgactctatttgggtgatagtcgacagacttaccaaagtggctcatttcatcccagtaaagacaacatattctggaagtcggttggcggaattgtatatggcaaggattgtgtgtttgcatggcgtccctaagaaaatagtgtctgatcgaggcagtcagtttacttcaaatttttggaagaagcttcaggaagagatgggttctaaactgaactttagtactgcttatcatccgcagacagacggacaaaccgaaagggtgaatcagattttggaagacatgttgagagcttgtgctttagacttcggtggaagttgggataagaatttaccttatgcagaattttcgtacaacaacagttatcaagctagtcttcagatggctccgtacgaagcactgtatggtcggaagtgccgcactccgcttttgtgggatcaaacgggagaacatcaggttttcgggacggatatcctgagggaagcagaagaaaaggtgaaaatcattcaagaaagattgcgagtggctcagtctcgtcataagagttatgccgacaatcgccgtcgagatttgagttttgaagaaggagattatgtgtaccttcgtgtcacgcctattcgaggtgttcatcgttttcacaccaaaggaaaattggcaccgcgttttgtgggaccttataagattgtcagtagaagaggagaggttgcttatcagttggagttacctcaatctttggcaggagtccataatgtgttccatgtgtcgcaactgaaaaagtgtttaagggtacctaccgaagaagctaatcttgaacagatagaagtccaagaggatctgacctatgttgagagaccaacccgtattttggaaatagatgagagaaaaaccagaaattgagttatccgtttttgcaaagtccaatggagtaatcactcggaagaagaatcaacttgggaacgagaagatgaattgaagtcagctcatccgcatctgttcgctagttcttccgaatctcgaggacgagattctgtt

SEQ ID NO: 14844 - DNA, 958 bp, Oryza sativa
  Clone ID: TFbOSC1664j.C1.o3.gm
atggcgacagtgtgcccatgtgcgcggctaccgacgggcatgtcttctgtctacctggtcgtgtccgagtgcgtggccctcgcacctgcctccgaaaccacgcgctgctgcgacgtttgcacggacgggcgggcgatcaggtttttggagagcgtaaggcgcgactactcactgttcgtcaacatctacttcaccttcaccaatatgtcgaacactggagacaacggcaacactggatacaaggagaaggaggctcccgtcaacatcaacggaggcaatactgcctcaaactccaacggaggaccattcttgggtgtactcgctgacaatatagtggacgtgtacatgcacatgccttcagggaagaacatgtgggatgcacttgaggccaagttcggagtttccgacgccggcagcgagctgtatgtcatggagcagttctatgactacaagatggttgatgaccgttctgtagtggaacaagctcatgagattcagatgctagcaaaggaacttgagaacaacaactgtgagttgccggacaagtttgtggcgggtggcattattgccaaattcccaccttcttggtcagactttgctacttctctaaaacacaagaggcaagagttcagtgttactgatctcattggctctttgggtgttgaggagaaggcgagagcaaaggacaaccggggcaaaaatatcgagggaggttctagcgccaatttggtgcaaaataagaaccctcacgcatcccataacaacaacaagaagaaagtcaagcctgatgtcaaaccaaaggctacaaccaattttaagaagaaaggcaagggaaaggccaagggcgactgctttgtgtgcggtaagcctgggcattgggcgaagaattgtcctgatcgcaaggacaagaagtctgccaacatggttattagcgagggcggaggaacatcggggtacg

SEQ ID NO: 14845 - DNA, 846 bp, Oryza sativa
  Clone ID: TFbOSC19218j.C1.o1.fg
atgcaatgcttctatgtttcacagggcaaacgaagtgaaccgcctctctctcctaaggaggaggctaagtttgaggcttcggattgcctgttccgtggagcattgatcagtgtactcactgacaatatagtggacgtgtacatgcacatgccttcagggaaggacatgtgggatgcacttgaggccaagttcggagtttccgacgccgtcagcgagctgtatgtcatggagcagttctatgactacaagatgatgctggcaaaggaatttgagaacaacaactgtgagttgccggacaagtttgtggcgggtggcattattgccaaattgccaccttcttggtcggactttgctacttctctaaaacacaagaggcaagagttcagcgttactgatctcattggctctttgggtgttgaggagaaggcgagagtaaaggacaaccggggcaaaaatatcgagggaggttctagtgccaatttggtgcaaaagaagaaccctcatgcatcccacaacaacaacaacaagaaagtcaagcctgatgtcaaaccaaaggctacaaccaattttaagaagaaaggcaagggaaaggccaagggcgactgctttgtgtgcggtaagcctgggcattgggcgaagaattgtcctgatcgcaaggacaagaagtctgccaacatggttattagcgagggcggaggaacatcggggtatggtcgggagaggttcctccttgttgatgggaaacgggtcgcttgcggctgttcatggtgttggtacggtcgatctgaagtttacttcgggaaagaacgtgcagcatgtcccttcaataaagaagaatctagttag

SEQ ID NO: 14846 - DNA, 1754 bp, Oryza sativa
  Clone ID: TFbOSC31861j.C1.o1.fg
aagaaagtcaagctgatgtcaacccaaaggctacaaccaattttaagaagaaaggcaagggaaaggccaagggggactgctttgtgtgcggtaagcctgggcattgggcgaagaattgtcctgatcgcaaggacaagaagtctgccaacatggttattagcgagggcggaggaacatcggggtacggttattttttacctacagttctctctgtttttcattcacctgattggtgggttgatactggtgctaatattcatgtcgggagaggttcctccttgttgatgggaaacaggtcgcttgcggctattcatgtttttgatattgctgtgtacctattgaaaacaaaagatgaggcattgcattactttaagatctataaagctgaggtagaaaaccaacttgaaaggaaaatcaaacggttgaggtctgataagggtggagagtatttttccaatgagtttacgtccttttgcgaagagtttggaattattcatgagagaacgcctccctattcaccccaatcaaatggggtagccgaaagaatgaaccgcactctaactaagatggtgaatgccatgttagacactgcgggactttccaatgaatggtggggtgaggcaatttttactgcttgtcatgtcctgaataaaattccagtgaagcataaggaagtaacaccattcgaagaatgggaaaggaagaaattaaatctctcatacctacgcacatggggctgcttggccaaggtaaatgtacctatagccaaaaagcgtaaacttggaccaaagaccatagactgtgtgttccttggttatgctatccacagtgtgggctataggttcttaatagtaaactctggagtacccgacatgcgtgttggtacaattactgagtccagagatgccatattttttgagaatgaatttcccatgaaaaatacacctagcacgtctagtctagaacctgttttaccccatgagcactttgcaccgataaaacacaatgagcaaacgcttgagggaaatcctgaggaggatagcattgtagatactcgtaagagtaagagacaaagggttgcaaaatcctttggagatgactacattgtatacctcgtggatgacactccaagaaccatagaagaggcatattcatctcctgacgctgactactggaaggaggcagtacgcatcgttgagcgtccatatgggtgcaagcctgtaggatgcaaatgggttttcaagaaaaagcttaggcctgatggtacaattgaaaagtacaaggcaaggcttgtggccaagggttatacccaaaaagaaggcgaggattttttcgacacctactcaccagttgcccgcttgaccacgattcgagtactacttgctctggcagcctctcatggtcttctcgtccatcagatggacgttaagacagttttcctaaacggagagctggaggaggagatctatatggatcaaccagacaggtatgtactaaaaggtcaggagggaatggtgtgtaaactgttgaaatccttgtatggccttaagcaagcacctaagcaatggcatgagaagtttgaccccacacttacatctgctggctttgttgtgaacgaagctgataaatgtgcgtactatcgctatggtaggggagaaggagtgatcttgtgcttatatgtcgatgacatattgatctttgggaccagcttcaatgtgattgaggaggtcaaggactttctggggatcctctaa

SEQ ID NO: 14847 - DNA, 4791 bp, Oryza sativa
  Clone ID: TFbOSC401054j.C1.o17.fg
atggccgccaaatcctcccacgtcgccgcctctcccgcgcgactccctctcccgcgcatgccgcgctacaagcctgagtacttgtttggtgttgagggatttgtccaggagttgcgtacgatgtcctttgtcataggatttgggactgctcctttttatgcccagattcctcatgatcgtcacgaagaaaagtgccgagtcaaagtcaccttgaacagtaatagtgaagatatcccctcagtgatgttcgaagctggaggaagaaactatatccatgcatgtcaggaggtggcaaggatcgccataggagagctccgtgatcgctatagtgatcagttggccgacacggagtatcgctatcatcctcgccaaccacaaggaagtgaccgtggcagttaccttgagactgagggaattgagaatgatgctaccacaaggcatttggttgatatgctgtgggctatggatgaaacccgtgcggagactgtgttagcagctcaagatcgtgaagaccggaatcgtggtaagatttgcaagctagaagataaagtggatcgtttggagaaggaactagccgcgttgaagggagaagcaccaccgcagaaggccagggttcgtcttaccgcaagaaagagagctctatttgtccctcgctaccaattggcgccaaaggtccgtgtggtggaaaaagaagttaccccagccctagcagatcctccggtcgtcaatatggtgctcactcgcagcaacgggaatggccccaacaacaacaataacaataacaacaacaatggagagaatcccacacttgcccaagtcctggctcaacaggcacagcttatgaacatgatgatgcagcaactccagaaccagcagaaccagggaaataaccatgcacctccccagaacaagttagcagaatttcttcgtgtaaggccgcctactttctctagtaccactaatcctgttgaagctggagattggctgcatgccatagagaagaagttggatttgcttcaatgcactgatcaggagaaggtctcatttgcatcacaccagttgcatggccctgcctctgaatggtgggatcacttccgcttgaataggactactgctgaacctatcacttggcttgagttgaccgctgctttccggaagacgcatataccatcgggagtggtgtctctcaagaagaaggaattcaggtcgctcactcaggggtctcgctctgttacggagtatctgcacgagttcaatcgtctggctcgttatgctccggaagataagttggtggataaggctattcgtcaggaggacaagtacaatcgcatggagcaaaagaaacgccggattgctcaattcaagacacaacaggggaataatcagaggccgcgtcttactttgggaccccagtccatgccacagggaggttcttcgtctgttgttcgtccgcaacgtcagatcttcaacaacaatgcaggcaacaacatcagcaatcaagctccacgccctgttgcagtttcgacacagcaacaacctgccaagagggagcaaggcagcaagcccgtggtgtgtttcaactgtggagaaccaggacattacgctgacaagtgtccgaagccccgacgcgtgaaggttgtccctacccagagcaactctaccgtaccagtatcaaaggccagtgtcaaccatgttgctgctgcagaagctcaaggtgctccagatgtgattttgggtacgtttcttgttaacttagttcctgcaacagtgcctttcgattctggtgctacacattcattcttatctatgagttttgcgggaaatcatgggatggaggtagaagatcttagacgtcctttgatggttagtaccccaagtaatcaagcactctctttgcaacgtagcccctccgtcagaatagaaattcaaggagtaccatttctggccaatcttatcctgttagaatccaaagaccttgatgtcatcctagggatggactggttagccagacataaaggtgtgatagactgtgctaacagaaaagtaactctcaccagtgatgatggtcgagttgtaactgttcatgcattgtcttctgagtctttaaggtcaagtctgaaccaaataattttgaaagagattcctatagttcgggggtatcccgatgtgttcccagatgacttacctggtatgccacctaaaagggatatagagttcagaatagatttggtaccaggaacaactccgatccataagagaccttatagaatggcagccaatgagttggcagaagtcaagaggcaagtagacgatttgcttcagaaaggatacatcagaccgagttcatctccatggggagctccagttattttcgtggaaaagaaagatcatacccagaggatgtttgtggactatcgtgcactaaatgatgtgactatcaagaataagtatccgttgcccagaattgatgatttgttcgatcagcttaaaggtgccaccgttttctccaagatagatcttcgatcagggtatcaccaattgaggattaaagaggaagatatacctaagacagcttttaccactaggtatggattgttcgaatgtactgttatgtcttttggacttaccaatgcccccgctttcttcatgaacttgatgaataaggtgtttatggaatacctagacaagttcgtggtggtctttattgatgacattcttatctactctcgaaccaaagaagagcatgaagaacatcttcgccttgcactagagaagctacgagaacatcaactgtatgctaagtttagcaagtgtgagttttggttgtctgaagtgaagttccttggtcacgtcatctcagcaggaggagttgccgtcgatcctagtaatgtggaatccgtaaccaactggaaacaaccgaagacagtttcagagattcgcagtttcctaggcctcgcaggatattatcggaggtttatagagaatttttccaagattgctaagcccatgacacggctgcttcagaaagatgtgaagtacaagtggtcggaagaatgtgagcagagttttcaagaattgaagaatcgcttaatatcagctcctattttgattttgcctgatccaaagaagggtttccaagtgtattgcgatgcatccaaacttgggttaggttgtgttctgatgcaggatgggaaggtggttgcctatgcatctcgtcagttacgtccgcatgagaagaactaccctactcatgatcttgagttagctgcagtggttcatgcgttgaagatttggcgtcattatcttttcgccttagaagcgaagcccactctaattgatcaagttagagaagcccaaattaatgatcctgatattcaaaaaatcaagaagaatatgagaagaggaaaagctatcggtttcttggaggatgagcaaggaactgtatggttgggtgagagaatctgcgtccttgacaacaaagatttaaaagatgcaattctgaaagaagctcatgataccttatactccattcaccctggtagtaccaaaatgtaccaggatctcaaggaaagattttggtgggcgagtatgaagcgtgaaatcgcagaatacgtagcagtatgtgatgtttgtcagcgagtcaaggcagaacatcagaaacccgccggtttgctgcagcctttgaagattcctgaatggaaatgggaggaaatcggtatggatttcatcactggtctacccagaacgtcatcaggccatgactctatttgggtgatagttgacagacttaccaaagtggctcatttcatcccagtaaaaacaacatattccggaagtcggttggcggaattgtatatggcaaggattgtgtgtttgcatggagtccgtaagaaaatagtgtctgatcgaggcagtcagtttacttcaaatttttggaagaagcttcaggaagagatgggttctaagctgaactttagtactgcttatcatccgcagacagacggacaaaccgaaagggtgaatcagattttggaagacatgttgagagcttgtactttagacttcggtggaagttgggataagaatctaccttatgcggaattcttgtacaacaacagttatcaagctagtcttcagatggctccttacgaagcactgtatggtcggaagtgccgcactccgcttttgtgggatcaaacgggagagcgtcaggttttcgggacggatatcctaagggaagcagaagaaaaggtgaaaatcattcaagaaagattgcgtgtggcccagtctcgtcataagagttatgccgacaatcgtcgtagagatctaagttttgaagaaggagattatgtgtatcttcgtgtcacgcctcttcgaggagttcatcgtttccacactaaaggaaaattggcacctcgttttgtgggaccttataagattgtcagtagaagaggagaggttgcttatcagttggagttacctcaatctttggcaggagtccataatgtgttccatgtttcgcaattgaaaaagtgtttaagggtacctaccgaagaagctaatcttgaacagatagaagtccaagaggatctgacctatgttgagaaaccaatccgtatcttggaaacaaatgagagaagaaccagaaatcgagttatccgcttttgcaaagttaattggagtaatcactcggaagaagaatcaacttgggaacgagaagatgagttgaagtcagctcatccgcatctgttcgccagttcttccgaatctcgaggacgagattctgtttaa

SEQ ID NO: 14848 - DNA, 5061 bp, Oryza sativa
  Clone ID: TFbOSC401161j.C1.o43.fg
atgcacgcccgagccgccgagccgccgccgccggtggtgacgtcatcgccgacgtcatcgtcgccctctcccattccgtcgtttccggagagtccgttttcgcaggagaagagtttgaagagttccaaggccagcaaggcaactcctggtttggaatggtatattcctggtttggagataggactgtgcagccgggatggttgttcagaatggttgggcctatacaacaggatgccgcgctacaagcctgagtacttgtttggtgttgagggatttgtccaggagttgcgtacgatgtcctttgccataggatttgggactgcccctttttatgcccaaattcctcatgatcgtcacgaagaaaagtgccgagtcaaagtcaccttgaacagtaatagtgaagatatcccctcagtgatgttcgaagccggaggaagaaactacatccatacatgtcaggaggtggcaaggatcgccataggagagctccgcgatcgctacagtgatcagttggccgacactgagtatcgctaccatcctcgccaaccccagggaagtgaccgtggcagctaccttgagactgagggaattgagaatgatgctaccacaaggcatttggttgagatgctgtgggctatggatgaaacccgtgcggagactgtgttagcggctcaagatcgtgaagatcggaatcgtggtaagatttgcaagttagaggacaaggtggatcgtttggagaaggaactagccgtattgaagggagaagcaccaccgcagaaggccagggttcgtctcaccgcgaggaagagagctctatttgtccctcgctaccaattggtgccaaaggtccgtgtggtggagaaagaagttaccccagccctagcagatcctccggtcgtcaatatggtgctcactcgcagcaacgggaatggccccaatagtaacaataacaataacaatgaagggaacccaactcttgcccaagttcttgctcaacagacacagcttatgaacatgatgatgcagcaactccagaaccagcagaaccagggaaataaccatgcacctccccagaacaagttagcagaatttcttcgtgtgaggccgcctattttctctagtaccgctaatcctgttgaagctggtgattggctgcatgccatagagaagaagttggatttgcttcagtgcaccgatcaggagaaggtctcatttgcatcacaccagctgcatggccctgcctctgaatggtgggatcacttccgccttaataggattactgctgaacctatcacttggcttgagttcaccgctgctttccggaagacgcatataccatcgggagtggtgtctctcaagaagaaggaattcaggtcgcttacccagggatctcgctctgttaccgagtatctgcacgagttcaatcgtctggctcgttatgctccggaagataagttagtggataaggctattcgtcaggaggacaaatacaatcgcatggagcagaagaaacgccggattgctcatttcatgacgcaacaggggaataatcagaggccgcgtcttactttaggaccccagtccatgccacagggaggttcttcgtctgttgttcgtccgcagcgtcagttcttcaacaacaatgctggcaacaacatccgcaatcaagctccacgccctgttgcagctttgacacagcaacaacctgccaagaaggagcaaggcagcaagcccgtggtgtgtttcaactgtggagaaccaggacattacgctgacaagtgtccgaagccccgacgcgcgaaggttgtccctgcccagagcaactctaccgcaccagcatcaaaggcccgtgtcaatcatgttgctgctgcagaaactcaaggtgctccagatgtgattttggccccttctatcagaatagaaattcaaggagtaccatttctggccaatcttatcctgttagaatccaaagaccttgatgtcatcctagggatggactggttagccagacataaaggtgtgatagactgtgctaacagaaaaataactctcaccagcaatgatggtcgagttgtaactgtgcatgcattgtctcctgagtttttaaggtcaagactgaaccaaataactttggaagagattcctatagttcgggagtatcccgatgtgttcccagatgatttacctggtatgccgcctaaaagggatatagagttcagaatagatttggtaccaggaacaactccgatccataagagaccttatagaatggcagccaatgaattagcagaagtcaagaggcaagtagacgatttgcttcagaaaggatacatcagaccgagttcatccccatggggagctccagtaatttttgtggaaaagaaagaccatacccagaggatgtgtgtggactatcgtgcactaaatgatatgactatcaagaataagtatccgctgcccagaattgatgatttgttcgatcagcttaaaggtgccaccgttttctccaagatagatcttcgatcagggtatcatcagttgagaatcaaagaggaagatatacctaagacagcttttaccactaggtatggattgtttgaatgtactgttatgtcttttggacttaccaatgcccccactttcttcatgaacttgatgaataaggtgtttatggaatacctagacaagttcgtggtagtctttattgatgacattcttatctactcccgaaccaaagaagagcatatagaacatcttcgccttgcactagaaaagctacgagaacatcaactgtatgctaagtttagtaagtgtgaattttggttgtctgaagtgaagttccttggtcacgtcatctcagcaggaggagttgccgtcgatcctagtaatgtggaatccgtaaccaactggaaacaaccaaagacagtttcagagattcgcagtttcctaggcctcgcgggatattatcggaggtttatagaaaatttttccaagattgctaagcccatgacacgattgcttcagaaagatgtgaagtacaagtggtcagaagaatgtgagcagagttttcaagagttgaagaatcgcttaatatcagctcctattttgattttacctgatccaaagaagggtttccaagtgtattgcgatgcatccaaactggggttaggttgtgttctgatgcaagatgggaaggtggttgcctatgcatctcgtcagttacgtccgcatgagaagaactaccctactcatgatcttgaattagctgcagtagttcatgcgttgaaaatttggcgtcattatctttttggtactcgtacagaggtgtataccgatcacaagagtttaaagtatatctttactcagccggatttgaacatgagacaacggagatggttggaattaattaaggactatgacatgggaattcattatcacccgggaaaggctaatgttgtagcagacgctcttagcaggaaaggctattgcaatgctacggaaggacgacagttgccattggaattatgcaaggaatttgaaagattaaatttgggaattgtcagtacaggtttcgttgcagccttagaagcgaagcccactctaattgatcaagttagagaagcccaaattaataatcctgatattcaagaaattaagaagaatatgagaagaggaaaagctatcggtttcttggaagatgagcaaggaactgtatggttgggtgagagaatctgcgtccccgacaacaaagatttaaaagatgcaattctgaaagaagcccatgatactttatactccattcaccctggtagtaccaaaatgtaccaggatctcaaggaaagattttggtgggcaagtatgaagcgtgaaattgcagaatacgtagcagtatgtgatgtttgtcagcgagtcaaggcagaacatcaaaaacccgccggtttgttgcagcctttgaagattcctgaatggaaatgggaggaaatcggtatggatttcatcactggtttacccagaacgtcatcaggtcatgactctatttgggtgatagtcgacagacttaccaaagtggctcatttcatcccagtaaagacaacatattctggaagtcggttggcggaattgtatatggcaaggattgtgtgtttgcatggcgtccctaagaaaatagtgtctgatcgaggcagtcagtttacttcaaaattttggaagaagcttcaggaagagatgggttctaagctgaactttagtactgcttatcatccacagacagacggacaaaccgaaagggtgaatcagattttggaagatatgttgagagcttgtgctttagacttcggtggaagttgggataagaatctaccttatgcggaattttcgtacaacaacagttatcaagctagtcttcagatggctccttacgaagcactgtatggtcggaagtgccgcactccgcttttgtgggatcaaacgggagaacgtcaggttttcgggacggatatcttgagggaagcagaagaaaaggtgaaaatcattcaagaaagattgcgtgtggcccagtctcgccataagagttatgccgacaatcgtcgtagagatctaagttttgacgcaggagattatgtgtaccttcgtgtcacgcctcttcgaggggttcatcgttttcataccaaaggaaaattggcaccgcgttttgtgggaccttataagattatcagtagaagaggagaggttgcttatcagttggagttacctcaatctttggcaggagtccataatgtgttccatgtgtcgcagttgaaaaagtgtttaagggtacctaccgaagaagctaatcttgaacatatagaagtccaagaggatctgacctatgttgagagaccaatccatatcttggaaatagatgagagaagaaccagaaatcgagttatccgtttttgcaaagtccaatggagtaatcactcggaagaagaatcaacttgggaacgagaagatgaattgaagtcagctcatccgcatctgatcgccagtgcttccgaatctcgaggacgagattctgtttaa

SEQ ID NO: 14849 - DNA, 678 bp, Oryza sativa
  Clone ID: TFbOSC413091j.C1.o1.fg
atggagcagttatatgactacaagatggtcgatgaccgttctgtagtggaacaggctcatgagattcagatgctggcaaaggaacttgagaacaacaactgtgagttgccggacaagtttgtggcgggtggcattattgccaaattgccacctttttggtcagactttgctacttctctaaaacacaagaggcaagagttcagtgttactaatctcattggctctttgggtgttgaggagaaggcgagagcaaaggacaaccggggcaaaaatatcgagggaggttctagcaccaatttggtgcaaaagaagaaccctcacgcatcccacaacaacaacaacaagaaagtcaagcctgatgtcaaaccaaaggctacaactaattttaagaagaaaggcaaaggaaaggccaagggcgactgctttgtgtgcggtaagcctgggcattgggcgaagaattgtcctgatcgcaaggacaagaagtctgccaacatggttattagcgagagcggaggaacatcggggtacggtcgggagaggttcctccttgttgatgggaaacgggtcgcttgcggctgttcatggtgttggtacggtcgatctgaagtttacttcgggaaagaccgtgcagctgaagaacgtgcagcatgtcccttcaataaagaagaatctagttag

SEQ ID NO: 14850 - DNA, 6349 bp, Oryza sativa
  Clone ID: TFbOSC414575j.C1.o1.np
aaagaaatttgctggcagcagcagttccactcggcctcgtcttgctccatctcctgcggttcgtcctatggcacctcagccacctcggcagatgtatgtgcctccacgtccgcaaactcagttagttcgtcaagttcctcgcgcagttcaagctgcgggagatgcatctcgtaatgccaatgtcacctgctacaattgcggcaagaggggcattattctcctagctgtccttatccgaagactccagctccaacttttggaaggggccggctcaaccatgtcactgcagaagaagcaaccgacgcacctggtgtcgtacttggtacatttcttgtgcactccattcccttaacagttctttttgattccggtgcaactcattcattcatgtcaaccttgaaagcaaaacaacttgacttgaaaacagaatttcttagcgatgctatgcgcatccaatctcctggatccaccatggtcaccaaacttctatgcaaaggtgtagaacttataatagacggggtaaagtttaaagctaacctcatattattagacaccttgggcctaaatgtcattcttgggatggattggttaactaaacatgagggaaccattgattgtgctcatagaactgtaactcttcgtagcaccgatggtcaatttgttaggtttacctttgaacaaacctccacttcaaatcaaccctctatacaatctctctctataccggagttaaaatcagtacccatcgtgaatgaatattccgatgtgtttcctgacgaattaccagggatgcctccagatcgtgacattgaatttgtgatagatttaatccctgggacagcacctatagccaaaaggccatatcgaatgacttctgaaaatttgatggaattaaagaagcaactcaatgagcaattggctaaaggtttcattcgtcctagttcatctccctggggctgtccagtgttgtttgtaccaaagaaagatggaaccatgcgaatgtgcgtggattatcgacctctgaatgaagtcaccatcaaaaataaatatcctcttcctaggatcgatgatttatttgatcagttaaccggaactcgtgtcttctcaaaaattgatcttagattgggatattttcagcttaaaatcagaccggaggacattcctaaaaccgcattcacaactcgctacggtttatttgaatacaccgtagtctcttttggattaaccattgctcctgcttctttcatgaatatgatgaataaaatcttcatggaatatcttgataaatttgtggtggtattcattgatgatatactcatctactccaagagtgaagaggaacatgcgcaacatttacgtatggtactcgataaactccgtgagcatcaactttatgccaaattctcaaaatgtgaattttggttaaaagaagttgaatttcttggtcatgtactttctgaaggtggtattgctgtgaatccaagaaatgtacagaacgtacttaattggaagcaaccacaaaatgttcctgaaattagaagttttcttggactagctggttactaccgtcgtttcattgaaaatttctccaaaattgctaggcccttgactcaacttcttaaaaaagaaaataaattcatatggtctgaggcatgtgaaacaagttttcatgaacttaaaagaaggctcacaacagccccagtgctagtgatgcctgatgttcttaaaccttttaatgtttactgcgatgcctcacatcatggtctcggttgtgtactgatgcaagaaggaaaagtagtggcttatgcttctcgtcagttacgaccacacgagatcaattatccaactcatgacttagagctagcagctgtggtgcatgctctaaagatttggcgccattatttggtcagtaatcggtgcgaaatctttaccgatcataagagtttgaaatatttctttacccaaccagatctgaacctaaggcaaagaagatggttagaactcattaaagattatgatctcggtattcattatcatcccggtaaagcaaatgtagtagctgatgctttaagccggaagctacatcaccttgccgttattgagacaataaatcagccatcgttgtcctctgaatttcagaaattgaatttgggattggtagaggatggttatgttgctgcactagcattacaacctactctctattctcaaattaaagctgctcagtccattgatgaggaagtagctgaaattatgaaagaaatcaattcaaagccacaatctatatacactcttaattctgatggtatggttatgcttggcaaacgaatctttgttcccaataatcaacaccttcgagaaaccattcttgatgaagcacatcaaacacctttgtctatccatccgggttgcactaagatgtaccaggatattcgcactcaatattggtggcctagcctgaggcgtgacatagcagcatatgttgcaatttgcgatgtgtgccaacgtgtcaaagctgaacatcaacgacccgctgggctactccaacctttgcaagtacctgaatggaaatttgatgaagttggaatggattttattaccggtcttcctaaaacacccaatcatgtgacttatggtggagccaagctagcagagttatatttgactcatattgtaaggcttcatggcgtaccaaaagtcatagtatccgatcgaggaacacaatttacatccagattttggaaaaatttacatgaacttctcggaaccaaattgttcctcagcaccgcctttcatccacaaacaggaggtcaagtggaaagaacaaaccaaatacttgaagacatgctccgagcttgtgtgcttgaacataacactaactgggagaaatgtctatcttttgctgaattctcctacaacaatagctttcaatcaagtatccaaatgtcaccatttgaagctctttatgggagaaattgtaggactcctctttattggtccgaagtaggagaaagacaattctttggacctgctatcattaatgaagctgaaaagaatgtcactcttattcgggaccgattaaaagaagctcaaactcgtcaaaagagctactctgatcgtcgtcgacgagagctaagttttgatgttggtgaccatgtctatcttaaagtatcacccatgagaggcactcaacgattccaaattcatggcaagcttgctccacgatatattgggccataccaaataatatctaagcgtggacaagtagcctatcaattggaattgccatttcagttgtctaatatacatgatgtattccatgtttctcaacttaagaaatgtcttcgaactccgattgagcacacctcacttgaagacattaatctaaagccaaatctctcctatcaagaatacccaattctgaactcgcatgccacgcgtgtgagcacgcgtcgagcacgggagagggcgagctcctcctgtccatctccgccggcgaccatacttaacccgaccggccgttttgaggaagaagcactgcctcacatcctgtggcttatgctgcaacatctaggttatgatcatccaccggagtatcatttcttttctcatgagcggagttcatctctcgagcatatatggctgagctgtgtatacagggactttggacccatgaaccacccctttactttcaagcttgtggttgggatgcaccctcagcaatgcaggaagctgcattacaagcaattgtgtattaccgacattataggccagggttggacgggttctttcatttctttccagctcgcgcaaaccaatcctccgctaattactatccaggtcttgagggaaacatgagagagattgacactccaggactattcttagctggcctggttcgtgctatggatagatatctcgcaaaaactatggtggtcatgcttgatagacgaatagaaccactcgggcatcaaggacattttgataatgccatcatttatgggaatcatgaactccagcctcttacagagactttgcctcctcccatgggtatttatcataatacagctcatgtacttttgtactttgagtgcaggatgacacatactcactctatggctgctcttactgatgatgccaatggtgagggagcgagtcagcctcgcactggcccatattcttctggacgtgccgggggtagtcgccgtgctgccactgcagaacagcatgatgatgaaccatctcttgctcaactcctggctaatcagaaccgactttttgaaaggatggtagcgaactctgaaaacatgggggctgccatggcacagcaggccaatcaagcaccctccaagctagcagatgttcaacgaacacatccacctcatttctcctctgcggctgatccactcgcagcagatgattggcttcgtgatattgaaatcaagctgaacctttgccggtgtgatcctgtagagaaggctacctttgctgcttactacctgcaaggtgcagcagctgcttggtgggagacatacaagactctcattcctcctgacgagccaatcacttggactgttttccgtgagggattcaggtctgctcacatccctgctggtctcatggaaatcaaaaagaaagaatttcttaacttgaagcaaggaaacatgcccttcatggagttcatggaacgcttcaattatctgggtagatatgccgcttctgacttgaacactgaaacaaagaaggttgagctatgcagagatcgtcttgcacctgaactcaagcatgctcttgctgctcatgaaatcaccagcatgaagacactggttgataaagcccttcgtgttgaatcaagtgaaaaggaagtggttgaagaccgtaagcgtaagtgggctgcaattcctcgcgcagttcaagctgcgggagatgcatctcgtaatgccaatgtcacctgctacaattgcggcaagaaggggcattattctcctagctgtccttatccgaagactggaaaatccggaccgtactcacagggagcaccgcagcagcctcgtggggccggctcaaccatgtcactgcagaagaagcaaccgacgcacctggtgtcgtacttggtacatttcttgtgcactccattcccttaacagttctttttgattccggtgcaactcattcattcatgtcaaccttgaaagcaaaacaacttgacttgaaaacagaatttcttagcgatgctatgcgcatccaatctcctggatccaccatggtcaccaaacttctatgcaaaggtgtagaacttataatagacggggtaaagtttaaagctaacctcatattattagacaccttgggcctaaatgtcattcttgggatggattggttaactaaacatgagggaaccattgattgtgctcatagaactgtaactcttcgtagcaccgatggtcaatttgttaggtttacctttgaacaaacctccacttcaaatcaaccctctatacaatctctctctataccggagttaaaatcagtacccatcgtgaatgaatattccgatgtgtttcctgacgaattaccagggatgcctccagatcgtgacattgaatttgtgatagatttaatccctgggacagcacctatagccaaaaggccatatcgaatgacttctgaaaatttgatggaattaaagaagcaactcaatgagcaattggctaaaggtttcattcgtcctagttcatctccctggggctgtccagtgttgtttgtaccaaagaaagatggaaccatgcgaatgtgcgtggattatcgacctctgaatgaagtcaccatcaaaaataaatatcctcttcctaggatcgatgatttatttgatcagttaaataaatttgtggtggtattcattgatgatatactcatctactccaagagtgaagaggaacatgcgcaacatttacgtatggtactcgataaactccgtgagcatcaactttatgccaaattctcaaaatgtgaattttggttaaaagaagttgaatttcttggtcatgtactttctgaaggtggtattgctgtgaatccaagaaatgtacagaacgtacttaattggaagcaaccacaaaatgttcctgaaattagaagttttcttggactagctggttactaccgtcgtttcattgaaaatttctccaaaattgctaggcccttgactcaacttcttaaaaaagaaaataaattcatatggtctgaggcatgtgaaacaagttttcatgaacttaaaagaaggctcacaacagccccagtgctagtgatgcctgatgttcttaaaccttttaatgtttactgcgatgcc

SEQ ID NO: 14851 - DNA, 5315 bp, Oryza sativa
  Clone ID: TFbOSC422890j.C1.o3.np
aaattgtccatcggtgataggagacaacaatagcagtaaagtgggctatgttgaagaggcttgacaggatgttgatgaagatgacgatgtcggtgatccagtcaatagcggtgtagcaacggagattccgacgtttccggagagtccgttttcgcaggagaagaatttgaagagttccaaggccagcaaggcaactcctggtttggaatggtatattcctggtttggagatagaactgtgcagccgggatggttgttcagaatggttggtcctatacaacaggatgccgcgctacaagcttgagtatttgtttggtgttgagggatttgtccaggatttgcgtacgatgtcctttgccataggatttgggactgcccctttttatgcccagattcctcatgatcgtcacgaagagaagtgccgagtcaaagtcaccttgaacagtaatagtgaagatatcccctcagtgatgttcgaagctggaggaagaaactacatccatgcatgtcaggaggtagcaaggatcgccataggagagttccgcgatcgttacagtgatcagttggccgacactgagtatcgctaccatcctcgtcaaccacagggaagtgaccgtggcagctaccttgagactgaaggaattgagaatgatgctaccacaaggcatttggttgagatgttgtgggctatggatgaaacccgtgcggagactgtgttagcagctcaagatcgggaagatcggaatcgtggtaagatttgcaagctagaagacaaggtggatcgtttagagaaggaactagccgcgttgaagggagaagcaccaccgcagaaggccaggattcgtcttaccgcaaggaagagagctctatttgtccctcgctaccaattggtgccaaagatggtgctcactcgcagcaacgggaatggccctaacaacaataacaacaacaatggagagaatcccccacttgcccaagtcctggctcaacaggcacagcttatgaacatgatgatgcagcaactccagaaccagcagaaccagggaaataaccatgcacctccccagaacaagttagcagaatttcttcgtgtgaggccgcctaccttctctagcaccactaatcctgttgaagcaggtgattggctgcatgccatagagaagaaattggatttgctccagtgcactgatcaggagaaggtctcatttgcatcacatcagctgcatggccctgcctctgaatggtgggatcacttccgccttaacaggactactgctgaacctatcacttggcttgaattcaccgctgctttccggaagacgcatataccatcgggagtggtgtctctcaagaagagggaattcaggtcgctcactcaggggtctcgctctgttacggagtatctgcactagttcaatcgtctggctcgttatgctccggaagatgtacgcactgatgaagagcgtcaggagaagttcttggaaggacttaatgatgagctttcttatccactcatgactggagattatcctgatttccagaagttagtagataaggctattcgccaggaggacaagtacaaccgcatggagcaaaagaaacgccggattgctcaattcaagacacaacaggggaataatcagaggccgcgtcttactttaggaccccagtccatgccacagggaggttcttcgtctgttgttcatccgcagcgtcagttcttcaacaacaatgctggcaacaacatccgcaatcaagctccacgccctgttgcagttttgacacagcaacaacctgccaagaaggagcaaggcagcaagcccgtagtgtgtttcaactgtggagaaccaggacattacgctgacaagtgtccgaagccccgacgcatgaaggttgtccctgcccagagcaactctactgtaccagcatcaaaggcccgtgtcaatcatgttgcggctgcagaagctcaagatgctccagatgtgattttgggtacgtttcttgttaacttagttcctgcaacagtgcttttcgattctggtgctacacattcattcttatctatgagttttgcgggaaatcatgggatggaagtagaagatcttagacgtcctttgatggttagtaccccaagtaatcaagcactctctatgcaacgtagcccctctgtcagaatagaaattcaaggagtaccatttctggccaatcttatcctgttagaatccaaagaccttgatgtcatcctagggatggactggttagccaggcataagggtgtgatagactgtgccaacagaaaagtaactctcaccagcaatgatggtcgagttgtaactgttcatgcattgtcttctgagtctttaaggtcaagactgaaccaaataactttggaagagattcctgtagtccgggagtatcctgatgtgttcctagatgatttacctggtattcctcctaaaagggatatagaattcagaatagatttggtaccaggaacaactccgatccataagagaccttatagaatggcagccaatgagttggcagaagttaagaggcaagtagacgatttgcttcagaaaggatacatcagaccgagttcatctccatggggagctccggttatttttgtggaaaagaaagatcatacccagaggatgtgtgtggactatcgtgcactaaatgatgtgactatcaagaataagtatctgctgcccagaattgatgatttgtttgatcagcttaaaggtgccaccgttttctccaagatagatcttcgatcagggtatcatcaattgagaatcaaagaggaagatatacctaagacagcttttaccactaggtatggattgttcgaatgtactgttatgtcttttggacttaccaatgcccccgctttcttcatgaacttgatgaataaggtgtttatggaatacctagacaagttcgtggtggtctttattgatgacattcttatctactcccgaaccaaagaagagcatgaagaacatcttcgccttgcactagagaagctacgagaacatcaactgtatgctaagtttagtaagtgtgaattttggttgtctgaagtgaagttccttggtcacgttatctcagcaggaggagttgccgtcgatcctagtaatgtggaatccgtaaccaactggaaacaaccaaagacagtttcagagattcgcagtttcctaggcctcgcaggatattatcagaggtttatagagaatttttccaagattgctaagcccatgacacgactgcttcagaaagatgtgaagtacaagtggtcagaagcatgtgagcagagttttcaagaattgaagaatcacttaatatcagctcctattttgattttacctgatccaaagaagggtttccaagtgtattgcgatgcatccaaacttgggttaggttgtgttctgatgcaagatgggaaggtggttgcctatgcatctcgtcagttacgtccgcatgaaaagaactaccctactcatgatcttgagttagctgcagtagttcatgcgttgaagatttggcgtcattatcttttcggcactcgtacagaggtgtataccgatcacaagagtttaaagtatatctttactcagccggatctgaacatgagacaaaggagatggttggaattaattaaggattatgacatgggaattcattaccacccgggaaaggctaatgttgtagcagacgctcttagcaggaaaggctattgcaatgctacggaaggacgacagttgccattggaattatacaaggaatttgaaagattaaatttgggaattgtcagtagaggtttcgttgcagccttagaagcgaagcccactctaattgatcaagttagagaagcccaaattaatgatcctgatattcaagaaatcaaaaagaatatgagaagaggaaaagctatcggtttcttggaggatgagcaaggaactgtatggttgggcgagagaatctgtgtccccgacaacaaagatttaaaagatgcaattctgaaagaagcccatgatactttatactccattcaccctggtagtactaagatgtaccaggatctcaaggaaagattttggtgggcaagtatgaagcgtgaaatcgcagaatacgtagcagtatgtgatgtttgtcagcgagtcaaggcagaacatcagaaactcgccggtttgttgcagcctttgaagattcctgaatggaaatgggaggaaatcggtatggatttcattactggtttacccagaacgtcatcaggccatgactctatttgggtgatagtcgacagacttaccaaagtggctcatttcattccggtaaagacaacatattctggaagtcgattggcggaattgtatatggccaggattgtgtgtttgcatggcgtccctaagaaaatagtgtctgatcgaggcagtcagtttacttcaaatttttggaagaagcttcaggaagagatgggttctaagctgaactttagtactgcttatcatccgcagacagacggacaaactgaaagggtaaatcaaattttggaagacatgttgagagcttgtgctttagatttcagtggaagttgggataagaatctaccttatgcagaattttcatacaacaacagttatcaagctagtgttcagatggctccttacaaagcactatatggtcggaaatgccgcactccgcttttgtgggatcaaacgggagaacgtcaggttttcgggacggatatcctgagggaagcagaagaaaaggtgaaaatcattcaagaaagattacgtgtggcccagtctcgtcataagagttatgccgacaatcgtcgtagggatctaagttttgacgaaggagattatgtgtaccttcgtgtcacgccttttcgaggagttcatcgttttcacaccaaaggaaaattggcaccgcgtttttgtgggaccttataagattatcagtagaagaggagaggttgcttatcagttggaattacctcaatctttggcaggagtccataatgtgttccatgtgtcacaattgaaaaagtgattaagggtacctaccgaagaagctaatcttgaacagatagaagtccaagaggatctgacctatgttgagaaaccaatccgtattttggaaatagatgagagaagaaccagaaatcgagttatccgtttttgcaaagttcaatggagtaatcactcggaagaagaatcaactggggaacgagaagatgaattgaagtcagctcatccgcatctgttcgccggttcttccgaatctcgaggacgagattctgtt

SEQ ID NO: 14852 - DNA, 2160 bp, Oryza sativa
  Clone ID: TFbOSC423199j.C1.o4.gm
gcctccgaaaccacgtgctgctgcgacgtttgcacggacgggcgggctatcaggtttttggggagcgcaacgcgcgactactcattgttcgtcaacatctacttcaccttcaccaatatatcgaacactggagacaacggcaacactggatacaaggagaaggaggctcccgtcaacaccaacggaggcaatactgcctcaaactccagcggaggaccattcttgggtgtactcgctgacaatatagtggacgtgtacatgcacatgccttcagggaaggacatgtgggatgcacttgaggccaagttcggagtttccgacgccggcagcgagctgtatatgctggcaaagaaacttgagaacaacaactgtgagttgccggacaagtttgtggcgggtggcattattgccaaattgccaccttcttggttggactttgctacttctctaaaacacaagaggcaagagttcagtgttactgatctcattggctctttgggtgttgaggagaaggcgagagcaaaggacaaccggggcaaaaatatcgagggaggttctagcaccaatttggtgcaacagaagaaccctcacgcatcccacaacaacaacaacaacaagaaagtcaagcctgatgtcaaaccaaaggctacaaccaattttaagaagaaaggcaagggaaaggccaagggcgactgctttgtgtgcggtaagcctgggcattgggcgaagaattgtcctgatcgcaaggacaagaagtctgccaacatggttattagcgagagcggaggaacatcgggcctcaatgtgattgaggaggttaaggactttttgtccaaaagctttgaaatgaaggatttgggagtggctgatgttgttcttaacattaagctactgagaggagatgagggtgggattacacttgtgcaatctcactatgtggacaaggttttgagtcgctttggttatagtgactgcaagccagctccaactccttatgactccagtgtgctattaaggaaaaaccgaagaatagcaagggatcaattgagatactcccaaatcattggttcattgatgtacttggctagtgcaacgaggcctgacatctcatttgctgtgagcaagctgagccggtttgtttcaaatccgggagatgatcattggcaagctctggaaagggtcatgcgctatctaaagggtacaatgagctatgaaattcactatactggttacccaaaagtactggaagggtatagtgactcaaactggatatctgatgctgatgagataaaggccacaagtagatatgtgttcacacttggaggtggcgctgtttcctggaagtcttgcaagcagaccatcttaacgaggtcaacaatggaagcagaactcacagcactagatactgccacagttgaggccgagtggcttcgtgaactcctgatggatttgccggtggttgaaaaaccagtgccagctatcctaatgaactgtgataatcaaatagtgattattaaggcctccgaaactacgcgctgctgcgacgtttgcacggacgggcgggctatcaggtttttggggagcgcaacgcgcgactactcactgttcgtcaacatctacttcatcttcaccaatatgtcgaacactggagacaacggcaacactggatacaaggagaaggaggctcccgtcaacaccaacggaggcaatactgcctcaaactccagcggaggaccattcttgggtcacgcgcatcgcctcctcacccctgccagcgaggcgcccaccaccaacccacatacccacccccgcgaggggggaaaggaaggagaaagcctcccgcccccctcgccgccggcgaacgcgacggcgggcgcgtcaccacatgccgatatcctccggcatactcgcgccgacgcggggggcctcctcgtcgtcgtccgcggtggggaggaagctcctcctcctcggggctcgtcatcctccctcgtccgtggcggtggcgggtcgtggcgtctggcgaagggggcttgccggggtcggggtggcggcggcggcggcgtcgtcgtcttcgcccgacgagcttcacgcgcgcgggaggcccctccgcggcggcgcctacgaggagccttttgcaaatactcgattgagcagcagtag

SEQ ID NO: 14853 - DNA, 1350 bp, Oryza sativa
  Clone ID: TFbOSC18589j.C1.o1.fg
atggataacactggtaacaaaggctatgggaatgatggatccgatgactcaagaacccaagccagtgggaatgagaaaagcatcaacaaaacctcaccagagctaatccaaattgtggttaaccaaaccaacatgttggcaacagcctttcaactattacagtattggaacaacccagcaggggcaaccaacgttcaagtacctacagtccagcaacagtgcaagttatcagaatttctcaaaactgagcctccaacctttgccattgccgtcgatcctatggaagccagtgattggttgcgcacagtcgagaagaagctagggttgattcagtgcaccgaccaggagcgggttggcttcacaactcatcagttggttggaccggcttcagagtggtgggatagctacgaagcatcacggccagaaggacataccatcacctggaacgagttttcatctgtattcaagagatcacatgttcccgcaagaatgatcacactaagaaaacgagagtttcgctacctgaagcaaggagatttgaccgtcacagagtacctgcacgagttctatcgtttggctcactatgcaccagaagatgtggaaacggatgaagacaaacaagagaagtttctccaggggttaaaagatgagcttgcagtgcaactactcctagaggattatgaagattttgagaaacttgtggacaaagccatgcaactcgaaagtgagcataatcggatgacgaactgcaagagaaggattgtcaacatcccagtatttccatgtggtaaccaaagacagcgcactgagccacttcagatcaccggatcttctgttgcgcatcaagagttactaccccaagaagatggacacaacgcagacaacaacattagcaatactaatgctgatgataccaccaacaaccatggttcttgccccattcatgaccacttagatcaagcgtgcaatgtcaacagcattcaccaagatatcgacgatagtatcaatgaaggcacccagaatgacaaccctagcaattttgactctgagaaagactccaatggtgatagcaactatggtaccactgatgccaatgttagcaaggatttccaaccaccaattccaactccaagtcagaatgatcgttcccagacggacaactcagtaaagaagacattgatttgttacaactgcaaagaaccaggtcatttctccaaagattgtccacagccgaagcgtaacctgcgtcatcactccggccattatgcaagaagaagacaagtcactcgccttgtggtcactggagcaaacgccatacctgtgaggcctcgagttaatcataacccatag

SEQ ID NO: 14854 - DNA, 441 bp, Oryza sativa
  Clone ID: TFbOSC22584j.C1.o1.fg
atggctgccagcacgtcagtccacgcaactccccgcaatcagaagcttgctcctcagcgaattgtcatccatgcatcccgaagcagtcctatagcacgcgttgcaacagctccaactccaacgagtgcactaccacaaggtgtcaatgcaccatttcagtcccatccacctgctgacgagacagaggccagtatctgcgttgtacctttggatgttccaatacagcagctgataaatcaagtacaagatgaagaacccgagtgtaagaaagttattgtttgttacaactgtagtgaagaagggcattactcgagggactgtcctcaaccaaggcaaaatcggcccccacattttcgccaatttacaggaagcaaacatgccaatcgccaagtggtcactggagcaaatgcagtacctgttaagcctagtgctagtcaatag

SEQ ID NO: 14855 - DNA, 4105 bp, Oryza sativa
  Clone ID: TFbOSC401836j.C1.o9.np
cttgcacttcgagttcctcctccttttttcctgagctgcctacgcgcacaggtgtacaggatgagcaggtgcctccggaactccatccgcttgagaacttgcacgggtaggcgggcgatcaagtttttgggtatcgcttcaaacgcgactgctcttgttcttcgcggctactgctgctgcatcggtgccttcaccaagatgtcaacggagattggagacaagaagatgaacgacatcaacggaggcaatactgcctcaaaatccagcggtgggacgttctcggggtctttttcgatagttgactttgctgcatcactcaaaccagatgctttcgatggttcaaattataaaagatggaaagcacatacacttttgtggttgacggcgatgcattgcttctttgtctcactgggcaaaccgagtgaagcgcctctctctcctgaggaggaggctaagttcgaggcttcggattgcctgttccgtggagcattgtttagtgtactcgctgacaaaatagtggacgtgtacatgcacatgccttcagggaaggacatgtgggattctcttgaggccaagttcggggtttccgacgccaacagcgagcggtatgtcatggagcagttctatgactacaacatggtcgatgaccgttctgtagtggaacaggctcatgaaattcagatgctggcaaaggaacttgggaacaacaactacgagttgccggacaagttttactgatcttattggctctttgggtgttgaggagaaggcgaaggcaaaggacaactgaggcaaaaggatcgagggaggttttagcaccaatttggtgcagaagaagaaccctcacgcatcccacaacaacaacaagaaagtcaaacctgacgtcaaatccaaggctacaaccaattttaagaagaaaggcaagggaaaggcaaaagaagattgctttgtgtgtggcaagcctgggcattgggccaaggattgtcctgagcgcaaggacaagaagtttgcaaacatggttattagtgagggcggaggaacattggggtaaggtaaatttttacctacagttctctctgtctgtcactcacctgattggtgggttgatactggtgctaatattcatgtgtatgcggacatttccctgttttcttcttattaagtcgggagaggttcctccttgttgatgggaaatggatcgcttgcggctgttcatggtgttggtacagtcgatctgaagtttatttcgggaaagatcgtgcagctgaagaacgtgtagcatgtcccttcaataaagaagaatctagttagcggctctctactgtgtacagatggttttagacttgtgtttgaatccaataaatgtgtcatatctaaatatggaacgtttattggaaaaggttatgacagcggaggtttgtttcgcttttccttggatgatatgtgtaataaagttgtgaaccatgtaagcgatgatgatgatgagtccaatgtgtggcattcgcaactttgtcatgtgaattttggttgtatgacatgcttagccaacatgagtttaattccaaaattcactttagtcaaaggctctaagtgacatacttgagttcaatcgaaacaacctcgcaagcctcacaaggcatctgaggcgagaaatttggcaccactagaacttgttcattccgatctgtgagaaatgaatggcgtgttgactaaagggggaaagaaatatttcatgacactgatagaagattgcactagattctgctatgtgtacctattgaaaataaaggatgaagctttacattactttaagatctataaggctgaggtagaaaaccaactggaaaggaaaatcaaacggttaaggtctgataggggtggagagtatttttccaatgagtttacttctttctgcgaagagtatggaattatttatgagaggacgcctccctattcaccccagtcaaatggggtagccgaaagaaagaaccgtactctaactgagatggtgaatgccatgttagacactgcaggactttccaaggaatggtggggtgaggcaatattgactgcgtgccatgtcctgaatataattcctactaagcataaggaagtaacaccatttgaggaatgggaaaggaaaaaattaaatctctctgacctgcgcacatggggctgtttgtccaaggtaaatgtacctatagccaaaaagcgtaaacttggaccaaagaccatagattgtgtgttccttggttatgctatccacagtgtgggatataggttcttaatagtaaattctggagtacccgacatgcgtgttggtacaattactgagtctagagatgccacattttttgagaatgaatttcctatgaaaaatgcacctagcacttctagtcaagaacctattttatcccctgagcactttatgccgatagaacacattgatcaaacgcttgaggaaaatcctgaggacgatagcattgtagcaactcgaaagagtaagagacaaaggactgcaaagtcttttggagatgactacattgtatatcttgtgaatgatactccaagaactactgaagaggcatatccatctcctaacgctagctattggaaggaagcggtacacagtgagatggactcaattatgtctaatggtacttgggaagtcgtcgagcatccatatgggtgcaagcctgtaggatgcaaatgggttttccaaaaaaagcttaggcctgatggtacaattgaaaagtacaaggcaaggcttgtggccaagggttatacccaaaaagaaggtgaggattttttcgacacttattcaccggttgctcgcttgaccacgattcgagtactactcgcgctggcagcctctgatggtctactcgtccatcagatggatgttaagacagctttcctcaatggagagttggaggaggagatctatatggatcaaccagatgggtatgtactagaaggtcaggagggaatggtgtgaaagctgttgaagtccttgtatgttctcaaacaagcgcctaagcaatgacatgagaagtttgacaatacacttacatctgctggctttgttgtgaacaaagctgacaaatgtgtgtactatcgctatggtgggggagagggagtaatcttgtgtttatatgtcgatgacatattgatctttgggaccagccacaatgtgattgaggaggtcaaggactttctgtccaaaagctttgaaatgaaggatttgggagtggctgatgttattcttaacattaaactactgagaggagatgagggtgggattacacttgtgcaatctcactatgtggacaaggtcttgagtcgctttggttatagtgactgcaaggcagctcctactccttatgatcctagtgtgctattaagcaaaaacggaagaatagcaagggatcaattgagatactcccagattattggttcattgatgtacttagctagtgcaacgaggcctgacatcttatttgctgtgagcaagttgagccggtttgtttcaaatccgggagacaatcattggcatgctcttgaaagagtaatgcgctatctaaaagggacaatgagctatggaattagctccactgggtacccaaaagtactggagggctatagtgattcaaactggatatctgatgctgatgagatcaaggccacaagtgggtatgtgttcacacttggagggggcgttgtttcctggaagtcttgcatgcagaccatcttaacgaggtcaacaatggaagcagaactcacagctttagatactgccacagttgaggccgaatggcttcgtgagctcttgatggacttgccggtggttgaaaaaccggtaccagcaatcctgatgaactgtgataatcaaacaatgattattaaagtgaacagttcgaaggacaacatgaagtcttccaggcatgttaaaagaagactgaagtctgtcagaaagcagaaaaactccggagtgatagcattggactatgtctagacggctaaaaatctggcagatcagtttaccaaggggctaccacgtaatgtgatagactgtgcatcgagggagatgggcttgagacccact

SEQ ID NO: 14856 - DNA, 345 bp, Oryza sativa
  Clone ID: TFbOSC101188j.C1.o2.gm
atgcctcctccccctgatgagtgcccacccggccaccccatgtatgagagcacaatcatcatggctcatggcaaagtcggcaacagcagaagcaccaacaataataacaagcaaaggcatcaatcagctggaggccacatccacagggacagggaggggcgggccggcacgcacagtggatgccccgagcactacgttgttgtacacgccgtgctggagccatatgcccctgtaggctgggggccggcgcagaggagggtgggcggcagtggcagctcgaacaggcaggcccagcgtcctcggctgcttgtcatgttttgctgggtgccacgaaagtactcctaa

SEQ ID NO: 14857 - DNA, 1527 bp, Oryza sativa
  Clone ID: TFbOSC400446j.C1.o28.fg
atggctgacaatgagaaaggcaataaggtcagaagtcaggacattggtacctcaagctcccgagtgaatgaagcaccagacaccagttgtgtgacactggtccaacacctgattaaccagaaccgattgcctatagagatactacagcagcatcagacgccaattctgaacctgagtcagatacaacctcaagtgcagttggaggcagtccaagcactcacaccacaagtcagcatgccgccagcatcccgaaggacccatggtgacgtgccacatgttgactcaaaagaagcaagtatcatttgttttatgtgtgatgagcaagggcactatgcaagggagtgtcctcagcagaaaagaaaaacaccaatgcgaaccgaagatgaagtccgaatgacaaaacgtcagagaagaaataccttccgaggtgcaccacagttgacagagcatcttttagctaatggaggtagagtgtctgatagtgaagattcagatcaagtctcatcagatgatgaagatgaaatggaacgtaaggcatgctcttgttgtggagaaatcggtcatgttgccagctcgtgtgccactacatgcgttcattgtgaggaagaccatccacccgacaggtgtccaacgagcaggatcacttgtttcttttgtgaaggaactgatcatgtactaaaagattgtcaattcagttttctgctgacgaagaagatggccaaccaacccgccagttccaacggagagaagcatcaaggcaacacaaatcctcgccaagattacagtttcagcctaactccagtgccaggacagaggaatcaaaatgagaaaagaaaatgccgagtccgggaagatatctgttgcttcaattgtcaaggaatgggtcattttgccgacaagtgcccaagaccgagaaacatagctgccagcacgtcagtccacgcaactccctgcaatcagaagcttgctcctcagcgaattgtcatccatgcatcccgaagcagtcatatagcccgcgttgcaacagctccaattccagcgaatgcattaccacaaggtgtcaatgctcaatttcggccccagccaccagttgacaagacagaggccagtatcggcattgtacctttggatgttccagcacagcagccaagaaatcaagtacaagatgaagaacccgagccaccaaccattctctgcacctacggcctcagcaaagaattgtcgtcgatggaagaagttgtttctctccccgacctactccaggccgagcaaagggcaatcaacctccggagggcgataccaagcagaagaccgtcatccgcttcaaacagcaatcagaaggaagcttctcctgtgaatgatagcaatatgcagtcctatcacatcatcacagaaccaatcaaggatgatgcagtcactagaacaacgccagctatatctctccagaatcaaaatgagcagccacgcttgtggttttcagttcgctacttatcattgcgtaatcgaaagtttgcagcaatcatgtaa

SEQ ID NO: 14858 - DNA, 1668 bp, Oryza sativa
  Clone ID: TFbOSC400943j.C1.o6.fg
atggctgacaatgagaaaggcaataaggtcagaagacaggacattggtacctcaagctcccgagtgaatgaagcaccagacaccagttgtgtgacactggtccaacacctgattaaccagaaccgattgcttatagagatactacagcagcatcagacgccaattctgaacctgagtcaaatacaacctcaagtgcagttggaggcagtccaagcactcacaccacaagtcagcatgccgccagcatcccgaaggacccatggtgacgtgccacatgttgactcaaaagaagcaagtatcatttgttttatgtgtgatgagcaagggcactatgcaagggagtgtcctcagcagaaaagaaaaacaccaatgcgaaccgaagatgaagtccgtaagatgatcattaccagcaccgaatggcctccaccaggaatgacaaaacgtcagagaagaaataccttccgaggggcaccacagttgacagagcatcttttagctaatggaggtagagtgtctgatagtgaagattcagatcaagtctcctcagatgatgaagaggagaagtctccccaaggtttcaaccagaataaaatggaacataaggcatgttcccgttgtggagaaatcggtcatgttgccagctcgtgtgccactacatgcgttcattgtgaggaagaccatccacccgacaggtgtccaacgagcaggatcacttgtttcttttgtgaaggaactgatcatgtaccaaaagattgtcaattcagttttctgctaacgaagaacatggccaaccaacccgccagttccaacggagagaagcatcaaggcaacacaaatcctcgccaagattacagtttcagcctaactccagtgccaggacagaggaatcaaaatgagaaaagaaaatgccgagtccgggaagatatctgttgcttcaattgtcaaggaatgggtcatttcgtcgacaagtgcccaaaaccgagaaacatagctgccagcacgtcagtccacgcaaccccctgcaatcagaagcttgttcctcagcgaattgtcatccatgcatcccgaagcagtcctatagcccgcgttgcaacagctccaactccagcgagtgcattaccacaaggtgtcaatgctcaatttcagccccagccatcaattgacaagacagaggccagtatcggcattgtacctttggatgttccagcacagcagccaagaaatcaagtaccagatgaagaacccgagcataagaaagttattgtctgttacaactgtgagaaacatgagataatgaatgagtttgataagtttattgagggatccatgttaagattgcaagtgctcctcagcaaagacttgtcgtcgatggaagaagttgtgtctctccccgacctactccaggccgagccaagggcaatcaacctccggagggcgataccaagcagaagaccgttattcgcctcaaacagcactcagaaggaagcttctccggtgaataatagcaatatgcagtcctatcacatcatcacagaaccaatcaaggatgatgcagtcactagaacaatgcccgctatatctctccagagtcaaaatgagcagccacgcttgtggttttcagttcgctacctatcattgtgcagtcgaaagtttgcagcaatcatgtaa

SEQ ID NO: 14859 - DNA, 2535 bp, Oryza sativa
  Clone ID: TFbOSC400925j.C1.o17.gm
atgtcgtgcggtggaagttgtaactgcggttcctgcggatgcggcggtggctgcggaaagatgtaccctgacctggctgagaagatcaccaccaccaccactactgcaaccactgtcctcggcgttgcacctgagaaggggcactttgaggtgatggttggcaaggcagctgaatctggtgaggctgcccatggctgcagctgtggctccagctgcaagacgtcggaggagttcacgccggcggacggcgacctccggagttggacaagagtaggttcacgcaggcgctgcatccgcgacgccgtcaagcccaccaccgtggccagatgggtggtgtgggagatatggaaggagcagaatcagcggatttttgagcacaaggagtccacaacgacgtatctgcttaccaaaatcatagaggaggccaagctctggatgctggccggcgctagaaggttgcgtgagctcctgccacatcttgtacaaaagatgtaccctgacctggcagagaagaacaccaccaccacctcagtgaccatggtcctcggtgttgcacctgaaaaggggcacagcgaaccgggtttcgagttggctgccggctccggtgaggccggccatggctgcagctgcggctccagctgcaatgtggacatgttccccttttcaggaagatggcagaaaagtggttgtggcttggtggatagagaggtccgtagactcatcgccagtcgtcactccggcgacggtgaccaccatctaatcgccggtgggcactccgacgccggcgaccacctcccaacatcctctctcatgtcgcagctaggaaggacgtcctggcgtgatatcgtcctgtcgcgtcccgcagttaatgcggtggatcaacggggcgaagaagaccaggcattcaagaaggcaagaacagtcccccgctggctccaaggatgctgctttaactgcctggggctaggacaccagaaatccgcctgcccaggaagcacgcgatgctacaactgctggtactcagggcacatcgctaggaattgccctacctcccgtgcggctagggcgcagccggccactggttcaaaagaagtggcaacgaagccagcgggaggtgaaaaaccgcggaaagaagtgctagaagctttgcctcccagaaagaaggggcgagaagagggagtggctgctggtgatggcatggctagctttcagatctgcgctcagcagccctctcgggtcatgaaggagtggcggaccggggacgccaacatccggccggagtcggggcggtgcaccatctcctggacgccgcgcatggtggagacggaggccatcttcgagcagaaggtgctcctggccacagtgcttggcaaccagccagcgctctcacctagagatctggttgcggtgatcgtcgactgtggcatcctccccgcgcacttccgggtggaggtaacgacccctgaggactacctaattgtgtttcgttctgccagagaaaaggattgggtcctcggcaaatccaaacaagtcttcttccaaggggcgccaatcgccttcaagagctggaacaggcgcctgctggccagcagcacgaggttccaattcttcaccaagctgtcattagaagggcttccccagcacgcctgggatgaggaggcgatggcccagctgatccgtgagctgggtggagagttggtggagcttgttccgccggcggacgcgagggttctcaccatgttcgcctggctcaagaacccgtctgcggtgccaacaacgctggaggtggagatcccagagcgcgcggggggcggcccgccgtgctgggaacgtatggcgggatcaatcaggattccaagggcgcctctgcacaagtgcacgctgacgtacaatatcattgtgcacattgaggagatcattgacccgacgcccctccatgttcccctctccacggcctccaacgacgaagatgatgatgacgtcccgcgccaggttacgttctcctgctgggctggccgaatcgacggcacagggccgtggacgtcgaaacaaggcggaggtcggccttttggcggagcatctggctttgctggtgggctaccggggcgcacctggtcgacatcttcagttcagcgggtgtccgagatgatccctaccaaccccggcgcgctgagggataccgcccgcgacgacgagcacactgaacacgccggctcgggcctgcatgcttcggacagggatacgatagaggaacactcaagtggcgagcctgggaataggatggcggggaggggagatgatgctgcgtgtaatgtcgtgccgcgtgtgcttgccacgagcacggcgctggtggcggggagagacgttctggcgacggggaaagatgtgctggcgacggagaatggcgttctggcgacggggaaggatgtgctggcaacagggggcgagctctgcccgcgccagtcgccgctgtcgccgctccgctccaaaccgcccgccgtcgtcatcgccggcccccgccactccgcgcgctag

SEQ ID NO: 14860 - DNA, 5151 bp, Oryza sativa
  Clone ID: TFbOSC900409j.C1.o9.fg
atgtctttcgtgattagtttcacacttctcaccatagttaatgatgctataactggtaataatttgattagctcctggtttggaatgatgccgcgctacaagcctgagtacttgtttggtgttgagggttttgtccaggagttgcgtacaatgtcctttgtcattggatttgggactgcccctttttatgcccagattcctcatgatcgtcatgaagagaagtgccgagtcaaagtcaccttgaacagtaatagtgaagatatcccctcagtgatgttcaaagctggaggaagaaactacatccatgcatgtcaggaagtggcaaggatcgccataggagagcttcgcgatcgctacagtgatcaattggccgacactgagtatcgctaccatcctcgtcaaccacagggaagtgaccgtggcagttaccttgagactgaaggaattgagaatgatgctaccacaaggcatttggtggagatgctgtgggctatggatgaaagtcgtgcggagattgtgttagcagctcaagatcgtgaagaccggaatcgtggtaagatttgcaagctagaagacaaagtggatcgtttggagaaggaactagctgtattgaagggagaagcaccaccgcagaaggccaggattcgtctcaccgcaaggaagagagctctatttgtccctcgctatcaattggcgccaaagtttcccccggtttctcttcttgtgccctgtccatgccagatggtgaacactcgcagcaacgggaatggccccagtaacaataacaacggagagaatcccactcttgctcaagttcttgctcaacagacacagctaatgaacatgatgatgcagcaactccagaaccagcaaaaccaaggaaataaccatgcacctccccagaacaagttagcagaatttcttcgtgtgaggccgcctgttttctctagcaccactaatcctgttgaagctggtgattggctgcatgccatagagaagaagttggatttgcttcagtgcactgatcaggagaaggtctcatttgcatcacatcagttgcatggccctgcctctgaatggtgggatcacttccgtctgaacaggactactgctgaacctatcacttggcttgaattcaccgctgctttccggaagacgcatataccatcgggagtggtgtctctcaagaagaaggaattcaggtcgctcactcagggatctcgctctgttacggagtatttgcacgagttcaatcgtcttgctcgttatgctccggaagatgtgcgcaatgatgaagagcgccaggagaagttcttggaaggacttaatgatgagctttcttacccactcatgactggggattatcatgatttccagaagttagtggataaagctattcgccaggaggaaaagtacaatcgtatggagcaaaagaaacgccggattgctcaattcaagacacaacaggggaataatcagaagccgcgtcttactttaggaccccagtctatgccacagggaggttcttcgtctgttgttcgtccgcagcgtcagttcttcaacaacaatgctggcaacaacatccgtaatcaagctccacatcctgttgcagctccagcacagcaacaacctgccaagagggagcaaggcagcaagcccgtggtgtgtttcaactgtggagacccaggacattatgctaacaagtgtccgaagccccgacgcgtgaaagttgtccctgtccagagcaactctactgtaccagcatcaaaggcccgtgttaatcatgttgctgctgcagaagctcaagatgctccagatgtgattttgggtacgttccttgttaacttagttcctgcaacagtgcttttcgattctggtgctacacattcattcttatctatgagttttgcgggaaatcatgggatggaagtagaagatcttagacgtcctttgatggttagtaccccaagtaatcaagcactctctttgcaacgtagcccctctgtcagaatagaaattcaaggagtaccattcctggccaatcttatcttgttagaatccaaagaccttgatgtcatcctagggatggactggttagccagacataaaggtgtgatagactgtgctaacagaaaagtaactctcaccagcaatgatggtcgagttgtaactgttcatgcattgtcttctgagtctttaaggtcaagactgaaccagataactttggaagagatttctatagtccgggagtatcccgatgtgttcccatatgatttacctggtatgccgcccaaaagggatatagagttcagaatagatttggtacctggaacaactccgatccataagagaccttatagaatggcagccaatgagttggcagaagtcaagaggcaagtagatgatttgcttcagaaaggatacatcagaccgagttcatcaccatggggagctccggttatttttgtggaaaagaaagaccatacccagagaatgtgtgtggactatcgtgcactaaatgatgtgactatcaagaataagtatccactacccagaattgatgatttgtttgatcagcttaaaggtgctactgttttctccaagatagatcttcgatcagggtatcaccagttaagaatcaaagaggaagatatacctaagacagcttttaccactaggtatgggttgttcgaatgtactgttatgtcttttggacttaccaatgcccccgctttcttcatgaacttgatgaataaggtgtttatggaatacctagacaagtttgtggcggtctttattgatgacattcttatctactctcgaaccaaagaagagcatgaagaacatcttcgccttgcactagagaagttacgagaacatcaactgtatgctaagtttagcaagtgtgaattttggttgtctgaagtgaagttccttggtcacgtcatctcagccggaggagttgccgttgatcctagtaatgtggaatccgtaaccaactggaaacaaccgaagacagtttcagagatccgcagtttcctaggcctcgcaggatattatcggaggtttatagagaatttttccaagattgctaagcccatgacacgactgcttcagaaagatgtgaagtacaagtggtcggaagaatgtgagcagagttttcaagagttgaaaagtcgcttgatatcagctcctattttgattttacctgatccaaagaagggtttccaagtgtattgcgatgcatccaaacttgggttaggttgtcttctaatgcaagatggaaaggtggttgcctatgcatctcgtcagttacgtccgcatgagaagaactaccctactcatgatcttgagttagctgtagtagttcatgcgttgaaaatttggcgtcattatcttttcggtactcgtacagaggtatataccgatcacaagagtttaaagtatatctttactcagccggatctgaacatgagacaacggagatggttggaactaattaaggattatgacataggaattcattatcacccgggaaaggctaatgttgtagcagacgctcttagtagaaaaggctattgcaatgctacggaaggacgacagctgccattggaattatgcaaggaatttgaaagattaaatttgggaattgtcagtagaggtttcgttgcagccttagaagcgaagcccactctaattgatcaagttagagaagcccaaattaatgatcctgatattcaagagatcaagaaaaatatgagaagaggaaaagctatcggtttcttggaggatgagcacggaactgtatggttgggtgagagaatctgtgtccccgacaacaaagatttaaaagatgcaattctgaaagaagctcatgatactttatactccattcaccctggtagtactaagatgtaccaggatctcaaggaaagattttggtgggcaagtatgaagcgtgaaatcgcagaatacgtagcagtatgtgatgtttgtcagcgagtcaaggcagaacatcagaaacccgccggtttgttgcagcctttgaagattcctgaatggaagtgggaagaaatcggtatggattttatcactggtttacccagaacgtcatcaggtcatgactctatttgggtgatagtcgacagacttaccaaagtagctcatttcattccggtaaagacaacctattccggaagtcgcttagcggaattgtacatggcaaggattgtgtgtttgcatggcgtccctaagaaaatagtgtctgatcgaggcagtcagtttacctcaaatttttggaagaaacttcaggaagagatgggttctaagctgaactttagtactgcttatcatccgcagacagacggacaaaccgaaagggtgaatcagattttagaagacatgttgagagcttgtgctttagatttcgatggaagttgggataagaatctaccttatgcagaattttcgtacaacaacagttatcaagctagtcttcagatggctccttacgaagcactgtatggtcggaagtgtcgcactccgcttttgtgggatcaaacgggagaacgtcaggttttcgggacggatatcctaagggaagcagaagaaaaggtaaagatcattcaagaaagattgcgagtggctcaatctcgtcataagagttatgccgacaatcgccgcagagatctaagttttgaaggagattatgtgtatcttcgtgtcacgcctcttagaggagttcatcgtttccacaccaaaggaaaattggcaccgcgttttgtgggaccttataagattgtcagtaaaagaggagaggttgcttatcagttggagttacctcaatctttggcaggagtccataatgtgttccatgtgtcgcaattgaaaaagtgtttaagggtacctaccgaagaagctaatctcgaacagatagaagtccaagaggatctgacctatgttgagaaaccaatccgtattttggaaacagatgagagaagaaccaggaatcgagttatccgcttttgcaaagtccaatggagtaatcactcggaagaagaatcaacttgggaacgagaagatgaattgaagtcagctcatccgcatctgttcgccagttcttccgaatctcgaggacgagattctgtttaa

SEQ ID NO: 14861 - DNA, 118 bp, Oryza sativa
  Clone ID: TFbOSC405121j.C1.o1.hg
ctacggtggtggtggcggcggctaccccaccggtggtggtgacgaagacgacggcgggtgctacaactgcggcgagaccggccacatcgctcgcgagtgccccagcaagacctactag

SEQ ID NO: 14862 - DNA, 1696 bp, Oryza sativa
  Clone ID: TFbOSC15730j.C1.o2.np
atggatgaagtcgttgcgacgatggatatctctgaggcaaatgaaggctacgcgagctgtggctcggtaatcgagatgtctaggcaaatgaaggctacacgggtcggtgcccgggctcaatcctggcctgcctgtcccgggataccggccgtaggcagggttggatcggtacttttgttcacggctaggatgggtaaagggttatgtcacgttttttatgatgggttccaattgcaatggaatgcagagtaaaggcgtgtcttgtgggttggcctgggttggcttgggacgagctgggacccaggtcgggttgccagttcggtccgaatcatcgtaggccttgggttaaggcagtactaggtggtcagctttgcgaagaagaagatgtcgtcaattgtctgccgaagctccgcaagactgttggatctgctagcgaagcgagggaagcagtgaagccagatgtgaagcaggagaaaaagtgtagctctgttaaggtcctatccttagtttctgatctgtctctcccctttgtttttcctctctccctctccaaaacctgcaacagatggcggataatgagaaaggcaataaggtcagaagtcaggaaatgggtacctcaagctcccgagtgaatgaagcaccagacaccaattgtgtggcagtggtccaacacttgattaaccagaacaaattgcttatagagatactacagcagcatcggatgccaattctgaacccgagtcagatgcaacctcaggcgcagttggaggcaatccaagcactcacaccacaagtcagcgcaccgccaacatcccagaaggcccctcatgccatgtcacatgttgactcaaaagaagcaagtatcattggttttatgtgtgatgaacaagggcactatgcaaggaactgtcctcagcagaaaagaaaagcaccaatgcgaaccgaagatgaagtccgtaagatgatcattaccagtacagaatggcctccaccaggaatgacaaaacgtcagagaagaaattccttccgaggtgcaccatagttgacagagcatcttttagctaatggaggtagagtgtctgatagtgaagattcagatcaagtctcctcagatgatgaagatgagaagtctccccaagggttcaaccagaataaaatggaacataaggcatgctctcattgtggagaaatcggtcatgttgccagctcatgtgccactacctgctttcattgtaaggaagaccatccacccggcgagtgccccatgagcaggatcacttgtttcttgtgtgaaggaactgatcatgtaccaaaagattgtcaactcagttttctgctgacgaagaagatggccaaccaacatgcccgttctaatggagagaagcatcaaggcaacaccaatcctcgccaagattacagtttcagcctaactccagtgccaggacagaggaatcaaaatgagaaaagaaaatactgagtccggaaagatatctgttgcttcaattgtcaagaaatgtgtcatttcactgacaagtgcccaaaaccgagaaacatagctaccagcacgtcagtccacgcaactccccacaatcagaagcttgctcctcagcgaattgtcatccatgcatcccgaagcattcctatagcccgcgttgcaacagctccaactccagtgatgtggacccccatttttata

SEQ ID NO: 14863 - DNA, 1393 bp, Oryza sativa
  Clone ID: TFbOSC402673j.C1.o7.np
atggctgacaatgagaaaggcaataaggtcagaagtcaggacattggtacctcaagctcccgagtgaatgaagcaccagacaccagttgtgtgacactggtccaacacctgattaaccagaaccgattgcttatagagatactacagcagcatcagacgccaattctgaacctgagtcaaatacaacctcaagtgcagttggaggcagtccaagcactcacaccacaagtcagcatgccgccagcatcccgaaggacccatggtgacgtgccacatgttgacccaaaagaagcaagtaacatttgctttatgtgtgatgagcaagggcactatgcaagggagcgtcctcagcagaaaagaaaaacaccaatgcgaaccgaagatgaagtccgaatgaccagacgtcagagaagaaataccttccgaggtgcaccacagttgacagagcatcttttagctaatggaggtagagtgtctgatagtgaagattcagatcaagtctcctcagatgatgaagatgaaatggaatgtaaggcatgctctcgttgtggagaaatcagtcatgtcgccagctcgtgtgccactatatgcgttcattgcgaggaagaccatccacccgacaggtgtccaacgagcaggatcacttgtttcttttgtgaaggaactgatcatgtaccaaaagattgtcaattcagttttctgctgacgaagaagatggctaaccaacccgccagttccaacggagagaagcatcaaggcaacaccaatcctcgccaagattacagtttcagcctaactccagtgccaggacagaggaatcaaaatgagaaaagaaaatgccgagtccgggaagatatctgttgcttcaattgtcaaggaatgggtcatttcgccgacaagtgcccaaaaccgagaaacatagctgccagcacgtcagtccacgcagctccctgcaatcagaagcttgctcctcagcgaattgtcatccatgcatcccaaagcagtcctatggcccgcgttgcaacagctccaactccagcgagtgcattaccacaaggtgtcaatgctcactttcagccccagcaaagaattgtcgtcgatggaagaagttgtgtctctccccgacctactccaggccaagcaaagggcaatcgacctccggagggcgataccaagcagaagaccgtcatccgcttcaaccagcaatcagaaggaagcttctcctgtgaatgatagcattatgcagtcctatcacatcaccacagaaccaatcaaggatgcagtcactagaacaatgccagctatatctctccagaatcaaaatgagcagccatgtttgtggtttccagttcgctacttatcatggtgtaatcgaaagtttgcagcaatcatg

SEQ ID NO: 14864 - DNA, 1593 bp, Oryza sativa
  Clone ID: TFbOSC18392j.C1.o5.fg
atggctgacaatgagaaaggcaataaggtcagaagtcaggacgttggtacctcaagctcccgagtgaacgaagcaccagacaccagttgtgtgacactggtccaacacctgattaaccagaaccgattgcttatagagatactgcagcagcatcagacgccaattctgaacctgagtcagatacaacctcaagtgcagttggaggcagtccaagcacccacaccacaagtcagcatgccgccagcatcccgaaggacccatggtgacgtgccacatgttgactcaaaagaagcaagtatcatttgttttatgtgtgatgagcaagggcactatgcaagggagtgtcctcagcagaaaagagaaacaccaatgcgaaccgaagatgaagtccgtaagatgatcattaccagcacagaatggcctccaccaggaatgacaaaacgtcagagaagaaataccttccgaggtgcaccacagttgacagagcatcttttagctaatggaggtagagtgtctgatagtgaagattcagatcaagtctcctcagatgatgaagacgagaagtctccccaaggtttcaaccaggataaaatggaacgtaaggcatgctctcgttgtggagaaatcggtcatgttgccagctcgtgtgccactacatgcattcattgtgaggaagaccatccacccgacaggtgtccaacgagcaggatcacttgtttcttttgtgaaggaactgatcatgtaccaaaagattgtcaattcagttttctgttgacgaagaagatggccaaccaacccgccagttccaacggagagaagcatcaaggccacacaaatcctcgccaagattacagtttcagcctaactccagtgccaggacagaggaatcaaaatgagaaaagaaaatgccgagtctgggaagatatctgttgcttcaattgtcaaggaatgggtcatttcgccgacaagtgcccaaaaccgagaaacatagctgccagcacgtcagtccacgcaactccctgcaatcagaagcttgctcctcagcgaattgtcatccatgcatcccgaagcagtcctatagcccgcggtgcaacagctccaactccagctagtgcattaccacaaggtgtcaatgctcaatttcagccgcagccaccagttgacaagacagaggccagtatcggcattgtacctttggatgttccagcacagcagccaagaaatcaagtacaagatgaagaacccgagccaccaaccattctctgcaccgacagcctcagcaaagaattgtcgtcgatggaagaagttgtgtctctccccgacctactccaggccgagcaaagggcaatcaacctccggagggcgataccaagcagaagaccgtcatccgcttcaacccacaatcagaaggaagcttctcctgtgaatgatagcaatatgcagtcctatcacatcatcacagaactaatcaaggatgcagtcactagaacaatgccagctatatctctccagaatcaaaatgagcagccatatttgtggttttcagttcgctacctatcattgtgtaatcgaaagtttgcagcaatcatgtaa

SEQ ID NO: 14865 - DNA, 2394 bp, Oryza sativa
  Clone ID: TFbOSC20764j.C1.o4.fg
atggctgacaatgagaaaggcaataaggtcagaagtcaggacatcggtacctcaagctcccgagtgaatgaagcaccagacaccagttgtgtgacactggtccaacacctgattaaccataaccgattgcttatagagatactacagcagcatcagacgccaattctgaacctgagtcagatacaacctcaagtgcagttggaggcagtccaagcactcacaccacgagtcagcatgccgccagcatcccgaaggacccatggtgacgtgccacatgttgactcaaaagaagcaagtatcatttgttttatgtgtgatgagcaagggcactatgcaagggagtgtcctcagcagaaaagaaaaacaccaatgcgaaccaaagatgaagtccgtaagatgatcattaccagcacagaatggcctccaccaggaatgacaaaacgtcagagaagaaataccttccgaggtgcaccacagttgacagagcatcttttagctaatggaggtagagtgtctgatagtgaagattcagatcaagtctcctcagatgatgaagatgagaagtctccccaaggtttcaaccagaataaaatggaacgtaaggcatgctctcgttgtggagaaatcggtcatgttgccagctcgtgtgccactacatgcgttcattgtgaggaagaccatccacccgacaggtgtccaacgagcaggatcacttgtttcttttgtgaaggaactgatcatgtaccaaaagattgtcaattcagtttgctgctgacgaagaagatggccaaccaacccgccagttccaacggagagaagcatcaaggcaacacaaatcctcgccaagattacagtttcagcctaactccagtgccaggacagaggaatcaaaatgagaaaagaaaatgccgagtccgggaagatatctgttgcttcaattgtcaaggaatgggtcatttcgccgacaagtgcccaaaaccgagagacatagctgccagcacgtcagtccacgcaactccctgcaatcagaagcttgctcctcagcgaattgtcatccatgcatcccgaagcagtcctatagcccgcgttgcaacagctccaactccagcgagtgcattaccacaaggtgtcaatgctcaatttcagccccagccaccagttgacaagacagaggccacctttcaactattacagaattggaactacccagcaggggcaaccaacgttcaagtacctacagtccagcaacagtgcaagttatcagaatttctcaaaactgagactccaacctttgccattgtcgtcgaacctatggaagccagtgattggttgcgcacagtcgagaagaagctggggttgattcagtgcacagaccaggagcgggttgtcttcgcaactcatcagttggttggactggcttcagaatggtgggatagctacgaagcatcacggccagaaggacataccatcacctgggacgagttttcatctgtattcaagagatcccatgttcccgcaggaatgatcacactgagaaaacgagagttccgctacctgaagcaagaagatttgaccgtcacagagtacctgcacgagttccatcgtttggctcactatgcaccagaagatgtggaaaatgatgaagacaaacaagagaagtatctccaggggttaaaagatgagatcgcagtgcaactactcctagaggaatatgaagattttgagaaacttgtggacaaagccatacaactcgaaagtgagcataatcggatgaagaactgtaagagaaggattgtcagcatcccagtattcccagtggtaaccaaagacagcgcacggagccacttcagatcaccggatcttctgttgcgcatcaagagtttccgccccaagaagatggacacaatgcagacaaccacattagcaatactaatgatgatgatacccccaccaaccatgcttcttgccccattagtgaccactcaaatcaagcgtgcaatgtcaacatcattcaccaaggtgtcgacgatagtatcaatgatggcacccaaaatgacaaccctagcaattgtgactctgagaaagactccaatggtgatagcaactatggtttctctgaaagacagcacgcccaaggacctcattgccccagaagcatcctcaacacccggagcgaagagtacctggttgagaaaggtcgaaagtggtaacttgtatgaggttgactccgaagatatgaatcatgagaagttctggaacggaagcatcattaaactaccgcaacctagtctgagtcagctaaaaggtgcaccctggttcaagtcaggtgaagagaagattccatccgcaacagaaggtcaagccaagcagttccgagtggtgaagttttgctga

SEQ ID NO: 14866 - DNA, 1249 bp, Oryza sativa
  Clone ID: TFbOSC25016j.C1.o1.fg
atggctgacaatgagaaaggcaataaggtcagaagtcaggacgttggtacctcaagctcccgagtgaacgaagcaccagacaccagttgtgtgacactggtccaacacctgattaaccagaaccgattgcttatagagatactgcagcagcatcagacgccaattctgaacctgagtcagatacaacctcaagtgcagttggaggcagtccaagcacccacaccacaagtcagcatgccgccagcatcccgaaggacccatggtgacgtgccacatgttgactcaaaagaagcaagtatcatttgttttatgtgtgatgagcaagggcactatgcaagggagtgtcctcagcagaaaagagaaacaccaatgcgaaccgaagatgaagtccgtaagatgatcattaccagcacagaatggcctccaccaggaatgacaaaacgtcagagaagaaataccttccgaggtgcaccacagttgacagagcatcttttagctaatggaggtagagtgtctgatagtgaagattcagatcaagtctcctcagatgatgaagacgagaagtctccccaaggtttcaaccaggataaaatggaacgtaaggcatgctctcgttgtggagaaatcggtcatgttgccagctcgtgtgccactacatgcattcattgtgaggaagaccatccacccgacaggtgtccaacgagcaggatcacttgtttcttttgtgaaggaactgatcatgtaccaaaagattgtcaattcagttttctgttgacgaagaagatggccaaccaacctgccagttccaacggagagaagcatcaaggccacacaaatcctccccaagattacagtttcagcctaactccagtgccaggacagaggaatcaaaatgagaaaagaaaatgccgagtccgggaagatatctgttgcttcaattgtcaaggaatgggtcatttcgccgacaagtgcccaaaaccgagaaacatagctgccagcacgtcagtccacgcaactccctgcaatcagaagcttgctcctcagcgaattgtcatccatgcatcccgaagcagtcctatagcccgcggtgcaacagctccaactccagctagtgcattaccacaaggtgtcaatgctcaatttcagccgcagccaccagttgacaagacagaggccagtatcggcattgtacctttggatgttccagcacagcagccaagaaatcaagtacaagatgaagaacccgagc

SEQ ID NO: 14867 - DNA, 1404 bp, Oryza sativa
  Clone ID: TFbOSC401512j.C1.o1.fg
atggctgacaatgagaaaggcaataaggtcagaagtcaggacattggtacctcaagctcccgagtgaatgaagcaccagacaccagttgtgtgacactggtccaacacctgattaaccagaaccgattgcttatagagatactacagcagcatcagacgccaattctgaacctgagtcagatacaacctcaagtgcagttggaggcagtccaagcactcacgccacaagtcagcatgccgccagcatcccgaaagacccatggtggcgtgccacatgttgactcaaaagaagcaagtatcatttgttttatgtgtgatgagcaagggcactatgcaagggagtgtcctcagcagaaaagaaaaacaccaatgcgaaccgaagatgaagtccgtaagatgatcattaccagcacagaatggcctccaccaggattgacaaaacgtcagagaagaaataccttccgaggtgcaccacagttgacagagcatcttttagctaatggaggtagagtgtctgatagtgaagattcagatcaagtctcctcagatgatgaagatgaaatggaacgtaaggcatgctctcgttgtggagaaatcggtcatgttgccagctcgtgtgccactacatgcgttcattgtaaggaagaccatccacccgacaggtgtccaacgagcaggatcacttgtttcttttgtgaaggaactgatcatgtaccaaaagattgtcaattcagttttctgctgacgaagaagatggccaaccaacccgccagttccaacggagagaagcatcaaggcaacacaaatcctcgccaagattacagtttcagcctaactccagtgccaggacagaggaatcaaaatgagaaaagaaaatgccgagtccgggaagatatctgttgcttcaattgtcaaggaatgggtcatttcgccgacaagtgcccaaaaccgagaaacgtagctgccagcacgtcagtccacgcaactccctacaatcagaagcttgctcctcagcgaattgtcatccatgcatcccgaagcagtcctatagcccgcgttgcaacagctccaactccagcgagtgcattaccacaaggtgtcaatgctcaatttcagccccagccatcagttgacaagacagaggccagtatcggcattgtacctttggatgttccagcacagcagccaagaaatcaagtacaagatgaagaacccgagcgcagcaggctcaagtaccacctcgtcaccggaagcatccacaacactcggagtgaagagtacttagttgacaaaggtcaaaagatgattgatagaagatatcgaaaaagatgtttattaccgggcaaagaagtaggtcgaaaggtgattgataagagaaatcgggaaagaacacatcaaggttga

SEQ ID NO: 14868 - DNA, 2189 bp, Oryza sativa
  Clone ID: TFbOSC405209j.C1.o1.np
aaagaaagtgaatccgagttgcttccgcctcgcccgtgccctagcgccgccgccgccgcgaatcccgccgcttacgtccgtcccgcgtgcaatcaagaggggggaaatattccccgtgattccctccctctttccccccccccccatttttccctccctctctccctcggattcgtttggaaactcctcccctaacctcgccggcgcatcaatggcggccggatcttccgcgcccgtttccccctcatccggccgctctctccccctcccaaccctatataaacactccccgtgcctccctccgccgtttccgccactcgccgcactctctctccgccggaatcgagctcgcgccgtcgctctctctctccgccgtcgccgccgagctccggtccgccgctgtcctcgccccggaccatctcccgcctcggcgccgcctccttcggcttcgccgcaacctcgccgacctcgtccacctctccgtttcggtcgccgaccgccggaacgccgccgtcccggtcaacccgagccacgcagccgcccctctccgctccagtcgccgttcccgtcgtcgccgtcgacccggggtgagccgtggaccgccgattcgtttcccccttccctcccctctctcgggcgccgctccgccgcgccggtggtcgccggcggcgaccatcggggcgcgggcgcgccgcctcccgtcggctgtgccggcgtggccgccttcgggcgcgtcccgcggctgccatgtggggcccggccgtcagccgcccgcaccctcgggtgcggctgacgcattggacccacggcgctggccggtgtgagccgggtgcacccggtccaccgtggaccgtgagactgccgcgtgggccccactcccatggacccggacaaatgaaggctacacgagctgcggcccgatggctgacaatgagaaaggcaataaggtcagaagtcaggacattggtacctcgagctcccgagtgaatgaagcaccagacaccagttgtgtgacactggtccaacacctgattaaccagaaccgattgcttatagagatactacagcagcatcagacgccaattctgaacctgagtcagatacaacctcaagtgcagttggaggcagtccaagcactcacaccacaagtcagcatgccgccagcatcccgaaggacccatggtgacgtgccacatgttgactcaaaagaagcaagtatcatttgttttatgtgtgatgagcaagggcactatgcaagggagtgtcctcagcagaaaagaaaaacaccaatgcgaaccgaagatgaagtccgtaagatgatcattaccagcacaaaatggcctccactaggaatgacaaaacgtcagagaagaaataccttccgaggtgcaccacagttgacagagcaccttttagctaatggaggtagagtgtctgatagtgaagattcagatcaagtctcctcagatgatgaagatgaaatggaacgtaaggcatgctctcgttgtggagaaatcggtcatgttgccagctcgtgtgccactacatgcgttcattgtgaggaagaccatccacccgacaggtgtccaacgagcaggatcacttgtttcttttgtgaaggaactgatcatgtaccaaaagattgtcaattcagttttctgctgacgaagaagatggctaaccaacccgccagttccaacggagagaagcatcaaggcaacaccaatcctcgccaagattacagtttcagcctaaatccagtgccaggacagaggaatcaaaatgagaaaagaaaatgccgagtccgggaagatatctgttgcttcaattgtcaaggaatgggtcatttcgccgacaagtgcccaaaaccgagaaacgtagctgccagcacgtcagtccacgcaactccctgcaatcagaagcttgctcctcagcgaattgtcatccatgcatcccgaagcagtcctatagcccgcgttgcaacagctccaactccagcgagtgcattaccacaaggtgtcaatgctcaatttcagccccagcaaagaattgtcgtcgatggaagaagttgtgtctctccccgacctactccaggccgagcaaagggcaatcaacctccggagggcgataccaagcagaagaccgccatccgcttcaaacagcaatcagaagaaaggttctcctgtgaa

SEQ ID NO: 14869 - DNA, 1611 bp, Oryza sativa
  Clone ID: TFbOSC411277j.C1.o2.fg
atggctgacaatgagaaaggcaataaggtcagaagtcaggacattggtacctcaagctcccgagtgaatgaagcaccagacaccagttgtgtgacactggtccaacacctgattaaccagaaccgattgcttatagagatactacagcagcatcagacgccaattctgaacctgagtcaaatacaacctcaagtgcagttggaggcagtccaagcactcacaccgcaagtcagcatgccgccagcatcccgaaggacccatggtgacgtgccacatgttgactcaaaagaagcaagtatcatttgttttatgtgtgatgagcaagggcactatgcaagggagtgtcctcagcagaaaagaaaaacaccaatgcgaaccgaagatgaagtccgtaagatgatcattaccagcacagaatggcctccaccaggaatgacaaaacgtcagagaagaaataccttccgaggtgcaccacagttgacagagcatcttttagctaatggaggtagagtgtctgatagtgaagattcagatcaagtctcctcagatgatgaagatgagaagtctccccaaggtttcaaccagaataaaatggaacgtaaggcatgctctcgttgtggagaaatcggtcatgttgccagctcgtgtgccactacatgcgttcattgtgaggaagaccatccacccgacaggtgtccaacgagcaggatcacttgtttcttttgtgaaggaactgatcatgtaccaaaagattgtcaattcagttttctgctgacgaagaagatggccaaccaacccgccagttccaacggagagaagcatcaaggcaacacaaatcctcgccaagattacagtttcagcctaactccagtgccaggacagaggaatcaaaatgagaaaagaaaatgccgagtccgggaagatatctgttgcttcaattgtcaaggaatgggtcatttcgccgacaagtgcccaaaaccgagaaacatagctgccagcacgtcagtccacgcaactccctgcaatcagaagcttgctcctcagcgaattgtcatccaggcatcccgaagcagtcctatagcccgcgttgcaacagctccaactccagcgagtgcattaccacaaggtgtcaatgctcaatttcagccccagccaccagttgacaagacagaggccagtatcggcattgcacctttggatgttccagcacagcagccaagaaatcaagtacaagatgaagaacccgagccaataatacctttagcgccaaccattctctgcaccgacagcctcagcaaagaattgtcgtcgatggaagaagttgtgtctctccccgacctactccaggccgagccaagggcaatcaacctccggagggcgataccaagcagaagaccgtcatccgcttcaaacagcacccagaaggaagcttctcctgtgaatgatagcaatatgcagttctatcacatcatcacagaaccaatcaaggatgatgcagtcactagaacaacgccagctatatctctccagaatcaaaatgagcagccacgcttgtggttttcagttcgctacttatcattgtgtaatcgaaagtttgcagcaatcatgtaa

SEQ ID NO: 14870 - DNA, 1643 bp, Oryza sativa
  Clone ID: TFbOSC6554j.C1.o2.np
atcatgtttgtgtggtgtaccccggcttttcctgggacggggattaatacactagcgttcgggaaaaggcaattttcccggtcgcgacaagctgtactagatggtcaggtcagtgaagaagaagacatcgtcagttgtttgccgaagctccggaagactgcaggatccgctagcgaagtggaggaagcagtgaagccagctgtgaagcaggacaaaagacttagatctgttaaggtcctatccttagtttctaatctgtctctcccctttgttttccctctctccctctccaaacctttgcaacagatggctgacaatgagaaaggcaataaggtcagaagtcaggacattggtacctcaagctcccgagtgaatgaagcaccagacaccagttgtgtgacactagtccaacacctgattaaccagaaccgattgcttatagagatactacagcagcatcagacgccaattctgaacctgagtcaaatacaacctcaagtgcagttggaggcagtccaagcactcacaccacaagtcagcatgccgccagcatcccgaaggacccagggtgacgtgccacatgttgactcaaaagaagcaagtatcatttgttttatgtgtgatgagcaagggcactatgcaagggagtgtcctcagcagaaaagaaaaacatcaatgcgaaccgaagatgaagtccgtaagatgatcattaccagcacagaatggcctccaccaggaatgacaaaacgtcagagaagaaataccttccgaggtgcaccacagttgacagagcatcttttagctaatggaggtagagtgtctgatagtgaagattcagatcaagtctcctcagatgatgaagatgaaatggacgtaaggcatgctctcgttgtggagaaatcggtcatgttgccagctcgtgtgccactacatgcattcattgtgaggaagaccatccacccgacaggtgtccaacgagcaggatcacttgtttcttttgtgaaggaactgatcatgtaccaaaagattgtcaattcagttttctgctgacgaagaagatggccaaccaacccgccagttccaatggagagaagcatcaaggcaacacaaatcctcgccaagatttcagtttcagcctaactccagtgccaggacagaggaatcaaaatgagaaaagaaaatgccgagtccgggaagatatctgttgcttcaattgtcaaggaatgggtcatttcgccgacaagtgcccaaaaccgagaaacatagctgccagcacgtcagtccacgcaactccctgcaatcagaagcttgctcctcagcgaattgtcatccatgcatcccgaagcaatcctatagcccgcgttgcaacagctccaactccagcgagtgcattaccacaaggtgtcaatgctcaatttcagccctagccatcagttgacaagacagaggccagtatcggcattgtacctttggatgttccagcacagcagccaagaaatcaagtacaagatgaagaacccgagcgtaagaaagttattgtctgttacaactgtagtacctgttaaggaagcagacatgccaatcgccaagtggtcactggagcaaatgcggtacctgttaagcctagcgctagtcagaagcaa

SEQ ID NO: 14871 - DNA, 1275 bp, Oryza sativa
  Clone ID: TFbOSC19734j.C1.o1.np
agctcccgagtgaatgaagcaccagacaccagttgtgtgacactggtccaacacctgattaaccagaaccgattgcttatagagatactacagcagcatcagacgccaattctgaacctgagtcagatacaacctcaagtgcagttggaggcagtccaagcactcacaccacgagtcagcatgccgccagcatcccgaaggacccatggtgacgtgccacatgttgactcaaaagaagcaagtatcatttgttttatgtgtgatgagcaagggcactatgcaagggagtgtcctcagcagaaaagaaaaacaccaatgcgaactgaagatgaagtccgaatgacaaaacgtcagagaagaaataccttccgaggtgcaccacagttgacagagcatcttttagctaatggaggtagagtgtctgatagtgaagattcagatcaagtctcctcagatgatgaagatgagatggaacgtaaggcatgctctcgttgtggagaaatcggtcatgttgccagctcgtgtgccactacatgcgttcattgtgaggaagaccatccacccgacaggtgtccaacgagcaggatcacttgtttcttttgtgaaggaactgatcatgtaccaaaagattgtcaattcagtttgctgctgacgaagaagatggccaaccaacccgccagttccaacggagagaagcatcaaggcaacacaaatcctcgccaagattacagtttcagcctaactccagtgccaggacagaggaatcaaaatgagaaaagaaaatgccgagtccgggaagatatatgttgcttcaattgtcaaggaatgggtcatttcgccgacaagtacccaaaaccgagagacatagctgccagcacgtcagtccacgcaactccctgcaatcagaagcttgctcctcagcgaattgtcatccatgcatcccgaagcagtcctatagcccgcgttgcaacagctccaactccagcgagtgcattaccacaaggtgtcaatgctcaatttcagccccagccaccagttgacaagacagaggccagtatcggcattttacctttggatgttccagcacagcagccaagaaatcaagtacaagatgaagaacccaagccaatgggaatgatcacagtgcaactactcctagaggaatatgaagattttgagaaacttgtggacaaagccatacaactcgaaagtgagcataatcggatgaagaactgtaagagaaggattgtcagcatcccagtattcccatgtggt

SEQ ID NO: 14872 - DNA, 1985 bp, Oryza sativa
  Clone ID: TFbOSC12272j.C1.o5.np
atggatgaattcgttgcgacgatggatatctctgaggcaaatgaaggctacgtgagctgcggctcggtaatcgagatgtctaggcaaatgaaggctgcacgggccggtgtccgggctcaatcctagcctgcctgttcgggatacctaccgtaggcaaggttgggtcggtacttttgttcacggctaggatgggtgaagggttatgtcacatgtttacgacgggttccaaggccatggaatgcggagtaaagatgtgtcttgtgggttggccttggttggcttgggacgagctgggacccaggtcgggttaccagtttggtctgaatcatcgtaggcctttggttaaggcagtactagatggtcatctttgcgaagaagaagatgccgtcaattgtctgccaaagctccggaagactgttgggtccgctagcgaagcaaaggaagctgtgaagccagctgtgaagcaggagaaaaagattagatctgttaaggtgctatccttagtttctgatctgtccctccccttttgttttccctctctccctctccaaacctggtaacagatggctgacaatgaaaaaggcagtaaggtcagaaatcaggacaagggtgcctcatgctcccaagtgaataaagcaccagacaccagttgtgtggtagtggtccaacacctaattaaccagaacaaattgctcatagatctattacaacatcatcagacgccaattctgaacccgagtcagatgcaacctcaagtgcaatttgaggcagatcaagcacccacatcgccagacaacgtgccactagcatcccaacaggcccattgtgccatgccacatgtggactcaaaagaagctataatcatttgtcttatctacgatgaacaagggcactatgcaaggaactgtcctcagcagaaaagaaaagcaccaatgcgaaccgatgatgaagtccgtaagatgaccattaccggcacagaatggcctccaccaggaatgacaaaacgtcagataggaaatttctttcgtggtgcaccacagttgacccaacatcttttagctaatggaggtagagtgtctgatagtgaagattcagatcaagtctcctcaggggatgaagatgagaagtctccctaaggtttcaagcagaataaaatggaacataaggcatgctctcgttgtggagaaatcggtcatgttgctagctcatgtgtcactacctgccttcattgtgagaaagaccatccacccggcgagtgtccaatgagcaggatcacttgtttcttgtgtgaaggaactgatcatgtaccaaaagattgtcaattcagttttctgctgacgaagaagatggccaaccaccccgccagttccaacaaagagaagcatcaagaccacgtaaatcctcgacaagaatacagttttcagcctaactccagagtaggacagaggaatcaaaatgggaaaagcaaatcccgagttcggcaagatatcagttgcttaaattgtcaagaaattgggtcatttcgccgccaggtgcccgaaactgagaaacatagctgccagcatgtcagtccatgcaactccccacaatcagaagcttgttccttagcgaattgtcatccatgcatcccgaagcagtcgtatagcctgagttgcaacaactgagtgcactaccacaaaggtgtcaatgcttaatttcagccccagccaccagttgacaagacagaggccaatatctgcgttgtacctttggatgttccagtacagcagccgagaaattaagtacttgatgaagaacttgggcgtaagaaagttattgtttgttacaactgcagtgaagaaagacattactccagaaattgtccacaaccaaagcgtaacccgcgccatcattccggtcgttatgcacgaagaagacatgaccacaatatcagggtcactggagcaaatgcagtacctgttaagcctagtgctagtcagtagcaa

SEQ ID NO: 14873 - DNA, 1658 bp, Oryza sativa
  Clone ID: TFbOSC14650j.C1.o1.np
gtaagagaagctttggagaagaagtcctagatggtcatctttgcgaagaagaagatgccgtcaattgtctgccaaagctccggaagactgttgggtccgctagcgaagcaaaggaagctgtgaagccagctgtgaagcaggagaaaaagattagatctgttaaggtgctatccttagtttctgatctgtccctccccttttgttttccctctctccctctccaaacctggtaacagatggctgacaatgaaaaaggcagtaaggtcagaaatcaggacaagggtgcctcatgctcccaagtgaataaagcaccagacaccagttgtgtggtagtggtccaacacctaattaaccagaacaaattgctcatagatctattacaacatcatcagacgccaattctgaacccgagtcagatgcaacctcaagtgcaatttgaggcagatcaagcacccacatcgccagacaacgtgccactagcatcccaacaggcccattgtgccatgccacatgtggactcaaaagaagctataatcatttgtcttatctacgatgaacaagggcactatgcaaggaactgtcctcagcagaaaagaaaagcaccaatgcgaaccgatgatgaagtccgtaagatgaccattaccggcacagaatggcctccaccaggaatgacaaaacgtcagataggaaatttctttcgtggtgcaccacagttgacccaacattttttagctaatggaggtagagtgtctgatagtgaagattcagatcaagtctcctcaggggatgaagatgagaagtctccctaaggtttcaagcagaataaaatggaacataaggcatgctctcgttgtggagaaatcggtcatgttgctagctcatgtgtcactacctgccttcattgtgagaaagaccatccacccggcgagtgtccaatgagcaggatcacttgtttcttgtgtgaaggaactgatcatgtaccaaaagattgtcaattcagttttctgctgacgaagaagatggccaaccaccccgccagttccaacaaagagaagcatcaagaccacgtaaatcctcgacaagaatacagttttcagcctaactccagagtaggacagaggaatcaaaatgggaaaagcaaatcccgagttcggcaagatatcagttgcttaaattgtcaagaaattgggtcatttcgccgccaggtgcccgaaactgagaaacatagctgccagcatgtcagtccatgcaactccccacaatcagaagcttgttccttagcgaattgtcatccatgcatcccgaagcagtcgtatagcctgagttgcaacaactgagtgcactaccacaaaggtgtcaatgcttaatttcagccccagccaccagttgacaagacagaggccaatatctgcgttgtacctttggatgttccagtacagcagccgagaaattaagtacttgatgaagaacttgggcgtaagaaagttattgtttgttacaactgcagtgaagaaagacattactccagaaattgtccacaaccaaagcgtaacccgcgccatcattccggtcgttatgcacgaagaagacatgaccacaatatcagggtcactggagcaaatgcagtacctgttaagcctagtgctagtcagtagcaa

SEQ ID NO: 14874 - DNA, 972 bp, Oryza sativa
  Clone ID: TFbOSC414256j.C1.o5.fg
atggcggggaaggaggagggccggatcttcgtgggcggcctgtcgttccacaccgacgagcgcaagctggccgacgcgttccgccgcttcggcaaggtcgtcgacgcccagtggttcggtagcttttgtggctcttttgtgaaccaggtgatactgatcatgctggagagacacacccaacgccatcgtggttttggcttcgtgacattttcagatccagaggcagttgatagcgctattaaagaaatgcactgtcaagaattagatggcaggactatatcagtgaacaaggctgagcctaagatgaatacagatgacacaaggtatgaaagtggtggtggacgaggagagtatcgtggtggtagaggtgatggaccacccccaggcaattgctttgagtgtggccgtgctggtcattgggctcgtgattgccctaatcctggtggtggtcgttctgcgcgatactcttcttctaagttcagcgctggtggcagaggagaccgtttttctggatcagataggtttggagaccgttacatggatgatcgttatgatggtgggtaccgtgaacctgttgatgtcagagacaggtatggtggaggccgtgaccgatatgctaatgatcgatacccatcaggtggtgaccgctatgttccagacagatatggaggtcccgatcgctatcagcctagtagttatggccgggaacgagaaagaagctacgagagggatggagtgcgtggcaatggcggctatgataggagtggcccaaggggtggtggaagctatgacagggatggcccaaggggtggtataagtggtggctatgacagggatggcccacgtggcggtggtgttgaccgttacggtggtggagggcctgctcgttatgatggaggaagctacagggacagatctgggccgtatgaccgccctagcagaggaggacgctttgatgatcgcttccagtga

SEQ ID NO: 14875 - DNA, 1290 bp, Oryza sativa
  Clone ID: TFbOSC400702j.C1.o17.fg
atggcgcctcaaccaacctgtcagacttgtgtccgcaactaccttggttctaaggaagacctagctttgtcagaaaatccaaatcaactagctgaacaagtcaccaaccaagttgccaagactgataatactgttcctggaccaaacaaggaacccaaggtgaatccagacaagagtaaggatgaggccgcagaaatacaaggaacacaatcagtagaaggcactgatacccataaagagaagaacaaagaattcttaaatgtgatgattatagggatgaaaaccccacttcgagctaataattgccccaaccttcagaactcaatcaataaatccgtatcgcaagaaaatagcatggttaaagaaggaagttgtcacaaaagaaagaccttgccatcaaaagttgacatgcaagatgtcccacaatgtcagacaatgcaatcttgccaaaacttacccaagtcccccaccctcaaatcaaagaagatcagacacgttcccggactcatatgcttcatttgccacgaaattggccattacatgagacactgcccccaaaaaccctatatggatgcactactacaagctaatatgagcacctcaaggatgcccttctatccccaaggaagcccgaatttgcaaaatgttaatgcagtacgtccaaccttccctgatgacaaaagagcaaaagcatcctgtgacatgtgccaagacatccaagaaaagaaaaagatgcaagaatacaagagacgcaaagtaatgtccctagggatccaagcaaaagaaggtttgtgtcgaaaaacaaactcgccaacacaatactatcagaaagcatctcagcattcaaatggttccggttctacgtctctttcgactatgtcagaacctggtcagcaagccacaatgatcaacagtaatagccatgaaggaagcaactccgtaccatgccctacaccttcaaaaagacgtggtcataaggcaggagtcgaatgtttcacctgccatgagatgggacactattcgtgggattgccctcagaaagccaagatgaagtgccctcagaaagtcaagtcaaaacaagttcaacaaacaacaagccttcccaacgtatctggaccaaaaagttcaaagccaccaaacagtggttctgcctcgttgacctcaccgcccgttggacaaggtcgtctgaaccatgtgcaagtagaaacaaatggaaaagttgtgaatctcgagcaggttgaaagagcaggagaagaacaggttccacaggcaagagcagagccacaataa

SEQ ID NO: 14876 - DNA, 5073 bp, Oryza sativa
  Clone ID: TFbOSC416848j.C1.o3.np
atgtcgaacaaggtgaaccatgtagggaaggctcccatgtttaatggcacaaactactccactggaaaattaaaatatctactcacctcaaagctatgagcttccatatttggagtattgtggatgtaggctttgccatcactggcacacccttgacggagattgatcaccgcaacctccaactcaatgcccaagccatgaatgccttgttcaactctttgagccaagaggagttcgatagagtgagcaaccttgagaccgcatatgagatttggaacaagttggcggagatccatgagggtacaagtgagtacaaggatgccaagcttcacttcctcaagatccaatatgagacattctccatgttgcctcatgagaatgtgaatgacatgtatgggaggctcaatgtcattgtgaatgatctcaaggggcttggggcaaactacaccgatcttgaggttgcccaaaagatgcttagagccctaccggagaagtatgagacccttgtcaccatgctcatcaactccgacatgtcaagaatgacacccgcaagcctcttggggaagatcaacaccaatgacatgtacaagttgaagaagaaggagatggaggaagcctcaccctccaagaagtgcattgctctccaagccgaagttgaagacaagagcaagagcaaggtgaatgaagtcaatgaggacttggaggaagagatgatccttcttgctagaaggttcaatgatctcttgggaaggagaaaggagagaggaaggggctccaactccaataggagaagaaatagaagacccaataagactctctccaacttgaggtgttttgagtgtagtgagaagggacactttgcttccaagtgcccttccaaggatgatgatggagacaagtcatccaagaagaagagtggaggctacaagctcatgaagaaacttaagaaggaagggaagaagattgaggctttcatcggggaatgggactcaaatgaggagagctccgcctcatccgggtccgaggaagaaggtggtgatgatgcaagctccaagaagaagaagatggtcgttgttgccatcaaggaggctccatcactcttcgctccaatttgtctcatggcaaagggttcctctaaggtaacatctcttagtgatagtgagagtgatgatgattgtgatgatgtttcctatgatgagcttgtgagtatgtttgaggagctctatgcttatagtgagaaggatattgtcaagttcaaggccctaaagaaggatcatgcttctttggaggtcttgtatgagtagctaaagatctctcatgagagactcaccatttctcatgagaagcttaaggaagctcatgacaatctcctttccactactcaacatggagctcacattgatgttggcatatcttgtgatttgcttgatgatagtgctacttgccatattgctcatgttgcatcatctagtatttctacctcttgtgatgatcttatgtatatgcctagcccttgctctagttctagctcgtgtgtttctatttgtgatgcctcacttgttgttgagaacaatgagcttaaggagcaagtggctaagctcaacaagagtttggagagatgcttcaagggtaagaacactcttgacaaaattttgagtgagcaacggtgcatccttaacaaggagggacttggattcattccaaagaagggtaagaaaccttctcaccatgccactcgttttgtcaagagaaatggtaagtattgctacaagtgtcgtgaggttgggcatttggtgagtgattgccccgaaggtaagcctcctaagacatgtatgtttgattctcattatatgcttagtaaggctcatgatggtagcattgttgctagatatgtgggttcccctatactcggtggtaaaaagaatgccatttgggtgcccaaagctttggtctctaacctccaaggactcaaacaagtttggattattctcgctatacttgggtgttttttttgcatgataagtctattgttgccgagcttttcaaaaagtttgcaaaaagggcccaaaatgaatttagttgcactcttgtgaaaattagaagtgacaatggttccgaatttaagaataccaatatcgaggactattgtgatgatcttggtatcaaacacgaactttccgctacctactcacctcaacaaaatggtgtagtggaaaggaaaaatcgtacattgattgagatggcaaggactatgctagatgaatatggtgtttccgattccttttgggcggaagccataaacaccgcttgccatgcaaccaataggctttatttgcatcgtctcttgaaaaagacttcctatgagctaattgttgtgaggaagccaaatgtcgcctattttcgagtttttggttgcaagtgttatatttaccgaaagggtgttagactaaccaaatttgaaagtcggtgtgatgaagggtttcttctaggttatgcctcaaatagcaaggcataccaggtctacaacaagaacaaaggtgatgaaggcttgatgagagctatgaagaacatgtctattggagatgtcaagcctattgaagtggatgatgagccatctacttccgcctcgtcaagtcaagctcaagttgaagtggaagaggagaaggcacaagatccacctatgcctccaagaatacacaccgctctttccaaggatcacccaattgaccaagtgttgggtgacattagtaagggtgttcaaactcgatctcatgtcgcttcaatttgtgaacattactcgtttgtttcttgtcttgagccaaaacatgtagatgaagctctttgtgatccggattggatgaatgctatgcatgaagagctcaacaactttgcaagaaacaaggtgttgactttggttgaaagacctagagaccacaatgtcatagggacaaaatggatctttaggaacaaacaagatgagaacggattggtggtgagaaacaaggcaaggttggtggcgcaaggtttcacacaagttgaaggtttggactttggtgaaacttttgcccccgtggcaagacttgaggctattcgcatccttcttgcatttgcatcatgctttgatataaaactatttcaaatggatgtgaaaagtgcttttctaaatggtgaaattgcctaacttgtctttgttgaacaacctcccggttttgaagatcctaaaaatcctaaccatgtttacaaactctcaaaagctctttatggtttaaaacaagctcctaggcttggtatgaaagattgagagattttcttttgtcaaaggatttcaaaattggaaaagttgacaccactcttttcacaaaaatcattggtgatgatttctttgtgtgtcaaatttatgttgatgacatcatattcggttttactaatgaggtattttgcaaggaatttggtgatatgatgtctagggaatttgagatgtccatgattggagagttgagcttcttccttggacttcaaatcaagcaactcaaggatgggacgttcgtgagccaaaccaagtacatcaaggatctactcaagaggtttggcttggaggatgcgaggcccatcaagacacctatggcaaccaacgggcatctcgaccttgatgagggaggtaaaccggtagatttaaagctttatcgttccatgattggtagcttgctttaccttaccgcatctaggccggatatcatgtttagtgtttgcatgtgtgcacggtttcaagccgttcctaaggagtgtcacttagtggcctacccaaaaggtgctaaatttaagcttgttggctattccgattcgaattatgtcggttgcaaagtggatagaaagagcacatccggtagttgccaaatgcttgctatgcctccccgcactcggcatggtcgtcgtgcgcccacgcccgatcccgttagtgagaatgaggaatcaagcggagatgagtatgttcaaagtgatgaggacaatatggaaaatgttgagggtgatgagatggaagtaagtgatgatggtgatgacaatgagagtggaaatggtgaagatgatgaggcaagtgatgatgggagtcctttcgattcctccatccaatttgtgcttaatttgaggaatgctcaacaatacgctatcctccatcatcatgatcaatttcggaggcctaacgattgtaatgatccaagatttcatacacggttccaaaagtccgtgtatgtacaagtgtatgccaagaaagccttcaccgaacacaaatggatctcttggaggcacattggtgagacaccggagtttgagaatgtgcaagagatgttccggaccgttgggattgatagaattgtcaccatgaagcaaccttttgatgaagatctcatccggcaattctatgccaccgtatgggtgtccggcgattgtgatgcaatgaagtggatgtcggggaccctccgatgctctatcaaccgccgtgaattcaaggagctcttgcacattcgcttcaacaacggggatgaccttcatgatgagcacacccacaatcccttccccattgatcacttttctcagttttatgaagaagggggaaggcacacatatggaaaggtggcgggtttaagggctctcccaagtgtgatcaaccgcatagtaagggccaccatcctcccaagatgcggcaacaatgatgacatacgcggagttgcttggcatgttattgatgccattatggatggtcgtcggtttgatgttatcaactttatgatgaaggagattaccatctcaaaggggactattggacaaggaatctattatgctccctacataatgaggttgccgcctcctagacggcttgtggaggagttgcccggtgacctctccgagaagattgtggaggaggcccggcgccggtttgtgagtggtttggagttcaccaccttcggagtgaaggaagaactaccccgagtgatcgaggcttgggtagtcctctccgtgggccggctcccgccttgcccaccccttgacgaaggggacgtgcggtggcttcgtggt

SEQ ID NO: 14877 - DNA, 3126 bp, Oryza sativa
  Clone ID: TFbOSC900333j.C1.o17.fg
atggctggttttgccgatgcactgaggccagataaattcagcggtgtgcactttaagagatggcagatcagggtcactctgtggctgacagctatgaaatgcttctgggtgagtactggcaaacctgaaggagttcttactgctgaacagcagaagcaattcgaggaagccactactctctttgtgggatgcattcttagcgttcttggcgatcgtctggtcgaggtgtatatgcatatgaccgacgctaaggagttgtgggatgcactgaatactaaattcggtgctactgatgctagcaatgatctgtatatcatggagcaatttcatgactacaagatggctgacaaccgttctgtagtcgaacaggctcatgagatacaaaccatggctaaggaactcgaactccttaagtgtgtcttacccgacaaatttgtggccgggtgcattattgcgaaacttcctccatcttggagaagtttcggtactgcactcaaacacaagagacaggaatactctgttgaggggttgatagcgtctcttgatgttgaggagaaagctcaggaaaaagatgctgcgtctaagggcgatggtgggcagtccagtgccaatgttgtgcacaaggcccagaacaagagcaaggggaaatacaaagctcagcagaccaccaacttcaagaagcagaagaagaacaacaacaatcctaatcaggatgacaggacttgctttgtgtgtggccaacctgatcatctggctaggaagtgtccacagcgcaaggggatgaaggcacctgcagagcagacttctaagtctgctaatgtgaccattggcaacactggagatggaagcgggtatggtaatttacctactgttttttcagttaatcagtctactaattggtgggttgatactggggccaatgtcgcacggggttccaccgtcctaatggggaatgggtcacatgcttctgttcatggtgttggcacagtagatctgaagtttacttcgggaaagatcgtgcagctgaagaacggtggaaaacgatatttcatgatgttgattgatgatgctactagattttgctatgtgtacttgttgaaaacgaaagacgaggttctagactattttaaaatttataaggcagaagttgaaaatcaacttgacagaaagataaaaagacttaggtctgatcgtggtggagagtttttctcaaacgagtttgacttattctgtgaggaatatggcattatacatgagaggacgcctccctattctcccgagtctaatgggattgccgaaaggaagaaccgcacactgactgacttggtgaatgccatgttggacaccacgggactacctaaggcatggtggggggaggcattgttgacctcgaatcatgtgttaaacagagttcctaacagaaataaggacaaaacaccatatgagatatggattgggagaaaaccatcactttcttacttgcgcacatgggggtgcttgacgaaagtcaatgtaccaataacgaagaagcgcaaacttggacctaagactgtggactgtgtctttctgggatatgctcaccacagcattgcctatagatttttaatagttaaatccgaggtacctgacatgcatgttggtacaattatggagtctcgtgatgctaccttctttgagagctttttcccaatgaaggatacacatagtagttctagtcaaccttctgaaataattcccagttcaatcacaccaccagaacaaactgaacatacacataaacatgtcactgaggaggatgacagtgaagctcctcgaaggagtaaaagacaaaggatggctaagtcctttggtgatgatttcattgtgtacctcgtggacgacactcctaagtcaatttcagaagcatatgcatctcctgatgcagactactggaaggaggctgtccgtagtgaaatggattccattatcgctaacggaacttgggaggtgacagagcgaccctatgggtgtaaacctgtggggtgcaagtgggtgttcaaaaagaagctgaggcctgatggtaccattgaaaagtacaaggctcggcttgttgctaagggctatactcagaaagaaggcgaagatttctttgacacttactcacctgttgccagattgaccacgattcgtgtgctactttccctagcagcctcacatggtcttctcgttcatcaaatggacgttaagacagcttttcttaatggagagctggatgaggaaatctatatggatcaacctgatgggtttgtagttgaaggtcaagaagacaaggtgtgcaaattgttgaagtctttgtatggtctgaaacaagctcctaagcaatggcatgagaaatttgatagaacattgacatctacaggcttcgcagtcaatgaggcagataaatgtgtatactatcgccatggtgggggtgagggagttattctgtgcttgtatgttgatgacatactgatatttgggacaaatcttgaggtgataaatgaggttaaatcattcttgtctcaaaaatttgatatgaaggatttgggagtagctgatgttatcctaaacatcaagctaattagaggtactattgaattggggcttcactattctgggtaccctgcggtactagaaggatatagtgattcaaactggatctctgatgtggatgaaatcaaagccactagtgaatatttcttcacactaggtggtgatgctgtttcgtggaggtcttgcaaacagaccattttgacgaggtcaaccatggaagcagagttgatggcattggatactgctattgttgaggcagaatggctgcgtgatctattaatggatctgcctattgttgaaaaaccggtgccggctatccttatgaactgtgacaatcaaacagtaattgtcaaagtgaatagttctaaggataatatgaaatcgtctagacatgtgaaaagacgattgaagtctgtcaggaagttgagaaactccggagttataacgttggattacatccaaacaactagaaacctggcagatcccttcacgaagggactatcacgaaatgtgatagacaatgcatcgaaggagatgggtttgagatccatgtga

SEQ ID NO: 14878 - DNA, 2442 bp, Oryza sativa
  Clone ID: TFbOSC20909j.C1.o1.fg
atgggggaaaatcagggactggaacaagtaatgggtaaattggtagagatgcttgcaaagaagtttaatgaggctccaactacgagtagtgcagtggttcctcatactgaatcggtgcaaaaaattgagttgatgcaaaatgacattaagttggagggtgtaaaaaattatttgagttggtcaagaagagctttattgattttgaagacaaaggggttagaaggatatgttaccggggagataaaggagcctgagaacatatcaagtgttgaatggaagacttggagtactaccaactcgttagtagtagcatggttgttaacctcacttatccctgctattgctacaactgttgagaccatctctagtgcaagtgagatgtggaaaactcttactaatctctactcaagagaaggaaatgtgatgttaatggtggagacacaggagaagataagtgttttgagacagggggagcgttctgttgcagaatatgttgctgaattgaagcatttatggtctgatttggatcattataatcctcttgggttagagcaccctgattgtatagcaaaaatgagaaaatggattgagcgtagaagggtcattgagttcttgaagggcttaaattcggagtttgaaggaagaaggaatgcaatgtttcatcaaaccacccttcctaccttggatgaggctattgcagctatggcacaggagaagcttaagaagaaagtattgcctagtgccacaccatcttcaccaagccccacctatgtagttgcacaaagtaaagagactagggagtgcttcaattgtggtaaaatggggcaccttatacgtgattgccgcgctcctcgcaagcctagttatgggagaggaagatttggtgataggggtggagcaagaggtggaagaggttatgcagttctcattcaaattggatacttgactcgggtacatctagacatgtcacgggagagggaaacagggaagaaacttgggattggcgtcaggcgtgatggactttggtatttggatcgaaaggagacaagtgaagatgtatgtcttgcattgatggcttctacaagcgaagaagaggctaagaagacagatttaagttctttattcattgatcttgatgattcaactaatggtcatgatggtcaccaaatgaaagatgaaatattgggtccaaagggagatgaacaaccaaagaaggaaaagcttgtggttggttcaattccatgtcccatgggtggtcctgttgcacaggagcaagaatggaggaagccacatgaagagaaaaatcttcaagtatacacaaggagaacaaggtgtccagtaatccaacaagttgaagaggataatcaggtagaggaagatgtaagccgtgagcaaggatctttggagtcagggggagaagaagaggaagttagagaagaatctgacttaccaattgccattagaaagagtgtgagaagcaatgcagcatcactagattcagtgcaaatcccaaaggattggagagaagcaaagcaagatccaaggtggcatcaagctatgctagatgaactagaggctcttgaaaagaacaaaacatgggatcttgtaccatttcctaaagggaagaaaattgtcaactataagtgggtttatacagtaaagcaaaatcctgatggaaaggtggaaagatacaaagcaaggttggtggctaagggatatagtcaaacatatggaattgattatgatgaaacatttgcaccagtagcaaagatgagcacggtaagaactcttatatcttgtgcagctaattttgattggccattgcatcagttagatgtcaagaatgcattcttacatggagatcttcaagaagaggtgtatatggatgtcccacctggatttgccacttcacaaactaaaggaaaggtgttgagattgaagaaatctttgtatggtcttaaacagtcaccaagagcatggtttgatcggtttaggcgtgcaatgtgtgctatggactataagcaatgtaatggagatcatacagttttctatcatcattgtggagatcatataaccattcttgctgtctatgttgatgatatgattatcactggaaatgattgcttggagataactaggttgaaacggaatctaagcaaagaatttgaggtcaaggacctaggccagttgagatattttctaggtattgaaattgcaagatctcctagagggatagttatttcacagcgaaaatatgtattggacttgcttagtgaaacaggtaggcttggatgtcgcccagtctctacaccaattgatcaaaatcataagttatgtgcggagtctggagatccagtgaatagggaaagataccaaagattggtgggaagattgatatatctatgtcatacacgacctgacataacatatgctgtcagtatg

SEQ ID NO: 14879 - DNA, 2646 bp, Oryza sativa
  Clone ID: TFbOSC1445j.C1.o1.fg
atgaaattgaggttgatgagaggtacaaatcctataagatcagcatacattgcagctgataatagggaatgctacaattgtgggcaagtgggtcatgtgagctacaattgtcccacttcccggaacattggtggtaggggatcgattcgaggagggcatggtggaactcgtggtggatttagaggagaccgtggtgtttttgggggaaatcgtggtggtagaggaggtgatcgtggaggtcgtgttggaggtcgtggtaggggcagaggtgttcctcaggccaatgcagttaaggaggatgggaaagctgttaccctaataggtgaacaagtgacacaatgggaggaatggcagaagaacaagaccaatgagagctctaacaccaccactcactttggtaacttcgccaactacgcccaagtgggcgaaggtactcaggcacaggcacttgcatctacatatagacatcctatagattggatcatagactcaggagcatcaaagcatgtcacaggattgcataatactttcacatcatacaccccttatatccactctgaaactatccaaatcgctgatggtacatccaagcctattcatggtatagggtcggtagagtgcacatcatcaatgaacttgtcttctgttctgcatgttccttcctttccagttaaccttctctcaattagctcggctattgatcaactcaagtgcattgttgtatttgatgagaattcttgtctgttccaggagaaggggactgggaggaggattgggactggagtcacgcgtgatgggttgtggtacatcaatcatgaggaactgggactacctgcggtggttggagatgttgagaaggagatcagtttgcttcactatgaggggattattcaccagactacttgtcctggcacccctcctcaaaatggtgtagctgagagaaagaatcggcatttgctagaagtggcaagatctctgatgttccagatgaatgtaccaaagtatctatggagtgaggctgtgatgacagcagcatatcttatcaatcgcatgccttccagaatacttggtatgaagtctcctgccgaactgttattgggtaagcgagagttcaaggttcctccaaaggtgtttggctgtgtttgttttgtgcgagatcaccgaccttctgttggcaagttagatcctcatgcagtaaagtgtgtgtttgttggctatgcttcgagtcagaaggggtataaatgttgggatcccattgggagaagactgtttgtgagtatggatgtgacatttcgtgagtttgagccctattataaaagtaaaggagatcttgatcaatttcttgaggaattctcgactgtcatggaggttgatagtcgagagggggagagagagagaggtgacatacatgaaaaaaatgttggtgacaagaatggagaggcagtagtgattggatcaataccatgctctattgatgatgcgagtaaagtagtggaagtcattgaagatacacaagatgaggatagagaaatggtccctcatgaagaggatggagaagaaggagaagtagttgttgggacaattccatgtcctatggagggagccgaaagggtgaaacaaaaggatgtgctggtttaccaaaggaggcggtttgatagtcagggggagaaaagaaaagggttagtgcaaagtcaaattgaagagttaccacacccaaaatgtccagtccctgaatcctcccagagtctctctcctccagcctccttggcttctcttgagacaattggtaatacttctccaactcttgaacatgtagaattacctcttgtacaacgtagagagactagatccaatgctggtagacctcctatacgtcttggttttgagcatcttagttttatgcatgacattgcaaactatatcacatattctcatgtttcaccagcatacaaaacatttattgcatcattacagacaatgcctataccaaaggattggaagtgtgcaaagcaggatccaaagtggaaagatgcaatgaaagaagagttgaatgcccttgtgaagaataagacttgggagcttgtaaaacttccaccagaaaaaagggcagtgggatgtaagtgggtctttacagtgaagcaaacccctgaagggaaggtggataggtataaagcaaggttagtcgcaaaaggctatagtcaaacatatggaattgactatgatgagacatttgcaccggtggcaaaaatgggtacagtgagagctttggtatcttgtgcggtgaactttgggtggccccttcatcagcttgatgtgaaaaatgcatttctccatggtgatttacatgaggaggtctacatggagatccctccaggatttgggaatagccagacagttggaaaagtatgtaaactcaagaaatccttgtatgggttgaagcagtctccacgtgcatggtttgataggttcaggcatgcagtgtgtgatatggggtattctcagtgtaatggagatcacactgtcttttacaaacatagggggacacacatcaccatcttggctgtgtatgttgatgatatagtgatcactggtgatgatgtagaagaaatcaggtgtctaaaggaaaggctgggaaaggcatttgag

SEQ ID NO: 14880 - DNA, 1407 bp, Oryza sativa
  Clone ID: TFbOSC400358j.C1.o1.fg
atgccacttgaggatgctcatctcatttggaacacactcgaggagagatatgacaagtccgagtgtgatgaggcaaagctcgctatagaagaaccacttgtggagtgctcaaattcatcgacaatttgtaaagagcctcaagtgattctatccaatgagcaagatagtcttgccacattcacctcctcaccaacacatgtctccattaaaggtaatgaaatggtgagtagcgtcaatgtggatacttctacttcctatagtgcttgtcgaactaatcttttgaaggtagaagtatgtgggaaaaaatggccaagtgaagaatttacatctccaagatgctcatcttcacacttggatgaatattcttgcatcatggagaaatcatatttggagaaagaaaatctagagcttaaagctcaacttgtggagctcactagcaagcatgtggacctacaagaaaaatatgatgagcttttgtgctctcatggaaatcttgtggattcacatgccatgctagaagtaactcatgaggtgatcataataacggtaaaatcctatgtgcctcatgttcaagttgactttacatgtgctaactcttgttgctctcaagcaaatatttttctgcgcactacatgtgacttggattatgtagggaaaaaggataaatacatcgatcatggatttgtttgcaatgctcaaccttctcaagataaccgtgaaagcatgctgaagaagcttgagaagggatcaaccgtagcttgcaccaagttctatcaagaagataacaagtccaacaacaagagcaaggggcaagatcaaagcaagaacaaagcttccattacttgcttcaagtgcaagaaaatgggacatcatgtgagagattgcccttggaagaaacagaagaagttgagcaagaatgaggatcttgctcacaagttcttcaaatccaccaaagagggacactttgcctcaagttgtccttgcaagattgatgatgaagccacacttccaagaaagacatcaagaatcaacagaaggaagtgctacggttgcattgagaaggggcatgaaattggattttgtccgcacaagaaggatgatcatagcaatcgatcaagcaagaggcaaaccggcaacaagcaagtcaagaagcaagataaaagcaaaactcaactttgctacaattgccgggcaaagggacatattggtaaaaattgtcccattggtaaaattcctaagccaaacctctcatttcatcacaatttgcttaggaaggccaaaaatggcacttgtgctactagggtgattagttcgctacatgctagcacaaaggccatttgggtccctaaatctcttgtgactaacatccatggacccaacgtgatttgggtaccaaaatatgcttag

SEQ ID NO: 14881 - DNA, 4491 bp, Oryza sativa
  Clone ID: TFbOSC400459j.C1.o7.fg
atgtcttcagtggttggaaaggaggttgtagatgcttcctcacttatcactaagggtgatatgaaggatttgctagaggatttgttgaagatgggcatgataggtcagaggaatgtagcaggagggtctaaactgaaactagaagtgatgccaagtgagttgaggttggaagggagcaaaaattatttgagttggtgtaggagagctcaactaatgttgagagcaaaaggggtggatcattttttgcaagagggttgtgaagagccctctgataaggagagccaagcatggaggacatggaatacaacaaatttaacagttatgctattgaagcatgaggaggacattgtgattggaaataaatggatgcagaggcgaagagtcattcatttcttgaaggggctgaacaaggagtttgaggatagaagagcggctatgttccaccaggctacattgcctactatggaagaggttatttttgctatggtgcaggagatgaggttgaaactgatgagaggcacaaatcttacaagatcagcatacactgtggctgataatagggaatgctacaactgtggacaagtgggtcatgtgagctacaattgtcccactcctcggaacattggcggcagggggttaattcgaggagggcatggtggatttggtggaacccgtggtggatttggaggagaccgtggtggctttgggggaaaccgcggtggtagaggaggtgactggagaggtcgcggtggaggtcgtggtaggacagaggttctcctcaggccaatgcagccattgaggagggagaagggactgggaggaggattgggactggagtcaggcgtgatgggttgtggtacatcaatcatgaggaactggataggttggcatttttgggacggagtagtggtgatggtaaatctatcatcatttttactattaccacctaataactacttaaattatccgcattggctccacctctctcctcccctctccgcgtgggacggtgtccgtggcgtcgcggcatcggccacgggcgggacaactgttcctgtgattaatccggccgtttccgcggcggatccagcatcagtggtgggcgagaaactgaaggcggccgttcttgcagcgaacccagtgttggcggcatcggcaatgggcgggggtagtatcggtcatgttggcggcaggcgaggcggtcgttcttgtgtcagatccggtgtcgacagtgggtggggcggcctatttaatgctatagatactattctaattattgggagaggagctttctcgatcgcaatcatggagctggtgatgggggcaatggaaaacctgatccccaagttgggtgagctgctcaaggaagagtacgtcatgcagtcgggcgtgagagagaagatccagtctgtctcacgggagctcgagagcatccacgctgctctccgcaagatcggcaaggtgccatgggagcatcttgacgatgagttgaggctttgggcgcacgaccttagggaggcgtcgtatgacatggaggacatcatcgactccttccttgtgcgcgtcgacggccatgaggcaagtgaagttcactggttcaaatggttcttggagaagatgaccaaccagttcaacaagatcaaggctagccatgaaatcggtgtcgcaatgaaagaaatcgatgagaagctccaggaggtggctaccaggcatgcgaggtacacaatcgacaatattgccatcaatcctgcaggcccagcaactgtcgatcctcgtctcttgagtatgtacaaaacattggcagagcttgttggaattgaggggcccatggatgagctcatgaagatgttggatattgatttgccgaccaagaagaggaagatcgaaatcgatgtgtccgttagaaaaccgaagatggtatccatctttgggtttggaggacttggcaagaccactcttgccaaagcagtctacgacaagcttaaaccaagttttgattctggggctttcattccggtcggtcagaatcctaatattaggaaagtttttagggatattctcatggatcttgacaagcagtcatacaatgacttaaatctaaagctgctggacgaaaggcaactcatcaacaaactccaggaattcctccaaaaaaagaggtgttttgtagtcattgatgacatatgggataaggattcatggaggttaattagatgtgcactacaagacagtaaccatgaaagcagagtagtcacaactactcgtatttatgaagttgccacacaagtgggcgaagtttacaaaatgcatccactttctcatgatgaatcaaaaaaattattgtacacaagaattattagcggtgaaggtgagtctctccgtagtacatcggttgaggcatgtgacaaaatactaaagaaatgtggcggtgtgcctttagctatcatcataatagctagtctgttggccaataaaccaagggaatactggtccgaagtgtataactctattggtttagaacatggatacaatgatgacgtagataatacaagaaggatattgtctttgagctactatgatttgccgttgcatctgaagccgtgcttattgtacctaagcatatttccggaagattattatattgagaaaaatttgttaatatggaagtggatagcagagggttttgtacatgagaaacaagcagcaaagttagggttatttgaaaccggggagggatatttcaatgagttgataaacagaagcatgatccagccagttgagcatgaatactcagggtacatgtgtggttgccgtgttcatgacatggtacttgatctgatcctcttattgtcaggtgaagaaaactttgtcactgtagtagatggcagtaaggaacatgaactttcatggaaaaatgcccgtagattagctctacaacattggagttttgaagagaacaggaatcagttggctaatatgggtgtgaagcaaacaaggtcccttattatgactgagtgctttgataagaacatgcaattaccgagcttccaagttttacgtgtactagaaatacaaaagcaaggccgttggtggaacattgatggtaaaattaacctgcagcatgttagaaatttacttcaccttaggttcctccatctagattgtattgattctattcctctcatagagcaattcagaaatttgaggtttctacaagtacttcatctgaaggaatctaacatacaagagctgccagagtcagtgggcctgctaacaaaattgctgtccctacgtgttgatattgatgtaagggtgtcgcctggtgtgatcgagaagctgacgtccttacaggagctgtatttgtggccttatagtgatgatacgttccagttcgtgaaggtcctaggcaagctgagggaactgagggtgctgcatgctaaaaaccttaagcttgatggacagggcgagacatcagcactgctggagtccctatgcaatctgcacaagatccaaactttggacattgacctaaatcttaatccaaatgagggtgtcacgtgggatgcaggattcacttcccctcaatgcctccgatacctctgcttggtgtctttgaggtttcatagaatgccagagtggattaattggtcgcttcttccaaacctctcttatcttgaattgagagtgaattttttggaagagctagaccttgaaacccttgggaggttaccaaaactacgatacctccatctgtttatacactgcgacaggatagtaagcatcgggaagattgccggtgctggtgatgcctgcttccaagagttgagatttttgaacacaccctacttgtatgtccggtttgatcagcatggcatcatgtgcagcaaagacgaaaaagctgtcatgccaaacgtcaaaactctcagtttttgtgtttatgtgcggatcctaaaagataccgacatacttggatttgacaagctgtttagcttcgctcatcttggaagaagttcgctccaacaagtccaagttaacatccaatgtcgtggtgctcgtgccatggaagtcgaggaagcggaggcggcgttggcacacgcagccgccatccatcccaaccgtccaacccttcaaatccataagttttcggagggagaaatgcttccccctcacgaggagcctagcagcttctttcctaaagttgttgtcgaaaatctcaatgcgcatgagagaaaggacgacgatcttcgttttgtcctcggacagatgctccagcgtaatccatgcgtaaagaaattcagtgtctccatcaactgtgaaaatgcatgtcttgaggaggtggagaaagcagaggcggctgcgagatatgcagtcgacttccacgcaaaccgcccgacacttgaactggtaaaatatggtgaagataagatggtgttgtctggccaacaccaacaggtatgcaccccaggttgcctatctgattctaatccctag

SEQ ID NO: 14882 - DNA, 903 bp, Oryza sativa
  Clone ID: TFbOSC401179j.C1.o20.fg
atggctcgcgtgtacgtggggaacctggatccgcgcgtgacggcgcgggagatcgaggacgagttccgcgtgtttggggttctgaggagtgtatgggttgctagaaaaccaccaggttttgcctttattgactttgatgaccgcagggatgcagaagatgcaattcgtgatttagatggcaagaatggatggagggttgagctgtcaaccaaagctggtagtggtcgtggccgagatcgttccggtggttctgacatgaagtgctatgaatgtggcgaacctggtcattttgcacgtgaatgccgcttacggattggttctggaggccttggcagtggaagacgccgcagccgcagccgtagccggagtccaaggtaccgcggtcgtagtcgcagccgcagcccaagataccggaggagcccaagctatggtagaaggagttacagcccacgggatcgttctccaaagaggcgcagctacagcaggtcgccaccaccagctcgtgcacgaagctacagccgatcacctccacctcctcgtgctgctctttttgcttgttgcggatgccgtaatatcagaggattacacatgcttctggatgtctccactgcatctggatgcgctgtggtcaccgtgctgcgccactttccaggttcacagctcttctggagcagctcacatatactcctacaacattcactgtatcatgcatcgcgtcaccattgccatgatcacatgcgctacatgtgtaccacccccacacccggcacgggcacaccgatacggcgcttcacatggctttgtgccaaagcggtgtacgctagtaccgaggtcacatggttgcactacgcggctgcagccatcaaacttccatggcatctgcaacagaaaaggcttcaatga

SEQ ID NO: 14883 - DNA, 4260 bp, Oryza sativa
  Clone ID: TFbOSC401225j.C1.o6.np
tgaaactagaattgatgccaaatgagttgaggttggaggggagcaaaaattatttgagttggtgtaggagagcccaactgatgttgagagcaaaaggggtggatcattttttactagagagttgtgaagaaccttctgataaggagagccaagcatggaggacgtggaatactacaaattccactgtggtatcttggttgatgaaccggtggctccttctattggcaggatgatagaagctatccagaatgctgcagttgtatggaagacgctgagcaacatgtattcaggagagggaaatgtaatgatgatggttgaggctcagaacaaagtggagaatttgaagcaagagaggagaacagtcaaagagtacgctagcgagctgcaacagttatgggcaaatcttgaccactatgatcccttacaattgaaacatgaggatgacattgtgattggaaataaatggctgcagaggcgaagagtcattcatttcttgaaggggttgaacaaggagtttgaggataggagagcagctatgttccaccaagctacattgcccactatggaagaggccatttcagcaatggtgcaggaagagatgagattgaggttgatgagaggtacaaattctataagatcagcatacattgcagctgataatagggaatgctacaattgtgggcaagtgggtcatgtgagctacaattgtcccacttcccggaacattggtggtaggggatcgattcgaggagggcatggtggaactcgtggtggatttggaggagaccgtggtggttttgggggaaatcgtggtggtagaggaggtgatcgtggaggtcgtgttaccaatgagagctctaacaccaccactcactttggtaacttcgccaactacgcccaagtgggcgaaggtactcaggcacaggcacttgcatctacatagacatcctatagattggatcatagactcaggagcatcaaagcatgtcacaggattgcataatactttcacatcatacactccttatatccactctgaaactatccaaatcgctgatggtacatccaagcctattcatggtatagggtcggtagagtgcacatcatcaatgaacttgtcttctgttctgcatgttccttcctttccagttaacattctctcagttagctcggctattgatcaactcaagtgcattgttgtatttgatgagaattcttgtctgttccaggagaaggggactgggaggaggattgggactggagtcaggcgtgatgggttgtggtacatcaatcatgaggaactgggactagctgcggtggttggagatgttgagaaggagatcagtttgcttcactgtcagttaggacatccatcttttgagattttgagtaagttgtatccagacctctttagtagagtggataagcatagattggtgtgtgatgcttgtgagcttggcaaacatactcgctctacatatgttggaattggtcttcgtaactgtgagcccttcatattaatacattctgatgtttgggaaccatgcccagttacttctgtgagtggtttcaagtggtttgtcacctttattgattgtcacactcgtatgacttggatttatatgcttaaacacaaaagtgaggtccttcgttgctttcaagactttcataaattagtgacaactcagtttgatgcaaaagttaagattattcggactgataatggaacagaatatatcaataatgaatttgtgtcatatgtctcagatgaggggattattcaccagactacttgtcctggcacccctcctcaaaatggtgtagctgagagaaagaatcggcatttgctagaagtggcaagatctctgatgttccagatgaatgtaccaaagtatctatggagtgaggctgtgatgacagcagcatatcttatcaatcgcatgccttctagaatacttggtatgaagtctcctgccgaactgttattgggtaagcgagagttcaaggttcctccaaaggtgtttggctgtgtttgttttgtgcgagatcaccgaccttctgttggcaagttagatcctcatgcagtaaagtgtgtgtttgttggctatgcttcgagtcagaaggggtataaatgttgggatcccattgagagaagactgtttgtgagtatggatgtgacatttcgtgagtttgagccctattataaaagtaaaggagatcttgaccaatttcttgaggaattctcgactgtcatggaggttgatagtcgagagggggagagagagagagaggtgacatacatgaaaaaaatgttggtgacaagaatggagaggcagtagtgattggatcaataccatgctctattgatgatgcgagtaaagaagatagagaaatggtccctcatgaagaggatggagaagaaggagaagtagttgttgggacaattccatgtcctatggagggagccgaaagggtgaaacaaaaggatgtgctagtttaccaaaggaggcggtttgatagtcagggggagaaaagaaaagggttactcttgaacatgtagaattacctcttgcacaacgtagagagactagatctaatgctagtagacctcctatacgtcttggttttgagcatcttagttctatgcatgacattgcaaactatatcacatattctcatgtttcaccagcatacaaaacatttattgcatcattacagacagtgcctataccaaaggattggaagtgtgcaaagcaggatccaaagtggaaagatgcaatgaaagaagagttgaatgcccttgtgaagaataagacttgggagcttgtaaaacttccaccagaaaaaaggacagtgggatgtaagtgggtctttacagtgaagcaaacccctgaagggaaggtggataggtataaagcaaggttagttgcaaaaggctacagtcaaacatatggaattgactatgatgagatatttgcaccagtggcaaaaatgggtacagtgagaggtttggtatcttgtgcggtgaactttgggtggccccttcatcagcttgatgtgaaaaatgcatttctccatggtgatttacatgaggaggtctacatggagatccctccaggatttgggaatagccagacagttggaaaagtatgtaaactcaagaaatccttgtatgggttgaagcagtctccacgtgcatggtttgataggttcaggcatgcagtgtgtgatatggggtattctcagtgtaatggagatcacactatcttttacaaacatagggggacacacatcaccatcttggctgtgtatgttgatgatatagtgatcactggtgatgatgtagaagaaatcaggtgtctaaaggaaaggctgggaaaggcatttgaggtgaaggatcttggtcctcttcgctacttccttggaattgaaattgctcgttcatcaaaggggattgttctctctcagaggaagtatgttttggatctgttgacagatataggaatgcttgggtgtcgtgcaagtactacgcctattgataggaatcaccaattgtgtgctcaatcaggtgatcccgttgataaggaagcataccaaagactggtgggacgcttgatctatctttgccatacaagacctgatatttcctatgcggttagtgttgtgagtaggtatatgcatgatcctcgaactggtcacttggatgttgttcataagattctcagatatctgaaagggactcctggaaagggattgtggtttaggaagaatgggcatctaaatgtggaaggatattgtgatgctgattgggcgagtagtatggatgatagaagatctacatcaggttattgtgtgtttgttggtggtaatcttgtttcttggcgaagcaagaagcaggcagtggtggctcggtctaccgcagaagcagaatacagagctatggctttgagcttgagtgagatgttgtggatgaggagcttgttgactgaattgcgagtgctaagaagtgacactgtgatgcttcattgtgacaataaatcagccatcagcattgcaaacaaccctgttcagcatgatcgcactaaacatgtggagattgataggttcttcattaaggagaagattgatagcggggtgattaggttggagtatattaagtcatgtgaacaactagctgattgtctaacaaaggggttaggtcctagtgagattcaatcaatatgtaacaagatgggtatgattgatatcttttgcccatct

SEQ ID NO: 14884 - DNA, 3249 bp, Oryza sativa
  Clone ID: TFbOSC401276j.C1.o5.fg
atgtcttcaggggttggaaaggaggttgtagatgcctcctcggtggttactaagggtgatatgaaagatttgctagagaatttgttgaagatgggcatgataggtccgaagagtgtagcagggggattcgaactgaaactagaattgatgccaaatgagttgaggttggaatggagcaaaaattatttgagttggtgtaggagagcccaattaatgttgagagcaaagggggtggatcattttttgcaagagagttgtgaagagccttctgataaggagagccaagcatggagaatgtggaatacaacaaattccaccgtggtatcttggttgatgacctcggtggctccttctattagtaggatgatagagactattcagaatgcagcaattgtgtggaagacattgagcaacatgtattcaggagagggaaatgtaatgatgatggttgaggctcagaacaaaatgcagaggcaaagagtcattcatttcttaaaggggctgaacaaggagtttgaggacagaagagcggctatgttctaccaggctacattgcccactatggaagaggctatttctgctatggtgcaggaggagatgaggttgaaactgatgagaggtacaaatcctacaagatcagcatacactgtggctgataatagagaatgctacaactgtggacaagtgggtcatgtgagctacaattgtcccactcctcggaacattggcggtagggggttgattcgaggagggtatggtggatttggtggaacccgtggtggatttggaggagaccgtggtgactttggggggaaccacagtggtagaggaggtcgtggtggagatcgtggtggtggaggtcgtggtgaacaggtgacacagtgggaggaatggcagaagaacaagatcaatgagagctccaacaccaccactcactttggtaacttcgccaactacgctcaagtgggcgaaggtattcaggcacaggcacttgcatctacatacagacatcctatagattggatcatagactcaggagcatcaaagcatttcacaggattgcataataccttcacatcatacaccccttatgtccactctgaaactatccaaatcgctgatggtacatccaaacctattcatggtatagggtcagtagagtgcacatcatcaataaacttatcctctgacttgcatgttccttcctttccagtaaaccttctctcagttagctcagctattgaccaactcaagtgcattgttgtatttgatgagaactctcatctgttccaggagaaggggactgggaggaggattgggactagagtcaggtgtgatgggttgtggtacatcaatcatgaggaactggggctagctgcggtggttggaaatgttgagaaggagatcagtttgcttcattgtcagttaggacatccatcttttgagattttgagtaagttgtatctagatctctttagtaaagtggataagcatagattggtgtgtgatgcttgtgagcttggaaaacatactcggtctacatatgttgggattggtcttcgtaactgtgagcctttcatattaatacattctgatgtttggggaccatgcccagttacttctgtgagtggttttaagtggtttgtcacctttattgattgccacactcgtatgacttggatttatatgcttaagcacaatagtgaggtccttcgttgctttcaggactttcataaattagtgacaactcagtttgatgcaaaagttaagattattcggactgataatggaacagaatatatcaataatgaatttgtgtcatatatctcagatgaggggattattcaccagactagtacccctcctcaaaatggtgtagctgagagaaagaatcgacatttgctagaagtggcaagatctttaatgttccagatgaatgtgccaaagtacctatggagtgaggctgtgatgacagctgcatatcttatcaatcgcatgccttctagaatacttggtatgaagtcccctgttgaacttttattgggtaagcgagagttcaaggtccctccaaaggtgtttggttgtgtttgctttgtgcgagatcatcgaccttctattggcaagttggatcctcatgcagtaaagtgtgtgtttgttggctatgcttcaagtcagaaggggtataaatgttgggatcccattgggagaagactgtttgtgagtatggatgtgacatttcgtgagtttgagccctattataaaagtaaaggagatcttgaccaatttcttgaggaattctcgactgtcatggaggttgatagtcgagagggggagatagagagaggtgacacacataggaaaaatgttagtgacaagaatggggagacagtggtggttggatcaataccatgctctattgacaatgcaagtaaagaagcagtggaagttattggagatacacaagacaaggatagagaaatggttcttcatgaggaggatggagaagatggagaagatgaagaagtggttgttgggacaattccatgtcctatggagcgagccgaaaagacagtgcccataccaaaggattggaagtgtgcaaaacaagatccaaggtggaaagatgcaatgagagaagagttgaatgcccttatgaagaataagacttgggagcttgtaaaacttccaccaggaaaaaaggcagtgggatgtaagtgggtttttacagtgaagcaaactcctgaagggaaggtggataggtataaagcaagattagtcgcaaaaggctacagtcaaacatatggaattgactatgatgagacatttgcaccggtggcaaaaatgggtacagtgagaactttagtatcttgtgcagtgaactttgggtggcccctccatcagcttgatgtgaaaaatgcatttcttcatggtgatttatatgaggaggtctacatggagattcctccaggatttgggaatagccagacagttggaaaaatatgtaaactcaagaaatccttgtatgggttgaagcagtttccacgtgcgtggtttgaaagattcaggtgcgcagtgtgtgatatggggtattctcagtgtaatggagatcacacggtattctacaaacatagggggacatacatcaccatcttggctgtgtatgttgatgatatagtgatcaccggtgatgatgtagaagaaatcaggtgcctgaaggaatggacacctaaatgtagaaggatattgtga

SEQ ID NO: 14885 - DNA, 4665 bp, Oryza sativa
  Clone ID: TFbOSC401564j.C1.o7.fg
atgtcttctggggagggaaaggaggttgtggatacttcattgcttgttactaaaggtgatatgaaaggtttgctagaggatttgctgaagatgggcatgataggtcctaggaatgcggctggagtgtctgaagtgaaactagaattgatgccaaatgagttgaggttggaggggagcaaaaattatttgagttggtgtaggagagcccaactgatgttgagagcaaaaggggtggatcattttttactagagagttgtgaagaaccttctgataaggagagccaagcatggaggacgtggaatactacaaattccactgtggtatcttggttgatgaccttggtggctccttctattggcaggatgatagaagctatccagaatgctgcagttgtatggaagacgctgagcaacatgtattcaggagagggaaatgtaatgatgatggttgaggctcagaacaaagtggagaatttgaagcaagaggggagaacagtccaagagtacgctagcgagctgcaacagttatgggcagatcttgatcactatgatcccctactattgaaacatgaggatgacattgtgattggaaataaatggctgcagaggcgaagagtcattcatttcttgaaggggttgaacaaggagtttgaggataggagagcagctatgttccaccaagctacattgcccactatggaagaggccatttcagcaatggtgcaggaagagatgagattgaggttgatgagaggtacaaatcctataagatcagcatacattgcagctgataatagggaatgctacaattgtgggcaagtgggtcatgtgagctacaattgtcccacttcccggaacattggtggtaggggatcgattcgaggagggcatggtggaactcgtggtggatttggaggagaccgtggtggttttgggggaaatcgtgggggtagaggaggtgatcgtggaggtcgtgttggaggtcgtggtaggggcagaggtgttcctcaggccaatgcagctacggaggatgggaaagctgttaccctaataggtgaacaagtgacacaatgggaggaatggcagaagaacaagaccaatgagagctctaacaccaccactcactttggtaacttcgccaactatgcccaagtgggcgaaggtactcaggcacaagcacttgcatctacatatagacatcctatagattggatcatagactcaggagcatcaaagcatgtcacaggattgcataatactttcacatcatacaccccttatatccactctgaaactatccaaatcgctgatggtacatccaagcctattcatggtatagggtcggtagagtgcacatcatcaatgaacttgtcttctgttctgcatgttccttcctttccagttaaccttctctcagttagctcggctattgatcaactcaagtgcattgttgtatttgatgagaattcttgtctgttccaggagaagtggactgggaggaggattgggactggagtcaggcgtgatgggttgtggtacatcaatcatgaggaactgggactagctgcggtggttggagatgttgagaaggagatcagtttgcttcactgtcagttaggacatccatcttttgagattttgagtaagttgtatccagacctctttagtagagtggataagcatagattggtgtgtgatgcttgtgagcttggcaaacatactcgctctacatatgttggcattggtcttcgtaactgtgagctcttcatattaatacattctgatgtttggggaccatgcccagttacttctgtgagtggtttcaagtggtttgtcacctttattgattgtcacactcgtatgacttggatttatatgcttaaacacaaaagtgaggtccttcgttgcttccaagactttcataaattagtgacaactcagtttgatgcaaaagttaagattattcggactgataatggaacagaatatatcaataatgaatttgtgtcatatgtctcagatgaggggattattcaccagactacttgtcctggcacccctcctcaaaatggtgtagctgagagaaagaatcggcatttgctagaagtggcaagatctctgatgttccagatgaatgtaccaaagtatctatggagtgaggctgtgatgacagcagcatatcttatcaatcgcatgccttccagaatacttggtatgaagtctcctgccgaactgttattgggtaagcgagagttcaaggttcctccaaaggtgtttggctgtgtttgttttgtgcgagatcaccgaccttctgttggcaagttagatcctcatgcagtaaagtgtgtgtttgttggctatgcttcgagtcagaaggggtataaatgttgggatcccattgggagaagactgtttgtgagtatggatgtgacatttcgtgagtttgagccctattataaaagtaaaggagatcttgaccaatttcttgaggaattctcgactgtcatggaggttgatagtcgagagggggagagagagagaggtgacatacatgaaaaaaatgttggtgacaagaatggagaggcagtagtgattggatcaataccatgctctattgatgatgcgagtaaagaagtagtggaagtcattgaagatacacaagatgaggatagagaaatggtccctcatgaagaggatggagaagaaggagaagtagttgttgggacaattccatgtcctatggagggagccgaaagggtgaaacaaaaggatgtgctagtttaccaaaggaggcggtttgatagtcagggggagaaaagaaaagggttggtgcaaagtcaaattgaagagttaccacaccaaaaatgtccagtccctgaatcctcccagagtctctctcctccagcctccttggcttctcttgagacaattggtaatacttctccaactcttgaacatgtagaattacctcttgcacaacgtagagagactagatccaatgctggtagacctcctatacgtcttggttttgagcatcttagttctatgcatgacattgcaaactatatcacatattctcatgtttcaccagcatacaaaacatttattgcatcattacagacagtgcctataccaaaggattggaagtgtgcaaagcaggatccaaagtggaaagatgcaatgaaagaagagttgaatgcccttgtgaagaataagacttgggagcttgtaaaacttccaccagaaaaaagggcagtgggatgtaagtgggtctttacagtgaagcaaacccctgaagggaaggtggatatgtataaagcaaggttagtcgcaaaaggctatagtcaaacatatggaattgactatgatgagacatttgcaccggtggcaaaaatgggtacagtgagagctttggtatcttgtgcggtgaactttgggtggccccttcatcagcttgatgtgaaaaatgcatttctccatggtgatttacatgaggaggtctacatggagatccctccaggatttgggaatagccagacagttggaaaagtatgtaaactcaagaaatccttgtatgggttgaagcagtctccacgtgcatggtttgataggttcaggcatgcagtgtgtgatatggggtattctcagtgtaatggagatcacactgtcttttacaaacatagggggacacacatcaccatcttggctgtgtatgttgatgatatagtgatcactggtgatgatgtagaagaaatcaggtgtctaaaggaaaggctgggaaaggcatttgaggtgaaggatcttggtcctcttcgctacttccttggaattgaaattgctcgttcatcaaaggggattgttctctctcagaggaagtatgttttggatctgttgacagatacaggaatgcttgggtgtcgtgcaagtactacgcctattgataggaatcaccaattgtgtgctcaatcaggtgatcccgttgataaggaagcataccaaagactggtgggacgcttgatctatctttgccatacaagacctgatatttcctatgcggttagtgttgtgagtaggtatatgcatgatcctcgaactggtcacttggatgttgttcataagattctcagatatctgaaagggactcctggaaagggattgtggtttaggaagaatgggcatctaaatgtggaaggatattgtgatgctgattgggcgagtagtatggatgatagaagatctacatcaggttattgtgtgtttgttggtggtaatcttgtttcttggcgaagtaagaagcaggcagtggtggctcggtctaccgcagaagcagaatacagagctatggctttgagcttcagtgagatgttgtggatgaggagcttgttgactgaattgcgagtgctaagaagtgacactgtgatgcttcattgtgacaataaatcagccatcagcattgcaaacaaccctgttcagcatgatcgcactaaacatgtggagattgataggttcttcattaaggagaagattgatagcggggtgcttaggttggagtatattaagtcatgtgaacaactagctgattgtctaacaaaggggttaggtcctagtgagattcaatcagtatgtaacaagatgggtatgattgatatcttttgctcatcttga

SEQ ID NO: 14886 - DNA, 4944 bp, Oryza sativa
  Clone ID: TFbOSC415902j.C1.o18.fg
atgtcttctggggagggaaaggaggttgtggatacttccttgcttgttactaaaggtgatatgaaaggtttgctagaggatttgctgaagatgggcatgataggtcctaggaatgcggctggagtgtctgcagtgaaactagaattgatgccaaatgagttgaggttggaggggagcaaaaattatttgagttggtgtaggagagcccaactgatgttgagagcaaaagggatggatcattttttactagagagttgtgaagaaccttctgataaggagagccaagcatggaggacgtggaatactacaaattccactgtggtatcttggttgatgacctcggtggctccttctattggcaggatgatagaagctatccagaatgctgcagttgtatggaagacgctgagcaacatgtattcaggagagggaaatgtaatgatgatggttgaggctcagaacaaagtggagaatttgaagcaagaggggagaacagtccaagagtatgctagcgagctgcaacagttatgggcagatcttgatcactatgatctcctacaattgaaacatgaggatgacattgtgattggaaataaatggctgcagaggcgaagagtcattcatttcttgaaggggttgaacaaggagtttgaggataggagagcagctatgttccaccaagctacattgcccactatggaagaggccatttcagcaatggtgcaggaagagatgagattgaggttgatgagaggtacaaatcctataagatcagcatacattgcagctgataatagggaatgctacaattgtgggcaagtgggtcatgtgagctacaattgtcccacttcccggaacattggtggtaggggatcgattcgaggagggcatggtggaactcgtggtggatttagaggagaccgtggtggttttgggggaaatcgtggtggtagaggaggtgatcgtggaggtcgtgttggaggtcgtggtaggggcagaggtgttcctcaggccaatgcagttaaggaggatgggaaagctgttaccctaataggtgaacaagtgacacaatgggaggaatggcagaagaacaagaccaatgagagctctaacaccaccactcactttggtaacttcgccaactacgcccaagtgggcgaaggtactcaggcacaggcacttgcatctacatatagacatcctatagattggatcatagactcaggagcatcaaagcatgtcacaggattacataatactttcacatcatacaccccttatatccactctgaaactatccaaatcgctgatggtacatccaagcctattcatggtatagggtcggtagagtgcacatcatcaatgaacttgtcttctgttctgcatgttccttcctttccagttaaccttctctcagttagctcggctattgatcaactcaagtgcattgttgtatttgatgagaattcttgtctgttccaggagaagaggactgggaggaggattgggactggagtcaggcgtgatgggttgtggtacatcaatcatgaggaactgggactagctgcggtggttggagatgttgagaaggagatcagtttgcttcactgtcagttaggacatccatcttttgagattttgagtaagttgtatctagacctctttagtagagtggataagcatagattggtgtgtgatgcttgtgagcttggcaaacatactcgctctacatatgttggaatcggtcttcgtaactgtgagcccttaatattaatacattctgatgtttggggaccatgcccagttacttctgtgagtggtttcaagtggtttgtcacctttattgattgtcacactcgtatgacttggatttatatgcttaaacacaaaagtgaggtccttcgttgcttccaagactttcataaattagtgacaactcagtttgatgcaaaagttaagattattcggactgataatggaacagaatatatcaataatgaatttgtgtcatatgtctcagatgaggggattattcaccagactacttgtcctggcacccctcctcaaaatggtgtagctgagagaaagaatcggcatttgctagaagtggcaagatctctgatgttccagatgaatgtaccaaagtatctatggagtgaggctgtgatgacagcagcatatcttatcaatcgcatgccttccagaatacttggtatgaagtctcctgccgaacagttattgggtaagcgagagttcaaggttcctccaaaggtgtttggctgtgtttgttttgtgcgagatcaccgaccttctgttggcaagttagatcctcatgcagtaaagtgtgtgtttgttggctatgcttcgagtcagaaggggtataaatgttgggatcccattgggagaagactgtttgtgagtatggatgtgacatttcgtgagtttgagccctattataaaagtaaaggagatcttgaccaatttcttgaggaattctcgactgtcatggaggttgatagtcgagagggggagagagagagaggtgacatacatgaaaaaaatgttggtgacaagaatggagaggcagtagtgattggatcaataccatgctctattgatgatgcgagtaaagtagtggaagtcattgaagatacacaagatgaggatagagaaatggtccctcatgaagaggatggagaagaaggagaagtagttgttgggacaattccatgtcctatggagggagccgaaagggtgaaacaaaaggatgtgctggtttaccaaaggaggcggtttgatagtcagggggagaaaagaaaagggttagtgcaaagtcaaattgaagagttaccacacccaaaatgtccagtccctgaatcctcccagagtctctctcctccagcctccttggcttctcttgagacaattggtaatacttctccaactcttgaacatgtagaattacctcttgcacaacgtagagagactagatccaatgctggtagacctcctatacgtcttggttttgagcatcttagttctatgcatgacattgcaaactatatcacatattctcatgtttcaccagcatacaaaacatttattgcatcattacagacaatgcctataccaaaggattggaagtgtgcaaagcaggatccaaagtggaaagatgcaatgaaagaagagttgaatgaccttgtgaagaataagacttgggagcttgtaaaacttccaccagaaaaaagggcagtgggatgtaagtgggtctttacagtgaagcaaacccctgaagggaaggtggataggtataaagcaaggttagtcgcaaaaggctacagtcaaacatatggaattgactatgatgagacatttgcaccggtggcaaaaatgggtacagtgagagctttggtatcttgtgcggtgaactttgggtggccccttcatcagcttgatgtgaaaaatgcatttctccatggtgatttacatgaggaggtctacatggagatccctccaggatttgggaatagccagacagttggaaaagtatgtaaactcaagaaatccttgtatgggttgaagcagtctccacgtgcatggtttgataggttcaggcatgcagtgtgtgatatggggtattctcagtgtaatggagatcacactgtcttttacaaacatagggggacacacatcaccatcttggctgtgtatgttgatgatatagtgatcactggtgatgatgtagaagaaatcaggtgtctaaaggaaaggctgggaaaggcatttgaggtgaaggatcttggtcctcttcgctacttccttggaattgaaattgctcgttcatcaaaggggattgttctatctcagaggaagtatgttttggatctattgacagatacaggaatgcttgggtgtcgtgcaagtactacgcctattgataggaatcaccaattgtgtgctcaatcaggtgatcccgttgataaggaagcataccaaagactggtgggacgcttgatctatctttgccatacaagacctgatatttcctatgcggttagtgttgtgagtaggtatatgcatgatcctcgaactggtcacttggatgttgttcataagattctcagatatctgaaagggactcctggaaagggattgtggtttaggaagaatgagcatctaaatgtggaaggatattgtgatgctgattgggcgagtagtatggatgatagaagatctacatcaggttattgtgtgtttgttggtggtaatcttgtttcttggcgaagcaaaaagcaggcagtggtggctcggtctaccgcagaagcagaatacagagctatggctttgagcttgagtgagatgttgtggatgaggagcttgttgactgaattgcgagtgctaagaagtgacattgtgatgcttcattgtgacaataaatcagccatcagcattgcaaacaaccctgttcagcatgatcgcactaaacatgtggagattgataggttcttcattaaggagaagattgatagcggggtgcttagtttggagtatattaagtcatgtgaacaactagctgattgtctaacaaaggggcaaatcgtatacagctccggtggccggattaagcacacggcagctgttccaatttgtggctacacagaccagatcgaggtgtgtgcacaacaccttgtggccaaccgggattcctatcgtcttaagcacattgcctaccaaatccatgatatgaacatgtgcctcgtcgtctctaaatgtggccaagaggagcggctgtctgtggtgagctgcgtgtgccttgatgaaaaggggatcggaggtcagggaccgccatgcctggcagataacacggaggcagcagagctccttggctgggagccgcaccaggacgtcgaacagcacgtccaaagggaggatgccagaatttga

SEQ ID NO: 14887 - DNA, 5142 bp, Oryza sativa
  Clone ID: TFbOSC900306j.C1.o19.fg
atgggatggggcgtggcatgccacacgccgcctgacacacgggcagcaagtgggcatgttgccgtcgtcctatcaatcacttggccggtcacagaccggttctttgttattattgatgacatatgggataggaaatcatgggaattaatcagatgtgcagtgcaggatagtaagcttggaagtagagtagttgtaactactcgtatttttgaaattgccacacatagaggagagaaggagaagaaagaaatgtcttcagtggttggaaaggaggttgtagatgcttcctcacttatcactaagggtgatatgaaggatttgctagaggatttgttgaagatgggcatgataggtcagaggaatgtagcaggagggtctaaactgaaactagaagtgatgccaagtgagttgaggttggaagggagcaaaaattatttgagttggtgtaggagagctcaactaatgttgagagcaaaaggggtggatcattttttgcaagagggttgtgaagagccctctgataaggagagccaagcatggaggacatggaatacaacaaatttaacagttatgctattgaagcatgaggaggacattgtgattggaaataaatggatgcagaggcgaagagtcattcatttcttgaaggggctgaacaaggagtttgaggatagaagagcggctatgttccaccaggctacattgcctactatggaagaggttatttttgctatggtgcaggagatgaggttgaaactgatgagaggcacaaatcttacaagatcagcatacactgtggctgataatagggaatgctacaactgtggacaagtgggtcatgtgagctacaattgtcccactcctcggaacattggcggcagggggttaattcgaggagggcatggtggatttggtggaacccgtggtggatttggaggagaccgtggtggctttgggggaaaccgcggtggtagaggaggtgactggagaggtcgcggtggaggtcgtggtaggacagaggttctcctcaggccaatgcagccattgaggagggagaagggactgggaggaggattgggactggagtcaggcgtgatgggttgtggtacatcaatcatgaggaactgtaaatttcggcattggctccacctctctcctcccctctccgcgtgggacggtgtccgtggcgtcgcggcatcggccacgggcgggacaactgttcctgtgattaatccgggccgtttccgcggcggatccagcatcagtggtgggcgagaaactgaaggcggccgttcttgcagcgaacccagtgttggcggcatcggcaatgggcgggggagaggagctttctcgatcgcaatcatggagctggtgatgggggcaatggaaaacctgatccccaagttgggtgagctgctcaaggaagagtacgtcatgcagtcgggcgtgagagagaagatccagtctgtctcacgggagctcgagagcatccacgctgctctccgcaagatcggcaaggtgccatgggagcatcttgacgatgagttgaggctttgggcgcacgaccttagggaggcgtcgtatgacatggaggacatcatcgactccttccttgtgcgcgtcgacggccatgaggcaagtgaagttcactggttcaaatggttcttggagaagatgaccaaccagttcaacaagatcaaggctagccatgaaatcggtgtcgcaatgaaagaaatcgatgagaagctccaggaggtggctaccaggcatgcgaggtacacaatcgacaatattgccatcaatcctgcaggccccagcactgtcgatcctcgtctcttgagtatgtacaaaacattggcagagcttgttggaattgaggggcccatggatgagctcatgaagatgttggatattgatttgccgaccaagaagaggaagatcgaaatcgatgtgtccgttagaaaaccgaagatggtatccatctttgggtttggaggacttggcaagaccactcttgccaaagcagtctacgacaagcttaaaccaagttttgattctggggctttcattccggtcggtcagaatcctaatattaggaaagtttttagggatattctcatggatcttgacaagcagtcatacaatgacttaaatctaaagctgctggacgaaaggcaactcatcaacaaactccaggaattcctccaaaaaaagaggtgttttgtagtcattgatgacatatgggataaggattcatggaggttaattagatgtgcactacaagacagtaaccatgaaagcagagtagtcacaactactcgtatttatgaagttgccacacaagtgggcgaagtttacaaaatgcatccactttctcatgatgaatcaaaaaaattattgtacacaagaattattagcggtgaaggtgagtctctccgtagtacatcggttgaggcatgtgacaaaatactaaagaaatgtggcggtgtgcctttagctatcatcataatagctagtctgttggccaataaaccaagggaatactggtccgaagtgtataactctattggtttagaacatggatacaatgatgacgtagataatacaagaaggatattgtctttgagctactatgatttgccgttgcatctgaagccgtgcttattgtacctaagcatatttccggaagattattatattgagaaaaatttgttaatatggaagtggatagcagagggttttgtacatgagaaacaagcagcaaagttagggttatttgaaaccggggagggatatttcaatgagttgataaacagaagcatgatccagccagttgagcatgaatactcagggtacatgtgtggttgccgtgttcatgacatggtacttgatctgatcctcttattgtcaggtgaagaaaactttgtcactgtagtagatggcagtaaggaacatgaactttcatggaaaaatgcccgtagattagctctacaacattggagttttgaagagaacaggaatcagttggctaatatgggtgtgaagcaaacaaggtcccttattatgactgagtgctttgataagaacatgcaattaccgagcttccaagttttacgtgtactagaaatacaaaagcaaggccgttggtggaacattgatggtaaaattaacctgcagcatgttagaaatttacttcaccttaggttcctccatctagattgtattgattctattcctctcatagagcaattcagaaatttgaggtttctacaagtacttcatctgaaggaatctaacatacaagagctgccagagtcagtgggcctgctaacaaaattgctgtccctacgtgttgatattgatgtaagggtgtcgcctggtgtgatcgagaagctgacgtccttacaggagctgtatttgtggccttatagtgatgatacgttccagttcgtgaaggtcctaggcaagctgagggaactgagggtgctgcatgctaaaaaccttaagcttgatggacagggcgagacatcagcactgctggagtccctatgcaatctgcacaagatccaaactttggacattgacctaaatcttaatccaaatgagggtgtcacgtgggatgcaggattcacttcccctcaatgcctccgatacctctgcttggtgtctttgaggtttcatagaatgccagagtggattaattggtcgcttcttccaaacctctcttatcttgaattgagagtgaattttttggaagagctagaccttgaaacccttgggaggttaccaaaactacgatacctccatctgtttatacactgcgacaggatagtaagcatcgggaagattgccggtgctggtgatgcctgcttccaagagttgagatttttgaacacaccctacttgtatgtccggtttgatcagcatggcatcatgtgcagcaaagacgaaaaagctgtcatgccaaacgtcaaaactctcagtttttgtgtttatgtgcggatcctaaaagataccgacatacttggatttgacaagctgtttagcttcgctcatcttggaagaagttcgctccaacaagtccaagttaacatccaatgtcgtggtgctcgtgccatggaagtcgaggaagcggaggcggcgttggcacacgcagccgccatccatcccaaccgtccaacccttcaaatccataagttttcggagggagaaatgcttccccctcacgaggagcctagcagcttctttcctaaagttgttgtcgaaaatctcaatgcgcatgagagaaaggacgacgatcttcgttttgtcctcggacagatgctccagcgtaatccatgcgtaaagaaattcagtgtctccatcaactgtgaaaatgcatgtcttgaggaggtggagaaagcagaggcggctgcgagatatgcagtcgacttccacgcaaaccgcccgacacttgaactggtaaaatatggtgaagataagatggtgttgtctggccaacaccaacaggtcttaaagagaaccaagactggctttcacccggcagccacactagagggggtgagacggcacggcaacgccctcaggaggctcgaacgccaccattgccggcccggccaaggccgggcttggttttcacccgtcgtccaccgcctgctgatcaaaagctgttctccattgctccaactaccaacccttcaccgtcagtacgtgaacatcgctgcaccaacgcccctagttggccagcctccactgcctccatgtaggcctcccactcgccgccaccggatagctggcaagccactgccaccacctgtcgtgcctccttgcgccgtactggcttccgccgtcaccgaccacacctcctcgtgccgtgccaactttcacgaccactgtggcacagccggcagcctccgctgccacctgcacgcgctgccttgtcgtcctccaccgttgcctgcatgtgccggctgtgccttgccgtcctccgccgcccctgcacgcgtcggtcgcccctcatcggcctccattgccgcctacatgcccacgtcggcctccgccgccacctggacgctcgcccttgctgcgagccgtttgtcaatgacaaaatttggtaatatcagcatcggagatgaagattag

SEQ ID NO: 14888 - DNA, 1578 bp, Oryza sativa
  Clone ID: TFbOSC900373j.C1.o7.fg
atggaatgccgaggatcaagaggatttggttcttcgatgaacatcaagtcaaaatccaaagtgggcattgatcaaagcaaaggagctgtttttgaaaatggctctactcgggacagagagtcccacctggaggttctgtccggaacttcctggcaccaaggtgaggttgaaaaatttcataagtgctgcccagaagttcctggcacttttacccggaagctcctggcaggtttccagttcaaacttgatgctcatctcatttggaacacactcgaggagagatatgacaagtccgagtgtgatgaggcaaagctcgctatagaagaaccacttgtggagtgctcaaattcatcgacaatttgtaaagagcctcaagtgattctatccaatgagcaagatagtcttgccacattcacctcctcaccaacacatgtctccattaaaggtaatgaaatggtagaagtatgtgggaaaaaatggccaagtgaagaatttacatctccaagatgctcatcttcacacttggatgaatattcttgcatcatggagaaatcatatttggagaaagaaaatctagagcttaaagctcaacttgtggagctcactagcaagcatgtggacctacaagaaaaatatgatgagcttttgtgctctcatggaaatcttgtggattcacatgccatgctagaagtaactcatgaggtgatcataataacggtaaaatcctatgtgcctcatgttcaagttgactttacatgtgctaactcttgttgctctcaagcaaatatttttctgcgcactacatgtgacttggattatgtagggaaaaaggataaatacatcgatcatggatttgtttgcaatgctcaaccttctcaagataaccgtgaaagcatgctgaagaagcttgagaagggatcaaccgtagcttgcaccaagttctatcaagaagataacaagtccaacaacaagagcaaggggcaagatcaaagcaagaacaaagcttccattacttgcttcaagtgcaagaaaatgggacatcatgtgagagattgcccttggaagaaacagaagaagttgagcaagaatgaggatcttgctcacaagttcttcaaatccaccaaagagggacactttgcctcaagttgtccttgcaagattgatgatgaagccacacttccaagaaagacatcaagaatcaacagaaggaagtgctacggttgcattgagaaggggcatgaaattggattttgtccgcacaagaaggatgatcatagcaatcgatcaagcaagaggcaaaccggcaacaagcaagtcaagaagcaagataaaagcaaaactcaactttgctacaattgccgggcaaagggacatattggtaaaaattgtcccattggtaaaattcctaagccaaacctctcatttcatcacaatttgcttaggaaggccaaaaatggcacttgtgctactagggtgattagttcgctacatgctagcacaaaggccatttgggtccctaaatctcttgtgactaacatccatggacccaacgtgatttgggtaccaaaatatgcttag

SEQ ID NO: 14889 - DNA, 2832 bp, Oryza sativa
  Clone ID: TFbOSC9929j.C1.o2.fg
atgtcttcaggggttggaaaggaggttgtagatgcctcctcggtggttactaagggtgatatgaaagatttgctagagaatttgttgaagatgggcatgataggtccgaagagtgtagcagggggattcgaactgaaactagaattgatgccaaatgagttgaggttggaatggagcaaaaattatttgagttggtgtaggagagcccaattaatgttgagagcaaagggggtggatcattttttgcaagagagttgtgaagagccttctgataaggagagccaagcatggagaatgtggaatacaacaaattccaccgtggtatcttggttgatgacctcggtggctccttctattagtaggatgatagagactattcagaatgcagcaattgtgtggaagacattgagcaacatgtattcaggagagggaaatgtaatgatgatggttgaggctcagaacaaaatgcagaggcaaagagtcattcatttcttaaaggggctgatcaaggagtttgaggacagaagagcggctatgctctaccaggctacattgcccactatggaagaggctatttctgctatggtgcaggaggagatgaggttgaaactgatgagaggtacaaatcctacaagatcagcatacactgtggctgataatagagaatgctacaactgtggacaagtgggtcatgtgagctacaattgtcccactcctcggaacattggcggtagggggttgattcgaggagggtatggtggatttggtggaacccgtggtggatttggaggagaccgtggtgactttggggggaaccacagtggtagaggaggtcgtggtggagatcgtggtggtggaggtcgtggtaggggcgaggagaaggggactgggaggaggattgggactagagtcaggtgtgatgggttgtggtacatcaatcatgaggaactggggctagctgcggtggttggaaatgttgagaaggagatcagtttgcttcattgtcagttaggacatccatcttttgagattttgagtaagttgtatctagatctctttagtaaagtggataagcatagattggtgtgtgatgcttgtgagcttggaaaacatactcggtctacatatgttgggattggtcttcgtaactgtgagcctttcatattaatacattctgatgtttggggaccatgcccagttacttctgtgagtggttttaagtggtttgtcacctttattgattgccacactcgtatgacttggatttatatgcttaagcacaatagtgaggtccttcgttgctttcaggactttcataaattagtgacaactcagtttgatgcaaaagttaagattattcggactgataatggaacagaatatatcaataatgaatttgtgtcatatatctcagatgaggggattattcaccagactagtacccctcctcaaaatggtgtagctgagagaaagaatcgacatttgctagaagtggcaagatctttaatgttccagatgaatgtgccaaagtacctatggagtgaggctgtgatgacagctgcatatcttatcaatcgcatgccttctagaatacttggtatgaagtcccctgttgaacttttattgggtaagcgagagttcaaggtccctccaaaggtgtttggttgtgtttgctttgtgcgagatcatcgaccttctattggcaagttggatcctcatgcagtaaagtgtgtgtttgttggctatgcttcaagtcagaaggggtataaatgttgggatcccattgggagaagactgtttgtgagtatggatgtgacatttcgtgagtttgagccctattataaaagtaaaggagatcttgaccaatttcttgaggaattctcgactgtcatggaggttgatagtcgagagggggagatagagagaggtgacacacataggaaaaatgttagtgacaagaatggggagacagtggtggttggatcaataccatgctctattgacaatgcaagtaaagaagcagtggaagttattggagatacacaagacaaggatagagaaatggttcttcatgaggaggatggagaagatggagaagatgaagaagtggttgttgggacaattccatgtcctatggagcgagccgaaaagacagtgcccataccaaaggattggaagtgtgcaaaacaagatccaaggtggaaagatgcaatgagagaagagttgaatgcccttatgaagaataagacttgggagcttgtaaaacttccaccaggaaaaaaggcagtgggatgtaagtgggtttttacagtgaagcaaactcctgaagggaaggtggataggtataaagcaagattagtcgcaaaaggctacagtcaaacatatggaattgactatgatgagacatttgcaccggtggcaaaaatgggtacagtgagaactttagtatcttgtgcagtgaactttgggtggcccctccatcagcttgatgtgaaaaatgcatttcttcatggtgatttatatgaggaggtctacatggagattcctccaggatttgggaatagccagacagttggaaaaatatgtaaactcaagaaatccttgtatgggttgaagcagtttccacgtgcgtggtttgaaagattcaggtgcgcagtgtgtgatatggggtattctcagtgtaatggagatcacacggtattctacaaacatagggggacatacatcaccatcttggctgtgtatgttgatgatatagtgatcaccggtgatgatgtagaagaaatcaggtgcctgaaggaatggacacctaaatgtagaaggatattgtga

SEQ ID NO: 14890 - DNA, 380 bp, Oryza sativa
  Clone ID: TFbOSC30459j.C1.o3.gp
tatgtcatagctgtagaattgatcttatcagaggatgattccagacttttcatgggattattcctaccacaatggcttgcctcaccacaattcaggcttaggacagttggtactgttccattatccgctttaggttggcgttcataggtatcatcatgtggctctagttctgcagtcaacatgacttctagtagattttgaggacatgtataagaaaagtgacctctgtcaccacagtcgaagcaggtcactcctgttaggttcggtgtcttatctttcatagctgcagcattggttgatctgactccatgttgcttttgcttttgaggacatttatttgaatagtgacctttgcccccacagttgaagcaggttactcc

SEQ ID NO: 14891 - DNA, 1209 bp, Oryza sativa
  Clone ID: TFbOSC23022j.C1.o2.fg
atggctgacaatgagaaaggcaataaggtcagaagtcaggacattggtacctcaagctcccgagtgaatgaagcaccagataccagttgtgtgacactggtccaacacctgattaaccagaaccgattgcttatagagatactacagcagcatcagacgccaattctgaacctgagtcaaatacaacctcaagtgcagttggaggcagtccaagcactcacaccacaagtcagcatgccgccagcatcccgaaggacccatggtgacgtgccacatgttgacccaaaagaagcaagtaacatttgctttatgtgtgatgagcaagggcactatgcaagggagcgtcctcagcagaaaagaaaaacaccaatgcgaaccgaagatgaagtccgtaagatgatcattaccagcacagaatggcctccaccaggaatgacaagacgtcagagaagaaataccttccgaggtgcaccacagttgacagagcatcttttagctaatggaggtagagtgtctgatagtgaagattcagatcaagtctcctcagatgatgaagatgaaatggaacgtaaggcatgctctcgttgtggagaaatcggtcatgtcgccagctcgtgtgccactatatgcgttcattgtgaggaagaccatccacccgacaggtgtccaacgagcaggatcacttgtttcttttgtgaaggaaccgatcatgtaccaaaagattgtcaattcagttttctgctgacgaagaagatggtcaaccaacccgccagttccaacggagagaagcatcaaggcaacaccaatcctcgccaaaattacagtctcagcttaaatccagtgccaggacagaggaatcaaaatgagaaatggaaatgccgagtccgggaagatatctgttgcttcaattgtcaaggaatgggtcatttcgccgacaagtgccccagaccaagaaacatagctgccagcatgtcagtccccgcaactccttgcaatcagaagcttgcccctcagcgaattgtcatccatgcagcccgaagcagtcctatagaccgcgttgcaacagctccaactccagcgagtgcattaccaccaggtgtcaatgctcaatttcagccccagccatcagtttacaagacagaggccagtatcggcattgtatctttggatgttccagcacagcagccaaagaaatcaagtataagatga

SEQ ID NO: 14892 - DNA, 2553 bp, Oryza sativa
  Clone ID: TFbOSC408350j.C1.o3.fg
atggctgacaatgagaaaggcaataaggtcagaagtcaggacatcggtacctcaagctcccgagtgaatgaagcaccagacaccagttgtgtgacactggtccaacacctgattaaccagaaccgattgcttatagagatactacagcagcatcagacgccaattctgaacctgagtcagatacagcctcaagtgcagttggaggcagtccaagcactcacaccacaagtcagcatgccgccagcatcccaaaagacccatggtggcgtgccacatgttgactcaaaagaagcaagtatcatttgttttatgtgtgatgagcaagggcactatgcaaggaactgtcctcagcagaaaggaaaaacaccaatgcgaaccgaagatgaagtccgtaagatgatcattaccagcacagaatggcctccaccaggaatgacaaaacgtcagagaagaaataccttccgaggtgcaccacagttgacagagcatcttttagctaatggaggtagagtgtctgatagtgaagattcagatcaagtctcctcagatgatgaagatgagaagtctccccaaggtttcaaccagaataaaatggaacgtaaggcatgctctcgttgtggagaaatcggtcatgttgccagctcgtgtgcctctacatgcgttcattgtgaggaagaccatccacccgacaggtgtccaacgagcaggatcacttgtttcttttgtgaaggaactgatcatgtaccaaaagattgtcaattcagtttgctgctgacgaagaagatggccaaccaacccgccagttccaacggagagaagcatcaaggcaacacaaatcctcgccaagattacagtttcagcctaactccagtgccaggacagaggaatcaaaacgagaaaagaaaatgccgagtccgggaagatatctgttgcttcaattgtcaaggaatgggtcatttcgccgacaagtgcccaaaaccgagagacatagctgccagcactcctatagcccgcgttgcaacagctccaactccagcgagtgcattaccacaaggtgtcaatgctcaatttcagccccagccaccagttgacaagacagaggccagtatcggcattgtacctttggatgttccagcacagcagccaagaaatcaaaattggaacaacccagcaggggcaaccaatgttcaagtacctacagtccagcaacagtgcaagttatcagaatttctcaaaactgagactccaacctttgccattgccgtcgaacctatggaagccagtgattggttgcgcacagtcgagaagaagctggggttgattcagtgcacagaccaggagcgggttgtcttcgcaactcatcagttggttggactggcttcagaattgtgggatagctacgaagcatcacggccagaaggacataccatcacctgggacgagttttcattagtattcaagagatcccatgttcccgcaggaatgatcacactgagaaaacgagagttccgctacctgaagcaagaagatttgaccgtcacagagtacctgcacgagttccatcgtttggctcactatgcaccagaagatgtggaaaatgatgaagacaaacaagagaagtatctccaggggttaaaagatgagatcgcagtgcaactactcctagaggaatatgaagattttgagaaacttaactgtaagagaaggattgtcagcatcccagtattcccatgtggtaaccaaagacagcgcacggagccacttcagatcaccggatcttctgttgcgcatcaagagtttccgccccaagaagatggacacaatgcagacaacaacattagcaatactaatgatgatgataccaccaacaaccatgcttcttgccccattagtgaccactcaaatcaagcgtgcaatgtcaacatcattcaccaaggtgtcgacgatagtatcaatgatggcacccaaaatgacaaccctagcaattgtgactctaagaaagactccaatggtgatagcaactatggtaccactgatgccaatgttagcaaggatttccaaccaccaattccaactccaagtcagaatgatcgtccccagacggatagctcagcaaagaagacgttgatttgctacaattgcaaagaaccagggcattactcgagggactgcctgcaaccaaggcaaagtcgacctccacattaccgccaatttacacgaagcagacatcccaatcgtattgtggtcactggagcaaacgccgtacccgtttctctgaaagacagcacgcccaaggacctcattgccccagaagcatcctcaacacccggagcgaagagtacctggttgagaaaggtcgaaagtggtaacttgtatgaggttgactccgaagatatgaatcatgagaagttctggaacggaagcatcattaaactaccgcaacctagtctgagtcagctaaaaggtgcaccctggttcaagtcaggtgaagagaagattccatccgcaacaggaggtcaagccaagcagttccgagtggtgaagttttgctga

SEQ ID NO: 14893 - DNA, 2070 bp, Oryza sativa
  Clone ID: TFbOSC9374j.C1.o4.np
tccactttcaagtgagttcatccagtgttcacaagccaattgattaggggtttcctgacaattggtatcagagcaaggtttagggcttggacacgtgatcgtgcgctagaagaagcacttatgccaaggcgtcacaagctccccgtgccgttggtcggtgtcgccgagcgcacgcactcctggaggttccagcggccgtgcctcaggcagcggcgggaatgaccgcgggctggttatacaccgcgtggtcaaggagtcaggatcgtctacgaactatccggttctcacgaagacgaattacaatgactgggcattgctcatgaagatcaagttgcgagcacgttgcctgtgggacgctgtcgaatgtggccgcgctgctgtcgagctgcacgaggatcggatggcacttgatgggatctgcagcacggttccacccgagatgatctcgaccttggcgacgaaggcgtcggtgaaggaggcgtgggactgcatcaagacaatgcgcgtcggcgacgaccgcatccgcaaggccagcgcacagcgggtgcgtacggagtacgagaggatcgtgttccgggacggctagtcggtggaggacttcgccatgcggcttaccagtgtcgtcaaccaactcgccaccctcggtgatcccgagcccgatgacaaggttgtcgagaagtatctgcgcgtcgcccgaccgatgtttagccaactcgttctttcaattgaaactcttctcgatatatctaccttatctttggaggaaatcaccgggagactcaaggcggccgaggattaccagcccccaccatcctcccagaacaccgacggcaagctctacctaaccgaagaagaatggctggagtgccacaagaaggagcaggaggcgaaacgctctggtgccggttccagcggacgcaacaagcgccgcggcagaaaggggtgcaccggcggcagctcggatgggtccacctatcacaccacctcctcactggcacacagggatgacaaatgtcgtaactgtggcaagctcggccattgggccaaggagtgccggagcaagcccaagcatgaagaccaggcccatgtggcccaagacgagcccacgctcatgctcctgactggaggctgcgtcgaaaccgcaggctccatgttgccgccaccgccgccaccagcgacgccggcgcctcagtgcgtctgcatcgagctcgtcgagaagaaggtgttcactgcgttagatgatgaagcagaccgcgacccgcgcagctggatcatggactccggcgcgtcaaaccatatgacaggttgccgagcggccttctccgacctcgacactagtgtcaccggcaacgttcggctcggggatggctcgatcgtccctatcgaggggcgcagcacggtgttgttcacctgcaagaatggagaacaccgcaccctcgccaacacgtactttctgccgtggctcgctgccaacattgtcagcatcggccaactccacaaaactggcttccaagtattggttgaggacggcatcatgcgcgtccgcgacgagcagtggcgcctgctcacccaaatccctcggagcccagggcgcttgtatgtgcttgacatcaagctcgcgcggccagtttgcttgacggcgcgccccggcgaaaacgcgtggcgttggcacgctcggttcgggcacatcaactttactgcgctgagaaaaatgagcagggagaccctggtacgtggattgccattattgatgcatgtcgatcaggtttgcgaggcgtgtctcgccgggaagcatcgacgggcgccgtttccacaacgcgtgctgtctcgctctaacgagcccctgcaactcctccatggcgatctctgcagcccgatctcgccagcgacgccgagtgggaaccgctacttccttctcctcgtcgacgactacagccgcttcatgtggatcaagctccttttgtcgaaggacgtcgcaccagccgccatcaagcagatacaagcggccgccgagagcaagtcgggaagctgctttgtgcactacgcacggaccgagggggcgagttcacc

SEQ ID NO: 14894 - DNA, 1314 bp, Oryza sativa
  Clone ID: TFbOSC401000j.C1.o11.fg
atggcttctagagatatagtacacacgggtggtgaccctcctatgtttgatggcacaaattatgcacaatggaaaatccacatgatttcttattttacggccatgagcccaaaaatatggtggattgtagatgtgggcttttctcatgctttggatgaccatgctccaacaagtgggcaagataaatgcctacatctcgatgctcaagctactaatgctttattttgtggtttgagtgatgacatgtttaatgaagtatgcaatctcaagagtgcacatgctatgtgggtaaagcttaaagaaaaatatgaagtgcccacacttgttgagaatggttgcacacaagaatcgatgtcgggtgaagactccacctcctcaagtgatgatgaggagctcccaataccatccacatcacctcattgcttaatgacaaattgtaagaatgaggtaaagaatgattctctcgatagtattattgaaaatacttgtgttgttgatgatggtggtgatgatgatgaaccttcatatgatgatctttttaacattcttagggaggctactagctcatgtagtacatctaaggctagtgtgtccacctcttgtgatgacttgttagatgtaccttgtagctcaagcatagatgaaaattcttgttcttcctcctctatgtatattgttgctaaccttgtagaggaaaacaagcaattacaagcccaagtcaaagatttaaaagaagacttggatagaagctacaaagggaagaacacacttgacgaaatcctaagcaagcaaaagagcacaaatgacaagtgtggacttggctttcatcgcaaggagaatgctaagaagacaagacacatgcctagatatgcaaggaagcatgcatacttaagaaatgatggaaagaaaaatgtgagtaagaaccatcctcacattacatgttttggttgtcatgagaagggacactttgcctccgtgtgcgcaaacatgaaggatgagaagtgcaacttcaaattgaggcaaaccggcaagaagcaagacaaaacgacaagtcatagaggtcaaaacctaacttgctacaattgccgcaaaaagggacatattggtaaaaattgtcccataggtaatactcctaagcctaatattatttttgatgattatgtgcttaggaaaaataggcaaggcaatgtgtttgctagatatgttggtttacctagacttgcacctagaaggaggaccatttgggtgcctcgtattttggtaactaacattgatggacccaattttgttggggaccaaaatgtgccaaaatga

SEQ ID NO: 14895 - DNA, 1632 bp, Oryza sativa
  Clone ID: TFbOSC900175j.C1.o8.fg
atggctgacaatgagaaaggcaataaggtcagaagtcaggacattggtacctcaagctcccgagtgaatgaagcaccagacaccagttgtgtggcagtggtccaacacctgattaaccagaacaaattgcttatagagatactacagcagcatcggatgccaattttgaacccgagtcagatgcaacctcaagtgcagttggaggcagtccaagcactcacaccacaagtcagcgcaccgccaacatcccagaaggcccctcatgccatgccgcatgttgacccaaaagaagcaagtatcatctgttttatgtgtgatgagcaagggcactacgcaaggaactgtcctcagcagaaaagaaaagcaccaatgcgaaccgaggatgaagtccgtaagatgatcattaccagcacagaatggcctccaccaggaatgacaaaacatcagagaagaaattccttccgaggtgcacaacagttgacagagcatcttttagctaatggaggtagagtgtctggtagtgaagattcagatcaagtctcctcagatgatgaagatgagaagtctccccaaggttttaaccagaataaaatagaacttaaggcatgctctcgttgtggagaaatcggtcatgttgccagctcgtgtgcctctacatgcgttcattgtgaggaagaccatccgcccgacaggtgtccaacgaacaagatcacttatttcttttgtgaaggaactgatcatgtaccaaaagattgtcaattcagttttctgctgacgaagaagatggccaaccaacccgccagttccaacggagagaagcatcaaggcaacacaaatccccgccaagatcaccgtttcagcctaactccagtgccaggacagaggaatcgaaatgagaaaagaaaatgccgagtccgggaagacatctgttgcttcaattgtcaaggaatgggtcatttcgccgacaagtgcccaaaaccgagaaacatagctgccggcacgtcagtccacgcaactccctgcaatcagaagcttgctcctcaacgaattgtcatccatgcatcccgaagcagtcctatagcccgcgttgcaacagctccaattccaatgaatgcactaccacaaggtgtcaatgctcaatttcagccccagccaccagctgacaagacaggggccagtatctgcgttgtacctttggaagttccaatacagcagctgagaaatcaagtacaagatgaagaacccgagttgaagaagggcattactccaaaaactgtccccaaccaaggcaaaatcgacctccacattaccgccaatttacacgaagcagacattccaatcgtattgtggtcactggagcaaacgccgtaccctggtaacttgtctgaggttgactccgaagatatgaatcatgagaagttctggaacggaagcatcactgcactaccgcaacctagtctgagtcagccaaaaggtgcaccctggtccaagtcaggtgaagaggagattccacccgcaacaggaggtcaagccaagcagttccgagtggtgaagttttgctggaagtttgtcaagacgcaacggaagaagtcagacaagaagagaagaccgcccaacctatcttcttgctag

SEQ ID NO: 14896 - DNA, 1668 bp, Oryza sativa
  Clone ID: TFbOSC101455j.C1.o23.gm
atggtggtgtcgtttgtagtgctgctcgccggtggtgcaggcgcggcggccgccgccgtggcgcagccggtgccgctcttcgtgttcggcgacggcacccttgacgtcggaaacaacaacaacttgcccggagacgaggacgtcggggatcctcctcgcgccaaccacccttattacggcatcgacttccccggcggcaaggccaccggcaggttcagcaacggctacaccatggccgacttcatcggcttgaccatcccactgtcgaagcaaatcagctacttcgccacgacgaggtcacagatggagtccaagctggggcgcctcgccatgagcgacctcctctcgaggtccctcttcctgctcgccgtcggcaccatggacctcctcccggactgcaactacttcctgacgttcccgccgtcgccgccggacaacaagacggaggtgcagcggctcgtggagctctacaacgccagcgtcacgtcgctatacggcatgggcgccaggaggttcgccgtcgtcaacgtcggcctcgtcgggtgcgggccgacggtggacacgcgccgcggtggcggcagcggcggcggcggcgggtgcgacgcgaggatgaacggcctcgccgcggagttcaacgcggctctcggggcactcctcgccggcctccggtccgagaagcgtcgccttcgctactccctcgctgatttctacgccttctccaacgccaccttcgccaacccatcggctgccggccacaacctgggcttgggccagaaaagtggcctcactctcgatccctcttgggctgatttcggcctggacgacaccgatcgtccgatctttagggttttgatcggacggccgagcgtcgatatcggggaaacaaaacccctccttctcctcagccgccgaaaccctagcccatttccctccctcccatctcacatcgccgccctcccctccgcgcccccgagcggcggcgacgacgcccctcttcccgcgagcggcggcggcggcgccctcccccacaaccaacggcgcggcgccctctccccgaacaacggcggcgtggaggcggttgcggcccggcgggagcgggaggggcggcgggccggacctcgcctccgccagatctggcggcatggaagcggctgtggtctggcgagggcaggagaggcggcggcgtcgtctctttctctctctctgtgcatggtggggaggtgcggcagtggtggtggtggcggacgtcatggaacgccggtcgggcctcgcctccgccagatccggcggtgtggaggcagctgcagcccggcgggggtgggaggggcggcgggccggacctcgcctccgccagattcggcggcatggaggcggctgcggtccgacgggggcgggagaggtggcggcgtcgtctctttctctctctctgtgaatggtgtcggttctcctgggtttgtgaacatcgacagctcgtgctgccccgggccttgcatgcccttcccctacttcaaccaaccaccctgcgacaaccgcgcgcagtactggttttgggacgggggttacaccacggagcaagctgccatggtggctgccgctgcgttctacaatggcaccgcaaagttcaccacgccggttaacttcaagcaactgatccgaaggaaaaagtga

SEQ ID NO: 14897 - DNA, 3501 bp, Oryza sativa
  Clone ID: TFbOSC3174j.C1.o1.fg
atggctggttttgccgatacactgaggccagataaattcaccggtgtgcactttaagagatggcagatcagggtcactctgtggctgacagctatgaaatgcttctgggtgagtactcgcaaacctgaaggaattcttactgctcctcagcagaagcaattcgaggaagccactactctctttgtgggatgcattcttagcgttcttggcgatcgtctggtcgaggagaaagctcgggaaaaagacgccgcgtctaagggcgatggtgggcagtccagtgccaatgttgtgcacaaggcctataacaagagcaagggaaaatacaaagctcaacagaccaccaacttcaagaaacagaagaagaacaacaacaatcctaatcaggatgagaggacttgctttgtgtgtgggcaacctggtcatctggctaagaagtgtccacagcgcaaggggatgaaggcacctgcagggcagacttctaagtctgctaatgtgaccattagcaacactggagatggaagcgggtatggtaatttacctactgttttttcagttaatcagtctactaattggtgggttgatactggggccaatgtcgcatggggttccaccgtcctaatggggaatgggtcacatgcttctgttcatggtgttggcacggtagatctgaagtttactttgggaaagatcatgaatcttgttagtggctcctgtctgactagagacggatttaagttggtttttgagtctaataaagtagtcgtgtctaaacatggatattttattggtaaagattatgagtgcggaggcctgttccgcttttccctttctgatttctgcaataagcctgtgaaccatatttgtggcagtgtggatgatgaggctaatgtttggcactcacgtttatgtcatattaattttggcttgatgtctcggctttccagcatgcgtttaattcctaagttttccattgtcaaatgttctaagtgccatagttgtgtgcaaccgaagcaacctcgcaagcctcacaaggctgccgaggagagaaacttggcacaactagaactcctacattcagatctttgtgaaatgaatggggtattgacgaagggtggaaaacgatatttcatgacgttgattgatgatgctactagattttgctatgtgtacttgttgaaaacgaaagacgaggctctagactattttaaaatttataaggcagaagatgaaaatcaacttgacagaaagataaaaagacttaggtctgatcgtggtggagagttcttctcaaacgagtttgacttattctgtgaggaacatggcatcatacatgagaggacgcctccctattctcccgaatctaatgggattgctgaaaagaagaaccgcacactgactgacttggtgaatgccatgttggacaccgcgggactacctaaggcatggtggggggaggcattgttgatctcgaatcatgtgttaaacagagttcctaacagaaataaggacaaaacaccatatgagatatggattgggagaaaaccatcactttcttatttgcgcacatgggggtgcttggcgaaagtcaatgtaccaataacgaagaagcgtaaacttggacctaagactgtggaccgtgtctttctgggatatgctcatcacagcattgcctatagatttttaatagttaaatccgaggtacctgacatgcatattggtacaattatggagtctcgtgatgctacctactttgaaagctttttcccaatgaaggatacatatagtggttcgagccaaccctctgaaataattcccagttcaatcacaccaccagaacaaactgaacatttatatgaacatgtcactaaggaggatgtcagtgaagctcctcgaaggagtaagagacaaaggacggctaagtcctttggtgatgattttactgtgtacctcgtggatgacactcctaagtcaatttcagaagcatatgcatctcctgatgcagactactggaaggaggttgtccgtagtgaaatggattccattatcgctaacaggacttgggaggtgacagagcgaccctatgggtgtaaacctgtggagtgcaagtgggtgttcaagaagaagtttaggcctgacggtactattgaaaagtacaaggctcagcttgttgctaagggatatactcagaaagaaggcgaagatttctttgacacttactcacctattgctagattgaccacaattcgtgtgctactttccctagcagcctcaaatggtcttctcgttcatcaaatggacgttaagacaacgtttcttaatagagagttggatgaggagatctatatggatcaacctgatgggtttgtagttgaaggtcaagaaggcaaagtgtgcaaattgttgaagtctttgtatggtctgaaacaagcttctaagcaatggcatgagaaatttgacaaaacattgacatctgcaggctttgcagtaaatgaggcagataaatgtgtgcactatcgccatggtgggggtgagggagttattctgtgcttgtatgttgatgacatactgatatttgggacaaaccttgaggtgataaatgaggttaaatcattcttgtctcaaaattttgatatgaaggatttgggagtagctgatgttatcttaaacattaagctaattaaaggtgagaatgggattacacttttgcagtcccattatatggagaagatcttgaatagctttggctacattgatagtaaggcttctccaacaccttatgatactagcttgttgcttcgcaagaacaagagaattgctaggaataaactggaatactcccaaatcattggctcgctgatttacctggctagtgcaactaggcctgatatctcctttgctgtcagcatggtgagccggtttacctctaatccgggagatgatcactggcgtgcgcttgagcgagtaatgcgctatctgaaaggtactatggaattagggcttcactattctgggtatcctgcggtactggagggatatagtgattctaactggatctctgatgtggatgagatcaaagccactagtggatatgtcttcacactgggtggtggtgctgtttcgtggaggtcttgcaaacagactattttgacgaggtcaaccatggaagcagaactgacggcactggatactgctactattgaggcagaatggctgcgtgatctattaatggatctacctattgttgaaaaaccggtgccggctatccttatgaactgtgacaatcaaacggtaattgtcaaagtggatagttctaaggataatatgaaatcgtctagacatgtgaaaaaacgattgaagtctgtcaggaaattgagaaactccggagttataacgttggattacatccaaacagctagaaacctggcagatcccttcacgaagggactatcacgaaatgtgatagataatgcatcgaaggagatgggtttgagtcccatgtga

SEQ ID NO: 14898 - DNA, 239 bp, Oryza sativa
  unsure (1)..(239): unsure at all n locations
  Clone ID: TFbOSC34965j.C1.o1.gm
aagaagaaccctcatgcatcccccaacaacaagaaagtcaagcctgatgtcaaacccaaggctgcanccaattttaagaagaaaggcaagggaaaggcaaagggagcctgctttgtgtgtggcaagtctgggcattgggccaaggactgtcctgagcgcaaagataggaagtctgccaacatggtcgggaagaggttcctccttgttgatgggaaacgggtcgcttgcggctgttcatg

SEQ ID NO: 14899 - DNA, 1252 bp, Oryza sativa
  Clone ID: TFbOSC400343j.C1.o1.np
atggcacctcaaccaatctgtcagacttgtgccctcaactaccttggttctaacgaagacccagctttgtcagaaaatccaaatcaactagctgaacaagtcaccaaccaagttgccaagactgatgacactgttcctggaccaaacaaggaagttgcaaattctggccaatcagactcggataaagccacagaaattcaaggattgcaatcggtagaagacactgataccaataaagagaagaacaaataattcttaaatgtgatgattacagggatgaaaaccccacttcgagctcatgattaccccaactttcagaattcgatcgacaaatccttgttacaagaatatagcacagttaaagaaggaagtggtcacaaaagaaagacctcgccatcagaagttgacatgcaagatgttccacaatgtcagacaatgcaaccttgccaagacatacccaagtaccctaccctcaaatcaaagaagatcagacacgttcccggtctcatatgcttcatttgccacgaaattggccattacatgagacactgcccccaaaaaccctatatggatgcactactacaagctaatatgagaacctcaaggacgcccttctatccccaaggaagcccgaattcgcaaaatgttaatacagtacgtccaacctcccctgacgacaaaagagcaaaagcatcctgtgacatgtgccaggacatccaagaaaagaaagagatgcaggaatacaagaaacgcaaagtatcgtcggtagagattcaagaaagagaaagttcacgtcaaaagaaaaacccgccagtgcagcacaatcaaggagcatctcagtatcccaatagttctggttatatgcctcgttcgacagtgtcagaatctagtcagcacgccacaatgatcaacagtaatagccatgaaggaagcaactccgtatcatgccctccaccttcaaaaagacgtggctataaggcaggagtcgaatgtttcatctgccatgagatgggacactattcgtgggattgcttgcagaaagtcaagtcaaagaaagtacaaccaacaacaagccttcctaacgtatctggacaaaaaaaattcaaagccaccaaacaatggatctgtctcgttaacctcaccgcctgttgagcagaatcgtctgaaccaagtgcaagaggaaacaaatggagaagttatgaatctcaagcaagttggagaacagaatgcgcagaaagaaagagacccacag

SEQ ID NO: 14900 - DNA, 6525 bp, Oryza sativa
  Clone ID: TFbOSC11379j.C1.o1.fg
atggtgaacacgcgcactggcaccggaagtggaagcggaagtggaagtggaagtggagctactaacaatggaggagatcccacgctagctcagattctggcccaacaaacacaactgatcaatctgttagtgcagcaggcacagaatcagcaggcaaacaatcagaatcagaatccacccccacctccccaaaacaagttggcagatttcttacgtgtgagaccccctaccttttcaagcaccaccaatccagtagaagcaggagattggttgcatgcggtggagaagaagttggatttgatccagtgtactgagcaggagaaagtttcttttgcttcgcatcagttgcatggacctgctgctgaatggtgggatcattttcgccaaggcagggctgaaggagaacttatcacttggcaggagttcacgactgcttttaagaagacgcatataccgtcaggtgttgtagctctaaagaagagagaatttagagcactcaatcagggatctcgttcggtcaccgagtacctccatgatgtcaaccgtttagctcgttatgctccggaagatgttcgcaccgatgaagagcgtcaggagaagttcttggagggactgaatgatgagttgtcttatgccttgatgtctacggatttccgggatttccagcagttggtggacaaggcgattcgtcaggaagacaagtataaccggatggagcagaagaagcgcagggctgcccaattcaaggcacaacagggcagtaaccagaggccgcgtctcgttactggacctcaagctccatcgtaccctcaaggaggatcttcatcagttgtccgtccccaacgccagttctacaataacaatactggtaatcgtggcaatgacaaccgcaacatggttgctcgtcctgcagcaactccagctcagaatcagcccgttaggaaggaacagggaagcaagccagtgatatgcttcaattgtggtgatccaggacattatgctgataagtgtcctaagcctcggcatgtgaagaacgctccagccccgaacaactccaatgttctagcaccgaaggcacgtgttaatcatgttgcagcagcagaagctcagaatgcaccagatgttgttttggaaatagaagaagttcttttcccatcctcgcttatcttgctagaatccaaagatctagatgttatcttagggatggactggttatctcgtcacagaggagttatagattgtgccaaccgtaaggtgactttaaccagtagcaattgggaaaccgtttctttctttgtgtcctcccctaaatatcatggtgtgaacttaaaccaagttgctctacaagagattcctatagtacaagactacccagacgtgtttcccgaggatttgccagctcctggtttggaatggtacattcctggtttggagatagaactgtgcagccggggtggttgttcagaatggttgggcctatacaacaggatgccgcgttacaagcctgagtacctgtttggtgttgagggttttgtccaggagttgcgcacgatgtcctttgtcattggatttgggactgcccctttttatgcccagattcctcatgatcgtcatgaagagaagtgccgagtcagagtcaccttgaacagcaatagtgaagaggtcccctcagtgatgtttgaagctggaggaagaaactacatccatgcatgtcaggaggtggcaaggatcgccataggagagctccgtgatcgctacagtgatcaattggccgacactgagtatcgctaccatcctcgccaacctcagggaagtgaccgtggcagttaccttgagactgaaggaattgagaatgatgttaccacgaaacatttggttgagatgttgtgggctatggatgaaagtcgtgcggagactgtgttagcagctcaagatcgtgaagatcggaatcgtggtaagatttgcaagttagaagacaaggtggatcgtttggagaaggaattagccgcattgaagggagaagcaccgccgcagaaggccaggattcgtcttaccgcaaggaagagagctctatttgtccctcgctatcaactggcgccaaagatggtgaacactcgtagcaatgggaatggtcccaacaaccccaataacaacaacaatggagagaatcccactctggcccaagttcttgctcaacagacacagcttatgaacatgatgatgcagcaatttcagaatcagcaaaaccaagggaataatcatgcacctccccaaaacaagttagcagaatttcttcgtgtgaggccgcctgttttctctagtaccactaatcctgttgaagctagtgattggctgcatgccatagagaagaagttggatttacttcagtgtactgatcaggagaaggtctcatttgcatcacatcagttgcatggccctgcctctgaatggtgggatcacttccgccttaacaggactactgctgaacctatcacttggcttgaattcaccgctgctttccggaagacgcatataccatcgggagtagtgtctctcaagaagaaggagttcaggtcgctttcccagggatctcgctctgttacggagtatctgcacgagttcaatcgtcttgctcgttatgctccggaagatgtgcgcaatgatgaagagcgccaggagaagtttttgggaggacttaatgatgagctttcttacccactcatggttggagattatcctgatttccagaaattagtggataaggctattcgtcaggaggacaagtacaatcgcatggagcagaagaaacgtcggattgctcaattcaagacacaacagggaaataatcagaagccgcgtcttactttaggaccccagcccatgccacagggaggttcttcgtctgttgttcgtccgcaacgtcagttcttcaacaacaatgctggcaacaacatccgtaatcaagctccacgtcctgttgcagctccagcacagcaacaacctgccaagagggagcaaggcaacaagcccgtggtgtgtttcaactgtggagatccaggacattatgctgacaagtgtccgaagccccgacgtgtgaaggttgtccctgcccagaataactctgctgtaccagcatccaaggctcgtgtaaatcatgtcgctgctgcagaagctcaagatgctccagatgtgattttgggtacgttccttgttaactcagttcctgcaacagtacttttcgattctggtgctacacattcattcttatctacgagttttgcgggaaatcatgggatggaagtagaagatcttagacgtcctttgatggttagtaccccaagtaatcaagcactctctttgcaacgtagcccctctgtcagaatagaaattcaaggagtaccatttctggccaatcttatcttgttaaaatccaaagaccttgatgtcatcctagggatggactggttagccagacataaaggtgtgatagactgtgccaacagaaaagtaactctcaacagctatgatggtcgagttgtaactgttcatgcattgtcatctgagtctttaaggtcaagactgaaccagataactttggaagagattcctatagtccgggagtatcctgatgtgttcccagatgatttacctggtatgccgcctaaaagggatatagagttcagaatagatttggtacctggaacaactccgatccataagagaccttatcgaatggcagccaatgagttggcagaagttaagaggcaagtagatgatttgctacagaaaggatacatcagaccgagttcatcaccatggggagctccggttatttttgtggaaaagaaagaccatactcagagaatgtgtgtggactatcgtgcactaaacgatgtgactattaagaataagtatccactacccaggattgatgatttgtttgatcaacttaaaggtgccactgttttctccaagatagatcttcgatcagggtatcatcagttgagaatcaaagaggaggatatacctaagacaacttttaccactaggtatgggttgtttgaatgtactgttatgtcttttggacttaccaatgcccctgctttcttcatgaacttgatgaataaggtgtttatggaatacctagacaagttcgtggtggtctttattgatgatattcttatctactctcgaaccaaagaagagcatgaagaacatcttcgccttgcattggagaagctacgagaacatcaactgtatgctaagtttagcaagtgtgaattttggttgtctgaagtgaaattccttggtcacgtcatctcagccggaggagttgccgtcgatcctagtaacgtggaatccgtaaccaattggaagcaaccaaagacagtttcagagattcgcagtttcctaggccttgcaggatattatcggaggtttatagagaatttttccaagattgctaagcccatgacacgactgcttcagaaagatgtgaagtacaagtggtcggaagaatgtgaacagagttttcaagaattgaaaagtcgcttaatatcagctcctattttgattttgcctgatccaaagaagggttttcaagtgcattgtgatgcatccaaacttgggttaggttgtgttctgatgcaagatgggaaggtggttgcctatgcctctcgacagttacgtccgcatgagaagaactaccctactcatgatattgagttagctgcagtcgttcatgcattgaagatttggcatcattatcttttcggtactcgtacagaagtgtacaccgatcacaagagtttaaagtatatctttactcagccggatctgaacatgagacaacggagatggttggaattaattaaggattatgacatgggaattcattatcatccgggaaaggctaatgttgtagcagacgctcttagcagaaaaggctattgcaatgctacagaaggacgacagttgccattggaattatgcaaggaatttgaaagattaaatttgggaattgtcgatagaggtttcgttgcagccttagaagcgaagcccactctaattgatcaagttagagaagcccaaattaatgatcctgatattcaagagatcaagaagaatatgagaagaggaaaagctattggtttcttggaggatgagcacggaactgtatggttgggtgagagaatctgtgtccccgacaacaaagatttaaaggatgcaattctgaaagaagctcatgatactttatactccattcaccctggtagtactaagatgtaccaggatcttaaggaaagattttggtgggcaagtatgaagcgtgaaatcgcagaatacgtagcagtatgtgatgtttgtcagcgagtcaaggcagaacatcaaaaacccgccggtttgttgcaacctttgaagattcctgaatggaaatgggaagaaattggtatggattttattactggtttacccagaacgtcatcaggccatgactctatttgggtgatagtcgacagacttaccaaagtggctcatttcattccggtaaagacaacttattccggaagtcgcttagcggaattgtatatggcaaggattgtgtgtttgcatggcgtccctaagaagatagtgtctgatcgaggcagtcagtttacttcaaatttttggaagaaacttcaggaagagatgggttctaagctgaactttagtactgcttatcatccgcagacagacggacaaaccgaaagggtgaatcaaattttggaagacatgttgagagcttgtgctctagatttcggtggaagttgggataagaatctaccctatgcagaattttcgtacaacaacagttatcaagctagtcttcagatggctccttacgaagcactgtatggtcggaagtgtcgcactccgcttttgtgggatcaaacgggagaacgtcaggttttcggaacggatatcctaagggaagcagaagaaaaggtaaagatcattcaagaaagattgcgtgtggctcagtctcgtcataagagttatgccgacaatcgccgcagagatttgagttttgaagagggagattatgtgtatcttcgtgtcacgcctctacgaggagttcatcgttttcataccaagggaaaattggcaccgcgttttgtgggaccttataagattgtcagtagaagaggagaggttgcttatcagttggagttacctcaatctttggcaggagtacataatgtgttccatgtgtcgcaattgaaaaagtgtttaagggtacctaccgaagaagctaatattgagcagatagaagtccaagaggatttgacttatgttgagaaaccaatccgtatcctggaaacaagtgagagaagaaccaggaatcgagttatccgtttttgcaaagtccagtggagtaatcactcggaagaagaatcaacttgggaacgagaagatgaattgaagtcagctcatccgcacctgttcgccagttcttccgaatctcgaggacgagattctgtttaa

SEQ ID NO: 14901 - DNA, 2561 bp, Oryza sativa
  Clone ID: TFbOSC400718j.C1.o80.np
cgaggtcctcgcaactcagctcgcgaaaatcatgatcttcgcgaccaccgccgccgccgccgcggattccgccgcatcccgccatccccgcgcaccattaagagggggaaatcactccccgtgattccctccctcttttcccccgctttcccctctctctctccctcgggttcgttcggatttgctcccgcgatcttcgccggcgcatcaatggcgcccgagatggccgcggccgtttccttcccctccggcctctctctctccctcccggcgctatataatcgttccccgtgcctccctcctccgtttccgccgctcgccgctcgctctccccgtcggaatcaagcccgcgccgtcgtcctctctctccgccgtcgccgccgagctccggttcgccgccgtcgtcgccccggacctcctcccgcttcggcgtcgcctccttcggcttcgccgcgtcttcgtcgacctcgtccgctccttcgtttcgcccgccgaccgccggagcgccgccgtcctcgtcgatccgaaccgcgccgccgcctctcgccgtttcggtcgccgtttccgtcaccgccgtcgacccggggtgagccgaggaccgccgcttcgcttccctcttctctcctctctctcggccgccgctccgccgtgcctatggccgccgccggcgaccataggggcgcgggcgcgccgcctcccgtcggccgtgccggcgaggccgccttcgggcgcgccccgtggctgccaggtggggcccggccgtcagccgcccgcgcccgcgggtgcggctgacgcgtgggacccacggcgccggccggctttgcttaatcaacttgcagaataagcctaacatacatcataacagcaaaagacttagatctgttaaggtcctatccttagtttctaatctgtctctcccctttgttttctctctctccctctccaaacctttgcaacagatggctaacaatgagaaaggcaataaggtcagaagtcaggacattggtacctcaagctcccgagtgaatgaagcaccagacaccagttgtgtgacactggtccaacacttgattaaccagaaccgattgcttatagagatactacagcagcatcagacgccaattctgaatctgagtcagatacaacctcaagtgcagttggaggcagtccaagcactcacaccacgagtcagcatgccgccagcatcccgaaagacccatggtgacgtgccacatgttgactcaaaagaagcaagcaagggagtgtcctcagcagaaaagaaaaacaccaatgcgaaccgaagatgaagtccgtaagatgatcattaccagcacagaatggcctccaccaggaatgacaaaacgtcaaagaagaaataccttccgaggtgcaccacagttgacagagcatcttttagctaatggaggtagagtgtttgatagtgaagattcagatcaagtctcctcagatgatgaagatgaaatggaacgtaaggcatgctctcgttgtggagaaatcggtcatgttgccagctcgtgtgccactacatgcgttcattgtgaggaagaccatccacccgacaggtgtccaacgagcaggatcacttgtttcttttgtgaaggaactgatcatgtactaaaagattgtcaattcagttttctgctgacgaagaagatggccaaccaacccgccagttccaacggagagaagcatcaaggcaacacaaatcctcgccaagattacagtttcagcctaactccagtgccaggacagaggaatcaaaatgagaagaaaatgccgagtccgggaagatatctgttgcttcaattgtcaaggaatgggtcatttcgccgacaagtgcccaaaaccgagaaacatagctgccggcccgtcagtccacgcaactccctgcaatcagaagcttgctcctcagcgaattgtcatccatgcatcccgaagcagcccaatagcccgcgttgcaacagctccaaccccagcgagtgcattaccacaaggtgtcaatgctcaatttcagccccagccgtcagttgacaagacagaggccagtatcggcattgtacctttggatgttccagcacagcagccaagaaatcaagtacaagatgaagaacccgagcaagaccatccaccaggggagtgccccactcgcaaggtgacatgttttctgtgcgaagaaacaaaccatgtgcccaaggattgccaactcagtgtgttgttgaccaagaccgcagaaatccaacgaacaaccctacgattgtctcatcagctagtcagctccaacagcaacattgacgatatcatccacagcaccaatgctcctcctgctccacctaactctgcaacaaatcatagcactaataccttcagcaccaaccattctctgcaccgacagcctcagcaaagaattgtcgtcgatggaagaagttgtttctcgacctactccaggccgagcgaagggcaatcaacctcaggagggcgataccaagcagaagaccgttattcgcttcaaccagcaatcagaaggaagcttctcctgtgaa

SEQ ID NO: 14902 - DNA, 1725 bp, Oryza sativa
  Clone ID: TFbOSC30299j.C1.o3.fg
atggatatctctgaggcaaatgaaggctacgcgagctgcggctcggtaatcgagatgtctaggcaaatgaagactacacgggttggcctgggttggcttgggacgagctgggacccaggtcgggttgccagttcggtccgaatcatcgtaggccttgggttaaggcagaataagcctaacatacatcataacagcaaaagacttagatctgttaaggtcctatccttagtttctaatctgtctctcccctttgttttccctctctccctctccaaacctttgcaacagatggctgacaatgagaaaggcaataaggtcagaagtcaggacattggtacctcaagctcccgagtgaatgaagcaccagacaccagttgtgtgacactagtccaacacctgattaaccagaaccgattgcttatagagatactacagcagcaccagacgccaattctgaacttgagtcaaatacaacctcaagtgcagttggaggcagtccaagcactcacaccacaagtcagcgcaccgccaacatcccagaaggcccctcatgccatgccacatgttgactcaaaagaagcaagtatcatctgttttatgtgtgatgagcaagggcactatgcaaggaactgtcctcagcagaaaagaaaagcaccaatgcgaaccgaagatgaagtccgtaagatgatcattaccagcacagaatggcctccaccaggaatgacaaaatgtcagagaagaagttccttccgaggtgcacaacagttgacagagcatcttttagctaatggaggtagagtgtctggtagtgaagattcagatcaagtctcctcagatgatgaagatgagaagtctccccaaggttttaaccagaataaaatagaacttaaggcatgctctcgttgtggagaaatcggtcatgttgccagctcgtgtgcctctgcatgcgttcatggtgaggaagaccatccacccgacaggtgtccaacgagcaggatcacttgtttcttttgtgaaggaactgatcacgtaccaaaagattgtcaattcagttttctgctgacgaagaagatggccaaccaacccgccagttccaacggagagaagcatcaaggaagcacaaatcctcgccaagattacagtttcagcctaactccagtgccaggacagaggaatcaaaatgagaaaagaaaatgccgagtccgggaagatatctgttgcttcaaatgtcaaggaatgggtcatttcgccgacaagtgcccaaaaccgagaaacgtagctgccagcacgtcagtccacgcaaccccccgcaatcagaagcttgctcctcaacgaattgtcatccatgcatcccgaagcagtcctatagcccgcgttgcaacagctccaactccaatgagtgcactaccacaaggtgtcaatgctcaatttcagccccagccaccagctgacaagacagaggtcagtatctgcgttgtacctttggaagttccaatacagcagctgagaaatcaagtacaagatgaagaacccgagtgtaagaaagttattgtttgttacaactgcagtgaagaagggcattactccaaaaactgtccccaaccaaggcaaaatcggcctccacattttcgccaatttacaggaagcaaccatgccaatcaccaagtagtcagtggagcaaatgcagtacctgttaagcctagtgctagtcagaagcaaccataa

SEQ ID NO: 14903 - DNA, 1434 bp, Oryza sativa
  Clone ID: TFbOSC873j.C1.o1.fg
atggctgacaatgagaaaggcaataaggtcagaagtcaggacattggtacctcaagctcccgagtgaatgaagcaccagacaccagttgtgtggcagtggtccaacacctgattaaccagaacaaattgcttatagagatactacagcagcatcggatgccaattttgaacccgagtcagatacaacctcaagtgcagttggaggcagtccaagcactcacaccacaagtcagcgcaccgccaacatcccagaaggcccctcatgccatgccacatgttgacccaaaagaagcaagtatcatctgttttatgtgtgatgagcaagggcactatgcaaggaactgtcctcagcagaaaagaaaagcaccaatgcgaaccgaagatgaagtccgtaagatgatcattaccagcacagaatggcctccaccaggaatgacaaaatgtcagagaagaaattcctcccgaggtgcacaacagttgacagagcatcttttagctaatggaggtagagtgtctggtagtgaagattcagatcaagtctcctcagatgatgaagatgagaagtctccccaaggttttaaccagaatgaaatagaacttaaggcatgctctcgttgtggagaaatcggtcatgttgccagctcgtgtgcctctacatgcgttcattgtgaggaagaccatccacccgataggtgtccaatgagcaggatcacttgtttcttttgtgaaggaactgatcatgtaccaaaagattgtcgattcagttttctgctgacgaagaagatggccaaccaacccgtcagttccaacggagagaagcatcaaggaaacacaaatcctcgccaagattacagtttcagcctaactccagtgccaggacagaggaaacaaaatgagaaaagaaaatgccgagtccgggaagatatctgttgcttcaattgtcaaggaatgggtcatttcgccgacaagtgcccaaaaccgagaaacgtagctgccagcacgtcagtccacgcaaacccccgcaatcagaagcttgctcctcaacgaattgtcatccatgcatcccgaagcagtcctatagcccgcgttgcaacagctccaatttcaatgagtgcactaccacaaggtgtcaatgctcaatttcagccccagccaccagctgacaagacagaggccagtatctgcgttgtacctttggaagttccaatacagcagctgagaaatcaagtacaagatgaagaacccgagtgtaagaaagttattgtttgttacaactgcagtgaagaagggcattactccaaaaactgtccccaaccaaggcaaaatcgacctccacattaccgccaatttacacgaagcagacattccaatcgtattgtggtcactggagcaaacgccgtacccgtaaggcctcgtgttaatcagaacccatag

SEQ ID NO: 14904 - DNA, 3397 bp, Oryza sativa
  Clone ID: TFbOSC400680j.C1.o16.np
gggagagcactcaaacacaagaggcaggaatacaccgttgaggggttgatagcctctcttgatgttgaggagaaagctcggggaaaagacgtcatgtctaaggacgatggtgggcagtccagtgccaatgttgtgcacaaggcccaaaacaagaacaaagggaaatacaaaccccagcagaccaccaacttcaagcagaagaagaacaacaacaatccaaaccaggatgagagaacttgctttgtgtgtggctagcctggtcacctggccaagaagtgtccacaacgcaaggggatgaaggcaccgacagggcagccttctatgaccattggcaacactgtagatggaagcgggtatggtaatttacctactgttttttcagttaatcagtctactaactggtgtgttgatattggggccaatctatatgtttgtgctgacatctcattgttttcttcttaccaggtcacacgggattccaccgtcctaatgaggaatgggttacatgcttctattcatggtgctgaaacggtagatctgaagtttacttcgagaaagatcgtgcagctgaagaacgtgcagcctgtccctactatcaacaggaatcttgttagtggctcttgtctaactagagacggatttaagttggtgctttaatataataaagtagttgtgtctaaacatggattttattggtaaaggctatgagtgtggaggcttgttccacttttccatttctgatttctgcaataagtctgtgaactatatttgtggcagtgttgatgatgaggctaatgtttggcactcacgtttatgtcatattaattttcgcttgatgtctcagctttctagtatgtgttttattcctaaattttccattgtcaaaggttctaagtgccatagctgtgtgcaatcaaagcaacctcgcaagcctcacaaggcggctgaggagagaaacttggcacctctagaacttctacattcagatcttcgtgaaatgaatggggtgttgacgaacggtggaaaatgatatttcatgatgttgattgatgatgctactagagtttgctatgtgtatttgctgaaaatgaaagacgaggctctagactattttaaaatgtataagacagaagttgaaaactaacttgacaaaaagataaaaagacttaggtctgatcggggtggagagttttattcaaacgagtttgacttattccgtgagaaacatagcatcatacatgagaggacgcctccctattctcccgagtctaatgggattgccgaaaggaagaaccgcacactaacttacttgttgaatgccatgttggacaccgcgggactacctaaggcatggtcgggggagttgtcacgtcctgataaattcatcccgaattaaaaatcattttccaaacagggttaaacgtgcttggcctggagcaatttgggatggccggaagccaatctccaaagaactccagggttaagcgtgcttggcctggagcaatttgggatgggtgaccgatcgggaaattcttcccgggtgcacacgagtgaggacaaaacttgtcgcgtatgcaaatcactaacatgcaaattcttcccgggtgcacacgagtgaggacaaaacttgtcgcgtatgcaaatcactaacatgcaggagctgcaggtaaatgactatctacgagacaacatgctactaaaagtcacagactctgatccgtggtatggaaccatcgtcaacttcatggtcgcaggcatgtaccaccggaagaaaataagaaaaggttaatctacgagagccgcaagcacttacgggatgcacgctatctctacatagtctgttcagacggtctactacgaagatgcgttctggtagatgaaggcatgaagatcattgagaagtgttgtgctgccccatatggaggtcactatggagcattcaggacacacacacagatctggcagagtggattcttttggccatcaataccttccgaaactttttgcaagaacttggggctcagcacaacattgccatccgtatcatccccagacaagtggacaagcagaaatgagcaacaaacaaatcaaaaatattctgcaaaagactgtcaatgatatggggaagacatggaagaacaagctacctaatgcactttgggcatataggactgcttataagacgcccatcggcatgtcaccataccaacttgtccacggaaagacttgtcaccttccagtagagttggaacacagggcgcactgggcaatccggatttggacgtgatgatgaaaaaaaaagaaaagaaaaaaaagatagccatgcactctcccaaatttcaaaagagaaaaaataaatggaggaggaggtatacaaaaggagttattattattagtattttcctttgttcacccacaaatttaccatacacatgcacattcttgaccagaaagtatgtcttgtattttcatggatcctttatttgactttgcagtatatgtggaagtcataactctgttgtagagtccatagccttcactcgggacgagcaaaggttaagtgtgggggtgttgttgacggtacttaaatcataatatttgaccgtcaatacttgcatataatgaaataaaatatggtatccaacttagtggtagggtttattactaatcatttccaccagtgttggtgaaatatgtgtatgcaggtattttgaggaaaaaacacatccgtcaagcgacaaactgcacctccgcgcattcaggacacatttacatggattggaggccccataagtccagaggtattccgtgcgcttgcggatttatctgtggtcgtaagaaataccaacaatgatcattggcgtgcgcttgagtgagtggtctatctaagagatactatggacctggagcttcactatactgggtatcttgcggtactagagagatatagtgatgctaattggatctctgatatggatgagatcaaagccaccagtggatatgtcttcacactgggtggtggtgctgtttcattgaggtcttgcaaacataccatttcgatgaggtcaaccatggaagtagagatactgctactgttgaggcagaatggctgcgtgatctattgatggatatgcctattgttgaaaaaccggtgccggctattcttatgaactgtgacaattaaacggtaattatcaaagtgaacagttctaaggataacatgaaatcgtctggatatgtgaaaatacgattgaagtatgttaggaaattgagaaactccggggttataacgttggattacatccaaataggtagaaacctagcaaatcccttcatgaagggactatcacgaaatatgatagacaattcttcgaatgagatgggtctgagacccatg

SEQ ID NO: 14905 - DNA, 1030 bp, Oryza sativa
  Clone ID: TFbOSC30459j.C1.o1.fg
atggagaacactcaatttagccgtccaaaggcggtaccctataatgactcctgggagatacccaattctgactatattctcttgtatctcaatgacaaacaaactgggaagatcacttgcatggtatgtgggaaagaaggacactacacttgtgagtgccccatgaagaataaagaaaaatatgtcatatgtactctttgtggcaaggttggccactgtcacttatggtgctgccatcagaatgagagtgagaggcgtgcttgccgtcgttgtggagaaaaaggacactatgataattggcatcacctaggttgctccagctgtgagaagcatcatccactcgggagatgtcctatgggaaaaattacatgttttctttgtgaaggcaatggacatgtccctgttcaatgtcatttgagtccaatgctcactgcaataactcagaatcaacgagagagtttccgagctactctgagacaagcattgagagaaacaagcaacacagcagtcacaccaattacattgaccagagaattagagccatataatgataagaatggaggccaacctaaaggggacaatgaaatggtgcccagggtcttaggcttcaatcaaggagaggaaggccattctgctttgaggaaccctaacagatgccatgtaccatcctctgacaaggctaacgttgctgcagataaggcaccaaaccaatctttaggagtaacctgcttcaactgtgggggcaaaggtcactattcaaataaatgtcctcaaaagcaaaagcaacatggagtcagatcaaccaatgctgcagctatgaaagataagacaccgaacctaacaggagtgacctgcttcgactgtggtgacagaggtcacttttcttatacatgtcctcaaaatctactagaagtcatgttgactgcagaactagagccacatgatgatacctatgaacgccaacctaaagcggataatggaacagtaccaactgtcctaagcctgaattgtggtgaggcaagccattgtg

SEQ ID NO: 14906 - DNA, 1248 bp, Oryza sativa
  Clone ID: TFbOSC900137j.C1.o21.fg
atgccgcttgaagatgctcatctcatttggaccacgcttaaggagagatgcaacaagtccaaatgtgatgatgatatagtctttatggaagaaccacttgaggagtgttcaacttcatcaccaaattgcgaagaacctcaagtgactactttcgatgatcaagataatcatccagcgtccaccttatcatcaacacatgactacgttgaaggtgatgaattggtgagtaaggttgacgatcgtccaatattcccaatggattcaaacaacaccgataatgaaattgtcatattgcattgtgttgttaactcatgcatctcacctagcaccaagtatgtgtgtgaggatgatatggataaatgctctacttcctatagtacttgtggaactaaccttttaaaggaagaagtaaatgagttccaatggacaagtgaagaatccacctcacaaagatgctcatcttctatttccgaaaattatgcttgctttatgggtgaagatggtgactccgagtttgatcacttgagcaagaaggatataacaatggtgatcaagctcatggaagccattcaaaagcaacaagcatgcactattaagaagaatgaagaaatcatgagtctaaccgaagaacataagaaacttaaggattttcattcttcattgattatgagaagcaaaatcaagagcttaaatctcaacttgacgagatcactaacaagtaaaagggagaagcaaatagatcatggacttgtgtgcattgctcaaccatctcaagataaccgtgagagcatggtgaagaagcttgaggagggatcaaccgtggcttgcaccaagatccatcaaagggatagcaagtccatcaatgcttataccaagggacgaagtcaaaagacgatcaagagttccattacttgcttcaagtgcaaaaaggtgggacatcatattagagattgcccttcgaagaaaggaaataagttgagcaagaaggaggacattcctcacatcaagtgcttcaagtgcaccgaagcgggacactttgccttaaggtgtccttgcacattggatgaacaatgcaaaacatcaagtgagaggcaaaccggcaacaagcaaaccaacaagcaatatagaagcaacatgggtaacatattggtaaaaattgtcccatgggtaacattcctaagtcaagtctctcatttgatcataatttacttaggaatgccaaaaaagacatttgtgctactagggtga

SEQ ID NO: 14907 - DNA, 1911 bp, Oryza sativa
  Clone ID: TFbOSC14742j.C1.o1.fg
atgtcgaacgaggagttcgatagagtgagcaaccttgagaccgcatatgagatttggaacaagttggcggagatccatgagggtccaagtgagtacaaggatgccaagcttcatttcctcaagatccaatataagacattctccatgttgcctcatgagagtgtgaatgacatgtatgggaagctcaatgtcattgtgaatgatctcaaggggcttggggcaaactacaccgatcttgaggttgcccaaaagatgcttagagccctaccggagaagtatgagacccttgtcaccatgctcatcaactccgacatgtcaagaatgacacccgcaagcctcttggggaagatcaacaccaatgacatgtacaagctgaagaagaaggagatggaggaagcctcaccctccaagaagtgcattgctctccaagccgaagttgaagacaagagcaagagcaaggtgaatgaagtcaatgaggacttggaggaagagatggtccttcttgctagaaggttcaatgatctcttaggaaggagaaaggagagaggaaggggctccaactccaataggagaagaaatagaagacccaacaagactctctccaacttgaggtgttttgagtgtggtgagaagggacactttgcttccaagtgcccttccaaggatgatgatggagacaagtcatccaagaagaagagtggaggctacaagctcatgaagaagcttaagaaggaagggaagaagattgaggctttcatcggggaatgggactcaaatgaggagagctccgcctcatccgggtccgaggaagaaggtggtgatgatgcaagctccaagaagaagaagatggccgttgttgccatcaagaaggctccatcactcttcgctccactttgtctcatggcaaagggctcctctaaggtaacatctcttagtgatagtgagagtgatgatgattgtgatgatgtttcctatgatgagcttgtgagtatgtttgaggagctccatgcttatagtgagaaggagattgtcaagttcaaggccctaaagaaggatcatgcttctttgaaggtcttgtatgaggagctaaagacctctcatgagagactcaccatttctcatgagaagtttaaggaagctcatgacaacctcctttccactactcaacatggagctcacattaatgttggcatatcttgtgatttgcttgatgatagtgctacttgccatattgctcatgttgcatcatctagcatttctacctcttgtgatgatcttatggatatgcctagcccttgctctagttctagctcttgtgtttctatttgtgatgcctcacttgctgttgagaacaatgagcttaaggagcaagtggctaagctcaacaagagtttggagagatgcttcaagggtaagaacactcttgacaagattttgagtgagcaacggtgcatccttaacaaggagggacttggattcattccaaagaagggtaagaaaccttctcaccatgccactcgttttgtcaagagaaatggtaagtattgctccaagtgtcgtgaggttgggcatttggtgagtgattgccccggaggtaagcctcctaagacatgcatgtttgattctcattatatgcttacaaaggctcatgatggtagcattgttgctagatatgtgggtttccctatactcggtggtaaaaacaatgccatttggatgcccaaagctttggtctctaacctccaaggacccaaacaagtttgggtgaactaccggaccgatgggagccattgggtgcttgatagtggatgcactcaacacatgatcggtgatagggctatgttcaccacatttgaagtaggagggaatgaacaagagaaagtgacatttggagacaatagcaaaggaaag

SEQ ID NO: 14908 - DNA, 5262 bp, Oryza sativa
  Clone ID: TFbOSC401487j.C1.o9.fg
atgtcgaacgaggtgaaccatgtagggaaggctcccatgtttaatggcacaaactactccacttggaaaattaaaatgtctactcacctcaaagctatgagcttccatatttggagtattgtggatgtaggctttgccatcaccggcacacccttgacggagattgatcaccgcaacctccaactcaatgcccaagccatgaatgccttgttcaactctttgagccaagaggagttcgatagagtgagcaaccttgagaccgcatatgagatttggaacaagttggcggagatccatgagggtacaagtgagtacaaggatgccaagcttcatttcctcaagatccaatatgagacattctccatgttgcctcatgagagtgtgaatgacatgtatgggaggctcaatgtcattgtaaatgatctcaaggggcttggggcaaactacaccgatcttgaggttgcccaaaagatgcttagagccctaccggagaagtatgagacctttgtcaccatgctcatcaactccgacatgtcaagaatgacacccgcaagcctcttggggaagatcaacaccaatgacatgtacaagttgaagaagaaggagattgaggaagcctcaccctccaagaagtgcattgctctccaagccgaagttgaagaccagagcaagagcaaggtgaatgaagtcaatgaggacttggaggaagagatggtccttcttgctagaaggttcaatgatctcttgggaaggagaaaggagagaggaaggggctccaactccaataggagaaaaaatagaagacccaataagactctctccaacttgaggtgttttgagtgtggtgagaagggacactttgcttccaagtgcccttccaaggatgatgatggagacaagtcatccaagaagaagagtggaggctacaagctcatgaagaagcttaagaaggaagggaagaagattgaggctttcatcggggaatgggactcaaatgaggagagctccgcctcatccgggtccgaggaagaaggtggtgatgatgcaagctccaagaagaagaagatggccgttgttgccatcaaggaggctccatcactcttcgctccactttgtctcatggcaaagggttcctctaaggtaacatctcttagtgatagtgagagtgatgatgattgtgatgatgtttcctatgatgagcttgtgagtatgtttgaggagctccatacttatagtgagaaggagattgtcaagttcaaggccctaaagaaggatcatgcttctttagaggtcttgtatgaggagctaaagaccactcatgagagactcaccatttctcatgagaagcttaaggaagctcatgacaacctcctttccactactcaacatggagctcacattgatgttgacatatcttgtgatttgcttgatgatagtgctacttgccatattgctcatgttgcatcatctagcatttctacctcttgtgataatcttatggatatgcctagcccttgctctagttctagctcgtgtgtttctatttgtgatgcctcacttgttgttgagaacaatgagcttaaggagcaagtgtctaagctcaacaagagtttggagagatgcttcaagggtaagaacactcttgacaagattttgagtgagcaacggtgcatccttaataaggagggacttggattcattccaaagaagggtaagaaaccttctcaccatgccactcgttttgtcaagagaaatggtaagtattgctccaagtgtcgtgaggttgggcatttggtgagtgattgccccggaagtaagcctcctaagacatgtatgtttgattctcattatatgcttaagaaggctcatgatggtagcattgttgctagatatgtgggttcccctatactcggtggtaaaaagaatgccatttgggtgcccaaagctttggtctctaacctccaaggacccaaacttgtttgggtgaactaccgcaccggtgggagccattgggtgcttgatagtggatgcactcaacacatgaccggtgatagggctatgttcaccacatttgaagtaggagggaatgaacaagagaaagtgacatttggagacaatagcaaagtgaagattattctcgctatacttggggtgttctttttgcatgataagtctattgttgccgagcttttcaaaaagtttgcaaaaagggcccaaaatgaatttagttgcactcttgtgaaaattagaagtgataatggttccgaatttaagaataccaatatcgaggactattgtgatgatcttggtatcaaacacgaactttccgctacctactcacctcaacaaaatggtgtagtggaaaggaaaaatcgtacattgattgagatggcaaggactatgctagatgaatatggtgtttccgattccttttgggcggaagccataaacaccgcttgccatgcaatcaataggctttatttgcatcgtctcttgaaaaagacttcctatgagctaattgttgggaggaagccaaatgtcgcctattttcgagtttttggttgcaagtgttatatttaccataagggtgttagactaaccaaatttgaaagtcggtgtgataaagggtttcttctaggttatgcctcaaatagcaaggcataccgggtctacaacaagaacaaaggtgatgaaggcttgatgagagctatgaagaacatgtatattggagatgtcaagcctattgaagtagaagacaagccatccacctccactcaagatgagccatctacttccgcctcgtcaagtcaagctcaagttgaagtggaggatgagaaggcacaagatccacctatgcctccaagaatacacactgctctttccaaggatcacccaattgaccaagtgttgggtgacattagtaagggtgttcaaactcgatctcgtgtcgcttcgatttgtgaacattactcgtttgtttcttgtcttgagccaaaacatgtagatgaaactctttgtgatccggattggatgaatgctatgcatgaagagctcaacaactttgcaagaaacaaggtgtggactttgattgaaagacctagagaccacaatgtcatagggacaaagtggatctttagaaacaaacaagatgagaacggattggtggtgagaaacaagacaaggttggtggcgcaaggtttcacacaagttgaaggtttagactttggtgaaatttttgcccccatggcaagacttgaggctattcgcatcctttttgcatttgcatcatgctttgatataaaactatttcaaatggatgtgaaaagtgcttttctaaatggtgaaattgccgaacttgtctttgttgaacaacctcccggttttgaagatcctaaaaatccaaaccatgtttacaaactctcaaaagctctttatggtttaaaacaagctcctagggcttggtatgaaagattgaaagattttcttttgtcaaaggatttcaaaattggaaaagttgacaccactctttttacaaaaatcattggtgatgatttctttgtgtgtcaaatttatgttgatgacatcatattcagttctactaatgaggtattttgcaaggaatttggtgatatgatgtctagggaatttgagatgtccatgattggagagttgagcttcttccttggacttcaaatcaagcaactcaaggatgggacgttcgtgagccaaaccaagtacatcaaagatctactcaagaggtttggcttggaggatgcgaagcctatcaagacacctatggcaaccaacgggcatctcgaccttgatgagggaggtaaactggtagatttaaagctttatcgtttcatgattggtagcttgctttaccttaccgcatctaggccggatatcatgtttagtatttgcatgtgtgcacggtttcaagccgctcctaaggagtgtcacttagtggccgtgaaaaggatttacccaaaaggtgctaaatttcagcttgttggctattccgattcggattataccggttgcaaagtggatagaaagagcacatccggtagttgccaaatgcttgctatgcctccccgcactcggcatggtcgtcgtgctcccacgcccgatcccgttagtgaaaatgaggaatcaagcggagatgagtatgttcaaagtgatgaggacaatatggaaaatgttgagggtgatgagatggaagtaagtgatgatggtgatgacaatgagagtggaaatggtgaagatgatgaggcaagtgatgatgggagtcctctcgattcctccatccaatttgtgcttaatttgaggaatgctcaacaatacactatcttccgtcatcatgatcaattccggaggcctaacgattgtaatgatccaagatttcatacacggttccaaaagtccgtgtatgtacaagtgtatgccaacaaagccttcgccaaacacaaatggatctcttggaggcacattggtgagacaccggagtttgagaatttgcaagagatgttccggaccgttgggattgatagaattgtcaccatgaagcaaccttttgatgaagatctcatccggcaattctatgccaccgtatgggtgtccggcgattgtgatgcaatgaagtggatgttggggaccctccgatgctctatcaaccgccgtgaattcaaggagctcttgcacattcgcttcaacaacggggatgaccttcatgatgagcacacccacaatcccttccccattgatcacttttctcagttttatgaagaagggggaaggcacacatatggaaaggtggcgggtttaagggctctcccaagtgtgatcaaccacatagtaagggccaccatcctcccaagatgcggcaacaatgatgacatacgcagagttgcttggcatgttattgatgccattatggatggtcgtcggtttgatgttatcaaccttatgatgaaggagattgccatctcaaaggggactattggacaaggaatctattatgctctctacataatgaggttgccgcctcctagacggcttgtggaggagttgcccggtgacctctccgagaagattgtggaggaggcccggcgccggtttgtgagtggtttggagttcaccaccttcggagtgaaggaagaactaccccgagtgatcgaggcttgggtagtcctctccgtgggccagctcccgccttgcccatcccttgacgaagggggcgtgcggtggcttcgtggttga

SEQ ID NO: 14909 - DNA, 3804 bp, Oryza sativa
  Clone ID: TFbOSC900326j.C1.o11.fg
atggagggcgcggaggactcaggctttgctattaccggcacgcccttgacggagattgatcaccgcaacctccaactcaatgcccaagctatgcatgctttgttcaactctttgagccaagaggagttcgatagagtgagcaaccttgagaccgcatatgagatttggaacaagttggcggagatccatgagggcacaagcgagtacaaggatgccaagcttcatttcctcaagatccaatatgagacattctccatgttgcctcatgagagtgtgaatgacatgtatgggaggctcaatgtcattgtgaatgatctcaaggggcttggggcaaactacaccgatcttgagttgaagaagaaggagatggaggaagcctcaccttccgagaagtgcattgctctccaagccgaagttgaagacaagggcaagggcaaggtgaatgaagccaatgaggacttggaggaagagattgcccttcttgctagaaggttcaatgatctcttgggaaggagaaaggagaaaggaatgggctctaactccaataggagaagaaatagaaggcccaacaagactctctccaacttgaggtgctttgagtgtggtgagaagggacactttgcttccaagtgcccttccaaggatgatgatggagacaagtcatccaagaagaagagtggaggctacaagctcatgaagaagctcaagaaggaaggcaagaagattgaggccttcatcggggaatgggactcaaatgagaagagctccgcctcattcggggctcctctaaggcaacatctcttagtgatagtgagtgatgatgattgtgatgatgtttcctatgatgagcttgtgagtatgtttgaggagctccatgcttatagtaaaaaggagattgtcaagttcaaggccctaaagaaggatcatgcttctttggaggtcttgtatgaggagctaaagacctctcatgagagactcaccatttctcatgagaagcttaaggaagctcatgacaacctcctttccactactcaacatggagctcttattgatgttggcatatcttgtgatttacttgatgatagtgttacttgccatatttctcatgttgcatcatctagcatttctacctcttgtgatgatcttgtggatatgcctagctctagctctagctcttgtgtttctatttgtgatgcctcacttgttgttgagaacaatgagcttaaggagcaagaggccaagctcaacaagagtttggagaggtgcttcaagggtaagaacactcttgacaagattttgagtaagcaatggtgcatccttaacaaggagggacttggattcattccaaagaagggtaagaaaccttctcaccgtgccactcattttgtcaagagcaatggtaagtattgctccaagtgccgtgaggttgggcatttggtgagtgattgccccggtggtaagccttctaagacatgcatatttgattctcattatatgcttaggaaggctcatgatggtagcattgttgctagatatgtgggttcccctatactcggtggtaaaaagaatgtcatttgggtacccaaagctttggtctctaacctccaaggttgggtgaactaccgcaccggtggaagccattgggtgcttgatagtggatgcactcaacacatgaccgatgatagggctatgttcaccacatttgaagtaggagggaatgaacaagagaaagtgacttttggagacaatagcaaaggaaagtctattgttgccgagcttttcaaaaagtttgcaaaaagggcccaaaatgaatttaattgcactcttgtgaaaattagaagtgacaatggttccgaatttaagaataccaatatcgaggactattatgatgatcttggtattaaacacgaactttccgctacctactcaccccaacaaaatggtgcagtggagaggaaaaatcgtacattgattgagatgggtgttagactaaccaaatttgaaagtcagtgtgatgaagggtttcttctaggttatgcctcaaatagcaaggcataccgggtctacaacaagaacaaaggtattgtggaagaaaccgccgatgttcaatttgatgagaataatggctcccaagaagggcacgagaatttggatgatgtaggtgatgaaggcttgatgagagctatgaagaacatgtgtattggagatgtcaagcctattgaagtggaagacaagccatccacctccactcaagctcaacaactttgcaagaaacaaggtgtggactttgcatcatgctttgatataaaactatttcaaatggatgtgaaaagtgcttttctaaatggtgaaattgccgaacctgtctttgttgaacaacctcccggttttgaagatcctaaaaatcctaaccatgtttacaaactctcaaaatctctttatggtttaaaacaagctcctagggcttggtatgaaagattgagagattttcttttgtcaaaggatttcaaaattggaaaagttgacaccaaccttttcacaaaaatcattggtgatgatttctttgtgtgtcaaatttatgttgatgatatcatattcggttctactaatgaggtattttgcaaggaatttggtgatatgatgtctagggaatttgagacgtccatgattggagagttgagcttcttccttggacttcaaatcaagcaactcaaggatgagacgttcgtgagccaaacgaagtacatcaaggatctactcaagaggttcggcatggaggatgcgaagcccatcaagacacctatggcaaccaacgggcatctcgaccttgatgagggaggtaaaccggtagatttaaagctttatcgttctatgattggtagcttgctttaccttaccgcatctaggccggatatcatgtttagtgtttgcatgtgtgcacggtttcaagccgctcctaaggagtgtcacttagcggccgtgaaaaggattctaagatatttaaagcattcctctactattggcttgtggtacccaaaaggtgctaaatttaagcttgttggctattccgacttggattatgccggttgcaaagtggatagaaatagcacatccggtagttgccaaatgcttggtagatcccttgtgtcatggtcatccaagaaacaaaactccgtagccctctctaccgccgaggcggaatatgtttcggcggtgatgcctccccacactcgccatggtcgtcgtgcacccactccggatcccgtgagtgagcctgtggaatcgagcggaaatgagtacgctcaaagtgatgaagaggttgaggccaatgttgaaggggctagtgaggaggcaagtggagatgatgtcagtggaagtggagaggatgaggacgaaggaactgatgatatgcacattgatccctccatccagtttgttgtgaacatgaggaatccatcgcagtataccatcttgaggtaccatgatcagtttttgaggcctcgggacaccccggatccccgttttcacaccgctttccagaagagtgtgtatgagcaggtttatgcagggaaagcttttgcagagcataagtggatttcttggagagacatcaatgagactctagagtttgagggcttacaggatctcttcgagactgttggcattgaccagattgtgactttcaaacaagactacaatgaagatttgatccggcagttctatgctacagtgtgggtggctggagactatagtgagatgaattgctttagctcgttgcaacacacgggcattttactagtttaa

SEQ ID NO: 14910 - DNA, 1695 bp, Oryza sativa
  Clone ID: TFbOSC13279j.C1.o6.fg
atggatatctctgaggcaaatgaaggctacgcgagctgcggctcggtaatcgagatgtctaggcaaatgaagactacacgggttggcctgggttggcttgggacgagctgggacccaggtcgggttgccagttcggtccgaatcatcgtaggccttgggttaaggcagaataagcctaacatacatcataacagcaaaagacttagatctgttaaggtcctatccttagtttctaatctgtctctcccctttgttttccctctctccctctccaaacctttgcaacagatggctgacaatgagaaaggcaataaggtcagaagtcaggacattggtacctcaagctcccgagtgaatgaagcaccagacaccagttgtgtgacactagtccaacacctgattaaccagaaccgattgcttatagagatactacagcagcaccagacgccaatgctgaacttgagtcaaatacaacctcaagtgcagttggaggcagtccaagcactcacaccacaagtcagcatgccgccaacatcccgaaggacccatgatgacatgccacatgttgacccaaaagaagcaagtatcatctgttttatgtgtgatgagcaagtgcactatgcaagggagcgtcctcagcagaaaagaaaaacaccaatgcgaaccgaagatgaagtccgtaagatgatcattaccagcacagaatggcctccaccaggaatgacaagacgtcagagaagaaataccttccgaggtgcaccacagttgacagagcatcttttagctaatggaggtagagtatctgatagtgaagattcagatcaagtctcctcagatgatgaagatgaaatggaacgtaaggcatgctctcgttgtggagaaatcggtcatgtcgccagctcgtgtgccactatatgcgttcattgcgaggaagaccatccacccgacaggtgtccaacgagcaggatcacttgtttcttttgtgaaggaactgatcatgtaccaaaagattgtcaattcagttttctgctgacgaagaagatggctaaccaacccgccagttccaatggagagaagcatcaaggaagcaccaatcctcgccaagattacagtttcagcctaactccagtgccaggacagaggaatcaaaatgagaaaagaaaatgccgagtccgggaagatatctgttgcttcaattgtcaaggaatgggtcatttcgccgacaagtgcccaaaaccgagaaacatagctgccggcacgtcagtccacgcaaccccccgcaatcagaagcttgctcctcaacgaattgtcatccatgcatcccgaagcagtcctatagcccgcgttgcaacagctccaactccaatgagtgcactaccacaaggtgtcaatgctcaatttcagccccagccaccagctgacaagacagaggtcagtatctgcgttgtacctttggaagttccaatacagcagctgagaaatcaagtacaagatgaagaacccgagtgtaagaaagttattgtttgttacaactgcagtgaagaagggcattactccaaaaactgtccccaaccaaggcaaaatcggcctccacattttcgccaatttacaggaagcaaccatgccaatcaccaagtagtcagtggagcaaatgcagtacctgttaagcctagtgctagtcagaagcaaccataa

SEQ ID NO: 14911 - DNA, 689 bp, Oryza sativa
  Clone ID: TFbOSC20836j.C1.o2.np
tccgtcgaccccgtcgacccgagccgcgccgccgccttccttcgctccggccgcctttttcgtcgtcgccgtcgacctagggtgagccgtggaccgccgcctcttttccctcttcccttcccctctctcggccaccgctccgccgtgcctatggccaccgccggcgaccataggggcgcgggcgccgcctcccgccggctgcgccggcttggctgccctcgggcgcaccgagtggctgccgcgtggggcccggccatcagccgcccgcgcccttaggtgcggctgacgcgtgggacccacggcgctggccggtgcgagcccgagtgcgcccagtccaccgtggacccacctcggccatataaggaccggtcttcgggcctctgttgcaaagcactaccgtacttccacaagtctagtgggacaaatgaaggctacacaagctgcggcccggtagtcgagatgtcatggcacagggccggtgtcctgctgctaggggctcagtcctgcctacctgtcccggggtttccggccgtaggtgggattgggttgatgtacacctctgatcagagtataatctattcgaatagccgcgccttcggttatgggaaagccgagcaatgtacccaatgggcggctacgacatcccggcgaggacgcgggtgttcatcaacacgttcgccatggggcgc

SEQ ID NO: 14912 - DNA, 3699 bp, Oryza sativa
  Clone ID: TFbOSC400337j.C1.o8.fg
atgtctgcacttgtagccgctgccgcctcacctagagccggcgccgctgccaccgtccctggagatggcatgccgggagccggagccgctgtgaacgacaacgtcaacggaggcagttctgcctcacaatccagtggagggacattctcgggatcaccccacattgttcatgtcatgattattgtcttaatattttggattaaaatatgccgatatatgaccatatttccaacaatccaaaaacctgataggtcattttcggtagttggctttgctctgaaaccacatgcatttgatggttctaactataagaggtggaaagcacgtgcactattgtggttgacagcgatgcaatgcttctatgtttcacggggtaaacgaagtgaaccacctctctctcctgaagaagaggttaagttcgaggcttcggattgcctgttccgtggagcattgatcagtatactcgctgacaacatagtggacgtgtacatgcacatgccttccgggaaggacatgtgggatgcacttgaggccaagttcggagtttccgacgccggcagtgagctgtatgtcatggagcagttctatgactacaagatggtcgatgaccgttctgtagtagaacaagctcatgagattcagatgctggctaaggaacttgagaacaacaactgtgagttgtcggacaagtttgtggcgggtggcattattgccaagttgccaccttcttggtcggactttgccacttctctaaagcacaagagacaagagttcagtgtttctgatctcattggctctttgggtgttgaggagaaggcgagggcaaaggacaaccggcacaaaaaggttgagggaggttctagtgccaatatggtacagaagaagaaccctcatgcatcccacaacaacaagaaagtcaagcctgatggcaaacccaaggctacaaccaattttaagaagaaaggcaagggaaaggcaaatggagactgctttgtgtgtggcaagtctgggcattgggccaaggactgtcctaagcgcaaagacaggaagtctgccaatatggtcattagcaagggcggagaaacatcggggtacggtaaattattacctacagttctctctgtttttcattcatctgattggtgggttgatactggtgctaatattcatgtcgggagaggttcctccttgtcgatgggaaacgggtcgcttgcggctgttcatggtgttggtatggtcgatttgaagttaacttcgggaaagaccgtgcagctgaagaacgtgcagcatgtcctttcaataaagaagaatcttgttagcggctctctattgtgtagagaaggttttagacttgtgtttgaatccaataaatgtgtcgtatctaaatatggaacttttgttggaaaaggttatgacagaggaggcttgttccgcttttctttggatgacatgtgtaataatcataatgttgtgaaccatattagcgagaatggttctaagtgccatacttgtgttcaatcgaaacaatctcgcaagcctcataaggcatctgaggcgaggaatttggcacctctagaacttgttcatttcgatttgaaagcattgcattactttaagacctataaagctgaggtagaaaaccaacttgaaaggaaaatcaaacggttgaggtctgatagaggtggggagtatttttccaatgagtttgcatccttttgcgaagagtttggaattattcatgagaggacgcctctctattcaccccaatcaaatggggtggccgaaagaaagaaccgtactctaactgagatggtgaatgccatgttagacactacggggctttccaaggaatggtggggtgaggcagttttgactgcgtgtcatgtcctgaataaaattctaatgaagcataaggatgtgacaccattcgaggaatgggaaaggaagaaattaaatctctcatacctacgaacatggggctgtttggccaaggtaagtgtacctatagctaaaaagcgaaaacttggaccaaatactgttgattgtgtgttcattggttgtgctattcacagtgtgggttatagattcttaatagtaaactctggagtacccgacatgcgtgttggtacaattattgagtctagggatgctacattctttgagaatgaatttcccatgaaacatacacctcgcacttctagtcaagaaactgttataccccatgagcactttgcaccgatagaacacaatgatcaaacgcctgagggaaatcctgaggaggacaacattgtagatactcgtaagagtaagcgacaaagggttgcaaaatcctttggagatgactacattgtatacctcgtggatgacaccccaagaaccatagaagaggcatattcatctcctgacgcttactactggaaggaagcagtacgcagtgagatggactcgattatgtctaatgcctctcatggtcttctcgtccatcagatggatgttaagacagctttcctaaacggagagctggaggaggagatctatatggatcaaccagacgagtatgtactagaaggtcaggagggaatgggttgtaaactgttgaaatccttgtatggccttaagcaagcacctaagcaatggcatgagaagtttgacaccacacttatatctgttggctttgttgtgaacgaagctgacaaatgtgtgtactatcgctatggtgggggagaaggagtgatcttgtgcttatatgtcgatgacatattgatctttgggaccagcctcaatgtgattgaggaggtcaaggactttctgtccaagagttttgaaatgaaggatttgggagtggctgatgttattattaacattaagctactaagaggagatgagggtgggattacacttgtgcaatcccactatgtggacaaggttttgagtcgctttggatatagtgactgcatgccagctcctactccttatgatcccagcgtgctattaaggaaaaaccgaagaatagcaagggatcaactgagatactctcaaatcattggttcattgatgtacttggctagtgcaacgaggcctgacatctcatttgctgtaagcaagctgagccggtttgtctcaaatccgggagatgatcattggcaggctctggaaagagttatgcgctatctaaagggcactatgagctatggaattcactataccaggtatccaaaattactagaagggtatagtgactcaaactggatatctgatgctgatgagataaaagccgcaagtgaatatgtgttcacacttggaggtggcgttgtttcctggaagtcttgcaagcagaccatcttaacgaggtcaacaatggaagcagaacttacagcactagatactgcgacagttgaggccgagtgccttcgtgaactcctgatggatttgccgatggttgaaaaaccagtgccagctatcctaatgaactatgataatcaaacaatgattattaaagtgaacagttcaaaggacaacatgaagtcatctaggcatatcaagagaagactgaaatctgttagaaagcataaaaactccggagtgatagcattcgactatgtccaaacagctagaaatctggcagatcagtttaccaaggggctaccacgtaatgtgatagacagtgcatcgagggaaatgggcttgatacccacctaa

SEQ ID NO: 14913 - DNA, 4029 bp, Oryza sativa
  Clone ID: TFbOSC400572j.C1.o23.fg
atgtcgaacactggagacaaggagaaggagactcccgtcaacaccaacggaggcaatactgcctcaaactccagcggaggactattcttggggtataaccttattacattatttcaattagaagttttactgttaatgttcatcgcaatgtcaacattgtgtcattatgtgattgttgatgcttattcaacgttaagcatgctcatgttgattacattcaccactatcactggatcaaatcctattgtaaatatcatgtttattatcttgttattttggattaaaatatgccgaattatgaccaaatttccaacaatccaaaaacctgataggtcattttcggtagttggctttgctgctgcactgaaaccacatgcctttgatggttcaaactataagagatggaaagcacgtgcactattgtggttgacagcgatgcagtgcttctatgtttcacggggcaaacgaagtgaaccacctctttctcctgaggaagaggctaagttcgaggcttcggattgcctgttccgtggagcattgatcagtgtactcgctgacaacatagtggacgtgtacatgcacatgccttctgggaaggacatgtgggatgcacttgaggccaagttcggagtttctgacgccggcagtgagctgtatgttatggagcagttctatgactacaagatggtcgatgaccgttctgtagttgaacaagctcatgagattcagatgctggctaaggaacttgagaacaacaactgtgagttgccggacaagtttgtggcaggtggcattattgccaaactaccaccttcttggtcggactttgccacttctctaaagcacaagagacaagagttcagtgttcctgatctcattggctctttgggtgttgaggagaaggcgagggcaaaggacgtccggggcaaaaaggttgagggaggttctagtgccaatatggtacagaagaagaaccctcatgcatcccacaacaacaagaaagtcaagcctgatgtcaaacccaaggctgcaaccaattttaagaagaaaagcaagggaaaggcaaagggagactgctttgtgtgtggcaagtctgggcattgggccaaggactgtcctaagcgcaaagacaggaagtctgccaacatgatcattagcgagggcggaggaacatcggggtacggtaaaatattacctacagttctctctgtttttcattcacctgattggtgggtggacactggtgctaatattcatgtcgggagaggttcctccttgttgatgggaaacgggtcgcttgcggctgttcatggtgttggtacggtcgatctgaagtttacttcgggaaagaccgtgcagctgaagaacgtgcagcatgtcccttcaataaagaagaatctagttagcggctctctattgtgtagagaaggttttagacttgtgtttgagtccaataaatgtgtcgtatctaaatatgggacttttgttggaaaaggttatgacagcggaggcttgttccgcttttctttgaatgacatgtgtaataatcataatgctgtgaaccatattagcgagaatgatgagtctaatgtgtggcattcgcgactctgtcatgtgaatttcggttgtatgacgcgcttagctaacatgagtttaattccaaaattcactttggtaaaaggttccaagtgccatacttgtgttcaatcgaaacaacctcgcaagcctcacaaggcatctgaggcgaggaatttggcacctctagaacttgttcattccgatttgtgcgaaatgaacggcgtgttgactaaagggggaaagaaatatttcatgacactgatagatgattgcactagattttgctatgtgtatctattgaaaacaaaggatgaggcattgcatttctttaaaatctataaagctgaggtagaaaaccaacttgaaaggaaaatcaaacggttgaggtctgatagaggtggggagtatttttccaatgagtttgcatccttttgcgaagagtttggaattattcatgagatgacgcctccctattcaccccaatcaaatggggtggccgaaagaaagaaccgtactctaactgagatggtgaatgccatgttagacactgcggggctttccaaggaatggtggggtgaggcagttttaactgcgtgtcatgtcctgaataaaattccaatgaagcataaggaagtaacaccattcgaggaatgggaaaggaagaaattaaatctctcatacctacgaacatggggctgtttggccaaggtaaatgtacctatagccaaaaagcggaaacttggaccaaaaactgttgattgtgtgtttcttggttatgctatccacagtgtgggttatagattcttaatagtaaactctggagtacccgacatgcatgttggtataattcttgagtccagagatgctacattctttgagaatgaatttcctatgaaatatacacctatcacttctagtaaagaaactgtcatgccccatgagcactttgcaccgatagaacacaatgatcaaacgcctgaggaaaatcctgaggaggacaacattgtagatactcgcaagagtaagagacaaagggttgcaaaatcctttggagatgactacattgtatacctcgtggatgacaccccaagaaccatagaagaggcatattcatctcctgacgctgactactggaaggaagcagtacgcagtgaaatggactcgattatgtctaatggtacttgggaagtcgttgagcgtccatatgggtgcaagcccgtaggatgcaaatgggttttcaagaaaaagcttaggcctgatggtacaatcgaaaagtacaaggcaaggcttgtggccaagggttatacccaaaaggaaggcgaggacttcttcgacacatactcaccagttgctcgcttgaccacgattcgacaagcacctaagcaatggcatgagaagtttgacaccacgcttacatctgcaggctttgttgtgaacgaagctgacaaatgtgtatactatcgctatggtgggggagaaggggtgatcttgtgcttatatgtcgatgacatactgatctttgggaccagccttaatgtgattgaggaggtcaaagactatctgtccaagagttttgaaatgaaagatttgggagaggctgatgttattcttaacatcaaactacaaagaggagatgagggtgggattacacttgtgcaatcccactatgtggacaaggttttgagtcgctttggatatagtgactgcaagccagctcctactccttatgatcccagcgtgctattaaggaaaaaccgaagaatagcaagggatcagctgagatactctcaaatcattggttcattgatgtacttggctagcgcaacgaggcctgacatctcatttgctgtaagcaagctgagccggtttgtctcaaatccgggagatgatcattggcaggctctggaaagagtaatgcgctatctaaagggtactatgagctatggaattcactataccgggtatccaaaagtactagaagggtatagtgactcaaactggatatctgatgctgatgagataaaagccacaagtggatatgtgttcacacttggaggtggcgctgtttcctggaagtcttgcaagcagaccatcttaacgaggtcaacaatggaagcagaacttacagcactagatactgcgacagttgaggccgagtggcttcgtgaactcctgatggatttgccggtggttgaaaaaccagtgccagctatcctaatgaactgcgataatcaaacagtgattattaaagtgaacagttcaaaggacaacatgaagtcatctagacacatcaagagaagactgaaatctgtcagaaagcagaaaaactccggagtgatagcattggactatgtccaaacggctagaaatctggcagatcagtttaccaaggggctaccacgtaatgtgatagacagtgcatcgagggaaatgggcttgatacccacctaa

SEQ ID NO: 14914 - DNA, 3741 bp, Oryza sativa
  Clone ID: TFbOSC401435j.C1.o29.fg
atggagcggcgtccgccgattcggccggactggcaagctaacaagcgtcaggcgatggagcaaggcggaggtgactgggggatccgcgacgtccgggaggaggagggcctccggcgtccactccccaatcaaccaagggtgaatccaaatgtcaagcctcaaggtcgtcaagctgcggagatggagcgtggggctggtacgatgaagatcaagtgcttcaaatgtggccgtgaaggtcaccaccaggcaaactatactaatccccccctctgttactcttgccacaatactggacacattgcttctcattgcccgctgatttctgctaaaagatgtgttaagctctgtggatttgggatcccagggcaagggttctatagtttgcaagtagagatttctgacgcagaggtggctagagctcctgtgagaggtattttgacagtgattcagggggaagcttctgtgagtaaagtgctagctgaactgaaacacttgtttgtaggtttaacttgggattggaaaattaagcagctaaatgctaaagaatttctcaaaaaattcccttcatatgaagttaggagtcagatttcaacttgcaagagctttgactttgagacatcccagattaaagctagtgtggtggagactggtataactgaagaggctgttgatgaattagtggctgtctgggtgaaaatctatgggattccaaaaatggccagatcagaagactatatcaaatctattgtggagctggttggggagtttgaggctgtagaggttgcaagtatcaggagagatggtccagtaagggtgagagttgcctgtaaggatcctagagagctatatttctctattcatctgtacataaacaaggtgggttacatgattcgttgggaacctaaggggtacttaccttatgagaatagacagaatcctccagatgatgatgacaaagatgataaggatgatgaggggctagaggatgatatgaatctagatgacgaattcaagaatcatgacatctctagaggaagacctcttaaaggcgagggaagccaacatgagagtagagcaggagctttttctgctccacccacttacaagggcaaagtcagttctgaacagggaggaagtataaaaatgatagcctctaagaaaacctctcttttgaaacaccctgacttatttgagagttgtacttctttagtgatatggggagacaaaaagcaagagatgattgcagagcaggaatcccaagagttggaggcacctgaattgtcccaaaatgagactagacccgagttctcaacactgttagagtttgatgaggatcttgagagatgccaaatccctactgattctgacattgagaggctgagagaagaagaagatagggaggaggaggacagtttccaggaggtctctaacaggaagaaggggaaggctaaaaggactgaacctgcagttacttcaagaatgagcttaagacatagagagttagctgttgttcctattccaaagagagctaagatcctgacccaaaggaaaaatttggagcaaccagactctgttgaattgaaaaagattgatgtagctgctaatatagatctaggcagtaaccctgttgagattgacaacaatattgagactttaaaagccaaagagttagtccaagctaagttagctgagttgaattggaagaatcaattggagaaacagaaacctcaggcaggagatgtttctgttcctgcaaaggtgattgagtcagaagatgtgtcatccattaaagagttggaaacagatttgagagttgaaaaagatggcataagccctgagcctaacaagagagaaactcatgcaggggctttttttcttagtaatgtcattaaattgaattatgataattcttgttgggagatcatggtgatttatggtcctgtggataacaatctgaaacaggcttttctggatgaactgaattggcacattctttatagatcccatcatgtggtgattgggggggattttaatttgtataggtttgctagtgagaaatcgaacaccaacactaactctagaaatatggatatgttcaattctttcattgctaacttagatctgagagagatttatcgcagtggccctaaattcacttggactaacaagcaagattctcttgtgcaagaagtcctagataggattctagtgaccactgactgggatgatatgtaccctactgctcttctttcctctatcttaagagtgggttctgaccacatccctcttctactagatacttgtgaaggtattatagtcaagagtaagtactttaagtttgaatctgcttggcttgctgaagagagttttaaagagttggttattcagaggctgttacctagagacaattcttatattttagagttttggaataaaaaacaaagcagtctgagacgattcctggtaggatggggcaaaaacaatcgctctaaaaagctgagggagaaaagaactttgcagtgtaaaatagaagaacttgataagaaggctttgactgaggaactgacttcagatgagtggaatcagagatacagttgggagaatgatcttgagcacatctatgagatggaagaactttactggcataaaagatgtggagagcaatggattcttgaaggagatagaaacacagagttttttcacagagttgctaatgggaggaaaagaaagtgtcacattacatccttgatggatggagaaacagagttgacctctaagagtgaaatccgagagcacattgtggagtactacaaaaccctctttagagatgtccccactgccaacattcacctttcccagggggtttggacgaaccacctcaacctttcagatgctagtaaagaaaacctgactaggccctttgtaatggcagagttagataaagttatcaatgaagctaaacttaacacagctcccggccctgatggttttagtatccctttctatagagctttttggccccaagtgaagaatgatttgtttgagatgttactcatgctacacaatgaagatctggacttaaaaagacttaactttggagttatttccttaattcctaagaacaacaatcccactgacataaaacagtttagacccatttgtgttcttaatgactgttttaaattcctaagtaaggtggtgactaatagattgacagaagtagctgatgaagttgtttctcaaacacaaactgcttttatccctggtagatttatccttgagggttgtgtcattattcatgaggtgctccacgagttgaaaagcaaaaattcagaaggtattattctgaaaattgacttcgagaaagcgtatgataaagtgaactgggagtttttaatagaagtgatggaaagaaaaaatttcccaaagaagtggattagttggatcaagtcctgtgttatgggaggtagagtttgtataaatataaatggtgagagaactgacttttttagaacttttaggggccttaggcagggtgaccctctctctcctctcctctttaatcttgtgagtgatgctctagctgctatgtttgacagtgccaaagctgctggagttttatgtggattagttcctaacattttcccggggggtattactcatcttcaatatgcggatgacacagtcctatttgttgctaatgatgttaatcaaattgtggccacaaagttcatcctctaa

SEQ ID NO: 14915 - DNA, 1086 bp, Oryza sativa
  Clone ID: TFbOSC14937j.C1.o3.fg
gatgccacatcagtaaaaccggacaaaaatactgccgagggacctcaggagatgcctcgctatgatgatcattatggaagcacacgcttgtatgttggtagactgtcttcgcgcactcgttctcgtgacctagaatatcttttcggcagatatggaaggtcttgtgtgtttgacttgaatgatcttgttgaaggtttttcggttttttacacaacccgggagtggaagttgcaagtcggtgatgcatttgagtacttgagtcatgatggcttactgtttggcaaccattggtgcagaatacgtgaagtggagttgaagcgcgactacgcgtttattgaattcagtgatccccgtgatgctgatgaagcgcggtataacctagatggcagggatgttgatggaagccgcattcttgttgagtttgctaaaggagttccacgtggtgctgctggtggttcacgtgaatatatggggagaggacctcctccaggaacaggtcgctgttttaactgtgggattgatggtcactgggcaagagactgcaaggctggtgactggaagaacaaatgttaccgttgtggagaaagaggtcacatagaaagaaactgccaaaacagtccaagaaatctcagccgatctaggtccagatccctatctggatctcccaggggacgcagagatcgtgatgataggagatcaaggagtcttagctacagcagaagtcccaggcgatccatctccccagcagcaaatggaaaggagcgcaaccccagcccgaatggtaggcggagtccaaggagtccacaggatcgggtaagcccaccacccaaggataatgatgagcgcaatggtgacagcccctggggcagggagaacagcaggagcccatctgacggctaccgtagccctgtggctgccaatgggcgcagcccaagcccaaggaacaatggaagccctagtccaatggacaacaatagccgaagcccaagggacaacggcagcccgagccctagggatggaaatggtgatggtggtagccgtggcggctcacgctcgcccagagcaagcgagtcccctgaagcttga

SEQ ID NO: 14916 - DNA, 975 bp, Oryza sativa
  Clone ID: TFbOSC2613j.C1.o1.fg
gagatgccgcgctatgatgatcgttatggaagcacgcgcttgtatgttggtagactgtcttcccgcactcgttctcgtgacctagaataccatttcagcagatatggaagaatacgtgaagtggagttgaagcgcgactacgcatttattgagttcagtgatccccgtgatgctgaggaagcaaggtacaaccttgatggcagggatgttgatggaaaccccattcttggtgagtttgctaaaggggttccacgtggtcctggtggttcacgtgaatatatggggagaggacctcctcctggaacaggtcggtgttttaactgtgggattgatggtcactgggcaagagactgcaaggctggtgactggaagaacaaatgttaccgctgtggggagagaggtcacatagaaagaaactgtcaaaacagcccaagaaatctcaggcgtgagagaagttattcatgctctccatcgccacgccgtggacgtggtcgcagtcggagctatagccggagccggagccggagccgcagttacagccggtctaggtccagatccctgtctggatctcccagggcacgcagagagcttgaaagatcaaggagtcttagttacagcaggagtcccaggcgatccatctccccagcagcaaatgaaaagaagcgcagccccacccctgatggtagccgtagtccaaggagtccacaggaccaggtgagcccaccacccaaggataatgctgagcgtaatggctcagatcacggtgacagcccccggggcagggagaacagcaggagcccgtctgatggctaccgtagccctgcagctgccaacgggcgcagcccaagcccaaggaacaatggaagccctagcccaatggacaacggtagccgaagtcctagggatggaaatggtgacggtggtagccgtggtggctcacgctcacctagaccgagcgagtctcctgaagcctga

SEQ ID NO: 14917 - DNA, 972 bp, Oryza sativa
  Clone ID: TFbOSC400090j.C1.o17.fg
atgccgcgctatgatgatcgttatggaagcacgcgcttgtatgttggtagactgtcttcccgcactcgttctcgtgacctagaataccatttcagcagatatggaagaatacgtgaagtggagttgaagcgcgactacgcatttattgagttcagtgatccccgtgatgctgaggaagcaaggtacaaccttgatggcagggatgttgatggaagccgcattcttgttgagtttgctaaaggggttccacgtggtcctggtggttcacgtgaatatatggggagaggacctcctcctggaacaggtcggtgttttaactgtgggattgatggtcactgggcaagagactgcaaggctggtgactggaagaacaaatgttaccgctgtggggagagaggtcacatagaaagaaactgtcaaaacagcccaagaaatctcaggcgtgagagaagttattcatgctctccatcgccacgccgtggacgtggtcgcagtcggagctatagccggagccggagccggagccgcagttacagccggtctaggtccagatccctgtctggatctcccagggcacgcagagagcttgaaagatcaaggagtcttagttacagcaggagtcccaggcgatccatctccccagcagcaaatgaaaagaagcgcagccccacccctgatggtagccgtagtccaaggagtccacaggaccaggtgagcccaccacccaaggataatgctgagcgtaatggctcagatcacggtgacagcccccggggcagggagaacagcaggagcccgtctgatggctaccgtagccctgcagctgccaacgggcgcagcccaagcccaaggaacaatggaagccctagcccaatggacaacggtagccgaagtcctagggatggaaatggtgacggtggtagccgtggtggctcacgctcacctagaccgagcgagtctcctgaagcctga

SEQ ID NO: 14918 - DNA, 1170 bp, Oryza sativa
  Clone ID: TFbOSC900030j.C1.o14.fg
atgctccgtagccgcgctcgcctgccgctgcgcctgcctccagccgtgcgccgctgccgctccccatctgcggcaaaggaaaaggatgccacatcagtaaaaccggacaaaaatactgccgagggacctcaggagatgcctcgctatgatgatcattatggaagcacacgcttgtatgttggtagactgtcttcgcgcactcgttctcgtgacctagaatatcttttcggcagatatggaaggtcttgtgtgtttgacttgaatgatcttgttgaaggtttttcggttttttacacaacccgggagtggaagttgcaagtcggtgatgcatttgagtacttgagtcatgatggcttactgtttggcaaccattggtgcagaatacgtgaagtggagttgaagcgcgactacgcgtttattgaattcagtgatccccgtgatgctgatgaagcgcggtataacctagatggcagggatgttgatggaagccgcattcttgttgagtttgctaaaggagttccacgtggtgctgctggtggttcacgtgaatatatggggagaggacctcctccaggaacaggtcgctgttttaactgtgggattgatggtcactgggcaagagactgcaaggctggtgactggaagaacaaatgttaccgttgtggagaaagaggtcacatagaaagaaactgccaaaacagtccaagaaatctcagccgatctaggtccagatccctatctggatctcccaggggacgcagagatcgtgatgataggagatcaaggagtcttagctacagcagaagtcccaggcgatccatctccccagcagcaaatggaaaggagcgcaaccccagcccgaatggtaggcggagtccaaggagtccacaggatcgggtaagcccaccacccaaggataatgatgagcgcaatggtgacagcccctggggcagggagaacagcaggagcccatctgacggctaccgtagccctgtggctgccaatgggcgcagcccaagcccaaggaacaatggaagccctagtccaatggacaacaatagccgaagcccaagggacaacggcagcccgagccctagggatggaaatggtgatggtggtagccgtggcggctcacgctcgcccagagcaagcgagtcccctgaagcttga

SEQ ID NO: 14919 - DNA, 384 bp, Oryza sativa
  Clone ID: TFbOSC13213j.C1.o5.np
tgcaatgtcaacatcattcaccaaggtgtcgacgatagtatcaatgatggcacccaaaatgacaaccctagcaattgggactctgaaaaagactccaatggtgatagcaactatggtaccactgatgccaatgttaccaaggatttccaaccaccaattccaactccaagtcaaaatgatcgtccccagatggatagctcagcaaaaaagacgttgatttgctacaattgcaaaaaaccagggcattactcgagggactgcctgcaatcaaggcaaagtcgacctccacattaccgccaatttacacgaagcagacatcccaatcgtattgtggtcactggagcaaacgccgtacccgtgaggcctcgtgttaatcagaaccca

SEQ ID NO: 14920 - DNA, 412 bp, Oryza sativa
  Clone ID: TFbOSC14509j.C1.o1.np
cggaagatccggccgccattgatgcgccggcgaagtttgcgggagcggtttccaaccgaatccgagggagagagggagggaaaattggggggaaagggagagggaatcacggggaataattccccccactttattgcgcgcggggacggcgggaggcggcgggattcgcggcggcagcggcgctagggcgcgggcggggcggcgggagcggcgggaggatagggatgacaggtgggccccacccgtcagcgagagtggcgggcgggcccgcccgtcagcggcgcgcgcgcggggagaggccgagtgggccgcggggagaggagggagaggggagggagatgggccgggctggccagagagagagagggaaggaaaaagatatttttagcttttcctttttataaaatcattt

SEQ ID NO: 14921 - DNA, 4383 bp, Oryza sativa
  Clone ID: TFbOSC413089j.C1.o13.fg
atggctagccgcccccgccgtgcagctcgtgcaccagcccgctttggttttgaagatggtagagtcgagccagaagcaaatcatgagtcagctaatgagcggtctcaccacagcaaccgttcgcaccgtactgcttcccgcaacgcagaagttgagcaacctcgccgcagcaaccgctcgcatcgcacagcttcccgtgatgcagagattgaacagtctcaccgctctcaccgcactgccagtcacaattctggagaagaacgcctcccttccccacctcatgtggaaaacaacatgcagcacctgatggcagttcagacacaaatcttgcaaggattagccgcagccgtagctggttttcagcataatgcgcatggaaatggccaccctcacacgaataacaatagatccaagctgacagattttctgaggtctcgtccgccagagttctctcagaccgtcgagcccgtcgaggctgacgattggctgaaggatgttgatagaaaactcaacttagtgcagtgtactccggttgagaagacgctctacgcctctcaccagctaagaggacctgctgcagattggtgggagaattactgcaacgcacaccctgaacccactaacattgcttgggatgagtttgctacggctttccgtgcagctcatgtgcctgaaagcactattgacatgaagaaagaggaattcaacagacttaagcaaggcaacagcagtgtcaatgagtacctaagtatgttcaacaagttggctcggtacgcccctgaggaagtggacacagacaagaagaagatcaggaaattcttgaaaggaatcgcagttggaatgagactccagttgcttgctcatgacttccccacttttcaatatatgatcaacaaggcacttctacttgaggatgccagaaaagaggctaccgaagaatacaagaaacgcaagtctaaccatcagggaaattcttcccgaggcgcacctcaccctcgctacggtcaacccatgcaataccaccagtcggtcactcaggctaaccgccagccaggctacgcccctcgtcctcagatgaaccgtccggcacctcagccacagcagcgtgcccctagtggcaatactgcgccaaacagtgttacctctttcaagtcaccgcagggaccaacaacagttcagtgtttccggtgcgaccagatgggccactatgccagacagtgccctcagaatcctaccaacaccaactcagggcatgctaatggcagcactgccagaactcctactccagcggcagctcagtttcgtcctagctctcaggcaagtggacaaggttcacgtgcttccaacaactttggtcgaggccgggtgaaccacattcaagctgaaaccgctcaggatgctccagacgttgtgatggtacattcccctgggaggaatataagggcaactcaaatatgcccggaagttaaccttagaattgaggaagttgacttcctagccaaaccgatagtcctagactcgcaaagcttggacatcatcctagggatggattggttcgctaagcacaaaggacagatagattgtgccaaaaagtccatcaccttgcaaggacctggaggaaagcaagtccgctttacctctaacacccctaccgcaagtcggtctatcctaacctgtttacaagtcacctccttggagtcggtgcctatagtctgtgaatatcccgacgtatttccggaagaattaacgagtatgccaccagaccgagagattgagttcgccatagaactggcgccaggcactgcaccaattgcaaaaagaccctaccgaatggcagctaatgagttagcagaagttaaaagacaaatcgaagagttggagagtaaaggttatgtgcgacctagctcatccccttggggagccccagtgcttctggttaagaaaaaggatggctctgagagaatggtaatcgactatagagccctgaatgaagtaactataaagaacaagtacccgttgccatggattgacgacttgttcgatcaacttaaaggagcaagagttttctcaaaaattgacttgagatcaggttaccaccaactgaaaatcagatctgaagatatcccgaagaccgctttctcaacgcgttatggtctatatgagttcacagtgatgtccttcggactcaccaatgctccagcgttcttcatgaacttaatgaacaaaatctttatggattacctggaccagtttgtcgtggtgttcatcgatgacatcctgatatactccaagaacgaggaagaacatgccgaacacctgaggctgataatggaaaagctcagagatcaccaactattcgctaaattctcgaaatgtgaattctggttagaccgaatagcatttcttggacacgtgatctcctccagtggtgtcgaagtagatcccagcaaggttgaagctgtacttgcttggaacccgcccaagaatgtgtcagagattcgcagcttccttggcttagctggatattatcgaagattcattgaaggattctctaagctagccagacctatgaccgagctgttaaagaaggaaaagaaatttcaatggtctgcagcctgtgaagacagctttcaagaaatgaagaaaaggttgaccactgccccagttctcaccttgccagatatccgaaaagatttcgagatcttctgtgatgcatcaagacaaggcttaggatgtgtcctaatgcaagaacgaaaggttgtggcctatgcatccaggcagctcaggcctcatgaagtcaattatcccacccatgatctcgagttggcagccgtggttcatgctcttaagatctggaggcactatttaatcaggaacagatgtgaagtatacaccgatcacaaaagtcttaagtacatcttcactcagaccgagttaaacatgaggcagagaagatggctggaactaatcaaggattacgatcttggaatccattaccaccccggtaaagctaacgtggtcgctgatgcgctaagtcgcaaggcctattgcaatgtagctcaaatacggcctaaccaagaacgcctgtgcagagaattagagaagttaaggctgaccgtggtacagtcaggtgtccctgccagcttgacagtacagcctaccctagaatcgcaaattcgggaggctcagaaagatgacgaagggataaaagagttaataaaaagaatacaggagaagaaagacaccaacttctccatagacgatcaaggcacagtttggtgcggtccacgcatctgtgtaccggccaagaaggagttaagagatatcatcctaaaggaagctcatgagtccgcctactccattcatccaggaagtacgaagatgtaccaagatatcaaggcatacttctggtgggctggaatgaagcgagatgtcgcagaatacgtagccttgtgtgacatttgccaaagagtcaaggcagagcatcagaggccagctggtctgctgcaacccctaccgattcccgagtggaaatgggaagagatcggaatggatttcatcaccggtttgccaagaacccctagcgggtatgactccatctgggtaatcgtggaccgactcacaaaatcagctcatttcgtgctagtgaaaaccacctttgatggaaagaaactagcagaactctacatgacccatgtcgtatgtagatttggttgtcccaagaagattgtgtcagaccgaggcactcagttcacctcaaggttctggaagcagttgcatgaagccctcggaaccgatctaaactttagtacggcctaccatccgcagaccaatggtcagacagagagggtaaaccaaatcctagaagacatgctacgtgcgtgtgccctggatttcgaaggcacttgggatcgttgtttgccgtatgctgagttctcatacaacaacagttatcaggccagcattcagatgtcgccgaatgaggcaatgttcggaagaaagtgccgcactcccttgtgctggaatgaggtgggcgaagcgctggtattcggtcctaacatactcaagtcagcagaagaacaagttaagctaatccgagaacgtttaaagacagcgcagaaccgtcagaagaattacgctgacaatcggagacgtgaccttgagttcgaaaaaggagatcatgtgtacctgcgggtatcgcctctccatggtataaggaggtttgggatgtccggcaagttagcaccttgctacatcggcccctacctcataaccgccagacgtggcgaagtggcttatcagcttgagttacctgaaggtctcgcagatgtgcacaacgtgttccacgtatcccagctaaagaaatgtcttcgagttccataa

SEQ ID NO: 14922 - DNA, 2092 bp, Oryza sativa
  Clone ID: TFbOSC400545j.C1.o13.np
taagcggcggtgagatgggaagctgcgggcggcggcggcgccctcccctccgccggatccggcgggaggggaggcgggagtcaggaggcgggaggcgggggcgacgggcttcatcaacggagacaattatgcctcacaatccagcggagggccattctctgggtataatctctctatactattgtttactgcgttaattcttattgtgtttctgtttagcgcaatgttttcaatgcattgctgtatgatggatgtctatgcttattatatattaagcatgattcgttcgttacatttgtttaacaattgcactagtttattccctgttaaagtcatgattattatcttgataatttggattaaaatatgctgaattgtgaccatatttccaacaatccaaaaacctgataggtccttttcggtagttggatttgccgcatcactgaaaccgcacgctttcgatggttcaaactataagagatggaaagcacgtgcactactatggttgacagcgatgcaatgtttctttgtttcacggggcaaactgagtaaaccgcctctctctcctgaggaggaggccaagttcgaggctgcggattgcatattccgtggagcattgatcagtgtgctcatcgacaacatagtggacgtgtacatgcacatgccttcaggaaggaaatgtgggatgcacttgaggcgaaattcggggtttctgatgctggcagtgagctgtatgtcatggagcagttctatgactacaagatggtcgatgatcgatctgtagtggaacaagctcatgagatacagatgctggcaaaggaacttgagaacaaccgctatgagttgccagacatgttcgtggcgggaggtatcatagccaaattgccacctttttggtccgactttgctacttctctaaaacacagaggcaagagctcagtgtcactgatctcataggctctttgggtgttgaggagaaggcgagggcaaaggacaaccgcggcaaaaaggtggaggggagttctagtaccaatttggtatagaagaaaaaccctcaagcatcccataacaacaagaaagtcaagcctgatgtcaaacccaaggctacaactacttttaagaagaaaggcaagggaaaggctaagggtgactgctttgtgtgtggcaagcctgggcattgggccaaggactgtcctaagcgcaaagacagaaagtctgcaaacatggtcattagcaagggcggaggaacatcggggtatggtaaatttttacctacagttcttcctatttgtcactcacctgattggtgggttaacactggtgttaatattcatgtgtgtgctgacatttccttgttttcttcttatcaagtcgggagaggttcctccttgttgatggaaaatgggtcgcttgcggctgttcttggtgttggtacggtcgatctaaagtttacttcgggaaagaccgtgcagctgaaaaacgtgcagcatgtcccttcaataaagaagaatctagttagcggctctctactgtgtagacatgattttagatttgtgtttgaatccaataaatgtgttgtatctaaatatggaacgtttattagaaaatgttatgatagcggaggcttgttccgcttttctttggaccatgtaagcaatgatgacgagtcaaatgtgtggcattcgcgactctgtcatgtgaattttggttgtatgacgcgcttagccaacatgagtttaattccaaaatttgctttagttaaaggttccaagtgtcatacctgttttcaatcgaaacaacctcgcaagcctcacagtgcatctgaggcgaggaatttggctcctctagaacttgttcattccgatctatgcaaaatgaacagtgtgttgactaaagggggaaagaaatatttcatgatactgatagatgattgcactagattttgctttgtgtacttattgaaaacaaaggatgaagcactgcattactttaagatctataaggctgaggtagaaaaccagctggaaagaaaaatccaacgattgaggtcagataggggtggagaccgactcacggatacttttaggttcac

SEQ ID NO: 14923 - DNA, 3603 bp, Oryza sativa
  Clone ID: TFbOSC401345j.C1.o5.fg
atgtctggagttgccgccgccgccgctgctggaggagatggcggaggtggtgcgccgccaacaggagctggatccggagccggagctggtgcgccaggaggtgccatgaacgacagcaacaacggaggcaattctgcctcaccatccagcggagggctattctcgggcatgttattgcgttactgttatgttcctgttcctgacattcatgatgcgcatagtatgatactggttatgttaagatcaccctacactgcttatgccatgattattgctttaacattttggattaaaatatgccgattaatgactatatttccaacaatccaaaaacctgataggtcattttcggtagttggctttgctgctgctctgaaaccacatgcttttgatggttcaaactataagagatggaaagcacgtgcactattgtggttgacagcgatgcagtgcttctatgtttcacggggcaaacgaagtgaaccacctctttctcctgaggaagaggctaagttcgaggcttcggattgcctgttccgtggagcattgatcagtgtactcgctgacaacatagtggacgtgtacatgcacatgccttctgggaaggacatgtgggatgcacttgaggccaagttcggagtttctgatgccggcagtgagctgtatgtcatggagcagttctatgactacaagatattcgatgaccgttctgtagtagaacaagctcatgagattcagatgctggctaaggaacttgagaacaacaactgtgagttgccggacaagtttgtggcgggtggcattattaccaaactaccaccttcttggtcggactttgccacttctctaaagcacaagagacaagagttcagtatttctgatctcattggctctttgggtgttgaggagaaggcgagggcaaaggacgtccggggcaaaaaggttgagggaggttctagtgccaatatggtacagaagaagaaccctcatgcatcccacaacaacaagaaagtcaagcctgatgtcaaacccaaggctgcaaccaattttaagaagaaaggcaagggaaaggcaaaggtagactgctttgtgtgtggcaagtctgggcattgggccaaggactgtcctgagcgcaaagacaggaagtctgccaacatggtcattagcgagggcggaggaacatcggggtacggtaaaatattacctatagttctctctgtttttcattcacctgattggtgggtggacactggtgctaatattcatgtcgggagaggtttctccttgttgatgggaaacgggtcgcttgcggctgttcatggtgttggtacggtcgatctgaagtttacttcgggaaagaccgtgcagctgaagaacgtgcagcatgtcccttcaataaagaagaatctagttccaagtgccatacttgcgttcaatcgaaacaacctcgcaagccttacaaggcatctgatagatgattgcactagattttgctatgtgtatctattgaaaacaaaggatgaggcattgcattactttaaaatctataaagctgaggtagaaaaccaacttgaaaggaaaatcaaacggttgaggtctgatagaggtggggagtatttttccaatgagtttgcattcttttgcgaagagtttggaattattcatgagaggatgcctccctattcaccccaatcaaatggggtggccgaaagaaagaaccgtactctaactgagatggtgaatgccttgttagacactgcggggctttccaaggaatggtggggtgaggcagttttgactgcgtgtcatgtcctgaataaaattccaatgaagcataagaaagtaacaccattcgaggaatgggaaaggaagaaattaaatctctcatacctacgaacatggggctgtttggccaaggtaaatgtacctatagccaaaaagcggaaacttggaccaaatactgttgattgtgtgttccttggttatgctatccacagtgtgagttatagattcttaatagtaaactctagagtacccgacatgcatgttggtacaattcttgagtccagagatgctacattatttgagaatgaatttcctatgaaacatacacctagcacttctagtaaagaaactgtcatgccccatgagcactttgcaccgataaaacacaatgatcaaacgcctgaggaaaatcctaaggaggacaacattgtagatactcgcaagagtaagagacaaagggttgcaaaatcatttggagatgactacattgtatacctcgtggatgacaccccaagaaccatagaagaggtatattcatctcttgacgctgactactggaaggaagcagtacacagtgaaatggactctattatgtctaatggtacttgggaagtcgttgagcgtccatatgggtgcaagcccgtaggatgcaaatgggttttcaagaaaaagcttaggcctgatggtacaatcgaaaagtacaaggcaaggcttgtggccaagggttatacccaaaaggaaggcgaggacttcttcgacacatactcaccagttgctcttttgaccacgattcgagtactacttgctctggcagcctctcatggtcttctcgtccatcagatggacgttaagacagctttcctaaacggagagctggaggaggagatctatatggatcaaccagacgggtatgtactagaaggtcaggagggaatggtgtgtaaactgttgaaatccttgtatggcctcaagcaagcacctaagcaatggcatgagaagtttgacaccacgcatacatctgcaggctttgttgtgaacgaagctgacaaatgtgtatactatcactatggtgggggagaaggggtgatcttgtgcttatatgtcgatgacatattgatctttgggaccagccttaatgtgattgaggaggtcaaggactatttgtccaagagttttgaaatgaaggatttgggagaggctgatgttattcttaacatcaaactacaaagaggagatgagggtgggattacacttgtgcaatcccactatgtgaacaaggttttgagtcgctttggatatagtgactgcaagccagctcctactccttatgatcccagcgtgctattaaggaaaaaccaaagaatagcaagggatcaactgagatactctcaaatcattggtttattgatgtacttggctagcgcaatgaggcctgacatctcatttgctgtaagcaagctgagccggtttgtctcaaatccgggagatgatcattggcaggctctggaaagagtaatgcgctatctaaagggcactatgagctatggaattcactataccgggtatccaaaagtactagaagggtatagtgactcaaactggatatctgatgctgatgagataaaagccacaagtggatatgtgttcacacttggaggcggcgctgtttcctggaagtcttgcaagcagaccatcttaacgaggtcaacaattgaagcagaacttacagcactagatactgcgacagttgagaccgagtggcttcgtgaactcctgatggatttgccggtggttgaaaaccagtgccagctatcctaa

SEQ ID NO: 14924 - DNA, 1249 bp, Oryza sativa
  Clone ID: TFbOSC21561j.C1.o2.hg
tgaatgggcggccaaaattgcaattagccccttgtcgccctcgggcctaatcgcaattttggccgacggcggcagacagcgcggtcgacccaccgtctgccacgtcagcttgccgcccaccaattgggcggcaggggctatttctgcaatttttttgtcgatctccccgtcgcttcggtctcgactcctcgtctcctcggccgccgccgccgccgccgccgccgagcagaggcgatctccacccgcgagcagcggcgccgtcgccggtttcaagatgcctcgctatgatgaccgtgatcgctacgatgaccgttacggcggcaacacgaggctgtacgtaggtcgtctttcctcgcgcacccggacccgggaccttgaagaccttttcggcagatatgggagagtgcgatatgtggatatgaagcacgagtttgcatttgttgaatttagtgatgctcgggatgctgatgaggcaaggtacaacctggatggtcgggactttgatggaagccgcatgattgttgagtttgctaaaggggttccacgtggccctggaggatcacgtgaatatatgggcagaggaccaccacctggttctggccgctgctttaactgtgggattgatgggcactgggcccgtgactgcaaagctggagactggaaaaacagatgctatcggtgtggagacaggggccatatagaaagggactgccggaacagccctaagaatctcaagcgtggaagaagctactcaagatccccatcccctcgtcgtgggaggagccgtggtaggagctacagcaggagccgtagcaggagctacagccgctcccagtctccaaggagggatagccgtaatgaaaggagatcaaggagccctcgtgacagtcggagccctaggggaagcccccgtgacagtcgcagccctagggggagcccccgtgacagtcgcagccctaaggggagccctcgcgacacccagagccctaggggaagccctcgtgatagccgcagccctaggagaagtgcttcaccacccaacgggaggaaccgcagccctacccctaatgccagcaggagtcctgcaccaagggacagcaggagcccaatgagagctgacagccgtagccctgctgaccatgagcgccgtgacatgagtacagctgccaatggccggagcccaagccccagggattatgaagacaatggcaatcatcgggcctcgcctagaggaagcgcatccccttga

SEQ ID NO: 14925 - DNA, 626 bp, Oryza sativa
  Clone ID: TFbOSC415629j.C1.o19.gp
tttacaagattgcagacaaggacaatatactttttaaggtagcgatacaaagtccagatcacaaggttccctgcccagtggacattggaggtaataaaggcataaacataaggcaggtttaacaactatacacgatacaccgatgccatccaagatgaacaaaatcaagatgctgctgctgctgctgcttcttcccttgcaaaatacttcagtagccaccaacaaaggattgcctattgtaaccccttgatgctgcaacattattcccatatgtctggtgctgggcgccagtagactgccctggacaatctctagcgaagtgcccaggctgtttacatttgaaacactccgagccaccagtagactgcactggacagtctctagaaaagtgcccaggctgtttacatttgaaacactccaagccaccagtggactgccctggacagtctctagcatagtgcccgggctgtttacatttgtaacactccgagctgccgttgccagcgatggagttgtagttacccatggagcttccaccggctgatgtttcctgcatatccatatctgcacccacatggcagatctgggcgctgtgcccatttgctccacaaatgctgcatgtctgc

SEQ ID NO: 14926 - DNA, 3615 bp, Oryza sativa
  Clone ID: TFbOSC16296j.C1.o1.fg
atggcagatcaggggcactctgtgtctgacggctatgaaatgcttctggatgatctgtatatcatggagcagtttcatgactacaagatggctgacaaccgttttgtagtcgaacaggctcatgagatacaaaccatggttaaggaactcgaactccttaagtgtgtcttacccgacaaatttgtggccgggtgcattattgcgaaactacctccatcatggagaagttttggtactgcactcaaacacaagagacaagaatactccgttgaggggttgatagcgtctcttgatgttgaggagaaagctcgggaaaaagacgccgcatctaagggcgatggtgggcagtccagtgccaatgttgtgcacaaggcccagaacaagagcaaggggaaatacaaagctcaacagaccaccaacttcaagaagcagaagaagaacaacatcaatcctaaccaggatgagaggacttgctttgtgtgtaggcaacctggtcatctggctaggaagtgtccacaacgcaaggggatgaaggcacctgcagggcaaacttctaagtctgctaatgtgacaattggcaatactggagatggaagcaggtatggtaatttacctactgttttttcagttaatcagtctactaattggtgggttgatactggggccaatgtcgcacggggttccactgtcctaatggggactgggtcacatgcttctgttcatggtgttggcacagtagatctgaagtttacttcgggaaagatcgtgcagctgaagaacatgcagcatgtcccttctatcgacaggaatcttgttagtggctcccgtctgactagagacggatttaagttggtttttgtgtctaataaagtagtcgtgtctaaacatggatattttattggtaaaggttatgagtgcggaggcctattccgcttttccttttctgatttctgcaataagtctgtgaaccatatttgtggcagtgtggatgataagactaatgtttggcactcacgtttatgtcatattaattttggcttgatgtttcggctttccagcatgtgtttaattcctaagttttccattgtcaaaggttctaagtgccatagttgtgtgcaatcgaagcaacctcgcaagcctcacaaggctgccgaggagagaaacttggcacctctagaactcctacattcagatctttgtgaaataaatagggtgttgacgaagggtggaaaacgatatttcatgacgttgattgatgatgctactagattttgctatgtatacttgttaaaaacgaaagacgaggctctagactattttaaaatttataagacagaagttgaaaatcaacttgacagaaagataaaaaggcttaggtctgatcgtggtggagagtttttctcaaacgagtttaacttattctgtgaggaacatggcatcatacatgagaggacgcctccctattctctcgagtctaatgggattgctgaaaggaagaaccgcacactgactgacttggtgaatgccatattggacaccgcgggactacctaaggcatggtggggggaggcattgttgacctcgaatcatgtgttaaatagagttcctaacagaaataaggacaaaacaccatatgagatatggattgggagaaaatcatcactttcttatttgcgcacattggggtgcttggcgaaagtcaatgtaccaataacaaagaagcgcaaacttagacctaagactgtggactgtgtctttctgggatatgctcatcataggattgcctatagatttttaatagttaaatccgaggtacctgacatgcatgttggtacaattatggagtctcgtgatgctaccttctttgagagctttttcccaatgaaggatacacatagtagttcgagtcaaccctctgaagtaatttccagtttaatcacaccaccagaacaaactgaacatacacatgaacatgtcactgaggaggatgtcagtgaagctcctcgaaggagtaagagacaaaggacggctaagtcctttggtgatgatttcactgtgtacttcgtggatgacactcctaagtcaatttcagaagcatatgcatctcctgatgcagactactggaaggaggctgtccgtagtgaaatggattccattatcgctaacgggacttgggaggtgacagagcgaccctatgggtgtaaatctgcggggtgcaagtgtgtgttcaagaagaagcttaggtctgacggtactattgaaaagtacaaggctcggcttgttgctaagggctatattcagaaagaaggcgaagatttctttgacacttactcacctattgctagattgaccacaattcgtgtgctactttccttaccagcctcacatggtcttctcgttcatcaaatggacgttaagacaatttttcttaatggagagctggatgaggagatctatatggatcaacttgatgggtttgtagttgaaggtcaagaaggcaaagtgtgcaaattgttgaagtctttgtatggtctgaaacaagctcctaagcaatggcatgagaaatttgacaaaacattgacatctgcaggctttgcagtcaatgaggcagataaatgtgtgtactatcgccatggtgggggtgagggagttattctgtgcttgtatgttgacgacatactgatatttgggacaaaccttgaggtgataaatgaggttaaatcattcttgtctcaaaattttgatatgaaggatttgggagtagctgatgttatcttaaacattaagctaattagaggtgagaatgggattacactcttgcagtcccattatgtggagaagatcttgaatcgctttggctacattgatagtaagccttctccaacaccttatgatcctagcttgttgcttcgcaagaacaaaagaattgctaagaatcaactggaatactcccaaatcattggctcgctgatgtacctggctagtgcaataaggcctaatatctcctttgttgtgagcaagttgagccggtttacctctaatccgggagatgatcactggcgtgcacttgagcgagtaatgcgctatctgaaaggtactatggaattggggcttcactatactgggtatcctgcggtattggagggttatagtgattctaactggatctctgatgtggatgagatcaaagccactagtggatatgtcttgacattgggtggtggtgctgtttcgtggaggtcttgcaaacagaccattttgacgaggtcaaccatggaagcagaactgacggcactggatactgctactgttgaggcagaatggctgcgtgatctattaatggatctgcctattgttgaaaaaccgatgccggctatcctaatgaactgtgacaatcaaacggtaattgtcaaagtgaatagttctaaggataatatgaaatcatctagacatgtgaaaagacgattgaagtctgtcaggaaattgagaaactccggagttataacgttggattacatccaaacagctagaaacctggcagatcccttcacgaagggactatcacgaaatgtgatagataatgcatcgaaggagatgggtttgagacccatgtga

SEQ ID NO: 14927 - DNA, 3615 bp, Oryza sativa
  Clone ID: TFbOSC16300j.C1.o2.fg
atggcagatcaggggcactctgtgtctgacggctatgaaatgcttctggatgatctgtatatcatggagcagtttcatgactacaagatggctgacaaccgttttgtagtcgaacaggctcatgagatacaaaccatggttaaggaactcgaactccttaagtgtgtcttacccgacaaatttgtggccgggtgcattattgcgaaactacctccatcatggagaagttttggtactgcactcaaacacaagagacaagaatactccgttgaggggttgatagcgtctcttgatgttgaggagaaagctcgggaaaaagacgccgcatctaagggcgatggtgggcagtccagtgccaatgttgtgcaccaggcccagaacaagagcaaggggaaatacaaagctcaacagaccaccaacttcaagaagcagaagaagaacaacatcaatcctaaccaggatgagaggacttgctttgtgtgtaggcaacctggtcatctggctaggaagtgtccacaacgcaaggggatgaaggcacctgcagggcaaacttctaagtctgctaatgtgacaattggcaatactggagatggaagcaggtatggtaatttacctactgttttttcagttaatcagtctactaattggtgggttgatactggggccaatgtcgcacggggttccactgtcctaatggggactgggtcacatgcttctgttcatggtgttggcacagtagatctgaagtttacttcgggaaagatcgtgcagctgaagaacatgcagcatgtcccttctatcgacaggaatcttgttagtggctcccgtctgactagagacggatttaagttggtttttgtgtctaataaagtagtcgtgtctaaacatggatattttattggtaaaggttatgagtgcggaggcctattccgcttttccttttctgatttctgcaataagtctgtgaaccatatttgtggcagtgtggatgataagactaatgtttggcactcacgtttatgtcatattaattttggcttgatgtttcggctttccagcatgtgtttaattcctaagttttccattgtcaaaggttctaagtgccatagttgtgtgcaatcgaagcaacctcgcaagcctcacaaggctgccgaggagagaaacttggcacctctagaactcctacattcagatctttgtgaaataaatagggtgttgacgaagggtggaaaacgatatttcatgacgttgattgatgatgctactagattttgctatgtatacttgttaaaaacgaaagacgaggctctagactattttaaaatttataagacagaagttgaaaatcaacttgacagaaagataaaaaggcttaggtctgatcgtggtggagagtttttctcaaacgagtttaacttattctgtgaggaacatggcatcatacatgagaggacgcctccctattctctcgagtctaatgggattgctgaaaggaagaaccgcacactgactgacttggtgaatgccatattggacaccgcgggactacctaaggcatggtggggggaggcattgttgacctcgaatcatgtgttaaatagagttcctaacagaaataaggacaaaacaccatatgagatatggattgggagaaaatcatcactttcttatttgcgcacattggggtgcttggcgaaagtcaatgtaccaataacaaagaagcgcaaacttagacctaagactgtggactgtgtctttctgggatatgctcatcataggattgcctatagatttttaatagttaaatccgaggtacctgacatgcatgttggtacaattatggagtctcgtgatgctaccttctttgagagctttttcccaatgaaggatacacatagtagttcgagtcaaccctctgaagtaatttccagtttaatcacaccaccagaacaaactgaacatacacatgaacatgtcactgaggaggatgtcagtgaagctcctcgaaggagtaagagacaaaggacggctaagtcctttggtgatgatttcactgtgtacttcgtggatgacactcctaagtcaatttcagaagcatatgcatctcctgatgcagactactggaaggaggctgtccgtagtgaaatggattccattatcgctaacgggacttgggaggtgacagagcgaccctatgggtgtaaatctgcggggtgcaagtgtgtgttcaagaagaagcttaggtctgacggtactattgaaaagtacaaggctcggcttgttgctaagggctatattcagaaagaaggcgaagatttctttgacacttactcacctattgctagattgaccacaattcgtgtgctactttccttaccagcctcacatggtcttctcgttcatcaaatggacgttaagacaatttttcttaatggagagctggatgaggagatctatatggatcaacttgatgggtttgtagttgaaggtcaagaaggcaaagtgtgcaaattgttgaagtctttgtatggtctgaaacaagctcctaagcaatggcatgagaaatttgacaaaacattgacatctgcaggctttgcagtcaatgaggcagataaatgtgtgtactatcgccatggtgggggtgagggagttattctgtgcttgtatgttgacgacatactgatatttgggacaaaccttgaggtgataaatgaggttaaatcattcttgtctcaaaattttgatatgaaggatttgggagtagctgatgttatcttaaacattaagctaattagaggtgagaatgggattacactcttgcagtcccattatgtggagaagatcttgaatcgctttggctacattgatagtaagccttctccaacaccttatgatcctagcttgttgcttcgcaagaacaaaagaattgctaagaatcaactggaatactcccaaatcattggctcgctgatgtacctggctagtgcaataaggcctaatatctcctttgttgtgagcaagttgagccggtttacctctaatccgggagatgatcactggcgtgcacttgagcgagtaatgcgctatctgaaaggtactatggaattggggcttcactatactgggtatcctgcggtattggagggttatagtgattctaactggatctctgatgtggatgagatcaaagccactagtggatatgtcttgacattgggtggtggtgctgtttcgtggaggtcttgcaaacagaccattttgacgaggtcaaccatggaagcagaactgacggcactggatactgctactgttgaggcagaatggctgcgtgatctattaatggatctgcctattgttgaaaaaccgatgccggctatcctaatgaactgtgacaatcaaacggtaattgtcaaagtgaatagttctaaggataatatgaaatcatctagacatgtgaaaagacgattgaagtctgtcaggaaattgagaaactccggagttataacgttggattacatccaaacagctagaaacctggcagatcccttcacgaagggactatcacgaaatgtgatagataatgcatcgaaggagatgggtttgagacccatgtga

SEQ ID NO: 14928 - DNA, 1782 bp, Oryza sativa
  Clone ID: TFbOSC421766j.C1.o6.gm
atggaggcgtcggcgaggggaaacctgaggaatgggggcgctagggtctctggaacctctgccttcgacgtcctgcaccgggagaaggcggcaataaggcgctgtgattttactatggctggttttgccgatgcactgaggctggataaattcaccgtccagtgccaatattttgcacaggcccagaacaagagcaaggggaaatacaaagctcaacagaccaccaacttcaagaagcagaagaagaacaacaacaatcctaaccaggatgagagaacttgctttgtgtgtaggcaacctggtcatctggctaggaagtgtccacagcgcaaggggatgaaggcacctgtagggcagacttctaagtctgctaatgtgactattggcaacactggagatagaagcgtcgcacggggttccaccgtcctaatggggaatgggtcacatgcttctgttcatggtgttggcacggtagatctgaagtttacttcggaaaagatcgtgcagctgaagaacagctttttcccaatgaaggatacacatagtagttcgagccaaccctctgaagtaattcccagttcaatcacaccaccagaacaaactgaacatacacatgaacatgtcactgaggaggatgtcagtgaagctcctcgaaggagtaagagacaaaggacggctaagtcctttggtgatgatttcactgtgtacctcgtggatgacactcctaagtcaatttcagaagcatatgcatctcctgatgcagactactggaagaaggctgtccgtaatgaaatggattccattatcgctaatgtcaatgaggcagataaatgtgtgtactatcgccatggtgggggtgagggtgttattctgtgcttgtatgttgatgacatactgatatttgggacaaaccttgaggtgataaatgagtcccattatgtggagaagatgttgaatcgctttggctacattgatagtaagccttctccaacaccttatgatcctagcttgttgcttcgcaagaacaagagaattgctaggaatcaactggaatactcccaaatcattggctcgctgatgtacctggctagtgcaactaggcctgatatctcctttgctgtgagcaagttgagccgatttacctctaatccgggagatgatcattggcgtgcgcttgagcgagtaatgcgctatctgaaaggtactatagaattggggcttcactatactgggtatcctgcggtattggagggttatagtgattctaactggatctctgatgtggatgagatcaaagccactagtggatatgtctttacactgggtggtggtgctgtttcgtggaggtcttgcaaacagaccattttgacgaggtcaaccatggaagcagaactgacggcattggatactgctactgatgaggcagaatggctgcgtgatctattaatggatctgcctattgttgaaaaaccggtgctggctatccttatgaactgtgacaatcaaacggtctccggaacctctgccttcgacgtcctgcaccgggagaaggcggcaataaggtttttgggaagcgcttcgcgcgactgctccctgttcgtccgcgacggctcgccttcctctccgctcgtgtgcttcgcgccttcgtcgacgctcgcaaccgcgagtagttcctaccgagcaaccgaattgatccagatggatagtacttggccttcggaatctgagcacacagagaatcaggctcctgaagcagccgccaacattgctttgctagcatag

SEQ ID NO: 14929 - DNA, 972 bp, Oryza sativa
  Clone ID: TFbOSC401810j.C1.o39.fg
atggccttctccggcgggcagctgatgatgacggggacgagcgttagccggcaacgcctcgccgtccatggacttgggcggctcagcggtgtccacggcaactccagcgagatggttcgggacgcagccggagctgatgacgccttgcgggcaccgagtagtggcgctccggccggcgttctcttcaagcagcaagacaatcatcgtctgcctggtgatcgtctcctccttagcgcgcttcctcagcgcacgcgcctcctcgccggacaccgaggaaaaagggagaatcatatggatcatggacttgtggacaaggctcaaccttctcaagataaccgtgggaacatggtgaagaagcttgagaagggatcaaccgtagcttgcaccaagtcctgtcaagaaaacaataagtccaacaacaagagtaaggggcaaattcaaagttggatcaaaactctcattacttgcttcatgtgcaagaaagtgggacactatgccttgatatgttccaacaagattgatgaccaagtcacacttccaaagaggagaacaagaagaagcaataggaagtgctatggatgcaatgagaagagtcatgaagttgcatcttgccctcacatgaagaatcactttgtgtcatcaaggaagaagcttaatatcaaggtagcaagtagcaaggtagcagagaagatgcaagatgtggtgaagaaagcaccatgtaaagacaagaatcgactttgctacaattgccgtgcaaagggacatattggtaacaattgtcccatgggtaacattcctaagccaaactcctcatttgattatgatttgcctagggatgccaaaaaggacatttgtgctattagggtgattagttcaccacatgctagcataaaatccatttgggtacctaagtctcatgtgacttacctttatggacccaatgttgttgaagaccaaaatgtgctaaaatga

SEQ ID NO: 14930 - DNA, 159 bp, Oryza sativa
  Clone ID: TFbOSC101387j.C1.o4.np
atggtgggttgtgagcacatggttttgatggtcgtgctcatgacaattaaggaccggttcacgagtttcgattgtgaaacattaatcgtgccaaccacaagccagcatgggcaacggctttatcttttgtatagcatggttcattgcggggcaccagac

SEQ ID NO: 14931 - DNA, 3685 bp, Oryza sativa
  Clone ID: TFbOSC20344j.C1.o4.np
atggcttattgtgccaatgcactgaggctggataaattctccggtatacactttaagggatggtagaacagggtcactctatggttgacggcgatgaaatgcttctgggttagtaatggcaaatctaaaggaattctcattgctgaaaagcagaaaaaattcataaatgatagaattggatgcattgttagcgttcttggcaatcgtctagtcgaggtgtatatgcacatgattgacactaaggagttataggatgcactgaataccaaattcgatgctactgatgctagcaatgatctgtatgtcatggagcagtttcaagactacaagatgattgataaccattctgtagttgagcagactcacgaaacacatacaaaggctaaggaactcgaactccttaagtgtgtcttacccgacaaatttgtggtcgggtgcattattgcgaaactaccttcattttggaaaaatttcaatattgcacttaaaacacacgagacatgaatactatgttgaggggttaatagcatctcttgatgttgaggagaaaactcgggaaaaagacatcgcgtctaaggagaacttgctttgtgtgtggcttgcctggtcatctggccaagaattgtccacaacgcaaggggatgaaggcacctgcagggtagtcttctaagtcttccaatgtgaccattggaaacactggagatgaaagcgggtatggtaatttacctactatttttttctgttaatcagtctactaactggtgggtagatacaggggccaatgtacatgtttgtgctgacatctcactattttgttcttatcaggtcgcacgggattccaccgtcctaatggagaataggtcacatgcttcagttcatgtattgacacggtagatctgaagtttacttcaggaaagatcgtgcaactgaagaacatgcagcatgtccctactatcgacaaaaatcttgttagtgtctcccatctatgtagagatggatttaagttggtgtttgaatctaataaagtagtcgtgtctaaacatggatattttattggtaaaggctatgagtgtggataatgaggctaatgtttggcactcacatttatgtcacattttattgggcttgatgtctcggctttacagtatgtgtttaattcataagttctccattgttaaaggttctaagtgtcataattgtgtgcaatcaaagcaacctcgcaagccttacaaggcagccggggagagaaacttggcacctctggaactcctacgtttagatctttgtgaaatggatggggtcttgagaagggagaaaaacgatatttcatgacgttgattgatgaagctacttgattttgctatgtgtatttgttgaaaacgaaagatgatggtccagactattttaaaatctataaggcagaaattgaaaaccaacttgacagaaagataaaaagatttaggtctgatcgtagtggagagtttttctcaaacgagtttgacttattctgtgagaaacatggcatcatacatgagaggacgcctccctgttcacactgactgacatggtgaatgccatgttggatactgtgggactacaggcatggtggggggaggcattgttgacctcgaatcatgtcttaaatagggttcctaatagaaataaggacaaaacaccatatgagcaatggatcgagagaaaaccatcactttcttacttgtgcacatgggggttcttggtgaatgtcaatgtaccaataacgaagaagtgcaaacttggaactaatactgtggaccgtgtctttctaggatatgctcattacagcattgcctatagatttttaatagttaaatcggaggtacctcacatgtatgttggtacaattatggagactcatgacgctaccttctttgaaagcttttttccaataaaggatacacacagtacttctagccaatcctgtgaaataattctcagttcaatcacaccaccaggacaaactgaacatacacatgaatatatcactgaggaggatgactgaggaggatgacagtgagactccttggagaagtaagaaacaaaggactactaagtcttttagtcatgatttcactgtgtacctcgtagatgacactcctaagtcaattttagaagcatacgcatctcctggtgctgactactagaaggaggctatccatagtgaaatggattccattattgctaacaggattttggaggtgacagagtgaccctatgggtgtaaacatgtgggatgcaagggggtgttcaagaaaaagctttggcctaatggtactattgaaaagtacaaggatcagcttgttgcaaagggctatactcagaaagaaggcgaagatttcttcgacacttactcacctgttggtagattgaccacaattcatgtactacttccctagctgcctcacatggtcttctcattcatcaaatggacgttaagacagcttttcttaatgtagagctggatgagatctatatggatcaaccttatgggtttatagttgaaggtatagaaggcaaggtgtgcaaactacgtagatcctcataccaacggaccccaataccctctatatccggtctacgggtatcccccgtcgacagatatctgtaggctttgcagtcaatgatgcaaaaaaatatgtgtactatcaccatggagggggtgagggagttattatatgcttgtatgttgatgacatactaatattttggacaaatcttgagttgattaatgatgttaaatcattcttatctcaaaattttgatatgaaagatttgggagtagctgctgttatcctaaacattaagctaattagaggtgaggatgggattacactcttacagtcccattatgtggagaagatcttgagtcactttggctactaatagcaagccttctccaacaccttatgatcctagcttgttgcttcgcaagaagaagagaattgctaggaatcaattggaatactcccaaattattggctcacttatgtacctacctaccacaactaggactgacatctcctttgctgtgagcaagttgagccggtttatctctaacctgggagatgatcactggcgtgcgcttgagtgagtgatgcactgtctaaaaggtactatggaattggggcttcactgtgctaggtatcctgcgttactagaggaatatagtggttttaattggatctctgatgtggatgagatcaaaaccactagtggatatgtcttcacatcaggtggtggtgctgtttcatgaaggtcttgcaaactgactattttgatgaggtcatccatagaagcagagctgatggcagaagatactgctattgttgaggcggaatggctgcgtgttctgttgatggatctgtctatggttgaaaaactgaaatgtgaaaagacaattgaactttgtcaggagattgagaaactccgaagttataccattggattacatccaaacagcaagcaacctggtagatccttcacgaagggactatcacgaaatgtgatagacaatgcatagaaggagatggtttgagaccatgtagcattcttgaaagaactcacatttgtgagcttgactgttggtcgcagtctatggagattttgggtgaatcttctaggaagcttaataagagaccaaggagta

SEQ ID NO: 14932 - DNA, 3912 bp, Oryza sativa
  Clone ID: TFbOSC400810j.C1.o4.fg
atgtctgatgatggcgggcgatacacaccgcccggacgccgtggtggcggtggcggcggcggaagcggcagcgggcgcggaggcgcaagtggcagcggcgcgggggatggcgcagacggcgcgaaccttcctctcgtgccacaggggagagatgctgggcacactgctcgcctcccggtgctgtcgaggaccaattatccggattgggcattgttgatgcgtgtaaacctacaggcgcaggggttgtggacggcgattgaacccggatacgcggagtaccgcgacgatcgggcggctctctcggcaatccttcaggcggtgccgcgcgagatgttgcgcgggctggcgaagcatgacacggcgaaggcggcgtgggacgccatcaagacaatgcgggtcggcgtcgaccgtgcgatgcgcttcaaggatggagagacaccggaggagttcgcgatgcgactcactgccgtcgtcgcggacattcgcgacatgggtggagtcatggaagacgaacacatcaacaagaaactgctgcgcgttgtgcccaagaagtacaagccggtggcgatttccctcgagcagcttctcgacgtgaaaacgatggcccttgaggagctcgttgggcggctgtcgatggtcaactcatacagtgatgatgaggaggaaggtggcggcgacaagctctacctcacggaggaacagtggcaggcacgcgcaaggaaacaggagcaggaaggctccggcggcagcagcaagagcaggggcagctctggcacccagaacaaccgtcggggcaaggccggtgggtcaccgaaggggaaggagacgatcaacagtgggaacaccagccgtgactactccaaggtaaaatgtttcaattgtgatgagtttgggcattttgcaaggcagtgccgcaagccgcggcgccaacgtcgaggggaagtaaacctgacgcagggggaggaggagccgaccttgctcatggctcacgtcatgggggtgtctctcgccggtgaggagacactcgggcgaacacctggtgtgcatgaggtgcatctcactgagaaaaaggtaaagcgctccccaagcttcctgtacattctgaagttgaacatggcgaggcccatctgtttggcggcgaatggcaccgagacggcgtggcgttggcacgcccgtttcggccacctcaatttccaggccctccggagattggcgcaagcggagatggtccgtggactccccgtgattgaccacgtcgatcaactgtgtgatgggtgcctcgccggcaagcagcgacgagtgccgttcccagacaaagccaggttcagggcgcaggatgcgctcgagttggttcatggcgacctgtgcgggccgattgcgccggcaacgccaggcggcaggaaatatttcctgctccttgttgatgacatgagccgtttcatgtggatacggctcctctccggcaagcacgaggcagcggctgcgatcaagcagttcaaggccggcgtcgagatggaaagcggccgaaaactgcgggcgctgcgcaccgaccggggaggagaatttacctctgtcgagttcactgagttctgtgccgatcggggtgtgagtcgccagctcacggctccatactcgccgcaacaaaatggggtcgtcaagaggcgaaacctgactatcgtcgctgctgctcgctctatgctcaaggcggcggggatgccggcacatttctggggagaggcagtcgtggcggctgtgtatctattgaatcggtcgcccacaaagagcctggatggtgtgacgccatatgaagcgtggcacgggcgacgtccctcggtcgaacacctgaaggtgtttggctgtgtcggctacgtcaagacagtgaagccaaatttgaggaaacttgatgatcgtggcacacgaatggtgttcattggttatgagcagggctcaaaagcctatcggatgtatgatccggtgtcacggcgagtttatgtgtcacgcgacgtcgtctttgatgaggcggcaatgtggccatggcgtgatccggaggtcactcaaactggaggcgaggaggatttcactgtggagtttttttccactccgctaggtggaaatcgtgttcctgacgtggttgtggaacatggaggcgcacgggaaactgaaaccgcaccaagtccgctggccacgcccgacgcggcgcccgtgtggtctccagtgacatcaagctcacctgccggtgttgagttctgtacaccaccatctgatgccagtattgaaagcgatggagctcctccccgttttcggacggtgaacaatgtgctggccaccacaactccggtgctcgatttcgactacgacgacgagtgtctcatagcggagcaggagcctttcagtttcaaggaagctgagaaggagcagtgctggatgaaggcgatggaagaggagatgagctccattgaaggtaacaatacttggttcctctgtgacttaccatctgaccatagggcaattggtctcaaatgggtttacaagatcaagagaagtgccgaaggtgagatattgaagtacaaagcaagattggtggcaaaggggtatgttcagcaacaaggcatagattatgaagaagtatttgctccagtagcaaggatggaaactgtgaggttgctggttgctttggcagcacatgagggttggcaaatacatcacatggatgtgaagtcagctttcctcaatggtgaattggaggaagaggtgtatgtagtccaaccacctggttttgttgttgagcacaaggagaacaaagtactgaagttaaaaaaggccctatatggtttaaagcaggcgccaagagcttggtatgcaaagctggattctacacttgcaaatctggattttgtaagaagtgcaacagagaatgcagtgtacactagaggggaaggtaatgccagactcatggtgggggtatatgttgatgatcttatcattacaggagctttggggacagaaatagcaaaattcaaggagcagatgagaagtatgtttagtatgagtgatcttggattactgtcctattacctgggaatggaggttaaacagactgaagaaggcattacaatgtcccaagctgggtatgcaggaagaattttagagaaggctgggatgcaaggttgcaatccttgtcaggttcctatggatgctagactgaagctgaaaaaaggagtagaagattgcattgatgcaacacagtttagaagcattataggaagcctgaggtatttggttaatacaaggcctgatctatcctactctgttggatatgttagtagatacatggagaatccaggtgctgaacattgggctgccatgaaacatattttgcgctatgtggcaggaagtctgaatattggtctcaagttcagaaagggagaagagaaatttcctcggctagttggctatagtgatagtgatatggctggggatgtggatgatagaaagagtacaacaggggtgttgtttaagctgggagaaaacttaatcacatggcagtctcagaagcaaaaaatagttgcattatcatcttgtgaagctgagtatattgctgctacaactgctgcctgtcaggggatttggttagcacgtttgctgggagaactgcaaatgaagaagccctgttgtgccatgttaaaagttgacaacaaatctgcaatcaatctctgcaagaatcctgtacttcatgatagaagcaaacacattgatacaagatatcatttcatccgtgagagggttgaaagaaaggaggtcgaagtggagtacacaagttcagcagaacaacttgcagacatactgacaaagcctcttggcaaggtccgatttctggagctgaggggaaagctgggtttgtctccagtgtga

SEQ ID NO: 14933 - DNA, 4270 bp, Oryza sativa
  Clone ID: TFbOSC401706j.C1.o1.np
tccgcacgactgctccgctccagttcgtcttcctctgcatcgtcttcgccaacatgtcgaacaccggtgacaacagcaacactggacacaaggagaaggaggctcccgccaacaccaacggaggcaatactgcctcaaattctagcaaagggccattctcagggtacaactcaactttcatcgtgttcatgttcttttctcaaatactactgttaggtgcaatgttttcattgcattcccatgtgacaaatgtttatgcttattctatattaagcatgatatgtagtcagtggcagacgtaggtttaaaatacagatttggcggcagagctagccctaattagttgcactagtttattccctgcagatgtcatacttattgtcttaatattttagattaaaatatatcgaattgtgaccatatttctaacaattcaaaaacctgataggtccttttcggtagttggctttgccgcatcactgaaaccgcacgctttcgatggttcaaactataagagatggaaagcatgtgcagtattatggttgacagcgatgcaatatttctttgtttcacggggcaaaccgagtgaaccgcctctctctcctgaggaggaggccaagttcgaggctgcagattgcctgttccgtggagcattgatcagtggtgctcgccgacaacatagtggacgtgtacatgcacatgcctttagggaaggaaatgtgggatgcacttgaggcgaagttcagggtttccgatcctagcagtgagctgtatatcatggagcagttctatgactaagagatggtcgatgatcgatctgtagtggaacaggctcatgagatacagatgctggcaaaggaacttgagaacaaccgctgtgagttgccatacaagtttgtggcgggaggcatcatcgccaaattgccaccttcttggtccgactttgctatttctctaaaacacaagaggcaagagttcactgtcactgatctcatatgctctttgggtgttgaggagaaggcgagggcaaaggacaaccgcggcaaaagggtggaggggagttctagtgtcaattaagcatcccataacaacaagaaagtcaagcctgatgtcaaactaaaggctacgaatacttttaagaagaaaggcatgggaaagcctaagggtgactgctttgtgtgtggcaagcctgggcattaggccaaggactgtcctaagcgcaaagacagaaagtttgcaaacatggtcattagcgagggtggacgaacatcggggtatggtaaatttttacctacaattgtttctgtctgtcactcacctgattggtgggttgacactggtgctaatatccatgtgtgtgctaacatttccctgttttcttcttatcaggccaggagaggttcctccttattgatgggaaatgggtcgcttgcggctgttcttggtgttggtacggtcgatctgaagtttacttcgggaaagaccgtgcagctgaaaaacatgcagcatgtcctttcaataaagaagaatctagttagcagctctctactatgtagagatggttttagactggtgtctgaatctaataaatgtgtcgtatctaaatatgaaacgtttattggaaaaggttttgacagcggaggcttgttccgcttctctttggataacatgtgtaataagattgtgaactatgtaagcaatgatgacgagtcaaatgtgtggcattcgcgactctgtcatgtgaactttggttgtatgacgcacttagacaacatgagtttaattccaaaatttactttagtgaaaggtgccaagtttcatacctgtgttcaatcgaaacaacctcgcaagcctcatagggaatttgaggcgaggaatttggcacctctagaacttattcattctgatctgtgcgaaatgaatggcgtgtagactaaagggggaaagaaatatttcatgacactgatagatgattgcactagattctgctatgtgtacctattaaaaacaaaggatgaagcattacattactttaagatatatatggctgaggtagaaaaccagctggaaaggaaaatcaaacggttgaggtctgataggggtggagagtttttccaatgagcttacctctttctgcgaagagtttggaattattcatgagaggatgcctccatattcaccctagtcaaacggagtagccaaaagaaagaactgcactctaactgagttggtgaatgccatgttagacaccgcgggactttccaaggaatcgtggggtgaggcaatcctgattgcatgtcatgtcctgaatagaattcctaccaagcataaagaagtaacaccattcgaggaatgggaaaggaggaaattaaatctctcatacctgctcacttggggttgtttggccaaggtaaatatatctataggtgcaaacttggaccaaagaccgtagattatgtgttcctcggttatgctatccatagtgtgggatataggttcttaatagtaaattctggagtacctgacatgcgtgttggtacaattactgagtctagagatgctacatttagcacttctagtgaagaacctatcttaacccctgagcattttgcaccgatagaacacattgatcaaacgcctgagggaaatcctgaggaggataataatgtagctactcgcaagagtatgagacaaagtactgcaaagtcggtttgtgatgactacattgtatacatagtggataacactccaagaaccatagaagaggcatattcatctcctaacgctaattattggaaggaagcggtacacagtgagatggactcgattatgtctaatggtacttgggaagttatcgagcgtccatttgggtgcaagccataggatgcaaatgagttttaaagaaaaatcttaggcttgatggtacaattgaaaagtacaaggcaagacttgtggccaagggttatacccaaaaggaaggcgaggattttttgacatttactcatcggttgcttgcttgaccacgattcgagtattattcgctacggcagcctctcatggtctacttgtccatcagatggacgttaagatagctttcctcaatggagagttggaggaggagatccatatggatcaaccaaacgggtatacattggaaggtcaggagggaataatgtgcaagctgttgaagtccttgtatacattggaagctgttgaagtcctcaaacaagcgcctaagcaatggcatgagaagtttgataaaacacttacatctgctggctttgttgtgaacgaagctgacaaatgtgtattctatcgctatggtgggggagagagagtgatcttgtgtttatatgtcaatgacatgtcgatctttgggaccagcctcaatttgattgaggaggtaaaggactttctatccaaaagctttgaaatgaaggatttgggagtggctgatgttattcttaacattaagctactgagaggagatgagggtgggattacacttgtgcaatctcactatgtggacaagaaggtagttcctactccttatgatccccgcgtgctattaaggaaaaaccgaagaatagcaagggatcaactgagatactcccagatcattggttcattgatgcacttagctagtgcaacgaggcctaacatctcatttgctgtgagcaaattgagccggtttgtctaaaatccgggagatgatcactggcatgctatggaaagagtaatgcgctatctaaagggcacaatgagctatggaattcactacgccgggtacccgaaagtaccgaagggctatagtgattcaaactggatatctgatgctgatgagataaaagccacaagtgggtatgtgtccacacttagagatggcgctgttccctagaagtcttgcaagcagaccatcttaacgaggtcaacaacggaagcagaactcacagcactagatactgccacagttgaggccgagtggcttcgtgagctcctgatggatttgccagtggttgaaaaagcagtgccagctatcctgatgaactatgataatcaaacagtgattatcaaggtgaacagttcaaaggacaacatgaagtcatcaaggcatgtgaagagaagactgaaatctgtcagaaggcagaagaactccagagtgatagcgttggactatgtctaaacagctaaaaatctggcagatcagtttacaaaggggctaacacgtaatgtgaaaaggcccacttaaagttgcaccatagtagaaacc

SEQ ID NO: 14934 - DNA, 4083 bp, Oryza sativa
  Clone ID: TFbOSC413692j.C1.o3.fg
atgtctgatgatggcgggcgatacacaccgcccggacgccgtggtggcggtggcggcggcggaagcggcagcgggcgcggaggcgcaagtggcagcggcacggggggtggcgcagacggcgcgaaccttcctctcgtgccacaggggagagatgctgggcacactgctcgcctcccggtgctgtcgaggaccaattatccggattgggcattgttgatgcgtgtaaacctacaggcgcaggggttgtggacggcgattgaacccggatacgcggagtaccgcgacgatcgggcggctctctcggcaatccttcaggcggtgccgcgcgagatgttgcgcgggctggcgaagcatgacacggcgaaggcggcgtgggacgccatcaagaccatgcgggtcggcgttgaccgtgtgcgtgaggcgaaggagcagggcttccgtcgccaattggaggcgatgcgcttcaaggatggagagacaccggaggagttcgcgatgcgactcactgccgtcgtcgcggacattcgcgacatgggtggagtcatggaagacgaacacatcaacaagaaactgctgcgcgttgtgcccaagaagtacaagccggtggcgatttccctcgagcagcttctcgacgtgaaaacgatggcccttgaggagctcgttgggcggctgtcgacggtcgactcatacagtgatgatgaggaggaaggtggcggcggcaagctctacctcacggaggaacagtggcaggcacgcgcaaggaaacaggagcaggaaggctccggcggcagtagcaagagcaggggcagctctggcacccagaacaaccgtcggggcaaggccggtgggtcaccgaaggggaaggagacgatcaacagtgggaacaccagccgtgactactccaaggtaaaatgtttcaattgtgatgagtttgggcattttgcaaggcagtgccgcaagccgcggcgccaacgtcgaggggaagtaaacctgacgcagggggaggaggagccgaccttgctcatggctcacgccatgggggtgtctctcgccggtgaggagacactcgggcgaacacctggtgtgcacgaggtgcatctcactgagaaaaagtttggtgatggctcagttgtggacatcaggggacgcggcaccgtgttgttccagtgcaagaatggagatcatcgctcgctagaggcagtgtatttcatccccaagctgtgcaagaatatcatctccatcggccggcttgacgcgcgtggctacgatgctcacatataccatggtgtctgcacgctgcgtgatcctgatggtctactgcttgccaaggtaaagcgctccccaagcttcctgtacattctgaagttgaacatggcgaggcccatctgtttggcggcgaatggcaccgagacggcgtggcgttggcacgcccgtttcggccacctcaatttccaggccctccggagattggcgcaagcggagatggtccgtggactccccgtgattgaccacgtcgatcaactgtgtgatgggtgcctcgccggcaagcagcgacgagtgccgttcccagacaaagccaggttcagggcgcaggatgcgctcgagctggttcatggcgacctgtgcgggccgattgcgccggcaacgccaggcggcaggaaatatttcctgctccttgttgatgacatgagccgtttcatgtggatacggctcctctccggcaagcacgaggcagcggctgcgatcaagcagttcaaggccggcgtcgagatggaaagcggccgaaaactgcgggcgctgcgcaccgaccggggaggagaatttacctctgtcgagttcactgagttctgtgccgatcggggtgtgagtcgccagctcacggctccatactcgccgcaacaaaatggggtcgtcgagaggcgaaacctgactgtcgtcgctgctgctcgctctatgctcaaggcggcggagatgccggcacaattctggggagaggcagtcgtggcggctgtgtatctattgaatcggtcgcccacaaagagcctggatgtgaagccaaatttgaggaaacttgatgatcgtggcacacgaatggtgttcattggttatgagcagggctcaaaagcctatcggatgtatgatccggtgtcacggcgagtttatgtgtcacgcgacgtcgtctttgatgaggcggcaatgtggccatggcgtgatccggaggtcactcaaactggaggcgaggaggatttcactgtggagtttttttccactccgctgggtggaaatcgtgttcctgacgtggttgtggaacatggaggcgcacgggaaactgaaaccgcaccaagtccgctggccacacccgacgcggcgcccgtgtggtctccagtgacatcaagctcacctgccggtgttgagttctgtacaccaccatctgatgccagtattgaaagcgatggagctcctccccgttttcggacggtgaacaatgtgctggccaccacaactccggtgctcgatttcgactacgacgacgagtgtctcatagcggagcaggagcctttcagtttcaaggaagctgagaaggagcagtgctggatgaaggcgatggaagaggagatgagctccattgaaggtaacaatacttggttcctctgtgacttaccatctgaccatagggcaattggtctcaaatgggtttacaagatcaagagaagtgccgaaggtgagatattgaagtacaaagcaagattggtggcaaaggggtatgttcagcaacaaggcatagattatgaagaagtatttgctccagtagcaaggatggaaactgtgaggttgctggttgctttggcagcacatgagggttggcaaatacatcacatggatgtgaagtcagcttttctcaatggtgaattggaggaagatgtgtatgtagtccaaccacctggttttgttgttgagcacaaggagaacaaagtactgaagttaaaaaaggccctatatggtttaaagcaggcgccaagagcttggtatgcaaagctggattctacacttgcaaatttggattttgtaagaagtgcaacagagaatgcagtgtacactagaggggaaggtaatgccagactcgtggtgggggtatatgttgatgatcttatcattacaggagctttggggacagaaatagcaaaattcaaggagcagatgagaagtatgtttagtatgagtgatcttggattactgtcctattacctgggaatggaggttaaacagactgaagaaggcattacaatgtcccaagctgggtatgcaggaagaattttagagaaggctgggatgcaaggttgcaatccttgtcaggttcctatggatgctagactgaagctgaaaaaaggagtagaagattgcattgatgcaacacagtttagaagcattataggaagcctgaggtatttggttaatacaaggcctgatctatcctactctgttggatattttagtagatacatggagaatccaggtgctgaacattgggctgccatgaaacatattttgcgctatgtggcaggaagtctgaatattggtctcaagttcagaaagggagaagagaaatttcctcggctagttggctatagtgatagtgatatggctggggatgtggatgatagaaagagtacaacaggggtgttgtttaagctgggagaaaacttaatcacatggcagtctcagaagcaaaaaatagttgcattatcatcttgtgaagctgagtatattgctgctacaactgctgcctgtcaggggatttggttagcacgtttgctgggagaactgcaaatgaagaagccctgttgtgtcatgttaaaagttgacaacaaatctgcaatcaatctctgcaagaatcctgtacttcatgatagaagcaaacacattgatacaagatatcatttcatccgtgagagggttgaaagaaaggaggtcgaagtggagtacacaagttcagcagaacaacttgcagacatactgacaaagcctcttggcaaggtccgatttttggagctgaggggaaagctgggtttgtctccagtgtga

SEQ ID NO: 14935 - DNA, 4488 bp, Oryza sativa
  Clone ID: TFbOSC415431j.C1.o2.fg
atgtctgatgatggcgggcgatacacaccgcccggacgccgtggtggcggtggtggcggcggaagcggcagcgggcgcggaggcgcaagtggcagcggcgcggggggtggcgcagacggcgcaaaccttcctctcgtgccacagaggagagatgctgggcacactgctcgcctcccggtgctgtcgaggaccaattatccggattgggcattgttgatgcgtgtaaacctacaggcgcaggggttgtggacggcgattgaacccggatacgcggagtaccgcgacgatcgggcggctctctcggcaatccttcaggcggtgccgcgcgagatgttgcgcgggctggcgaagcatgacacggcgaaggcggcgtgggacgccatcaagaccatgcgggtcggcgtcgaccgtgtgcgtgaggcgaaggagcagggcttccgtcgccaattcgaggcgatgcgcttcaaggatggagagacaccggaggagttcgcgatgcgactcactgctgtcgtcgcggacattcgcgacatgggtggagtcatggaagacgaacacatcaacaagaaactgctgcgcgttgtgcccaagaagtacaagccggtggcgatttccctcgagcagcttctcgacgtgaaaacgatggcccttgaggagctcgttgggcggctgtcgatggcacgcgcaaggaaacaggagcaggaaggctccggcggcagcagcaagagcaggggcagctctggcacccagaacaaccgtcggggcaaggccggtgggtcaccgaaggggaaggagacgatcaacagtgggaacaccagccgtgactactccaaggtaaaatgtttcaattgtgatgagtttgggcattttgcaaggcagtgccgcaagccgcggcgccaacgtcgaggggaagtaaacctgacgcagggggaggaggagctgaccttgctcatggctcacgtcatgggggtgtctctcgccggtgaggagacactcgggcgaacacctggtgtgcacgaggtgcatctcactgagaaaaaggtgattctgaatcatgaggttgcagaagaggaggacaacaccacggaatggttcctggataccggggccaccaatcatatgaccggctctcggtcggcattcgctgacctcgacaccggtgttgttggtactgtgaagtttggtgatggctcagttgtggacatcaggggacgcggcaccgtgttgttccagtgcaagaatggagatcatcgctcgctagaggcagtgtatttcatccccaagctgtgcaagaatatcatctccatcggccggcttgacgcgcgtggctacgatgctcacatataccatggtgtctgcacgctgcgtgatcctgatggtctactgcttgccaaggtaaagcgctccccaagcttcctgtacattctgaagttgaacatggcgaggcccatctgtttggcggcgaatggcaccgagacggcgtggcgttggcacgcccgtttcggccacctcaatttccaggccctccggagattggcgcaagcggagatggtccgtggactccccgtgattgaccacgtcgatcaactgtgtgatgggtgcctcgccggcaagcagcgacgagtgccgttcccagacaaagccaggttcagggcgcaggatgcgctcgagctggttcatggcgacctgtgcgggccgattgcgccggcaacgccaggcggcaggaaatatttcctgctccttgttgatgacatgagccgtttcatgtggatacggctcctctccggcaagcacgaggcagcggctgcgatcaagcagttcaaggccggcgtcgagatggaaagcggccgaaaactgcgggcgctgcgcaccgaccggggaggagaatttacctctgtcgagttcactgagttctgtgccgatcggggtgtgagtcgccagctcacggctccatactcgccgcaacaaaatggggtcgtcgagaggcgaaacctgactgtcgtcgctgctgctcgctctatgctcaaggcggcggggatgccggcacaattctggggagaggcagtcatggcggctgtgtatctatggaatcggtcgcccacaaagagcctggatggtgtgacgccatatgaagcgtggcacgggcgacgtccctcggtcgaacacctgaaggtgtttggctgtgtcggctacgtcaagacagtgaagccaaatttgaggaaacttgatgatcgtggcacacgaatggtgttcattggttatgagcagggctcaaaagcctatcggatgtatgatccggtgtcacggcgagtttatgtgtcacgcgacgtcgtctttgatgaggcggcaatgtggccatggcgtgatccggaggtcactcaaactggaggcgaggaggatttcactgtggagtttttttccactccgctgggtggaaatcgtgttcctgacgtggttgtggaacatggaggcgcacgggaaactgaaaccgcaccaagtccgctggccacgcccgacgcggcgcccgtgtggtctccagtgacatcaagctcacctgccggtgttgagttctgtacaccaccatctgatgccagtattgaaagcgatggagctcctccccgttttcggacggtgaacaatgtgctggccaccacaactccggtgctcgatttcgactacaacgacgagtgtctcatagcggagcaggagcctttcagtttcaaggaagctgagaaggagcagtgctggatgaaggcgatggaagaggagatgagctccattgaaggtaacaatacttggttcctctgtgacttaccatctgaccatagggcaattggtctcaaatgggtttacaagatcaagagaagtgccgaaggtgagatattgaagtacaaagcaagattggtggcaaaggggtatgttcagcaacaaggcatagattatgaagaagtatttgctccagtagcaaggatggaaactgtgaggttgctggttgctttggcagcacatgagggttggcaaatacatcacatggatgtgaagtcagcttttctcaatggtgaattggaggaagatgtgtatgtagtccaaccacctggttttgttgttgagcacaaggagaacaaagtactgaagttaaaaaaggccctatatggtttaaagcaggcgccaagagcttggtatgcaaagctggattctacacttgcaaatctggattttgtaagaagtgcaacagagaatgcagtgtacactagaggggaaggtaatgccagactcgtggtgggggtatatgttgatgatcttatcattacaggagctttggggacagaaatagcaaaattcaaggagcagatgagaagtatgtttagtatgagtaatcttggattactgtcctattacctgggaatggaggttaaacagactgaagaaggcattacaatgtcccaagctgggtatgcaggaagaattttagagaaggctgggatgcaaggttgcaatccttgtcaggttcctatggatgctagactgaagctgaaaaaaggagtagaagattgcattgatgcaacacagtttagaagcattataggaagcctgaggtatttggttaatacaaggcctgatctatcctactctgttggatatgttagtagatacatggagaatccaggtgctgaacattgggctgccatgaaacatattttgcgctatgtggcaggaagtctgaatattggtctcaagttcagaaagggagaagagaaatttcctcggctagttggctatagtgatagtgatatggctggggatgtggatgatagaaagagtacaacaggggtgttgtttaagctgggagaaaacttaatcacatggcagtctcagaagcaaaaaatagttgcattatcatcttgtgaagctgagtatattgctgctacaactgctgcctgtcaggggatttggttagcacgtttgctgggagaactgcaaatgaagaagccctgttgtaccatgttaaaagttgacaacaaatctgcaatcaatctctgcaagaatcctgtacttcatgatagaagcaaacacattgatacaagatatcatttcatccgtgagagggttgaaagaaaggaggtcgaagtggagtacacaagttcagcagaacaacttgcagacatattgataaagcctcttggcaagcgatatcatggtgccacggaaggcgacaacgtagtgaggagccaacgggtggcggccgggcttgctggcaggcagagccggcagcacatgctcgtataccgcgccgatgatgaactggtcgttgttgttggagtcgtccttgatcactcggaggaggcggaagccaaagctctcccaccaagccggcgcgagagcgttggtatgcaccctgcgcctgttactgtcgttctccatggtatagacgcctttcacaagacaggcagcgacgcaccggcggtgttcctcattgtccctgcgtga

SEQ ID NO: 14936 - DNA, 2184 bp, Oryza sativa
  Clone ID: TFbOSC402671j.C1.o1.np
ttgaggagcttaaataggggtagtgccttctctcacagcctcgtagcgccgccgccgccgcgaatcccgccgctcccgtccgccccgcgtgcaatcaagaggggggaattaatccccgcgttcccctcccccgtttccccctctttcccctctctctctccctcggattcgttcgaatcaagcccgtaatcgtcgccggcgcaatcaatggagccgaatcttccgcgcgcgattcctccctctccggccgctctttccttcccccggcgctatttaaaccctccccgagctccgctctttcgtttccgccgctcgccgctcactctcgccgtcggaatcgtgctcgcgccgtagcaccttctctccgccgtcgccgccgtgcttcggttagccgccgccgccgctccgctcctcctcccgactcggcgacacctccctcggcatcgccgcatcgccgtcgacctcgtccgcgcctccgtttcgctcgccgaccgtcggagcaccgtcgtcatcgtcatcccgagccgcgccgccgtctccctccgctccggccgccgttctcgtcgtcgtcgttgtcccggggtgagccgaggaccgccgttcgccttcccccttccctcctctctctcgggcgccgctccgccgcgccgatggtcgccggcggtgaccatcggggcgcgggcgcgtcgctcccgtcggccgcgccggcgaggccgccctcgggcgcgccctcgcggctgccaagtgggcccggccgtcagccgcccgcgcccgcgggtgcggctgacgcgcgggacccacggcgccgaccgccgccagccgcgtgcgcccggtccaccgtggaccgtggggctgacgcgtgggccccactccccgtggacccgggcaaatgaaggctacacgagctgcggcccgatggctgacaatgagaaaggcaataaggtcaggagtcaggacattggtacctcaagctcccgagtgaatgaagcacaagacaccagttgtgcggcagtggtccaacacctgattaaccagaacaaattgcttatagagatactacagcagcatcggatgccaattttgaacccgagtcagatgcaacctcaggtgcagttggaggcagtccaagcactcacaccacaagtcagcgcaccgccaacatcccagaaggcccctcatgccatgccacatgttgacccaaaagaagcaagtatcatctgttttatgtgtgatgagcaagggcactacgcaaggaactgtcctcagcagaaaagaaaagcaccaatgcgaaccgaaggtgaagttcgtaagatgatcattaccagcacagaatggcctccaccaggaatgacaagacgtcagagaagaaacaccttccgaggtgcaccacagttgacagagcatcttttagctaatggaggtagagtgtctgatagtgaagattcagatcaagtctcctcagaagatgaagataaaatggaacgtaaggcatgctctcgttgtggagaaatcggacatgttgccagctcgtgtgcctctacatgcgttcattgtgaggaagaccatccacccgacaggtgtccaacgagcaggatcacttgtttcttttgtgaaggaactgatcatgtaccaaaagattgtcaattcagttttctgctgacgaagaagatggctaaccaacccgccggtttcaacggagagaagcatcaaggcaacaccaatcctcgccaagattacagtttcagcctaactccagtgccaggacagaggaatcaaaatgagaaaagaaaatgccgagtccgggaagatatctgttgcttcaattgtcaaggaatgggtcatttcgccgacaagtgcccaaaaccgagaaacatagctgccggcacgtcagtccacgcaactccctgcaatcagaagcttgctcctcaacgaatggtcatccatgcatcccgaagcagtcctatagcccgcgttgcaacagctccaattccaatgagtgcactaccacaaggtgtcaatgctcaatttcagccccagcaaagaattgtcgtagatggaaggagttgtgtctctccccgacctactccaggccgagccaagggcaatcaacctccggagggcgataccaagcagaagaccgtcatccgctgcaaccaacaatcagaaggaagcttctcctgtgaa

SEQ ID NO: 14937 - DNA, 4671 bp, Oryza sativa
  Clone ID: TFbOSC400353j.C1.o2.fg
atgggttgcaagatggccgaccacccacccaaccaccgcggagaaggcatgattgactttgtggcagagttggcacgtatgacgctggtggtgggctaccccaacgcgccagagtacacgactgttccacctctcagtggtgagcttcctcaccgtgtccgcctggaggtccatggctacgtgggtacctgcctagctaatatggtggttgaggcgtccggaggcatagcagatcacgcctgtcaggaggcagcatacctgatgatgcccagactacgggagcgccacaactacatcttccacgacacggcgtaccaatttcaccctcgtcgagccagcggtgatgatgtcagtaccttccgtccaacagccggtgagaacgacaccaccttcggccacatgtgcgccgtgatgaggggaatggataggatgcactcgaatctacacaaggcgtccaaggccttgaacgatgggaagctcgtgaggatcatagctctgaaggatgagatagcacgcctaaagagggagaatgctcaattgaagggtctcccagcgccaggaggagtccggatccgcaccacgccccgcaagtcgacgactgcacctatggtctacaccaggaatggtagccgtacaacaggcgagggcagcaacggcgaagagcgcactgatggtgtgcatcccaacagcgatttcggcaatggtccgccaccactccccgagaatccgacccttgcccaagtaatggctcatcagacacagatgatgacagctatgacgcagcaggcaagtgccagatgggttgtggcacaaaagaagagggaattccgggcactccaccagggcaacaggacagtgacggagtatttccatgagttcaatcgcctcgcgcgatatgcaccggaggatgtccgtaccgacgccgagaagcaggagaaattcctagcaggtctggatgatgagctaaccaatcagttgatatctggagattacgccgactttgagaggctggttgacaaggcaatccgccaggaggatcaacgcaacaaaatggacaggaagagcaaggcggcgcagttccggtcaaaccaagggagccaccagcgaccgcgcttcactcccggacagcagagtggacctaccaccctgatcgtccaccagcaccgccctttcaatgccagcaacttccatcagggtgccagtggcagccagaaccaccatggtggtcagcccaaccgcagtgcagctccgcgcccacaaatggcactagcacagtcagctacgtccgcgcaagccaagaaggagactgggacaaagccagggtcctgcttcaactgtggcgagcttggccacttcgctaagaaatgcccgaagcctaggcgtgccgagccaaggtttgtccaggcccgtgtcaaccacgcatctacagaggaggcacaagcagcaccagaggtcgtactaggtacgtttcctgttaactcaatccctgcaacaatactttttgattctggtgcaacgcattcgttcatttcaaagaagtttgttgggatgcatgggttaataagagaggaacttagcacaccaatgcgggttcataccccagggaatagctccacttcggttcaattcagcccttctataacaatagaaattcaaagatcaccatttctggccaacctcatccttctcggatccaaagacctagatgtcattcttgggatggattggctgaccaagttcaagggagtcattgattgtgcgaatcgcacagtcaccttgaccaacgagaagggagaaacagtagtgtacaaatcaccagtctcaccaaagcaaggggtctctttgaatcagattgaggtggaaatcccagtggtcaccgaggagaagaattcgaggaaattggaagagattcccatagtctgcgagtacccaaaagtgtttcccgaagacctcactaccatgccacccaagagagagattgaattccggattgatttggcaccgggaaccgctccaatttacaagagaccgtacaggatggcagccaacgagctagcagagaagaaggacaagacaaagagaatgtgcgtcgattatcgcgcactcaatgaggtcacaatcaagaacaaatatcctttgccgcggattgatgatttgtttgatcagctgaaaggagctaaagtgttttctaagatagacctgcgatcaggctaccaccagttgagaattcgggaagaggatattccaaagacggccttcaccactcggtacgggctatatgagtgcacggttatgtctttcggacttaccaacgcacccgcattcttcatgaatctgatgaacaaagtgttcatggaatttctggacaagtttgttgtggtattcatcgatgacatacttatctattcaaagtccgaagaagaacatgagcaacatctccgtctggtactcgagaagttaaaggagcaccagttatacgctaagtccagcaagtgtgacttctggttgtctgaagtcaaatttctacgtcacgttattacagctcagggcgtggcagttgatccatcgaatgtggagtcaattaccaaatggaccccacctaaggccgtgtcgcagattcggagttttcttggacttgcgggttattaccgccgattcattgaaaacttctccaggatcgcccgacccatgactcagttgcttaagaaagatgagaagtttaaatggacagctgagtgcgacaaaagttttgaggagctcaaaaagaaattagtatccgcaccagttttgattctgcccgaccagatgaaagacttccaagtctattgcgatgcatcccgccacgggcttggatgtgttctaatgcaggaaggtagagtggtctcatatgcctcgcggcagttgcgtccacatgaagggaattatccaactcatgatctagaattggcagcagtggttcatgctttgaagatctggaggcactatctgattggcaaccgctgcgaagtatatacggaccataagagtctgaaatacatcttcacccaaccggacctaaatctccgacaacgaagatggttagaactaatcaaagactatgacatgagcattcactaccacccgggtaaagccaatgtggtggcagatgcgctaagcaggaaaagctactgcaatgccctatgcatcgagggcatgtgtggagaattgcagcaggatcttgagcgtctcaacgtgggaattgttgaacacgggttcgtagccgctctggaagcacagcctacgctcgtggatcaagtcagagcagctcaagtaaatgaccccaaaatagctgaactgaaaaagaatatgagggtgggaaaagcccgggacttccttgaggatgaacatggcacaatctggatgggagaaagattgtgtgtacctgacgacaaggaactgaaggatctgatacttatcgaggctcatcagactcagtactcaattcatccaggcagcaccaaaatgtataaagacctcaaagaaaagttttggtgggtcagcatgagaagggaaatagcggaattcgtcgcactctgcgacgtttgccaacgagtgaaggcagagcaccaaaggccagcaggtttactccaacctcttcaaatcccggaatggaaatgggaggagattggaatggactttataataggactgccccggacatcatcgggtcacgattcaatctgggtagtcgtggatcgactcactaaggttgctcacttcataccagtacataccacgtatacgtgcaaaagggagccaattcacttcaaagttctagcagaaattgcaagaggaattgggaacccggttaaatttcagcacagcctaccatccgcagaccgatggtcagacagaagagtcaatcaaatattggaggacatgttaagggcttgcgcacttgattttggtggagcttgggacaaaagcttgccgtatgcggagttctcttacaacaacagttaccaggctagccttcaaatggcactgttcaaagcattatacggtcggaagtgccgcacacctctcttctgggatcagacaggcgaacgtcaactgttcggaacagaagtgttagcggaagcagaagagaaagtcaggactgtcagagagaggctgaggattgcccagtctcgacagaaaagctacgcggacaaccgccgacgagagctcacttttgaagcaggggattacgtgtatcttcgtgttactccactccggggagtgcaccgttttcaaacgaaaggcaagttggcaccacgcttcgtgggaccatacaaaatcttggaacaaagaggagaagttgcgtatcagctagaacttccatccaatatgatcggtatccatgacgtgttccacgcatcccaattaaagaagtgcttgagggtacccaaagaacaagccaattcggagcacatcgatatccaagaagatatgacgtatgtggagaggccagttcgtatccttgagaccagcgaaaggaggactagaaacaaggtcaccaggttttgccgggttcagtggagccaccattctgaggaagaagcaacctgggaaagggaagatgagttgaaggccacccatccgcacctcttcgccagctcctccaaatctcggggtcgagatttcatttaa

SEQ ID NO: 14938 - DNA, 849 bp, Oryza sativa
  Clone ID: TFbOSC24996j.C1.o1.fg
atgtggaaaactcttactaatctctactcaggagaaggaaatgtgatgttaatggtggaggcacaggagaagataagtgttttgagacagggggagcgttctattgcagaatatgttgctgaattgaagcatttgtggtctgatttggatcattatgatcctcttgggttagagcaccctgattgtatagcaaaaatgagaaaatggattgagcgtagaagggtcattgagttcttgaagggcttaaattcggagtttgaaggaagaagggatgcaatgtttcatcaaaccacccttactaccttggatgaggctattgcagctatggcacaggaggagcttaagaagaaagtattgcctagtgccacaccatcttcaccaagccccacctatgtagttgcacaaagtaaagagaccagggagtgcttcaattgtggtgaaatggggcaccttatacgtgattgccgcgctcctcgcaagcctagttatgggagaggaagatttggtgataggggtggagcaagaggtggaagaggttatgcaggtagaggtaatagaggtagaggctatgaatataaaagtgatcacagagctaatgtggtcactcttgaaaagggttgttctggatctacaaatgttgatgttgccaatcttgttcattcttcttcagttctcattcaaattggatacttgactcgggtgcatctagacatgtcacgggagagggaaacagggaagaaacttgggattgacgtcaggcgtgatggactttggtatttggatcgaaaggcgacaagtgaagatgtatgtcttgcattgatggcttctacaagtgaagaagaggctaag

SEQ ID NO: 14939 - DNA, 5043 bp, Oryza sativa
  Clone ID: TFbOSC401337j.C1.o10.fg
atgtcgacatcattagctgaagttccgcaaggaggacatatcaaagaggtcattgcagagggctcttcgggaggcctatcatcgtcaacacagttattggctacaaaacgaaagttagcagcatcgaatcctccaacagcaaagcgaagacgatcacctattgcattgccaatagtcaggtctccaggagtgcgacaaattatttcccaaaatgaagtcatcatggagagatcacaagttgctggtcagatgtccccaagtgcagagtctccaagagctagatctatgtctccagtggcaaggttcgtatcaagtccgtctgctatcccaattgagctggatgttgaaactcagccaagggagtcaactcaatcaacacctcatgttgtgactcatcgttctgggaaaagaacactcaaatctttaatctggaaagaatttaaaccattttattcttctactggaaaggtgctctatgggaaatgcattcattgcagtaaggactggaaatttgatcctgatgtagcacgtgcagaacttttaaggatgcttgttttgcaagaacttcctttcagttttgttgaacaccctggttttagaagattttgtgcaagcttgaacccgtactttagggtgctttccagaattactataaagggtgattgcttggctgcctatcaagaacaaaagttagctttgtttgaggattggcagatagaaagtaagttgttcagtattacagtagacaatgcatctgttaatgattctatggttgtggaattgaaaggaaatctcttgggtaagcttgccatgccttgcaaaggggagctatttcatttccggtgcgcagctcacatccttaatcttattgttcaagatggattgagtactatcagtggtgccatatctaggataagggaaagtgtaaagtatataaaagcatcagaagcatgtgagcaaaaatttgaagaaatcattgcacaagtcggaattgttgaagagaagcgtccttcacttgatgtgtccactcgttggaattccacctatttgatgctttcctcatccttattattcaggagggcttttgattcattggatcggtttgatccaaactttcaagatgctccactattttttgattgggacaatgcagaagttctttgcaaacatctcaagatcttctatgatgcaactgttgtggtttccgggacatcatatcccactgtttctcgctactttcatgaattttggaaagtgaaggtgatgcttctaaatgagtccaacagtgaggatgttcttgtcgctagcatggtttctaaaatggatacaaaatttcagaaatattgggatctgcagttcctgcagatttgtgttcctgttattttttatcccagatttaagttgaaattccttgagtttaggctgaaagcaggttttggagataaggcaactggtccaaatggatatctgtctagaattaagaggatagtccgcagttggtttgttgaatattcttcacaaattggtggtccaagcgcaatcaattctcaagaagcatcaactagtggagtgaatgttggtggcagccaatttgctgactggaggcaatatcttcatgatcaaagcaagagttttggtgatccctattcaattctaactgatacggttgaggacgatgatgttaatatgcaactattagggatgagatggccttcagcagctgcgaatgctgctaccactagttttgttccctgtagtttttatttcagtaacttagttcgtttagatgcactagccgttgtcatttttgtgcatgtccagagcctgctgaaaataatacaagccttgcaaaaagcaaaacaattgattgtttctcatgaatctctaagcaagattcagccttttcaggttttctgcttgcagaagtgtgtagctagcgttaaaggactggaacaagtaatgggtaaattggtagagatgcttacaaagaagtttaatgaggctccaactacgagtagtgcagtggttcctcatactgaatcggtgcaaaaaattgagttgatgcaaaatgacattaagttggagggtgtaaaaaattatttgagttggtcaagaagagctttattgattttgaagacaaaggggttagaagcatatgttactggggaggtaaaggagcctgagaacatatcaagtgttgaatggaagacttggaggactaccaactcgttagtagtagcatggttgttaacctcacttatccctgctattgctacaactgttgagaccatctctagtgcaagtgagatgtggaaaactcttactaatctctactcaggagaaggaaatgtgatgttaatggtggaggcacaggagaagataagtgttttgagacagggggagcgttctattgcagaatatgttgctgaattgaagcatttgtggtctgatttggatcattatgatcctcttgggttagagcaccctgattgtatagcaaaaatgagaaaatggattgagcgtagaagggtcattgagttcttgaagggcttaaattcggagtttgaaggaagaagggatgcaatgtttcatcaaaccacccttactaccttggatgaggctattgcagctatggcacaggaggagcttaagaagaaagtattgcctagtgccacaccatcttcaccaagccccacctatgtagttgcacaaagtaaagagaccagggagtgcttcaattgtggtgaaatggggcaccttatacgtgattgccgcgctcctcgcaagcctagttatgggagaggaagatttggtgataggggtggagcaagaggtggaagaggttatgcaggtagaggtaatagaggtagaggctatgagtatagaagtgatcacagagctaatgtggtcactcttgaagagggttgttctggatctacaaatgttgatgttgccaatcttgttcattcttcctcagttctcattcaaattggatacttgactcgggtgcatctagacatgtcacgggagagggaaacagggaagaaacttgggattgacgtcaggcgtgatggactttggtatttggatcgaaaggcgacaagtgaagatgtatgtcttgcattgatggcttctacaagtgaagaagaggctaaggagcaagaatggaggaagccacatgaagagaaaaatcttcaagtatacacaaggagaacaaggtgtccagtaatccaacaagttgaagaggataatcaggtagaggaagatgtaagccgtgagcaaggatctttggagtcagggggagaagaagaggaagttaaagaagaatctgacttaccaattgccattagaaagagtgtgagaagcaatgcaggtaaacctccactaaggtatggttttgaagctcaagatgagggtgatgatgaaaataatatatccaactatgtttcctatgactccttgtcatccacatataaggcctttgtagcatcactagattcagtgcaaatcccaaaggattggagagaagcaaagcaagatccaaggtggcatcaagctatgctagatgaactagaggctcttgaaaagaacaaaacatgggatcttgtaccatttcctgaagggaagaaaattgtcaactgtaagtgggtttatacagtaaagcaaaatcctgatggaaaggtggaaagatacaaagtaaggttggtggctaagagatatagtcaaacatatggaattgattatgatgaaacttttgcaccagtagcaaagatgagcatggtaagaactcttatatcttgtgcagctaattttgattggccattgcatcagttagatgtcaagaatgcattcttacatggagatcttcaagaagaggtgtatatggatgtcccacctggatttgccacttcacaaactaaaggaaaggtgttgagattgaagaaatctttgtatggtgttaaacagtcaccaagagcatggtttgatcggtttaggcatgcaatgtgtgctatggactataagcaatgtaatggagatcatatagttttctatcatcatagtggagatcatataaccattcttgctgtctatgttgatgatatggttatcactggaaatgattgcttggagataactaggttgaaacggaatctaagcaaagaatttgaggtcaaggacctaggccagttgagatattttctgggtattgaaattgcaagatctcctagagggatagttatttcacagcgaaaatatgtattggacttgcttagtgaaacaggtatgcttggatgtcgcccagtctctacaccaattgatcaaaatcataagttatgtgcggagtctggagatccagtgaataggaaaagataccaaagattggtgggaagactgatatatctatgtcatacacgacctgacatagcatatgctgtcagtatggtgagtcgatatatgcatgatccaagaagtggtcatatggaggcggtgtatagaatcttgagatatctgaagggaagtccaggcaaaggcttatggtttaagaaaaatggacatcttaagatagaagggtattgtgatgcagattgggctagctgtcttgatgatagaaggtcaacttcaggctattgtgtttatgttggtggcaacttggtatcttggagaagcaagaaacaatccgtagtgtctcgctcaactgctgaagcagaatacagggcaatggtagtgagtttaagtgagttgttgtggttaagaaatcttctagttgagctgaaaattttggagaacactcccatgaagctattgtgtgataataagtcagctattaacattgctaataatccagtccaatatgatagaacaaagcatgtggaaatagatcgtttctttatcaaggaaaaactagacgagggagtgttggaattaggatttgtaacgtctggtggacaagttgctgattgtttaacaaagggcttaggtgttaaagagtgtaattgttcatgtgacaagatgggtatgatagatatctatcacccatcttga

SEQ ID NO: 14940 - DNA, 5220 bp, Oryza sativa
  Clone ID: TFbOSC418407j.C1.o7.fg
atgtcgacatcattagctgaagttccgcaaggaggacatatcaaagaggtcattgcagagggctcttcgggaggcctatcatcgtcaacacagttattggctacaaaacgaaagttagcagcatcgaatcctccaacagcaaagcgaagacgatcacctattgcattgccaatagtcaggtctccaggagtgcgacaaattatttcccaaaatgaagtcatcatggagagatcacaagttgctggtcagatgtccccaagtgcagagtctccaagagctagatctatgtctccagtggcaaggttcgtatcaagtccgtctgctatcccaattgagctggatgttgaaactcagccaagggagtcaactcaatcaacacctcatgttgtgactcatcgttctgggaaaagaacactcaaatctttaatctggaaagaatttaaaccattttattcttctactggaaaggtgctctatgggaaatgcattcattgcagtaaggactggaaatttgatcctgatgtagcacgtgcagaacttttaaggatgcttgttttgcaagaacttcctttcagttttgttgaacaccctggttttagaagattttgtgcaagcttgaacccgtactttagggtgctttccagaattactataaagggtgattgcttggctgcctatcaagaacaaaagttagctttgtttgaggattggcagatagaaagtaagttgttcagtattacagtagacaatgcatctgttaatgattctatggttgtggaattgaaaggaaatctcttgggtaagcttgccatgtcttgcaaaggggagctatttcatttccggtgcgcagctcacatccttaatcttattgttcaagatggattgagtactgtcagtggtgccatatctaggataagggaaagtgtaaagtatataaaagcatcagaagcatgtgagcaaaaatttgaagaaatcattgcacaagtcggaattgttgaagagaagcgtccttcacttgatgtgtccactcgttggaattccacctatttgatgctttcctcatccttattattcaggagggcttttgattcattggatcggtttgatccaaactttcaagatgctccactattttttgattgggacaatgcagaagttctttgcaaacatctcaagatcttctatgatgcaactgttgtggtttccgggacatcatatcccactgtttctcgctactttcatgaattttggaaagtgaaggtgatgcttctaaatgagtccaacagtgaggatgttcttgtcgctagcatggtttttaaaatggatacaaaatttcagaaatattgggatctgcagttcctgcagatttgtgttcctgttattttttatcccagatttaagttgaaattccttgagtttaggctgaaagcaggttttggagataaggcaactggtccaaatggatatctgtctagaattaagaggatagtccgcagttggtttgttgaatattcttcacaaattggtggtccaagcgcaatcaattctcaagaagcatcaactagtggagtgaatgttggtggcagccaatttgctgactggaggcaatatcttcatgatcaaagcaagagttttggtgatccctattcaattctaactgatacggttgaggacgatgatgttaatatgcaactattagggatgagatggccttcagcagctgcgaatgctgctaccactagttttgttccctgtagtttttatttcagtaacttagttcgtttagatgcactagccgttgtcatttttgtgcatgtccagagcctgctgaaaataatacaagccttgcaaaaagcaaaacaattgattgtttctcatgaatctctaagcaagattcagccttttcaggttttctgcttgcagaagtgtgtagctagcgttaaaggactggaacaagtaatgggtaaattggtagagatgcttacaaagaagtttaatgaggctccaactacgagtagtgcagtggttcctcatactgaatcggtgcaaaaaattgagttgatgcaaaatgacattaagttggagggtgtaaaaaattatttgagttggtcaagaagagctttattgattttgaagacaaaggggttagaagcatatgttactggggaggtaaaggagcctgagaacatatcaagtgttgaatggaagacttggaggactaccaactcgttagtagtagcatggttgttaacctcacttatccctgctattgctacaactgttgagaccatctctagtgcaagtgagatgtggaaaactcttactaatctctactcaggagaaggaaatgtgatgttaatggtggaggcacaggagaagataagtgttttgagacagggggagcgttctattgcagaatatgttgctgaattgaagcatttgtggtctgatttggatcattatgatcctcttgggttagagcaccctgattgtatagcaaaaatgagaaaatggattgagcgtagaagggtcattgagttcttgaagggcttaaattcggagtttgaaggaagaagggatgcaatgtttcatcaaaccacccttcctaccttggatgaggctattgcagctatggcacaggaggagcttaagaagaaagtattgcctagtgccacaccatcttcaccaagccccacctatgtagttgcacaaagtaaagagaccagggagtgcttcaattgtggtgaaatggggcaccttatacgtgattgccgcgctcctcgcaagcctagttatgggagaggaagatttggtgataggggtggagcaagaggtggaagaggttatgcaggtagaggtaatagaggtagaggctatgagtatagaagtgatcacagagctaatgtggtcactcttgaagagggttgttctggatctacaaatgttgatgttgccaatcttgttcattcttcctcagttctcattcaaattggatacttgactcgggtgcatctagacatgtcacgggagagggaaacagggaagaaacttgggattgacgtcaggcgtgatggactttggtatttggatcgaaaggcgacaagtgaagatgtatgtcttgcattgatggcttctacaagtgaagaagaggctaagtttattagaactgataatggaggggagtatataaacaatgaatttagtagctttctttcatcagaaggaatattgcatcaaacttcttgtcctgatactcctccacaaaatggggtggctgagaggaaaaaccgtcatctcttagagacagcccgctcattgatgtatactatgaatgtacctaaattcttgtggagtgaggcagtaatgacagcaacttatcttatcaaccgcacaccatcaagaatacttggaatgaagacaccatgtgagatgatatttggaaagaatgaatttgttgttccaccaaaagtgtttggttgcacttgttttgttagagatcatagaccttccattggaaaacttgatcctcgggctgtcaaatgcatctttgtaggctattcatctggccagaaggggtataagtgttggagtccattagaacgacgaacctttgagcaagaatggaggaagccacatgaagagaaaaatcttcaagtatacacaaggagaacaaggtgtccagtaatccaacaagttgaagaggataatcaggtagaggaagatgtaagccgtgagcaaggatctttggagtcagggggagaagaagaggaagttagagaagaatctgacttaccaattgccattagaaagagtgtgagaagcaatgcagcatcactagattcagtgcaaatcccaaaggattggagagaagcaaagcaagatcccaggtggcatcaagctatgctagatgaactagaggctcctgaaaagaacaaaacatgggatcttgtaccatttcctgaagggaagaaaattgtcaactctaattttgattggccattgcatcagttagatgtcaagaatgcattcttacatggagatcttcaagaagaggtgtatatggatgtcccacctggatttgccacttcacaaactaaaggaaaggtgttgagattgaagaaatctttgtatggtgttaaacagtcaccaagagcatggtttgatcggtttaggcatgcaatgtgtgctatggactataagcaatgtaatggagatcatatagttttctatcatcatagtggagatcatataaccattcttgctgtctatgttgatgatatggttatcactggaaatgattgcttggagataactaggttgaaacggaatctaagcaaagaatttgaggtcaaggacctaggccagttgagatattttctgggtattgaaattgcaagatctcctagagggatagttatttcacagcgaaaatatgtattggacttgcttagtgaaacaggtatgcttggatgtcgcccagtctctacaccaattgatcaaaatcataagttatgtgcggagtctggagatccagtgaataggaaaagataccaaagattggtgggaagactgatatatctatgtcatacacgacctgacatagcatatgctgtcagtatggtgagtcgatatatgcatgatccaagaagtggtcatatggaggcggtgtatagaatcttgagatatctgaagggaagtccaggcaaaggcttatggtttaagaaaaatggacatcttaagatagaagggtattgtgatgcagattgggctagctgtcttgatgatagaaggtcaacttcaggctattgtgtttatgttggtggcaacttggtatcttggagaagcaagaaacaatccgtagtgtctcgctcaactgctgaagcagaatacagggcaatggtagtgagtttaagtgagttgttgtggttaagaaatcttctagttgagctgaaaattttggagaacactcccatgaagctattgtgtgataataagtcagctattaacattgctaataatccagtccaatatgatagaacaaagcatgtggaaatagatcgtttctttatcaaggaaaaactagacgagggagtgttggaattaggatttgtaacgtctggtggacaagttgctgattgtttaacaaagggcttaggtgttaaagagtgtaattgttcatgtgacaagatgggtatgatagatatctatcacccatcttga

SEQ ID NO: 14941 - DNA, 1970 bp, Oryza sativa
  Clone ID: TFbOSC416075j.C1.o3.np
atggatgaagtcgggcgtcgatggacattctccagggcaaatgaaggctacacgagctgcggcccggtagtcgagatgtcatacggcggagggttggtgcccaatgctaggggctcagttctgcctgcctgtcccgggtatcccggccgtaggtaggattgggtcggtactcttgtctaaggctaggatgggttggaaactatgtcacatctttacgacgggttccaaggccatggaatgcggaataaagatgtgtcttgtgggttggcctgggttggcttgggacgagctgggacccaggtcgggttgccagttcggtccgaatcatcgtaggccttgggttaaggcagtactagatggtcagctttgcgaagaagaagatgtcgtcagttgtttgccgaagctccggaagactgcaggatccgctagcgaagcgaaggaagcagtgaagccagctgtgaagcaggaaagaagagttagttcctttaaggtcctatccttagtttctaatctgtctctcccctttgttttccctctctccctctccaaacctttgcaacagatggctggcaatgagaaaggcaataaggtcagaagtcaggacattggtacctcaagctcccgagtgaatgaagcaccagacaccagttgtgtgacactggtccaacacctgattaaccagaaccgattgcttatagagatactacagcagcatcagacgccaattctgaacctgagtcaaatacaacctcaagtgcagttggaggcagtccaagcactcacaccaccagtcagcatgccgccagcatcccgaaggactcatggtgacgtgccccatgttgacccaaaagaagcaagtaacatttgctttacgtgtgatgagcaagtgcactatgcaagggagcgtcctcagcagaaaagaaaaacaccaatgcgaaccgaagatgaagtccgtaagatgatcattaccagcacagaatggcctccaccaggaatgacaagacgtcagagaagaaataccttccgaggtgcaccacagttgaccgagcatcttttagctagtggaggtagagtgtctgatagtgaagattcagatcaagtctcctcagatgatgaagatgaaatggaacgtaaggcatgctctcgttgtggagaagtcggtcatgttgccagctcgtgtgccactacatgcgttcattgtgaggaagaccatccacccgacaggtgtccaacgagcaggatcacttgtttcttttgtgaaggaactgatcatgtaccaaaagattgtcaattcagttttctgctgacgaagaagatggccaaccaacccgccagttccaacggagagaagcatcaaggcaacacaaatcctcgccaagattaccgtttcagcctaactccagtgccaggacagaggaatcgaaatgagaaaagaaaatgccgagtccgggaagacatctgttgcttcaattgtcaaggaatgggtcatttcgccgacaagtgcccaaaaccgagaaacatagctgccagcacgtcagtccacgcaactccctgcaatcagaagcttgctcctcagcgaattgtcatccatgcatcccaaagcagtcctatggcccgcgctgcaacagcttcaactccagcgagtgcattaccacaaggtgtcaatgctcactttcagccccagcaaagaattgtcgtcgatggaagaagttgtgtctctccccgacctactccaggccgagccaagggcaatcaacctccggagggcgataccaagcagaagaccgttattcgcttcaaccagcaatcagaagggagcttctcctgtgaatgatagcattatgcagtcctatcacatcatcacaaaaccaatcaaggatgcagtcactagaacaatgccagctatgtatccacgtttgtgatcttcagttcgctacttatcaccgtaatcgaaagtttgcagcaatcct

SEQ ID NO: 14942 - DNA, 726 bp, Oryza sativa
  Clone ID: TFbOSC408704j.C1.o1.fg
atggagcaggtctgccgctgttacaatgagtccatcaaggagcaggagcaacagcaggagcagaagcagaagcagaagcgggagcaagagcaagagcaagagcaagagcaggagtcgcagcaggagcaggagccgaagccgaagccctcggcgagaaaggctgcgtattgttctgccaatcccccagacttgacccacctcaacccccaagggatcttatatgcaagaattgcaggaggcctggtcactttgctagggattgccaatctactgctacatgcaacagatgcaatcttccaggacacttcgcagcagaatgcacttctgaaactgtttgttggaactgcaagcagtctggccacattgctaccgaatgcaagaatgacgccctgtgtcacacctgcagcaagacaggtcatctggcacgtgattgcccaagttcaggatctacctgggcacatagctcgggagtgcacgaacgagcctgtttgcaacctgtgcaatgtctctgggcatcttgctcggaactgtcaaaaaacgaccatttcttcagagatacagggcggccctttccgtgacattacctgccgcttgtgtggcaagccagggcacatcagccgcaactgcatgacaaccatgatctgtggcacctgcggtgggaggggtcatatgtcatatgagtgcccatctgcaaggatgtttgatcgtgggctccgcaggttctga

SEQ ID NO: 14943 - DNA, 1993 bp, Oryza sativa
  Clone ID: TFbOSC102121j.C1.o8.np
atggatgaagtcgggggtcgatggacattctccagggcaaatgaaggctacacgagctgcggcccggtagtcgagatgtcatggcagagggttggtgccctgctgctagggtgctcagtcctgcctgcctgtcccgggtgtcccggccgtagggggattgggtcggtactcttgtctatggctaggatgggttggaaactatgtcacgtctttcgtctgtataccgtggtggtatcttgcttaacaactaaaatatggaatggttggcctgggttggcttgggacgagctgggacccagggtcgggttgccagttcggtctgaatcatcgtaggccttgggttaaggcagtactagatggtcaggtcagtgaagaagaagacatcgtcagttgtttgccgaagctccggaagactgcaggatccgctagcgaagtggaggaagcactgaagccagctgtgaagcaggacaaaagacttagatctgttaaggtcctatccttagtttctaatctgtctctcccctttgttttccctctctccctctccaaacctttgcaacagatggctgacaatgagaaaggcaataaggtcagaagtcaggacatcggtacctcaagctcccgagtgaatgaagcaccagacaccagttgtgtgacactggtccaacacctgattaaccagaaccgattgcttatagagatactacagcagcatcagacgccaattctgaacctgagtcagatacaacctcaagtgcagttggaggcagtccaagcactcacaccacgagtcagcatgccgccagcatcccgaaggacccatggtgacgtgccacatgttgactcaaaagaagcaagtatcatttgttttatgtgtgatgagcaagggcactatgcaagggagtgtcctcagcagaaaagaaaaacaccaatgcgaactgaagatgaagtccgtaagatgatcattaccagcacagaatggcctccaccaggaatgacaaaacgtcagagaagaaataccttccgaggtgcaccacagttgacagagcatcttttagctaatggaggtagagtgtctgatagtgaagattcagatcaagtctcctcagatgatgaagatgagaagtctccccaaggtttcaaccagaataaaatggaacgtaaggcatgctctcgttgtggagaaatcggtcatgttgccagctcgtgtgccactacatgcgttcattgtgaggaagaccatccacccgacaggtgtccaacgagcaggatcacttgtttcttttgtgaaggaactgatcatgtaccaaaagattgtcaattcagtttgctgctgacgaagaagatggccaaccaacccgccagttccaacggagagaagcatcaaggcaacacaaatcctcgccaagattacagtttcagcctaactccagtgccaggacagaggaatcaaaatgagaaaagaaaatgccgagtccgggaagatatatgttgcttcaattgtcaaggaatgggtcatttcgccgacaagtacccaaaaccgagagacatagctgccagcacgtcagtccacgcaactccctgcaatcagaagcttgctcctcagcgaattgtcatccatgcatcccgaagcagtcctatagcccgcgttgcaacagctccaactccagcgagtgcattaccacaaggtgtcaatgctcaatttcagccccagccaccagttgacaagacagaggccagtatcggcattttacctttggatgttccagcacagcagccaagaaatcaagtacaagatgaagaaccctcagcaaagaagacgttgatttgctacaattgcaaaggaccagggcattactcgagggactgcctgcaaccaaggcaaagtcgatctccacattaccgccaatttacacgaagcagacatcccaatcgtattgtggtcactggagcaaacgccgtacccgtgaggcctcgtgttaatcagaaccca

SEQ ID NO: 14944 - DNA, 402 bp, Oryza sativa
  Clone ID: TFbOSC102216j.C1.o9.gm
atgaccttggcggcggcggccaccgtcgcgttcgagcgggatggccagcgaggagggggccgcggctctcttattccacctgtagcaccgcttacaagagcaagcaagggcgccgctgtcggtgacgacgaccttagccgcatcaaggccgtggacgtcaccgtgccaggcggcgtcgcgctcaccgacggatcccttcctagcggctgcgaggaccgcggctacggaggcggcggaggaggtgaccgtgcgtgctacaagtgcggcaaggaggcccacatggccaaggactgctcccagggcagcgacaacggcgcgggaggatcgtccgtcatgcttcgcgggccggccgcttcgccccgcctcggtcgtcacctgctccggccgccctacggcgtctag

SEQ ID NO: 14945 - DNA, 334 bp, Oryza sativa
  Clone ID: TFbOSC11382j.C1.o6.np
agacaaaaggaagaggggatcccggggatcatttcccctctattatttataaatttaggatttttagggtgtgacattttcgaaccgtaccgatgccgagttgatgagatggcaccaggagggtaggaaaaatgacggtaagattcaacaccctgccgatgctcgacagtggaaaaactttgatgcactacacccggaatttgcaaagaacccgagaaacgtaaggtttgcctggagcacaaacggaaagaacccgttcagtgacctaagcagctttcacaaaaccacactatcgatggatggattcacccgtgagatgacgtggttgtttcat

SEQ ID NO: 14946 - DNA, 5194 bp, Oryza sativa
  Clone ID: TFbOSC420875j.C1.o3.np
gttccgacgttcccggagagtccgattttggaggggaagattttgaagaattccagggccagcaaggcaactcctggtttggaatggtatattcctggtttggagatagaactgtgcagccgggaatggttgttcaggatggttgggcctatgcaacgggatgccgcgcttcaagcctgagtacttgttcggtactgagggatttgtccaggagttgcgtacgatgtccttcgccataggatttgggactgcccctttgtatgcccagattcctcatgaccgtgatgaagagaagtgccgtgtcaaggtcaccttgaacactaatcatgaagacatcccatcgctgatgttcgaggctggagggggaaactacattcatgcttgtcaggaggtggcaaggatcgccataggagagcttcgcgattgctacagtgatcagttggccgacactgagtatcgctaccatcctcgccaaccccagggaagtgaccgtggcagctaccttgaacctgcaggaattgagaatgatgctaccacaaggcatttggttgagatgctgtgggccatggatgagttccgcgctgagattgtgttagctgctcaagatcgtgaagaccggaatcgtggtaagatatgtaagcttgaggacaaagttgatcgtttggagaaggaactagccgcgttgaagggagaagcaccaccacaaaaggccagggttcgtcttaccacaaggaagagagctctatttgtccctcgctaccagttggcgcctaagatggtgcttactcacagcaatgggaatggcccaaacaacaacaacaacaacaacaacaacaatggagagaatcccacgcttgcccaagtcctggtccaacaggcacagctcatgaacatgatgatgcagcaattccagaaccagcagaaccaggggaacaaccatgcacctccccagaacaagttagcagaatttcttcgtgtgaggccgcccactttttctagcactaccaatccagttgaggctagtgattggctgcacgccatagaaaagaaattggacctgcttcagtgcactaatcaagaaaaagtctccttcgcttcacatcagcttcatggccctgcctctgagtggtgggatcacttccgtctcaacaggaccactgcggaaccaatcacttggcttgagttcactgctgctttgcggaaaactcacataccgtcgggagtggtgtctcccaagaagaaggagttcaggacgctcactcagggatctcgctctgtcactgaatacttgcatgaatttaatcgtctagctcgctatgctccagaagatgtacgtacagatgaagagcgtcaagagaagttcttggaaggactgaatgatgagctctcttacccattaatgactggggattatcatgatttccagaagttggtggatatggccattcgccaggaggacaagtacaaccgaatggagcagaagaaacgcaggattgctcacttcaaagctcagcaggggaatagtcagaggccgtgtcttgctatgggacctcaggcagtgtcacagggaggatcttcgttggttgcccgtccacagcgtcagttcttcaacaacaattctggcaacaacaaccgcaaccaagctccacgtcctgttgcaactctagcccagcatcagcctgccaagagggagccgggaaacaagccaagagtgtgcttcaactgtggggaaccaggtcattattctgacaagtgtccgaagccccggcgcgtgaaggttgtccctgcacagaacaactccaccgcaccagtgtccaaggctcgtgtcaatcatgttgctgctgcagaagcccaaggtgctccagatgtgattttgggtacgttccttgttaactcagttcctgcaacagtgcttttcgattctggtgctacacattcatttttgtctatgagttttgcgagaaatcacgggatggaggtagaagatcttagacgtccgttgatggttagtacccccagcaaccaagcactctcgtcacaacgtagcccctccgtcagaatagagattcaaggagtaccatttctggccaaccttattctattagaatccaaagaccttgatgtcatcctagggatggactggttagcccgatataaaggtgtgatagactgtgccaatagaaaagtaactctcaccagcaatgacggtcaagttgtaactgtttacgcattgccttctgagcctttaaggtcaagtctgaaccaagtaagtttggaagagattcccatagtacaggactacccggatgtgttcccggatgatttacctggtatgccgcccaagagagatatagaattcagaatagatctggtaccaagaaaaactccgatccataagagaccttatagaatggcagccaatgaactagcagaggtcaagaggcaagtagatgatttgcttcagaaaggatacattagaccaagttcgtctccatggggagctccagtcatttttgtggaaaagaaagatcatactgagaggatgtgtatggattatcgtgcactaaatgatgtgactatcaagaataaatacccactgcctagaattgatgatttgtttgttcagcttaaaggagccaccgttttctccaagatcgatcttcgatcagggcagttgaggattaaagaggaagatatacctaagacggattttaccactcaagatgggttgtttgaatgtactgttatgtcttttggacttaccaatgcccccgctttcttcatgaacttgatgaataaggtgtttatggaatacctggacaagttcgtggtggtttttattgatgacattcttatctactcccgaaccaaagaagagcatgaagaacaccttcgccttgcactagagaagctacgagaacatcaactgtatgccaagtttagcaaatgtgaattttggttgtctgaagtaaagttccttggacacgtcatctcagccggaggagttgccgttgatccgagtaatgtggaatgagtaaccaactagaaacaaccgaagacagtctccgagattcatagtttcctgggtcttgcaggctattaccggaggttcatagagaatttttccaagattgctaagcccatgacacaactgctttagaaagatgtgaagtacaagtggtcagaagaatgtgagcagagttttcaagagttgaaaagtcgcttaatatcaacacccattttgattttgcctgatccaaagaagggtttccatgtgtactacgacgcatctaagcttgggttaggttgtgttctgatgcaagatgggaaggtggttgcgtatgcatctcgtcagttacatccgcatgagaagaactaccctagtcatgaccttgagttagccgcagtggttcatgcgttgaagatttggcgtcactacctctttggtactcgtacggaggtgtacacgaatcacaagggtttaaagtatatctttactcagccggatctgaacatgagacagcggagatggttggaactgattaaggattatgacatgggaattcattatcacccgggaaaggctaatgttgtagcagatgctctcagcaggaaaggctattgcaatgctacggaaggacggcggttgccgtgggaattatgcaaggaatttgaaagattgaatttgggaattgtcagtagaggttttgttgcagctttagaagcgaagcccactctcattgaccaggttagagaagctcaaatcaatgatcctgatattcaagagattaagaagaacatgagaaggggaaaggctatcgggtatttggaagatgagcaaggaaccgtatggttgggtgagagaatttgtgtcccagagaacaaggagttgaaaaatgcaatcttgaaggaagctcatgacactttatactccattcaccctggtagtaccaagatgtaccaagatctcaaggagaaattttggtgggcaagtataaagcgtgagatagcagagtatgtagctgtgtgtgatgtttgttagcgagtcaaggcagaacatcagaaacccacaggtttgctgcagcccttaatgataccagaatggaagtgggaggaaatttggatggatttcatcactggtctacccagaacgtcatcaggccatgactctatttgggtgatagtcgacaaacttaccaaagtggctcatttcatccctgtgaggacaacatattccggaagtcgtttggcggaattgtatatggcaagaattgtgtgtttgcacggagtgcctaagaaaatagtatccgatcgaggtagccagtttacttcaaagttttggaagaagcttcaggaagagatgggttccaagctgaacttcagtaccgcttatcatccgcagacagacggacaaattgaaagggtaaatcagattttggaagacatgttgagagcttgtgctttagacttcggtggaagttgggataagaatctgccttacgcggaattctcatacaacaacagttatcaagctagtcttcaaatggctccttatgaagcactgtatggtcggaagtgccgcactccgctgttgtgggatcaaacgcgagaacgtcaggttttcgggactgatattctgagggaagtagaagagaaggtaaagatcactcaagagaggttgcgtatagctcagtctcgtcataagagttatgccgacaatcgccgcagggatttaagttttgaggaaggagatcatgtgtaccttcgtgtcatgcctctttggggggttcatcgttttcacaccaaaggaaaattggcaccgcgttttgtgggaccttataagattgtcagtagaagaggtgaggttgcttatcagttggagttacctcaatgcttggcaggtgttcataatgtgttccatgtgtcatagttgaaaaagtgtttaagggtacacactgaagaagctaatcttgagcagattgaaatccaagaggatttgacatatgttgagaaaccaatccgtatcctggagacagatgagagaagaaccaggaatcgagttatccgtttctgtaaggtccaatggagtaatcactcggaagaagaagctacctgggaacgagaagaagaattaaagtcagctcatccgcatcttttcgccagctcttccgaatctcgaggacgagattctgtt

SEQ ID NO: 14947 - DNA, 1629 bp, Oryza sativa
  Clone ID: TFbOSC404471j.C1.o21.gm
atgccgccgccgcgccttggctcggccgagccggtctcatgccgtgcccgtgccccagccgcgccgcctcgtgaccgtccgatcggctttgtgccgatccgagccgtcggttcccgtggaccggcggtggacagcctcggtggtcccggtccacggtggaccggcgcccatgtgccgctgactggtggggcccgcttgccggcgccgcccctcccccttgatgacgtcagcgaggagttcccaatatcggcaccgaagacccctgtcaaaatgcggtccagatccccgaagataacgacagccaagtcaatgtcagaccaaaggaaagtaagtgctacctgttatgattgtggtgagcaaggtcattatataaggaactgtccatggaaggtgttcgccaggtcacctgaaaaggacgagaagcagtgcccaggaagtaaccaagctccaagtcagtctactaacaagaaagatggtactctgcagcacaactttggagcgaacaggaaggtgatatggaagatggataatggcaggaccatgatcatcaccagttcagaatttactcctgaagacgcagcaaggatacccaagcgtcagagaggaagaaataccttccgtggagcacgccagctaacccgacatctcataaagtacggtccgcccagacccgaagatgatgaatcaggagagcggtttgctgctgatgacgatgatgatgatactgatgacgatgatgatacgacccttaacagtttcatggaaagaggattggagttcaaagcatgtgctagatgtgggatagtcggacacactgctagtttatgcctccccacctgccgctgtgatcatgtgcctaaggactgtcagttgaacgcggtcatagctaagaccaagaaagaacaagggacaaccgtgcaacccattcgtcaaccaatgacaatcgacaacagcggtcacaatccttctgctcttcctccaactccagctccagtggaagccaaccatggaagaagcaacgtcaccaaggatgttcataagtctctgcttgttcccgtttcagctgccaaagtgcataatcagaagcctgcacctcgggaccaagcaagtcgattctgccgtaactgtcgtaagccaggacatcgtttcagtgattgtcctcttccaagagcagcaaaggcagttcgtcgtgattcacaagttaccagcattgcccatgacaccaatcgacacctgaatgtgcaacctccgcctcaacggattatcgtcaagggcaccgtcaaaggtcgcattgttccaccggcaaccgtttcaagcctacagcaccaacgccagcagggtaagcaatgccaggagaacaacagctcgctacagctacaaagaggtggtacgctccttcgtcagcacccgcggcaagtgttgtcagcaccaggtcgtccaactgttgtcagttctagcaatgcacctggtattgctccaatctggaggcccatcgacaaatcaccgctcggtaaccccacgggcaagaagatcctacccgttacagctgacaagacagttgcccctccaccatcgaagatcaacaagcagagcaacgttcccggtgagacttctggtagtaggaactaa

SEQ ID NO: 14948 - DNA, 1675 bp, Oryza sativa
  Clone ID: TFbOSC900396j.C1.o8.np
cttaaattttccttggtctaaaataaggtcagaagtcaaaacaagggtgcctcaacctcccgagtgaatgaagcaccagacaccagttgtgtggtagtagtccaacgcctgattaaccagaacaaactacttatagagctactacagcaacatcagacgccaattctgaacccgagtcagatgcaacctcaagtgcagtttaaggaagcccaagaactcacaccacaagtcagcgcaccgccagcatcccaactggcccatgatgccatgccacatgtggactcaaaagaagcaagaatcatttgttttatctgtgatgaacaagggcactatgcaaggaaatgtcctcagcggaaaagaaaagcaccaatgcgaaccgaagatgaagtccgtaagatgaccattaccggcacagaatggcctccaccaggaatgacaaaacgtcagagaggaaatttctttcatggtgcaccacagttgacccaacatcttttagctaatggaggtagagtgtctgatagtgaagattcagatcaagtctcctcaagggatgaagatgagaagtctctccaacgtttcaagcagaataaaatggaacataaggcatgctctcattgtggagaaatcggtcacattgccagctcatgtgtcactacctgcgtttattgtgaagaagaccatccacccggcgagtgtccaacaagcaagatcacttgtttcttgtgtgaaggaactgatcatttaccaaaagattgtcagttcagttttctgctgacgaagaagatggacaaccaagcgttccaacagagagaagcatcaaggcaacgcaattccccaccaagactacagtttcagcctaaccctagtgccaggacagaggaatcaaaatgtgaaaagcaaatcccgagttcggcaagatatcagttgcttcaattgtcgagaaatgggtcatttcaccgacaagtgcccgaaaccgacaaacacagctgccagcacgtcagtccacacaacaccttgcaatcagaagcttgctcctcagcgaatggtcatccatgcatctggaagcagtcctatagcccgaattgcaatagctccaactccaatgagtgcactaccacaaggtgtcaatgctcccttccagccccatccacctattgacaagacaaaggccagtatccgcattgtacctttggatgttccagtacaacagccgagaaatcaagtacttgatgaagaacctatgaagaaggacattactccagaaattgtccacgaccaaagcgtaacccacgccatcattccggacattatgcacgaagaagacaggatcacaatatcagggtcactggagcaaatgcagtacctgtcaagcctagtgctagacaagctggtgtcgacgcatgtcatgaaggtggtaacttgtatgaggttgactccaatgatatgaattatgagaagttctggaactgaagccccatcttcaactaccgcaacccagtcgaagtcagcaaaaggtgcaaccagggacaagtcaggtgaagagaagattccatctgcaacaggagatcaagccaagcagttccgagtggggaagttttgctggacaagtttgttatagaagacgcaacggaagaagtcagaaaataagagaagatcgcccaaccaatcttcttgc

SEQ ID NO: 14949 - DNA, 1863 bp, Oryza sativa
  Clone ID: TFbOSC401303j.C1.o3.fg
atggctgacaatgagaaaggcaataaggtcagaagtcaggacattggtacctcaagctcccgagtgaatgaaacaccagacaccagttgtgtggcagtggtccaacacctgattaaccagaaccaattgcttatagagatactacagcagcatcggatgccaattttgaacccgagtcagatgcaacctcaagtgcagttggaggcagtccaagcactcacaccacaagtcagcgcaccgccaacatcccagaaggcccctcatgccatgccacatgttgacccaaaagaagcaagtatcatctgttttatgtgtgatgagcaagggcactatgcaaggaactgtcctcagcagaaaagaaaagcaccaatgcgaaccgaagatgaagtccgtaagatgatcattaccagcacagaatggcctccaccaggaatgacaaaacatcagagaagaaattccttccgaggtgcacaacagttgacagagcatcttttagctaatggaggtagagtgtctgatagtgaagattcagatcaagtctcctcagatgatgaagatgaaatggaacgtaaggcatgctctcgttggggagaagtcggtcatgttgccagcttgtgtgccactacctgctttcattgtgaggaagaccatccacccggtgaatgccccatgagcaggatcacttgtttcttttgtgaaggaactgatcatgtaccaaaagattgtcaattcagttttctgctgacgaagaagatggccaaccaacccgccagttccaacggagagaagcatcaaggcaacacaaatccccgccaagatcaccgtttcagcctaactccagtgccaggacagaggaatcgaaatgagaaaagaaaatgccgagtccgggaagacatctgttgcttcaattgtcaaggaatgggtcatttcgccgacaagtgcccaaaaccgagaaacatagctgccggcacgtcagtccacgcaactccctgcaatcagaagcttgctcctcaacgaattgtcctccatgcatcccgaagcagtcctatagcccgcgttgcaacagctccaattccaatgagtgcactaccacaaggtgtcgatgctcaatttcagccccagccaccagctgacaagacagaggccagtatctgcgttgtacctttggaagttccaatacagcagctgagaaatcaagtacaagatgaagaacccgagttgaaggagggcattactccaaaaactgtccccaaccaaggcaaaatcgacctccacattaccgccaatttacacgaagcagacattccaaccgtattgtggtcactggagcaaacgccgtacccgtttcaccgaaaggcagcaagccaaaggacctcatcgtccccagaagcgtccgcaatccacattaaagaataccacctgatagagataggccgaaagatgattgataaaaagagattggcaaagatgttctctagcatgaaagaagtaggccgaaaggtgattgataaacagaaacatgttctgcatcgctcacggaagacccctgattgtaattgccccgcaacagtcaccttgtcattaagtaagcaagatgacctagttgataacttgtccgaggttgactccgaagatatgaatcatgagaagttctggaacggaagcatcactgcactaccgcaacctagtctgagtcagccaaaaggtgcaccctggtccaagtcaggtgaagagaagattccatccgcaacaggaggtcaagccaagcagttccgagtggtgaagttttgctggaagtttgtcaagacgcaacggaagaagtcagacaagaagagaagaccgcccaacctatcttcttgctag

SEQ ID NO: 14950 - DNA, 1996 bp, Oryza sativa
  Clone ID: TFbOSC900144j.C1.o12.np
atggatgaagtcgttgcgacgatggatatctctgaggcaaatgaaggctacgcgagctgtggctcggtaatcgagatgtctaggcaaatgaaggctacacgggtcggtgcccgggctcaatcctggcctgcctgtcccgggataccggccgtaggcagggttggatcggtacttttgttcacggctaggatgggtaaagggttatgtcacgttttttatgatgggttccaattgcaatggaatgcagagtaaaggcgtgtcttgtgggttggcctgggttggcttgggacgagctgggacccaggtcgggttgccagttcggtccgaatcatcgtaggccttgggttaaggcagtactaggtggtcagctttgcgaagaagaagatgtcgtcaattgtctgccgaagctccgcaagactgttggatctgctagcgaagcgagggaagcagtgaagccagatgtgaagcaggagaaaaagtgtagctctgttaaggtcctatccttagtttctgatctgtctctcccctttgtttttcctctctccctctccaaaacctgcaacagatggcggataatgagaaaggcaataaggtcagaagtcaggaaatgggtacctcaagctcccgagtgaatgaagcaccagacaccaattgtgtggcagtggtccaacacttgattaaccagaacaaattgcttatagagatactacagcagcatcggatgccaattctgaacccgagtcagatgcaacctcaggcgcagttggaggcaatccaagcactcacaccacaagtcagcgcaccgccaacatcccagaaggcccctcatgccatgtcacatgttgactcaaaagaagcaagtatcattggttttatgtgtgatgaacaagggcactatgcaaggaactgtcctcagcagaaaagaaaagcaccaatgcgaaccgaagatgaagtccgtaagatgatcattaccagtacagaatggcctccaccaggaatgacaaaacgtcagagaagaaattccttccgaggtgcaccatagttgacagagcatcttttagctaatggaggtagagtgtctgatagtgaagattcagatcaagtctcctcagatgatgaagatgagaagtctccccaagggttcaaccagaataaaatggaacataaggcatgctctcattgtggagaaatcggtcatgttgccagctcatgtgccactacctgctttcattgtaaggaagaccatccacccggcgagtgccccatgagcaggatcacttgtttcttgtgtgaaggaactgatcatgtaccaaaagattgtcaactcagttttctgctgacgaagaagatggccaaccaacatgcccgttctaatggagagaagcatcaaggcaacaccaatcctcgccaagattacagtttcagcctaactccagtgccaggacagaggaatcaaaatgagaaaagaaaatactgagtccggaaagatatctgttgcttcaattgtcaagaaatgtgtcatttcactgacaagtgcccaaaaccgagaaacatagctaccagcacgtcagtccacgcaactccccacaatcagaagcttgctcctcagcgaattgtcatccatgcatcccgaagcattcctatagcccgcgttgcaacagctccaactccagtgattgcactaccacaaggtgtcaatgctcaatttcagccccagccaccagttgacaagacagaggccagtatttgcgttgtacctttggatgttccagcacagcagccaagaaatcaagtacaagatgaagaacccgagcgtaaaaaagttatagtctatttcaactgtagagaagaagggcattactcgagggactgtcccctaccaaggcaaaatcagcccccacattttcgccaatttacaggaagcagacataccaatcgccaagtggtcactggagcaaatgcagtacctgttaagcctagtgctagtcaaaagcaa

SEQ ID NO: 14951 - DNA, 4290 bp, Oryza sativa
  Clone ID: TFbOSC100841j.C1.o2.fg
atggctggttttgccgatgcactgaggccggataaattcaccggtgtgcattttaagagatggcagatcagggtcactctgtggctgacagctatgaaatgcttctgggtgagtactggcaaacctgaaggagttcttaccgctgaacagcagaagcaattcgaggaagccactactctctttgtgggatgcattcttagcgttcttggcgatcgtctggtcgaggtgtatatgcatatgaccgacgctaaggagttgtgggatgcactgaatactaaattcggtgctactgatgctagcaatgatctgtatatcatggagcagtttcatgactacaaaatggctgacaaccgttctgtagtcgaacaggctcatgagatacaaaccatggctaaggaactcgaactccttaagtgtgtcttacccgacaaatttgtggccgggtgcattattgcaaaactacctccatcttggaggagtttcggtactgcactcaaacacaagagacaggaatactccgttgaggggttgattgcgtctcttgatgttgaggagaaagctcgggaaaaagatgccgcgtctaagggcgatggtgggcagtccagtgccaatgttgtgcacaaggcccagaacaagagcaaggggaaatacaaagctcagcagaccaccaacttcaagaagcagaagaagaacaacaacaatcctaatcaggatgagaggacttgctttgtgtgtggccaagttggtcatctggctaggaagtgtccacaacgcaaggggatgaaagcacctgcagggcagacttctaagtctgctaatgtgaccattggcaacactggagatggaagctggtatggtaatttacctactgttttttcagttaatcaatctactaattggtgggttgatactggggccaatgtacatgtttgtggtgacatctcattgttttcttcttatcaggtcgcacggggttccaccgtcctaatggggaatgggtcacatgcttctgttcatggtgttggcacggtagatctgaagtttacttcgggaaagatcgtgcagctgaagaacgtgcagcatgtcccttctatcgacaggaatcttgttagtggctcccgtctgactagagacggatttaagttggtttttgagtctaataaagtagtcgtgtctaaacatggatattttattggtaaaggttatgagtacggaggcctgttccgcttttccctttctgatttctgcaataagtctgtgaaccatatttgtggcagtgtggatgatgaggctaatgtttggcattcacgtttatgtcatattaattttggcttgatgtctcggctttccagcatgtgtttaattcctaagttttccattgtcaaaggttctaagtgccatagttgtgtgcaatcgaagcaacctcgcaagcctcacaaggctgccgaggagagaaacttggcaccactagaactcctacattcagatctttgtgaaatgaatggggtgttgacgaagggtggaaaacgatatttcatgacattgattgatgatgctactagattttgctatgtgtacttgttgaaaacgaaagacgaggctctagactattttaaaatttataaggcagaagttgaaaatcaacttgacagaaagataaaaaggcttaggtctgatcgtggtggagagtttttctcgaacgagtttgacttattctgtgaggaacatggcatcatacatgagaggacgcctccctattctcccgagtctaatgggattgctgaaaggaagaaccgcacactgactgacttggtgaatgccatgttggacaccgcgggactgcctaaggcatggttgggggaggcattgttgacctcaaatcatgtgttaaacagagttcctaacagaaataaggacaaaacaccatatgagatatggattggtagaaaaccatcactttcttatttgcgcacatgggggtgcttggcgaaagtcaatgtaccaataacgaagaagcgcaaacttggacctaagactgtggactgtgtttttctgggatatgctcatcatagcattgcctatagatttttaatagttaaatccgaggtaccggacatgcatgttggtacaattatggagtctcgtgatgctaccttctttgagagctttttcccaatgaaggatacacatagtggttcgaaccaaccctctgaaataattcccagttcaatcacaccaccagaacaaactgaacatacacatgaacttgtctctgaggaggatgtcagtgaagctcctcgaaggagtaagagacaaaggacagctaagtcttttggtgatgatttcattgtgtacctcgtggatgacactcctaagtcaatttcagaagcatatgcatctcctgatgcagactactggaaggaggctgtccgtagtgaaatggattccattatcgctaacgggacttgggaggtgacagagcgaccctatgggtgtaaacctgtggggtgcaagtgggtgttcaagaagaagcttaggcctgacggtactattgaaaagtacaaggctcggcttgttgctaagggctatactcagaaagaaggcgaagatttctttgacacttactcacctgttgctagattgaccacaattcgtgtgctactttccctagcagcctcacatggtcttctcgttcatcaaatggacgttaagacagcttttcttaatggagagctggatgaggagatctatatggatcaacctgatgggtttgtagttgaaggtcaagaaggcaaagtgtgcaaattgttgaagtctttgtatggtctgaaacaagctcctaagcaatggcatgagaaatttgacaaaacattgacatctgcaggctttgcagtcaatgaggcagataaatgtgtgtactatcgccatggtgggggtgagggagttattttgtgcttgtatgttgacgacatactgatatttgggacaaatcttgaggtgataaatgaggttaaatcattcttgtctcaaaattttgatatgaaagatttgggagtagctgatgttatcttaaacattaagctaattagaggtgagaatgggattactctcttgcagtcccattatgtggagaagatcttgaatcgctttggctacattgatagtaagccttctccaacaccttatgatcctagcttgttgcttcgcaagaacaagagaattgctaggaatcaactggaatactcccaaatcattggctcgttgatgtacctggctagtgcaactaggcctgatatctcctttgctgtgagcaagttgagccgatttacttctaatccgggagatgatcactggcgtgcgcttgagcgagtaatgcgctatctgaaagactccaaaatctggcgtgcgcttgagcgagtaatgcgctatctgaaaggtactgtggaattggggcttcactatactgggtatcctgcggtactggagggttatagtgattctaactggatctctgatgtggatgagatcaaagccactagtggatatgttttcacactgggtggtggtgctgtttcatggaggtcttgcaaacagacaattttgacgaggtcaaccatggaagcagagctaacggcactggatactgctactgttgaggcagaatggctgcgtgatcactggcgtgcgcttgagcgagtaatgcgctatctgaaaggtactgtggaattggggcttcactatactgggtatcttgcggtactggagggttatagtgattctaactggatctctgatgtggatgagatcaaagccactagtggatatattttcacactgggtggtggtgctgtttcatggaggtcttgcaaacagacaattttgacgaggtcaaccatggaagcagagctaacgacactggatactgctactgttgaggcagaatggctgcgtgatctattaatggatctgcctgttgttgaaaaaccggtgccggctatccttatgaactgtgacaatcaaacgacatgtgaaaagacgattgaagtctgtcaggaaattaagaaactccggagttataacgttggattacatccaaacagcgagaaacatggcagatcccttcacgaagggactatcacgaaatgtgatagacaatgcatcgaaggagatgggtttgagacccatagcattcttgaaggaactcacctttgtgagcttgactgttggtcgcagtctatgaagattttgggtgaatcttctaggaagcttactaaagacctaggagtatga

SEQ ID NO: 14952 - DNA, 4326 bp, Oryza sativa
  Clone ID: TFbOSC101706j.C1.o9.fg
atggctagaggtggagcagcgtgtcgcaccaccaatccatctcgtcggcttcggcggcggcaacagccgacggggacgaggccgacaggttcagatcgagcagcagcggcgagcagcgtggagcggtcggcggcgcccgaggcgccgtcctcgcagagcacggaggatgaggagccgacggggagagcgaggaggccgccgtcgtcatccatggaagctggtggagaggcgacggaggccggcggcgtggggggcggccctcttgctcccacatcgtcgccgccgccgccacatcgcccgtcgagatctaatgatgcgttcatgctagttttcatctgtaatgtcatgatttatttatggaatagattaaatcattatatgtctataatctcaacaatccaacaaccttattataggcactgtgattttactatggctggttttgccgatgcactgaggccggataaattcaccggtgtgcattttaagagatggcagatcagggtcactctgtggctgacagctatgaaatgcttctgggtgagtactggcaaacctgaaggagttcttactgctgaacagcagaagcaattcgaggaagccactactctctttgtgggatgcattcttagcgttcttggcgatcgtctggtcgaggtgtatatgcatatgaccgacgctaaggagttgtgggatgcactgaatactaaattcagtgctactgatgctagcaatgatctgtatatcatggagcagtttcatgactacaaaatagctgacaaccgttctgtagtcgaacaggctcatgagatacaaaccatggctaaggaactcgaactccttaagtgtgtcttacccgacaaatttgtggccgggtgcattattgcaaaactacctccatcttggaggagtttcggtactgcactcaaacacaagagacaggaatactccgttgaggggttgattgcgtctcttgatgttgaggagaaagctcgggaaaaagatgtcgcgtctaagggcgatggtgggcagtccagtgccaatgttgtgcacaaggcccagaacaagagcaaggggaaatacaaagctcagcagaccaccaacttcaagaagcagaagaagaacaacaacaatcctaatcaggatgagaggacttgctttgtgtgtggccaagttggtcatctggctaggaagtgtccacagcgcaaggggatgaaggcacctgcagggcagacttctaagtctgctaatgtgaccattggcaacactggagatggaagcgggtatggtaatttacctactgttttttcagttaatcaatctactaattggtgggttgatactggggccaatgtacatgtttgtgctgacatctcattgttttcttcttatcaggtcgcacggggttccaccgtcctaatggagaatgggtcacatgcttatgttcatggtgttggcacggtagatctgaagtttacttcgggaaagatcgtgcagctgaagaacgtgcagcatgtcccttctatcgacaggaatcttgttagtggctcccgtctgactagagacggatttaagttggtttttgagtctaataaagtagtcgtgtctaaacatggatattttattggtaaaggttatgagtgcggaggcctgttccgcttttccctttctgatttctgcaataagtctgtgtaccatatttgtggcagtgtggatgatgaggctaatgtttggcattcacgtttatgtcatattaattttggcttgatgtctcggctttccagcatgtgtttaattcctaagttttccattgtcaaaggttctaagtgccatagttgtgtgcaatcgaagcaacctcgcaagcctcacaaggctgccgaggagagaaacttggcaccactagaactcctacattcagatctttgtgaaatgaatggggtgttgacgaagggtggaaaacgatatttcatgacattgattgatgatgctactagattttgctatgtgtacttgttgaaaacgaaagacgaggctctagactattttaaaatttataaggcagaagttgaaaatcaacttgacagaaagataaaaaggcttaggtctgatcgtggtggagagtttttctcgaacgagtttgacttattctgtgaggaacatggcatcatacatgagaggacgcctccctattctcccgagtctaatgggattgctgaaaggaagaaccgcacactgactgacttggtgaatgccatgttggacactgcgggactgcctaaggcatggtggggggaggcattgttgacctcaaatcatgtgttaaacagagttcctaacagaaataaggacaaaacaccatatgagatatggattggtagaaaaccatcactttcttatttgcgcacatgggggtgcttggcgaaagtcaatgtaccaataacgaagaagcgcaaacttggacctaagactgtggactgtgtttttctgggatatgctcatcatagcattgcctatagatttttaatagttaaatccgaggtaccggacatgcatgttggtacaattatggagtctcgtgatgctaccttctttgagagctttttcccaataaaggatacacatagtggttcgaaccaaccctctgaaataattcccagttcaatcacaccaccagaacaaactgaacatacacatgaacttgtctctgaggaggatgtcagtgaagctcctcgaaggagtaagagacaaaggacggctaagtcttttggtgatgatttcactgtgtacctcgtggatgacactcctaagtcaatttcagaagcatatgcatctcctgatgcagactactggaaggaggctgtccgtagtgaaatggattccattatcgctaacgggacttgggaggtgacagagcgaccctatgggtgtaaacctgtggggtgcaagtgggtgttcaagaagaagcttaggcctgacggtattattgaaaagtacaaggctcggcttgttgctaagggctatactcagaaagaaggcgaagatttctttgacacttactcacctgttgctagattgaccacaattcgtgtgctactttccctagcagcctcacatggtcttctcgttcatcaaatggacgttaagacaacttttcttaatggagagctggatgaggagatctatatggatcaacctgatgggtttgtagttgaaggtcaagaaggcaaagtgtgcaaattgttgaagtctttgtatggtctgaaacaagctcctaagcaatggcatgagaaatttgacaaaacattgacatctgcaggctttgcagtcaatgagacagataaatgtgtgtactatcgccatggtgggggtgagggagttattttgtgcttgtatgttgacgacatactgatatttgggacaaaccttgaggtgataaatgaggttaaatcattcttgtctcaaaattttgatatgaaagatttgggagtagctgatgttatcttaaacattaagctaattagaggtgagaatgggattacactcttgcggtcccattatgtggagaagatcttgaatcgctttggctacattgatagtaagccttctccaacaccttatgatcctagcttgttgcttcgcaagaacaagagaattgctaggaatcaactggaatactcccaaatcattggctcgttgatgtacctggctagtgcaactaggcctgatatctcctttgctgtgagcaagttgagccgatttacctctaatccgggagatgatcactggcgtgcgcttgagcgagtaatgcgctatctgaaaggtactgtggaattggggcttcactatactgggtatcctgcggtactggagggttatagtgattctaactggatctctgatgtggatgagatcaaagccactagtggatatgttttcacactgggtggtggtgctgtttcatggaggtcttgcaaacagaccattttgacgaggtcaaccatggaagcagagctaacggcactggatactgctactgttgaggcagaatggctgcgtgatctattaatggatctgcctgttgttgaaaaaccggtgccggctatccttatgaactgtgacaatcaaacgacatgtgaaaagacgattgaagtctgtcaggaaattaagaaactccggagttataacgttggattacatccaaacagcgagaaacctggcagatcccttcacgaagggactatcacgaaatgtgataaacaatgcatcgaaggagatgggtttgagacccatgtgaattatactatggtggtaacccagtctatgtga

SEQ ID NO: 14953 - DNA, 3651 bp, Oryza sativa
  Clone ID: TFbOSC101997j.C1.o18.fg
atggctggttttgtcgatgcactgaggccggataaattcaccggtgtgcattttaagagatggcagatcagggtcactctgtggctgacagctatgaaatgcttctgggtgagtactggcaaacctgaaggagttcttactgctgaacagcagaagcaattcgaggaagccactactctctttgtgggatgcattcttagcgttcttggcgatcgtctggtcgaggtgtatatgcatatgaccgacgctaaggagttgtgggatgcactgaatactaaattcggtgctactgatgctagcaatgatctgtatatcatggagcagtttcatgactacaaaatggctgacaaccgttctgtagtcgaacaggctcatgagatacaaaccatggctaaggaactcgaactccttaagtgtgtcttacccgacaactttgtggccgggtgcattattgcaaaactacctccatcttggaggagtttcggtactgcactcaaacacaagagacaggaatactccgttgaggggttgattgcgtctcttaatgttgaggagaaagctcgggaaaaagatgccgcgtctaagggcgatggtgggcagtccagtgccaatgttgtgcacaaggcccagaacaagagcaaggggaaatacaaagctcagcagaccaccaacttcaagaagcagaagaagaacaacaacaatcctaatcaggatgagaggacttgctttgtgtgtggccaagttggtcatctggctaggaagtgtccacagcgcaaggggatgaaggcacctgcagggcagacttctaagtctgctaatgtgaccattggcaacactggagatggaagcgggtatggtaatttacctactgttttttcagttaatcaatctactaattggtgggttgatactagggccaatgtacatgtttgtgctgacatctcattgttttcttcttatcaggtcgcacggggttccaccgtcctaatggggaatgggtcacatgcttctgttcatggtgttggcacggtagatctgaagtttacttcgggaaagatcgtgcagctgaagaacgtgcagcatgtcccttctatcgacaggaatcttgttagtggctcccgtctgactagagacggatttaagttggtttttgagtctaataaagtagtcgtgtctaaacatggatattttattggtaaaggttatgagtgcggaggcctgttccgcttttccctttctgatttctgcaataagtctgtgaaccatatttgtggcagtgtggatgatgaggctaatgtttggcattcacgtttatgtcatattaattttggcttgatgtctcggctttccagcatgtgtttaattcctaagttttccattgtcaaaggttctaagtgccatagttgtgtgcaatcaaagcaacctcgcaagcctcacaaggctgccgaggagagaaacttggcaccactagaactcctacattcagatctttgtgaaatgaatggggtgttgacgaagggtggaaaacgatatttcatgacattcattgatgatgctactagattttgctatgtgtacttgttgaaaacgaaagacgaggctctagactattttaaaatttataaggcagaagttgaaaatcaacttgacagaaagataaaaaggcttaggtctgatcatggtggagagtttttctcgaacgagtttgacttattctgtgaggaacatggcatcatacatgagatgacgcctccctattctcccgagtctaatgggattgctgaaaggaagaatcgcacactgactgacttggtgaatgccatgttggacaccgcgggactgcctaaggcatggtggggggaggcattgttgacctcaaatcatgtgttaaacagagttcctaacagaaataaggacaaaacaccatatgagatatggattggtagaaaaccatcactttcttatttgcgcacatgggggtgcttggcgaaagtcaatgtaccaataacgaagaagcgcaaacttggacctaagactgtggactgtgtttttctgggatatgctcatcatagcattgcctatagatttttagtagttaaatccgaggtatcggacatgcatgttggtacaattatggagtctcgtgatgctatcttctttgagagctttttcccaatgaaggatacacatagtggttcgaaccaaccatctgaaataattcccagttcaatcacaccaccagaacaaactgaacatacacatgaacttgtctctgaggaggatgtcagtgaagctcctcgaaggagtaagagacaaaggacggctaagtcttttggtgatgatttcactgtgtacctcgtggatgacactcctaagtcaatttcagaagcatatgcatctcctgatgcagactactggaaggaggctgtccgtagtgaaatggattccattatcgctaacgggacttgggaggtgacagagcgaccctatgggtgtaaacctgtggggtgcaagtgggtgttcaagaagaagcttaggcctgacgcctcacatggtcttctcgttcatcaaatggacgttaagacagcttttcttaatggagagctggatgaggagatctatatggatcaacctgatgggtttgtagttgaaggtcaagaaggcaaagtgataaatgaggttaaatcattcttgtctcaaaattttgatatgaaagatttgggagtagctgatgttatcttaaacattaagctaattagaggtgagaatgggattacgctcttgcagtcccattatgtggagaagatcttgaatcgctttggctacattgatagtaagccttctccaacaccttatgatcctagcttgttgcttcgcaagaacaagagaattgctaggaatcaactggaatactcccaaatcattggctcgttgatgtacctggctagtgcaactaggcctgatatctcctttgctgtgagcaagttgagccgatttacctctaatccgggagatgatcactggcgtgcgcttgagcgagtaatgcgctatctgaaaggtactgtggaattggggcttcactatactgggtatcctgtggtactggagggttatagtgattctaactggatctctgatgtggatgagatcaaagccactagtggatatgttttcacactgggtggtggtgctgtttcatggaggtcttgcaaacagaccattttgacgaggtcaaccatggaagcagagctaacggcactggatactgctactgttgaggcagaatggctgcgtgatctattaatggatctgcctgttgttgaaaaaccggtgccggctatccttatgaactgtgacaatcaaacgacatgtgaaaagacgattgaagtctgtcaggaaattaagaaactccggagttataacgttggattacatccaaacagcgagaaacctggcagatcccttcacgaagggactatcacgaaatgtgatagacaatgcatcgaaggagatgggtttgagacccatatgagttatactatggtgagcattcttgaaagaactcacctttgtgagcttgactgttggtcgcagtctatgaagattttgggtgaatcttctaggaagcttactaaagacctaggagtatga

SEQ ID NO: 14954 - DNA, 3744 bp, Oryza sativa
  Clone ID: TFbOSC102144j.C1.o1.fg
atggctggttttgccgatgcactgaggccggataaattcaccggtgtgcattttaagagatggcagatcagggtcactctgtggctgacagctatgaaatgcttctgggtgagtactggcaaacctgaaggagttcttactgctgaacagcagaagcaattcgaggaagccactactctctttgtgggatgcattcttagcattcttggcgatcgtctggtcgaggtgtatatgcatatgaccgacgctaaggagttgtgggatgcactgaatactaaattcggtgctactgatgctagcaatgatctgtatatcatggagcagtttcatgactacaaaatggctgacaaccgttctgtagttgaacaggctcatgagatacaaaccatggctaaggaactcgaactccttaagtgtgtcttacccgacaaatttgtggccgggtgcattattgcaaaactacctccatcttggaggagtttcggtactgcactcaaacacaagagacaggaatactccgttgaggggttgattgcgtctcttgatgttgaggagaaagctcgggaaaaagatgccgcgtctaagggcgatggtgggcagtccagtgccaatgttgtgcacaaggcccagaacaagagcaaggggaaatacaaagctcagcagaccaccaacttcaagaagcagaagaagaacaacaacaatcctaatcaggatgagaggacttgctttgtgtgtggccaagttggtcatctggctaggaagtgtccacagcgcaaggggatgaaggcacctgcagggcagacttctaagtctgctaatgtgaccattggcaacactggagatggaagcgggtatggtaatttacctactgttttttcagttaatcaatctactaattggtgggttgatactggggccaatgtacatgtttgtgctgacatctcattgttttcttcttatcaggtcgcacggggttccaccgtcctaatggggaatgggtcacatgcttctgttcatggtgttggcacggtagatctgaagtttacttcgggaaagatcgtgcagctgaagaacgtgcagcatgtcccttctatcgacaggaatcttgttagtggctcccgtctgactagagacggatttaagttggtttttgagtctaataaagtagtcgtgtctaaacatggatattttattggtaaaggttatgagtgcggaggcctgttccgcttttccctttctgatttctgcaataagtctgtgaaccatatttgtggcagtgtggatgatgaggctaatgtttggcattcacgtttatgtcatattaattttggcttgatgtctctgctttccagcatgtgtttaattcctaagttttccattgtcaaaggttctaagtgccatagttgtgtgcaatcgaagcaacctcgcaagcctcacaaggctgccgaggagagaaacttggcaccactagaactcctacattcagatctttgtgaaatgaatggggtgttgacgaagggtggaaaacgatatttcatgacattgattgatgatgctactagattttgctatgtgtacttgttgaaaacgaaagacgaggctctagactattttaaaatttataaggcagaagttgaaaatcaacttgacagaaagataaaaaggcttaggtctgatcgtggtggagagtttttctcgaacgagtttgacttattctgtgaggaacatggcatcatacatgagaggacgcctccctattctcccgagtctaatgggattgctgaaaggaagaaccgcacactgactgacttggtgaatgccatgttggacaccgcgggactgcctaaggcatgcattgcctatagatttttaatagttaaatccgaggtaccggacatgcatgttggtacaattatggagtctcgtgatgctaccttctttgagagctttttcccaatgaaggatacacatagtggtttgaaccaaccctctgaaataattcccagttcaatcacaccaccagaacaaactgaacatacacatgaacttgtctctgaggaggatgtcagtgaagctcctcgaaggagtaagagacaaaggacggctaagtcttttggtgatgatttcactgtgtacctcgtggatgacactcctaagtcaatttcagaagcatatgcatctcctgatgcagactactggaaggaggctgtccgtagtgaaatggattccattatcgctaacgggacttgggaggtgacagagcgaccctatgggtgtaaacctgtggggtgcaagtgggtgttcaagaagaagcttaggcctgacggtactattgaaaagtacaaggctcggcttgttgctaagggctatactcagaaagaaggcgaagatttctttgacacttactcacctgttgctagattgaccacaattcgtgtgctactttccctagcagcctcacatggtcttctcattcatcaaatggacgttaagacagcttttcttaatggagagctggatgaggagatctatatggatcaacctgatgggtttgtacttgaaggtcaagaaggcaaagtgtgcaaattgttgaagtctttgtatggtctgaaacaagctcctaagcaatggcatgagaaatttgacaaaacattgacatctgcaggctttgcagtcaatgaggcagataaatgtgtgtactatcgccatggtgggggtgagggagttattttgtgcttgtatgttgacgacatactgatatttgggacaaaccttgaggtgataaatgaggttaaatcattcttgtttcaaaattttgatatgaaagatttgggagtagctgatgttatcttaaacattaagctaattagaggtgagaatgggattacactcttgcagtcccattatgtggagaagatcttgaatcgctttggctacattgatagtaagccttctccaacaccttatgatcctagcttgttgcttcgcaagaacaagagaattgctaggaatcaactggaatactcccaaatcattggctcgttgatgtacctggctagtgcaactaggcctgatatctcctttgctgtgagcaagttgagccgatttacctctaatccgggagatgatcactggcgtgcgcttgagcgagtaatgcgctatctgaaaggtactgtagaattggggcttcactatactaggtatcctgcggtactggagggttatagtgattctaactggatctctgatgtggatgagatcaaagccactagtggatatgttttcacactgggtggtggtgctgtttcatggaggtcttgcaaacagacaattttgacgaggtcaaccatggaagcagagctaacggcactggatactgctactgttgaggcagaatggttgcgtgatctattaatggatctgcctgttgttgaaaaaccggtgccggctatccttatgaactgtgacaatcaaacgacatgtgaaaagacgattgaagtctgtcaggaaattaagaaactccggagttataacgttggattacatccaaacagcgagaaacctggcagatcccttcacgaagggactatcacgaaatgtgatacacaatgcatcgaaggagatgggtttgagacccatagcattcttgaaggaactcacctttgtgagcttgactgttggtcgcagtccatgaagattttgggtgaatcttctaggaagcttactaaagacctaggagtatga

SEQ ID NO: 14955 - DNA, 1234 bp, Oryza sativa
  Clone ID: TFbOSC10364j.C1.o1.gm
gagcgcgggtgagcgggagagagggggaagtgggcgcgggtgcgagggcgacgtggacggcgtggcccgggaggcgcggacgcgaggcgcggcggcggttgcgggcgcggcggcgagcggctggagcgtgcaccggcgatcgggagagcaggtctccggaacctctgccttcgacgtcctgcaccaggagaaggcggcaataaggcactgtgattttactatggctggttttgccgatgcactgaggccggataaattcaccggtgtgcattttaagagatggcagattagggtcactctgtggctgacagctatgaaatgcttctgggtgagtactggcaaacctgaaggagttcttactgctgaacagcagaagcaattcgaggaagccactactctctttgtgggatgcattcttagcgttcttggcgatcgtctggtcgaggtgtatatgcatatgaccgatgctaaggagttgtgggatgcactgaatactaaattcggtgctactgatgctagcaatgatctgtatattatggagcagtttcatgactacaagatggctgacaaccgttctgtagtcgaacaggctcatgagatacaaaccatggctaaggaactcgaactccttaagtgtgtcttacccgacaaatttatggccgggtgcattattgcaaaactacctccatcttggaggagtttcggtactgcactcaaacacaagagacaggaatactccgttgaggggttgattgcgtctcttgatgttgaggagaaagctcgggaaaaagatgccgcgtctaagggcgatggtggacagtccagtgccaatgttgtgcacaaggcccagaacaagagcaaggggaaatacaaagctcagcagaccaccaacttcaagaagcagaagaagaacaacaacaatcctaatcaggatgagaggacttgctttgtgtgtggccaagttggtcatctggctaggaagtgtccacagcgcaaggggatgaaggcacctgcagggcagacttctaagtctgctaatgtgaccattggcaacactggagatggaagcgggtatggtaatttacctactgtcgcacggggttccaccgtcctaatggggaatgggtcacatgcttctgttcatgttgttggcacggtagatctgaagtttacttcgggaaagatcgtgcagctgaagaatgtgcagcatgtcccttctatcgacaggaatctt

SEQ ID NO: 14956 - DNA, 973 bp, Oryza sativa
  Clone ID: TFbOSC12941j.C1.o2.hg
atgcatatgaccgacgctaaggagttgtgggatgcactgaatactaaattcggtgctactgatgctagcaatgatctgtatatcatggagcagtttcatgactacaaaatggctgacaaccgttctgtagtcgaacaggctcatgagatacaaaccatggctaaggaactcgaactccttaagtgtgtcttacccgacaaatttgtggccgggtgcattattgcaaaactacctccatcttggaggagtttcggtactgcactcaaacacaagagacaggaatactccgttgaggggttgattgcgtctcttgatgttgaggagaaagcttgggaaaaagatgccgcgtctaagggcgatggtgggcagtccagtgccaatgttgtgcacaaggcccagaacaagagcaaggggaaatacaaagctcagcagaccaccaacttcaagaagcagaagaagaacaacaacaatcctaatcaggatgagaggacttgctttgtgtgtggccaagttggtcatctggctaggaagtgtccacagcgcaaggggatgaaggcacctgcagggcagacttctaagtctgctaatgtcgcacggggttccaccgttctaatggggaatgggtcacatgcttctgttcatggtgttggcacggtagatctgaagtttacttcgggaaagatcgtgcagctgaagaacgtgcagcatgtcccttctatcgacaggaatcttgttagtggctcccgtctgactagagacggatttaatttaatcacaccaccagaacaaactgaacatacacatgaacttgtctctgaggaggatgtcagtgaagctcctcgaaggagtaagagacaaaggacggctaagtcttttggtgatgatttcactgtgtacctcgtggatgacactcctaagtcaatttcagaagcatatgcatctcctgatgcagactactggaaggaggctgtcc

SEQ ID NO: 14957 - DNA, 2037 bp, Oryza sativa
  Clone ID: TFbOSC14597j.C1.o3.fg
atggctggttttgccgatgcactgaggccggataaattcaccggtgtgcattttaagagatggcagatcagggtcactctgtggctgacagctatgaaatgcttctgggtgagtactggcaaacctgaaggagttcttactgctgaacagcagaagcaattcgaggaagccactactctctttgtgggatgcattcttagcgttcttggcgatcgtctggtcgaggtgtatatgcatatgaccgacgctaaggagttgtgggatgcactgaatactaaattcggtgctactgatgctagcaatgatctgtatatcatggagcagtttcatgactacaaaatggctgacaaccgttctgtagtcgaacaggctcatgagatacaaaccatggctaaggaactcgaactccttaagtgtgtcttacccgacaaatttgtggccgggtgcattattgcaaaactacctccatcttggaggagtttcggtactgcactcaaacacaagagacaggaatactccgttgaggggttgattgcgtctcttgatgttgaggagaaagctcgggaaaaagatgccgcgtctaagggcgatggtgggcagtctagtgccaatattgtgcacaaggcccagaacaagagcaaggggaaatacaaagctcagcagaccaccaacttcaagaagcagaagaagaacaacaacaatcctaatcaggatgagaggacttgctttgtgtgtggccaagttggtcatctggctaggaagtgtccacagcgcaaggggatgaaggcacctgcagggcagacttctaagtctgctaatgtgaccattggcaacactggagatggaagcgggtatggtaatttacctactgttttttcagttaatcaatctactaattggtgggttgatactggggccaatgtacatgtttgtgctgacatctcattgttttcttcttatcaggtcgcacggggttccaccgtcctaatggggaatgggtcacatgcttctgttcatggtgttggcacggtagatctgaagtttacttcgggaaagatcgtgcagctgaagaacgtgcagcatgtcccttctatcaacaggaatcttgttagtggctcccgtctgactagagacggatttaagttggtttttgagtctaataaagtagtcgtgtctaaacatggatattttattggtaaaggttatgagtgcggaggcctgttccgcttttccctttctgatttctgcaataagtctgtgaaccatatttgtggcagtgtggatgatgaggctaatgtttggcattcacgtttatgtcatattaattttggcttgatgtctcggctttccagcatgtgtttaattcctaagttttccattgtcaaaggttctaagtgccatagttgtgtgcaatcgaagcaacctcgcaagcctcacaaggctgccgaggagagaaacttggcaccactagaactcctacattcagatctttgtgaaatgaatggggtgttgacgaagggtggaaaacgatatttcatgacattgattgatgatgctactagattttgctatgtgtacttgttgaaaacgaaagacgaggctctagactattttaaaatttataaggcagaagttgaaaatcaacttgacagaaagataaaaaggcttaggtctgatcgtggtggagagtttttctcgaacgagtttgacttattctgtgaggaacatggcatcatacatgagaggacgcctccctattctcccgagtctaatgggattgctgaaaggaagaaccgcacactgactgacttggtgaatgccatgttggacaccgcgggactgcctaaggcatggtggggggaggcattgttgacctcaaatcatgtgttaaacagagttcctaacagaaataaggacaaaacaccatatgagatatggattggtagaaaaccatcactttcttatttgcgcacatgggggtgcttggcgaaagtcaatgtaccaataacgaagaagcgcaaacttggacctatgtaa

SEQ ID NO: 14958 - DNA, 3846 bp, Oryza sativa
  Clone ID: TFbOSC15392j.C1.o2.fg
atggctggttttgccggtgcactgaggccggataaattcaccggtgtgcattttaagagatggcagatcagggtcactctgtggctgacagctatgaaatgcttctgggtgagtacgggcaaacctgaaggagttcttactgctgaacagcagaagcaattcgaggaagccactactctctttgtgggatgcattcttagcgttcttggcgatcgtctggtcgaggtgtatatgcatatgaccgacgctaaggagttgtgggatgcactgaatactaaattcggtgctactgatgctagcaatgatctgtatatcatggagcagtttcatgactacaaaatggctgacaaccgttctgtagtcgaacaggctcatgagatacaaaccatggctaaggaactcgaactccttaagtgtgtcttacccgacaaatttgtggccgggtgcattattgcaaaactacctccatcttggaggagtttcggtactgcactcaaacacaagagacaggaatactccgttgaggggttgattgcgtctcttgatgttgaggagaaagctcgggaaaaagatgccgcgtctaagggcgatggtgggcagtccagtgccaatgttgtgcacaaggcccagaacaagagcaaggggaaatacaaagctcagcagaccaccaacttcaagaagcagaagaagaacaacaacaatcctaatcaggatgagaggacttgctttgtgtgtggccaagttggtcatctggctaggaagtgtccacagcgcaaggggatgaaggcacctgcagggcagacttctaagtctgctaatgtgaccattggcaacactggagatggaagcgggtatggtaatttacctactgttttttcagttaatcaatctactaattggtgggttgatactggggccaatgtacatgtttgtgctgacatctcattgttttcttcttatcaggtcgcacggggttccaccgtcctaatggggaatgggtcacatgcttctgttcatggtgttggcacggtagatctaaagtttacttcgggaaagatcgtgcagctgaagaacgtgcagcatgtcccttctatcgacaagaatcttgttagtggctcccgtctgactagagacggatttaagttggtttttgagtctaataaagtagtcgtgtctaaacatggatattttattggtaaaggttatgagtgcggaggcctgttccgcttttccttttctgatttctgcaataagtctgtgaaccatatttgtggcagtgtggatgatgaggctaatgtttggcattcacgtttatgtcatattaattttggcttgatgtctcggctttccagcatgtgtttaattcctaagttttccattgtcaaaggttctaagtgccatagttgtgtgcaatcgaagcaacctcgcaagcctcacaaggctgccgaggagagaaacttggcaccactagaactcctacattcagatctttgtgaaatgaatggggtgttgacgaagggtggaaaacgatatttcatgacattgattgatgatgctactagattttgctatgtgtacttgttgaaaacgaaagacgaggctctagactattttaaaatttataaggcagaagttgaaaatcaacttgacagaaagataaaaaggcttaggtctgatcgtggtggagagtttttctcgaacgagtttgacttattctgtgaggaacatggcatcatacatgagaggacgcctccctattctcccgagtctaatgggattgctgaaaggaagaaccgcacactgactgacttggtgaatgccatgttggacaccgcgggactgcctaaggcatggtggggggaggcattgttgacctcaaatcatgtgttaaacagagttcctaacagaaataaggacaaaacaccatatgagatatggattggtagaaaaccatcactttcttatttgcgcacatgggggtgcttggcgaaagtcaatgtaccaataacgaagaagcgcaaacttggacctaagactgtagactgtgtttttctgggatatgctcatcatagcattgcctatagatttttaatagttaaatccgaggtaccggacatgcatgttggtacaattatggagtctcgtgatgctaccttctttgagagctttttcccaatgaaggatacacatagtggttcgaaccaaccctctgaaataattcccagttcaatcacaccaccagaacaaactgaacatacacatgaacttgtctctgaggaggatgtcagtgaagctcctcgaaggagtaagagacaaaggacggctaagtcttttggtgatgatttcactgtgtacctcgtggatgacactcctaagtcaatttcagaagcatatgcatctcctgatgcagactactggaaggaggctgtccgtagtgaaatggattccattatcgctaacgggacttgggaggtgacagagcaaccctatgggtgtaaacctgtggggtgcaagtgggtgttcaagaagaagcttaggcctgacggtactattgaaaagtacaaggctcggcttgttgctaagggctatactcagaaagaaggcgaagatttctttgacacttactcacctgttgctagattgaccacaattcgtgtgctactttccctagcagcctcacatggtcttctcgttcatcaaatggacgttaagacagcttttcttaatggagagctggatgaggagatctatatggatcaacctgatggctttgcagtcaatgaggcagataaatgtatgtactatcgccatggtgggggtgagggagttattttgtgcttgtatgttgacgacatactgatatttgggacaaaccttgaggtgataaatgaggttaaatcattcttgtctcaaaattttgatatgaaagatttgggagtagctgatgttatcttaaacattaagctaattagaggtgagaatgggattacactcttgcagtcccattatgtggagaagatcttgaatcgctttggctacattgatagtaagccttctccaacaccttatgatcctagcttgttgcttcgcaagaacaagagaattgctaggaatcaactggaatactcccaaatcattggctcgttgatgtacctggctagtgcaactaggcctgatatctcctttgctgtgagcaagttgagccgatttacttctaatccgggagatgatcactggcgtgcgcttgagcgagtaatgcgctatctgaaaggtactgtggaattggggcttcactatactgggtatcctgtggtactggagggttatagtgattctaactggatctctgatgtggatgagatcaaagccactagtggatatgttttcacactggttggtggtgctgtttcatggaggtcttgcaaacagacaattttgacgaggtcaaccatggaagcagagctaacggcactggatactgctactgttgaggcagaatggctgcgtgatctattaatggatctgcctgttgttgaaaaaccggtgccggctatccttatgaactgtgacaatcaaacgacatgtgaaaagacgattgaagtctatcaggaaattaagaaactccggagttataacgttggattacatccaaacagcgagaaacctggcagatcccttcacgaagggactatcacgaaatgtgatagacaatgcatcgaaggagatgggtttgagacccatagcattcttgaaggaactcacctttgtgagcttgactgttggtcacagtctatgaagattttgggtgaatcttctaggaagcttactaaagacctaggagtatga

SEQ ID NO: 14959 - DNA, 3777 bp, Oryza sativa
  Clone ID: TFbOSC16532j.C1.o1.fg
atggctggttttgccgatgcactgaggccggataaattcaccggtgtgcattttaagagatggcagatcagggtcactctgtggctgacagctatgaaatgcttctgggtgagtactggcaaacctgaaggagttcttactgctgaacagcagaagcaatttgaggaagccactactctctttgtgggatgcattcttagcattcttggtgatcgtctggtcgaggtgtatatgcatatgaccgacgctaaggagttgtgggatgcactgaatactaaattcggtgctactgatgctagcaatgatctgtatatcatggagcagtttcatgactacaaaatggctgacaaccgttttgtagtcgaacaggctcatgagatacaaaccatggctaaggaactcgaactccttaagtgtgtcttacccgacaaatttgtggccgggtgcattattgcaaaactacctccatcttggagaagtttcggtactgcactcaaacacaagagacaggaatactccgttgaggggttgatagcgtctcttgatgttgaggagaaagctcgggaaaaagatgccgcgtctaagggcgatggtgggcagtccagtgccaatgttgtgcacaaggcccagaacaagagcaaggggaaatacaaagctcagcagaccaccaacttcaagaagcagaagaagaacaacaacaatcctaatcaggatgagaggacttgctttgtgtgtggccaagttggtcatctggctaggaagtgtccacagcgcaaggggatgaaggcacctgcagggcagacttctaagtctgctaatgtgaccattggcaacactggagatggaagcgggtatggtaatttacctactgttttttcagttaatcaatctactaattggtgggttgatactggggccaatgtacatttttgtgctgacatctcattgttttcttcttatcaggtcgcacggggttccaccgttctaatggggaatgggtcacatgcttctgttcatggtgttggcacggtagatctgaagtttacttcgggaaagatcgtgcagctgaagaacgtgcaacatgtcccttctatcgacaggaatcttgttagtggctcccgtctgactagaaacggatttaagttggtttttgagtctaataaagtagtcgtgtctaaacatggatattttattggtaaaggttatgagtgcggaggcctgtttcgcttttccctttctgatttctgcaataagtctgtgaaccatatttgtggcagtgtggatgatgaggctaatgtttggcattcacgtttatgtcatattaattttggcttgatgtctcggctttccagcatgtgtttaattcctaagttttccattgtcaaaggttctaagtgccatagttgtgtgcaatcgaagcaacctcgcaagcctcacaaggctgccgaggagagaaacttggcaccactagaactcctacattcagatctttgtgaaatgaatggggtgttgacgaagggtggaaaacgatatttcatgacattgattgatgatgctactagattttgctatgtgtacttgttgaaaacgaaagacgaggctctagactattttaaaatttataaggcagaagttgaaaatcaacttgacagaaagataaaaaggcttaggtctgatcgtggtggagagtttttctcgaacgagtttgacttattctgtgaggaacatggcatcatacatgagaggacgcctccctattctcccgagtctaataggattgctgaaaggaagaaccgcacactgactgacttggtgaatgccatgttggacaccgcgggactgcctaaggcatggtggggggaggcattgttgacctcaaatcatgtgttaaacagagttcctaacagaaataaggacaaaacaccatatgagatatggattggtagaaaaccatcactttcttatttgcgcacatgggggtgcttggcgaaagtcaatgtaccaataacgaagaagcgcaaacttggacctaagactgtggactgtgtttttctgggatatgcttatcatagcattgcctatagatttttattagttaaatctgaggtaccggacatgcatgttggtacaattatggagtctcgtgatgctaccttctttgagagctttttcccaatgaaggatacacatagtggttcgaaccaaccctctgaaataattcccagttcaatcacaccaccagaacaaactgaacatacacatgaacttgtctctgaggaggatgtcagtgaagctcctcgaaggagtaagagacaaaggacggctaagtcttttggtgatgatttcactgtgtacctcgtggatgacactcctaagtcaatttcagaagcatatgcatctcctgatgcagactactggaaggaggctgtccgtagtgaaatggattccattatcgctaacgggacttgggaggtgatagagcgaccctatgggtgtaaacctgtggggtacaagtgggtgttcaagaagaagcttaggcctgacggtactattgaaaagtacaaggctcggcttgttgctaagggctatactcagaaagaaggcgaagatttctttgacacttactcacctgttgctagattgaccacaattcgtgtgctactttccctagcacctcacatggtcttctcgttcatcaaatggacgttaagacagcttttcttaatggagagctggatgaggagatctatatggatcaacctgatgggctttgcagtcaatgaggcagataaatgtgtgtactatcgccatggtgggggtgagggagttattttgtgcttgtatgttgacgacatactgatatttgggacaaaccttgaggtgataaatgaggttaaatcattcttgtctcaaaattttgatatgaaagatttgggagtagctgatattatcttaaacattaagctaattagaggtgagaatgggattacactcttgcagtcccattatgtggagaagatcttaaatcgctttggctacattgatagtaagccttctccaacaccttatgatcctagcttgttgcttcgcaagaacaagagaattgctaggaatcaactggaatactcccaaatcattggatcgttgatgtacctggctagtgcaactaggcctgatatctcctttgctgtgagcaagttgagccgatttacctctaatccaggagatgatcactggcgtgcgcttgagcgagtaatgcgctatctgaaaggtactgtggaattggggcttcactatactgggtatcctgcggtactggagggttatagtgattctaactggatctctgatgtggatgagatcaaagccactagtggatatgttttcacactgggtggtggtgctgtttcatggaggtcttgcaaacagaccattttgacgaggtcaaccatggaagcagagctaacggcactggatactgctactgttgaggcagaatggctgcgtgatctattaatggatctgcctgttgttgaaaaaccggtgccggctatccttatgaactgtgacaatcaaacgacatgtgaaaagacgattgaagtctgtcaggaaattaagaaactccggagttataacgttggattacatccaaacagcgagaaacctggcagatcccttcacgaagggactatcacgaaatgtgatagacaatgcatcgaaggagatgggcttgagacccatgtgagttatactatggtggtaacccagtctatgtga

SEQ ID NO: 14960 - DNA, 307 bp, Oryza sativa
  Clone ID: TFbOSC21378j.C1.o19.np
tcattagatctacacatgtaaactacacagtataacatgaacagatcaaatatgcgcaatatattgaacacgtaccgaggtgacgaaaagaccggctgcttggtcgaaacttttcgcaggtgtctacgaaggcacgaaacacgcgagcgaagaggaaggcgagccgtcgcgaacgaacagggagcagtcgcgcgaagcgcttcccaaaaaccttattgccgccttctcccggtgcaggacgtcaaagacagaggttctggagacctgctctcccgatcgctggtgcacgccggcgagcgggatggag

SEQ ID NO: 14961 - DNA, 3252 bp, Oryza sativa
  Clone ID: TFbOSC22414j.C1.o2.fg
atggcggagaggctacggcgaatccgaggcggcggcgccatgctcgtgctcatcctcctcgccgtcgtggcgtcggcgcagcaggagtacgaggtcacctcctcctcgtcctcctcgccgtcgcggcgcggcgcgggcgagggccatcggccgccgccttgggcgcagcaggagtacgacgtcacctccgccgccaccacggactactccatcccgctcgccggcgtgcaccagcgatcgggagagcaggtctccggaacctctgcctttgacgtcctgcaccgggagaaggcggcaataagattaaatcgttatatgtctataatctcaacaatccaaaaaccttattataggcactgtgattttactatggctggttttgccgatgcactgaggccggataaattcaccggtgtgcattttaagagatggcagatcagggtcactctgtggctgacaactatgaaatgcttctgggtgagtactggcaaatctgaaggagttcttactgctgaacagcagaagcaattcgaggaagccactactctctttgtgggatgcattcttagcgttcttggcgatcgtctggtcgaggtgtatatgcatatgaccgacgctaaggagttgtgggatgcactgaatactaaattcggtgctactgatgctagcaatgatctgtatatcatgaagcagtttcatgactacaaaatggcagacaaccgttctgtagtcgaacaggctcatgagatacaaaccatggctaaggaactcgaactccttaagtgtgtcttacccgacaaatttgtggccgggtgcattattgtaaaactacctccatcttggaggagtttcggtactgcactcaaacacaagagacaggaatactccgttgaggggttgattgcgtctcttgatgttgaggagaaagctcgggaaaaagatgccgcgtctaagggcgatggtgggcagtccagtgccaatgttgtgcacaaggcccagaacaagagcaaggggaaatacaaagctcagcagaccaccaacttcaagaagcagaagaagaacaacaacaatcctaatcaggatgagaggacttgctttgtgtgtggccaagttggtcatctggctaggaagtgtccacagcgcaaggggatgaaggcacctgcagggcagacttctaagtctgctaatgtgaccattggcaacactggagatggaagcgggtatggtaatttaccaactgttttttcagttaatcaatctactaattggtgggttgatactggggccaatgtcgcacggggttccaccgtcctaatggggaatgggtcacatgcttctgttcatggtgttggcacggtagatctgaagtttacttcgggaaagatcgtgcagctgaagaacgtgcagcatgtcccttctatcgacaggaatcttgttagtggctcccgtctgactagagacggatttaagttggtttttgagtctaataaagtagtcgtgtctaaacatggatattttattggtaaaggttttgagtgcggaggcctgttccgcttttccctttctgatttctgcaataagtctgtgaaccatatttgtggcagtgtggatgatgaggttaatgtttggcattcacgtttatgtcatattaattttggcttgatgtctcggctttccagcatgtgtttaattcctaagttttccattgtcaaaggttctaagtgccatagttgtgtgcaatcgaagcaacctcgcaagcctcacaaggctgccgaggagagaaacttggcaccactagaactcctacattcagatctttgtgaaatgaatggggtgttgacgaagggtggaaaacgatatttcatgacattgattgatgatgctactagattttgctatgtgtacttgttgaaaacgaaagacgaggctctagactattttaaaatttataaggcagaagttgaaaatcaacttgacagaaagataaaaaggcttaggtctgatcgtggtggagagtttttctcgaacgagtttgacttattctgtgaggaacatggcatcatacatgagaggacgcctccctattctcccgagtctaatgggattgctgaaaggaagaaccgcacactgactgacttggtgaatgccatgttggacaccgcgggactgcctaaggcatggtggggggaggcattgttgacctcaaatcatgtgttaaacagagttcctaatagaaataaggacaaaacaccatatgagatatggattggtagaaaaccatcactttcttatttgcgcacatgggggtgcttggcgaaagtcaatgtaccaataacgaagaagcgcaaacttggacctaagactgtggactgtgtttttctgggatatgctcatcatagcattgcctatagatttttaatagttaaatccgaggtaccggacatgcatgttggtacaattatggagtctcgtgatgctaccttctttgagagctttttcccaatgaaggatacacatagtggttcgaaccaaccctctgaaataattcccagttcaatcacaccaccagaacaaactgaacatacacatgaacttgtctctgaggaggatgtcagtgaagctcctcgaaggagtaagagacaaaggacggctaagtcttttggtgatgatttcactgtgtacctcgtggatgacactcctaagtcaatttcagaagcatatgcatctcctgatgcagactactggaaggaggctgtccgtagtgaaatggattccattatcgctaacgggacttgggaggtgacagagcgaccctatgggtgtaaacctgtggggtgcaagtgggtgttcaagaagaagcttaggcctgacggtactattgaaaagtacaaggctcggcttgttgctaagggctatactcagaaagaaggcgaagatttctttgacacttactcacctgttgctagattgaccacaattcgtgtgctactttccctagcagcctcacatggtcttctcgttcatcaaatggacgttaagacagcttttcttaatggagagctggatgaggagatctatatggatcaacctgatgggtttgtagttgaaggtccctgcgacgcctactgtcacgcccagaaattcccgaatagaattccaagcagaatgtgcattaaaatccccgtccaggaccagccggggtacacaaacgacaatgttgacattcagatccacgtcttacaaacatcataa

SEQ ID NO: 14962 - DNA, 3887 bp, Oryza sativa
  Clone ID: TFbOSC23264j.C1.o7.gm
atgtcgacggcggcggcgtccgagactagcagcgcgagcgcgtggtgggcggcccttgacagcgtcccgtgcgcggagcgacgcatcggccaacgccgccacgggcaacagccgccgccaagcacgcgagtgtcctgctgctgggccgaggcggcggcggtggcggagcaggcggggttgagatggtcgagcgcgcatgaggcagggagcgggagcgggagcgcccgtggaggcggggagcgggagcgacaagcggccacgggcaacaagcagatccacgacgagcgagtgagcgacaaggccgacacgcgattgacgacgaggatgacgagatggcgaagagcggcggggaactggcagctgccgaactcgacggtgtacgccctcgcgaagttggcgccgctcgtcgccagcctcttcttgtcgttcagctcctgcacgatcaatcaatcgatagatggatcagctcatcgaagcaactactccatcccgctcgccggcgtgcaccagcgatcgggagagcaggtctccggaacctctgcctttaacgtcctgcaccgggagaaggcggcaataaggcactgtgattttactatggctggttttgccgatgcactgaggccggataaattcaccggtgtgcattttaagagatggcagatcagggtcactctgtggctgacagctatgaaatgcttctgggtgagtactggcaaacctgaaggagttcttactgctgaacagcagaagcaattcgaggaagccactactctctttgtgggatgcattcttagcgttcttggcgatcgtctggtcgaggtgtatatgcatatgaccgacgctaaggagttgtgggatgcactgaatactaaattcggtgctactgatgctagcaatgatctgtatatcatagagcagtttcatgactacaagatggctgacaaccgttctgtaatcgaacaggctcatgagatacaaaccatggctaaggaactcgaactccgtaagtgtgtcttacccgacaaatttgtggctgggtgcattattgcgaaactaccttcatcttggagaagtttcggtactgcactcaaacacaagagacaggaatactccgttgaggggttgatagcgtctcttgatgttgaggagaaagctcgggaaaaagatgccgcgtctaagggcgatggtggacagtccagtgccaatgttgtgcacaaggcccagaacaagagcaaggggaaatacaaagctcagcagaccaccaacttcaagaagcagaagaagaacaacaacaatcctaatcaggatgagaggacttgctttgtgtgtggccaagttggtcatctggctaggaagtgtccacaacgcaaggggatgaaggcacctgcagggcagacttctaagtctgctaatgtgaccattggcaacactggagatggaagcgggtatggtaatttacctactgtcgcacggggttccaccgtcctaatggggaatgggtcacaagcttctgttcatggtgttggcacggtagatctgaagtttacttcgggaaagatcgtgcagctgaagaacgtgcagcatgtcccttctatcgacaggaatcttgttagtggctcccgtctgactagagacggatttaagttggtttttgagtctaataaagtagtcgtgtctaaacatggatattttattggtaaaggttatgagtgcggaggcctgttccgcttttccctttctgatttctgcaataagtctgtgaaccatatttgtggcagtgtggatgatgaggctaatgtttggcattcacactactggaaggaggctgtccgtagtgaaatggattccattatcgctaacgggacttgggaggtgacagagcgaccctatgggtgtaaacctgtggggtgcaagtgggtgttcaagaagaagcttaggcctgatggctttgcggtcaatgaggcagataaatgtgtgtactatcgccatggtgggggtgagggagttattttgtgcttgtatgttgacgacatactgatatttggaacaaaccttgaggtgataaatgagtcccattatgtggagaagatcttgaatcgctttggctacattgatagtaagccttctccaacaccttatgatcctagcttgttgcttcgcaagaacaagagaattgctaggaatcaactggaatactcccaaatcattggctcgttgatgtacctggctagtgcaactaggcctgatatctcctttgctgtgagcaagttgagccgatttacctctaatccgggagatgatcactggcgtgcgcttgagcgagtaatgcgctatctgaaaggtactgtggaattggggcttcactatactgggtatcctgcggtactggagggttatagtgattctaactggatctctgatgtggatgagatcaaagccactagtggatatgttttcacactgggtggtggtgctgtttcatggaggtcttgcaaacagaccattttgacgaggtcaaccatggaagcagagctaacggcactggatactgctactgttgaggcagaatggctgcgtgatctattaatggatctgcctgttgttgaaaaaccggtgccggctatccttatgaactgtgacaatcaaacggaaattaagaaactccggagttataacgttggattacatccaaacagcgagaaacctggcagatcccttcacgaagggactatcacgaaatgtgataaacaatgcatcgaaggagatgggtttgagacccatgtctccggaacctctgcctttgacgtcctgcaccgggagaaggcggcaataaggtactcgtcgaacacgccggccctggcctgcccggccttgcgcagcggcggaggcggcgatcacggcggcgagacccagcagcgcggcgcgcctgccgccgccctgctcagcttgggcggtgccgcgacgtgcacgcgcttcggcagcgccggcgagccggccgactgcggcaccgccgcggcgggcttgaggccgacaaggctgttgttcactccggccatggctcgattgagctgcgtgcaagcggctgtcaccacctgccgcctacctctgacaaatccgtgggatacacaacaaacaaagctatgggaattgtccaaaacaccctcaaccgtcattgggaaggcatcagcaacgtacacgtggagggccaggatgagggatgcagatctttgtgaagacactcactggcaataccataaggttgagtcctctgacacgattgacaatgtcaaggccaagattcaggacaaggagggtattccacctgaccagcagcgcctcatctttgcgggcaagcaacttgaggacggacgcaccctcgcagattacaacattcagaaagagtccaccctccaccttgtccttcgcctcaggggaggaatgcagatctttgtgaagaccttgacaagaaagacccatcactttggagcgtctttatctttgctggcaagcagcttgaggatggacaaggagggcatccccccggaccagcagcgcctcatcttcgccggcaagcagctcaaggacggacgcaccctggctgactacaatatccagaaggagtctacccttcacctagtgctcaggctcaggggtggaatgcaaatctttgtcaagacattgaccggcaaaaccattaccttggaggttgagtcgtcggacacaattgacaacgtgaaagcaaagattcaggacaaggagggcattcccccggatcagcagcgactgatctttgctggcaagcagctcgaggatggccgcaccttagcaggttacaacatccagaaggagtccaccttgcacctggcgctccgtctccgtggtggcct

SEQ ID NO: 14963 - DNA, 4380 bp, Oryza sativa
  Clone ID: TFbOSC26101j.C1.o4.fg
atggacggaagaggtagggggcggcgggaggtggacctagctgcggcgaccggcggagaggaactgggcgtcagcagcggaagcggagtctcgaaggctggcccccaggcgatgcggaatcgacagcgggagctgcgggaagacggcagccgctgtggccgcccgcgcatggaggagaggtgggagccagagagcgcgagctcctcctcttccgcgacgccaccggcctcaatgctcgatctcaccctcctcgcggcgttagagctccgtctaatattcttgtcgagatccggccagagtagcaccaagcccacgaggccaagctggccatcgtcccgccacagctcgatgagacgatggtgctcctcgattggtgagctcgagccggcggccagatgcagagcggaagaggacgcagagcacgtgctacgacaagtccgcccggcggccggctgtgtccggtgttctgtgttcatgtgcgctcctccatgggggaagccgccccgatctaatgatgcgttcatgctagttttcatctgtaatgtcatgatttatttatggaataaattaaatccttatatgcccataatctcaacaatccaaaaaccttattataggcactgtgattttactatggctggttttgccgatgcactgaggccggataaattcaccggtgtgcattttaagagatggcagatcagggtcactctgtggctgacagctatgaaatgcttctgggtgagtactggcaaacctgaaggagttcttactgctgaacagcagaagcaattcgaggaagccactactctctttgtgggatgcattcttagcgttcttggtgatcgtctggtcgaggtgtatatgcatatgaccgacgctaaggagttgtgggatgcactgaatactaaattcggtgctactgatgctagcaatgatctgtatatcatggagcagtttcatgactacaaaatggctgacaaccgttctgtagtcgaacaggctcatgagatacaaaccatggctaaggaactcgaactccttaagtgtgtcttacccaacaaatttgtggccgggtgcattattgcaaaacttcctccatcttggaggagtttcggtactgcactcaaacacaagagacaggaatactccgttgaggggttgattgcgtctcttgatgttgaggagaaagctcgggaaaaagatgccgcgtctaagggcgatggtgggcagtccagtgccaatgttgtgcacaaggcccagaacaagagcaaggggaaatacaaagctcagcagaccaccaacttcaagaagcagaagaagaacaacaacaatcctaatcaggatgagaggacttgctttgtgtgtggccaagttggtcatctggctaggaagtgtccacaacgcaaggggatgaaggcacctgcagggcagacttctaagtctgctaatgtgaccattggcaacactggagatggaagcgggtatggtaatttacctactgttttttcagttaatcaatctactaattggtgggttgatactggggccaatgtcgcacggggttccaccgtcctaatggggaatgggtcacatgcttctgttcatggtgttggcacggtagatctgaagtttacttcgggaaagatcgtgcagctgaagaacgtgcagcatgtcccttctatcgacaggaatcttgttagtggctcccgtctgactagagacggatttaagttggtttttgagtctaataaagtagtcgtgtctaaacatggatattttattggtaaaggttatgagtgcggaggcctgttccgcttttccctttctgatttctgcaataagtctgtgaaccatatttgtggcagtgtggatgatgaggctaatgtttggcattcacgtttatgtcatattaattttggcttgatgtctcggctttccagcatgtgtttaattcctaagttttccattgtcaaaggttctaagtgccatagttgtgtgcaatcgaagcaacctcgcaagcctcacaaggctgccgaggagagaaacttggcaccactagaactcctacattcagatctttgtgaaatgaatggggtgttgacgaagggtggaaaacgatatttcatgacattgattgatgatgctactagattttgctatgtgtacttgttgaaaacgaaagacgaggctctagactattttaaaatttataaggcagaagttgaaaatcaacttgacagaaagataaaaaggcttaggtctgatcgtggtggagagtttttctcgaacgagtttgacttattctgtgaggaacatggcatcatacatgagaggacgcctccctattctcccgagtctaatgggattgctgaaaggaagaaccgcacactgactgacttggtgaatgccatgttggacaccgcgggactgcctaaggcatggtggggggaggcattgttgacctcaaatcatgtgttaaacagagttcctaacagaaataaggacaaaacaccatatgagatatggattggtagaaaaccatcactttcttatttgcgcacatgggggtgcttggcgaaagtcaatgtaccaataacgaagaagcgcaaacttggacctaagactgtggactgtgtttttctgggatatgctcatcatagcattgcctatagatttttaatagttaaatccgaggatgtcagtgaagctcctcgaaggagtaagagacaaaggacggctaagtcttttggtgatgacttcactgtgtacctcgtggatgacactcctaagtcaatttcagaagcatatgcatctcctgatgcagactactggaaggaggctgtccgtagtgaaatggattccattatcgctaacgggacttgggaggtgacagagcgaccctatgggtgtaaacctgtggggtgcaagtgggtgttcaagaagaagcttaggcctgacggtactattgaaaagtacaaggctcggcttgttgctaagggctatactcagaaagaagacgaagatttctttgacacttactcacctgttgctagattgaccacaattcgtgtgctactttccctagcagcctcacatggtcttctcgttcatcaaatggacgttaagacagtttttcttaatggagagctggatgaggagatctatatggatcaacctgatgggtttgtagttgaaggtcaagaaggcaaagtgtgcaaattgttgaagtctttgtatggtctgaaacaagctcctaagcaatggcatgagaaatttgacaaaacattgacatctgcaggctttgcagtcaatgaggcagataaatgtgtgtactatcgccatggtgggggtgagggagttattttgtgcttgtatgttgacgacatactgatatttgggacaaaccttgaggtgataaatgaggttaaatcattcttgtctcaaaattttgatatgaaagatttgggagtagctgatgttatcttaaacattaagctaattagaggtgagaatgggattactctcttgcagtcccattatgtggagaagatcttgaatcgctttggctacattgatagtaagccttctccaacaccttatgatcctagcttgttgcttcgcaagaacaagagaattgctaggaatcaactggaatactcccaaatcattggctcgttgatgtacctggctagtgcaactaggcctgatatctcctttgctgtgagcaagttgagccgatttacttctaatccgggagatgatcactggcgtgcgcttgagcgagtaatgcgctatctgaaaggtactgtggaattgggacttcactatactgggtatcctgcggtactggagggttatagtgattctaactggatctctgatgtggatgagatcaaagccactagtggatatgttttcacactgggtggtggtgctgtttcatggaggtcttgcaaacagacaattttgacgaggtcaaccatggaagcagagctaacggcactggatactgctactgttgaggcagaatggctgcgtgatctattaatggatctgcctgttgttgaaaaaccggtgccggctatccttatgaactgtgacaatcaaacgacatgtgaaaagacgattgaagtctgtcaggaaattaagaaactccggagttataacgttggattacatccaaacagcgagaaacctggcagatcccttcacgaagggactatcacgaaatgtgatagacaatgcatcgaaggagatgggtttgagacccatagcattcttgaaggaactcacctttgtgagcttgactgttggtcgcagtctatgaagattttgggtgaatcttctaggaagcttactaaagacctaggagtatga

SEQ ID NO: 14964 - DNA, 2655 bp, Oryza sativa
  Clone ID: TFbOSC28278j.C1.o3.gm
atgcccgtgcgttgcaacgggcgacgtgtggcggcggaagtgcttggcgcggtcgtcgggcttctgaacgagcttgacgcaggccagcggcaggaactacatcagttgaaggccaacgactactccatcccgctcgccggcgtgcaccagcgatcgggagagcaggtctccggaacctctgtctttgacgtcctgcaccgggagaaggcggcaataaggcactgtgattttactatggctggttttgccgatgcactgaggccggataaattcaccggtgtgcattttaagagatggcagatcagggtcactctgtggctgacagctatgaaatgcttctgggtgagtactggcaaacctgaaggagttcttactgctgaacagcagaagcaattcgaggaagccactactctctttgtgggatgcattcttagcgttcttggcgatcgtctggtcgaggtgtatatgcatatgaccgacgctaaggagttgtgggatgcactgaatagtaaattcggtgctactgatgctagcaatgatctgtatatcatggagcagtttcatgactacaaaatggctgacaaccgttctgtagtcgaacaggctcatgagatacaagccatggctaaggaactcgaactccttaagtgtgtcttacccgacaaatttgtggccgggtgcattattgcaaaactacctccatcttggaggagtttcggtactgcactcaaacacaagagacaggaatactccgttgaggggttgattgcgtctcttgatgttgaggagaaagctcgggaaaaagatgccgcgtctaagggcgatggtgggcagtccagtgccaatgttgtgcacaaggcccagaacaagagcaaggggaaatacaaagctcagcagaccaccaacttcaagaagcagaagaagaacaacaacaatcctaatcaggatgagaggacttgctttgtgtgtggccaagttggtcatctggctaggaagtgtccacagcgcaaggggatgaaggcacctgcagggcagacttctaagtctgctaatgtgaccattggcaacactggagatggaagcgggtatggtaatttacctactgtcgcacggggttccaccgtcctaatggggaatgggtcacatgcttctgttcatggtgttggcacggtagatctgaagtttacttcggaaaagatcgtgcagctgaagaatgtgcagcatgtcccttctatcgacaggaatcttgttagtggctcccagtctcgtgatgctatcttctttgagagctttttcccaatgaaggatacacatagtggttcgaaccaaccatctgaaataattcctagttcaatcacaccaccagaacaaactgaacatacacatgaacttgtctctgaggaggatgtcagtgaagctcctcgaaggagtaagagacaaaggacggctaagtcttttggtgatgatttcactgtgtacctcgtggatgacactcctaagtcaatttcagaagcatatgcatctcctgatgcagattactggaaggaggctgtccgtagtgaaatggattccattatcgctaacgggacttgggaggtgacagagcgaccctatgggtgtaaacctgtggggtgcaagtgggtgttcaagaagaagcttaggcctgacgcctcacatggtcttctcgttcatcaaatggacgttaagacagcttttcttaatggagagctggatgaggagatctatatggatcaacctgatgggtttgtagttgaaggctttgcagtcaatgaggcagataaatgtgtgtactatcgccatggtgggggtgagggagttattttgtgcttgtatgttgacgacatactgatatttgggacaaaccttgaggtgataaatgagtcccattatgtggagaagatcttgaatcgctttggctacattgatagtaagccttctccaacaccttatgatcctagcttgttgcttcgcaagaacaagagaattgctaggaatcaactggaatactcccaaatcattggctcgttgatgtacctggctagtgcaactaggcctgatatctcctttgctgtgagcaagttgagccgatttacctctaatccgggagatgatcactggcgtgcgcttgagcgagtaatgcgctatctgaaaggtactgtggaattggggcttcactatactgggtatcctgcggtactggagggttatagtgattctaactggatctctgatgtggatgagatcaaagccactagtggatatgttttcacactgggtggtggtgctgtttcatggaggtcttgcaaacagaccattttgacgaggtcaaccatggaagcagagctaacggcactggatactgctactgttgaggcagaatggctgcgtgatctattaatggatctgcctgttgttgaaaaaccggtgccggctatccttatgaactgtgacaatcaaacggccgctgccgccgtccccaaagtcctcatcgccgatgactgctacctctccatgccatctcccatcagctcggctacatcgtcggccacggaatctccacggcctccacatcgacttggaccaggatcctcttcccgtcgcactctgtcggcaccaccgcctgccatccgctga

SEQ ID NO: 14965 - DNA, 299 bp, Oryza sativa
  Clone ID: TFbOSC28278j.C1.o3.np
atggagatccaatatgagcttaattcggatagggatccgaataagagtcctacgggccttggagacccgagtgatggatcctatatatttgtgaggggtgtgaccggcggaggcattgcatcaccatgggagtacggcgaggagaacgcacgaggaggagaaggtcgagccagtgcgatcgactacttcctctacatcgacgcgcgctacttcgcgagagttccttcgacttctcagcgtcttcttccgttgcgcagcgcgtcgagtggtaactgtaattttcttctaactgcaaaggg

SEQ ID NO: 14966 - DNA, 4101 bp, Oryza sativa
  Clone ID: TFbOSC2875j.C1.o7.fg
atgcagcctccttttgtaaccgacccgccgtcttcacgcaatatatgcgaaaatcagtctagggtttgcctcctactctgtactgcgccgtcgctcgtagactactccatcccgctcgccagcgtgcaccagcgatcgggagagcaggtctccggaacctctgcctttgacgtcctgcaccgggagaaggcggcaataaggcattgtgattttactatggctggttttgccgatgcactgaggccggataaattcaccggtgtgcattttaagagatggcagatcagggtcactctgtggctgacagctatgaaatgcttctgggtgagtactggcaaacctgaaggagttcttactgctgaacagcagaagcaattcgaggaagccactactctctttgtgggatgcattcttagcgttcttggcgatcgtctggtcgaggtgtatatgcatatgaccgacgctaaggagttgtgggatgcactgaatactaaattcggtgctactgatgctagcaatgatctgtatatcatggagcagtttcatgactacaaaatggctgacaaccgttctgtagtcgaacaggctcatgagatacaaaccatggctaaggaactcgaactccttaagtgtgtcttacccgacaaatttgtggccgggtgcattattgcaaaactacctccatcttggagaaagctcgggaaaaaagatgccgcgtctaagggcgatggtgggcagtccagtgccaatgttgtgcacaaggcccagaacaagagcaaggggaaatacaaagctcagcagaccaccaacttcaagaagcagaagaagaacaacaacaatcctaatcaggatgagaggacttgctttgtgtgtggccaagttggtcatctggctaggaagtgtccacagcgcaaggggatgaaggcacctgcagggcagacttctaagtctgctaatgtgaccattggcaacactggagatggaagcgggtatggtaatttacctactgttttttcagttaatcaatctactaattggtgggttgatactggggccaatctacatgtttgtgctgacatctcattgttttcttcttatcaggtcgcacggggttccaccgtcctaatggggaatgggtcacatgcttctgttcatggtgttggcacggtagatctgaagtttacttcgggaaagatcgtgcagctgaagaacgtgcagcatgtcccttctatcgacaggaatcttgttagtggctcccgtctgactagagacggatttaagttggtttttgagtctaataaagtagtcgtgtctaaacatggatattttattggtaaaggttatgagtgcggaggcctgttccgcttttccctttctgatttctgcaataagtctgtgaaccatatttgtggcagtgtggatgatgaggctaatgtttggcattcacgtttatgtcatattaattttggcttgatgtctcggctttccagcatgtgtttaattcctaagttttccattgtcaaaggttctaagtgccatagttgtgtgcaatcgaagcaacctcgcaagcctcacaaggctgccgaggagagaaacttggcaccactagaactcctacattcagatctttgtgaaatgaatggggtgttgacgaagggtggaaaacgatatttcatgacattgattgatgatgctactagattttgctatgtgtacttgttgaaaacgaaagacgaggctctagactattttaaaatttataaggcagaagttgaaaatcaacttgacagaaagataaaaaggcttaggtctgatcgtggtggagagtttttctcgaacgagtttgacttattctgtgaggaacatggcatcatacatgagaggacgcctccctattctcccgagtctaatgggattgctgaaaggaagaaccgcacactgactgacttggtgaatgccatgttggacaccgcgggactgcctaaggcatggtggggggaggcattgttgacctcaaatcatgtgttaaacagagttcctaacagaaataaggacaaaacaccatatgagatatggattggtagaaaaccatcactttcttatttgcgcacatgggggtgcttggcgaaagtcaatgtaccaataacgaagaagcgcaaacttggacctaagactgtggactgtgtttttctgggatatgctcatcatagcattgcctatagatttttaatagttaaatccgaggtaccggacatgcatgttggtacaattatggagtctcgtgatgctaccttctttgagagctttttcccaatgaaggatacacatagtggttcgaaccaaccctctgaaataattcccagttcaatcacaccaacagaacaaactgaacatacacatgaacttgtctctgaggaggatgtcagtgaagctcctcgaaggagtaagagacaaaggacggctaagtcttttggtgatgatttcactgtgtacctcgtggatgacactcctaagtcaatttcagaagcatatgcatctcctgatgcagactactggaaggaggctgtccgtagtgaaatggattccattatcgctaacgggacttgggaggtgacagagcgaccctatgggtgtaaacctgtggggtgcaagtgggtgttcaagaagaagcttaggcctgacggtactattgaaaagtacaaggctcggcttgttgctaagggctatactcagaaagaaggcgaagatttctttgacacttactcacctgttgctagattgaccacaattcgtgtgctactttccctagcagcctcacatggtcttctcgttcatcaaatggatgttaagacagcttttcttaatggagagctggatgaggagatctatatggatcaacctgatgggtttgtacttgaaggtcaagaaggcaaagtgtgcaaattgttgaagtctttgtatggtctgaaacaagctcctaagcaatggcatgagaaatttgacaaaacattgacatctgcaggctttgcagtcaatgaggcaaataaatgtgtatactatcgccatggtgggggtgagggagttattttgtgcttgtatgttgacgacatactgatatttgggacaaaccttgaggtgataaatgaggttaaatcattcttgtctcaaaattttgatatgaaagatttgggagtagctgatgttatcttaaacattaagctaattagaggtgagaatgggattacactcttgcagtcccattatgtggagaagatcttgaatcgctttggctacattgatagtaagccttctccaacaccttatgatcctagcttgttgcttcgcaagaacaagagaattgctaggaatcaactggaatactcccaaatcattggctcgttgatgtacctggctagtgcaactaggcctgatatctcctttgctgtgagcaagttgagccgatttacctctaatccgggagatgatcactggcgtgcgcttgagcgagtaatgcgctatctgaaaggtactgtggaattggggcttcactatactgggtatcctgcggtactggagggttatagtgattctaactggatctctgatgtggatgagatcaaagccactagtggatatgttttcacactgggtggtggtgctgtttcatggaggtcttgcaaacagacaattttgacgaggtcaaccatggaagcagagctaacggcactggatattgctactgttgaggcagaatggttgcgtgatctattaatggatctgcctgttgttgaaaaaccagtgccggctatccttatgaactgtgacaatcaaacgacatgtgaaaagacgattgaagtctgtcaggaaattaagaaactccggagttataacgttggattacatccaaacagcgagaaacctggcagatcccttcacgaagggactatcacgaaatgtgatagacaatgcatcgaaggagatgggtttgagacccatagcattcttgaaggaactcacctttgtgagcttgactgttggtcgcagtccatgaagattttgggtgaatcttctaggaagcttactaaagacctaggagtatga

SEQ ID NO: 14967 - DNA, 1005 bp, Oryza sativa
  Clone ID: TFbOSC29687j.C1.o1.fg
atggctggttttgccgatgcactgaggccggataaattcaccggtgtgcattttaagagatggcagatcagggtcactctgtggctgacagctatgaaatgcttctgggtgagtactggcaaacctgaaggagttcttactgctgaacagcagaagcaattcgaggaagccactactctctttgtgggatgcattcttagcgttcttggcgatcgtctggtcgaggtgtatatgcatatgaccgacgctaaggagttgtgggatgcactgaatactaaattcggtgctactgatgctagcaatgatctgtatatcatggagcagtttcatgactacaaaatggctgacaaccgttctgtagtcgaacaggctcatgagatacaaaccatggctaaggaactcgaactccttaagtgtgtcttacccgacaaatttgtggccgggtgcattattgcaaaactaccttcatcttggagaagtttcggtactgcactcaaacacaagagacaggaatactccgttgaggggttgatagcgtctcttgatgttgaggagaaagctcgggaaaaagatgccgcgtctaagggcgatggtgggcagtccagtgccaatgttgtgcacaaggcccagaacaagagcaagggaaaatacaaagctcagcagaccaccaacttcaagaagcagaagaagaacaacaacaatcctaatcaggatgagaggacttgctttgtgtgtggccaagttggtcatctggctaggaagtgtccacagcgcaaggggatgaaggcacctgcagggcagacttctaagtctgctaatgtgaccattggcaacactggagatggaagcggatatggtcgcacggggttccaccgtcctaatggggaatgggtcacatgcttctgttcatggtgttggcacggtagatctgaagtttacttcgggaaagatcgtgcagctgaagaacgtgcagcatgtcccttctatcgacaggaatcttgttag

SEQ ID NO: 14968 - DNA, 856 bp, Oryza sativa
  Clone ID: TFbOSC30492j.C1.o1.fg
atggctggttttgccgatgcactgaggccggataaattcaccggtgtgcattttaagagatggcagatcagggtcactctgtggctgacagctatgaaatgcttctgggtgagtactggcaaacctgaaggagttcttactgctgaacagcagaagcaattcgaggaagccactactctctttgtgggatgcattcttagcgttcttggcgatcgtctggtcgaggtgtatatgcatatgaccgacgctaaggagttgtgggatgcactgaatactaaattcggtgctactgatgctagcaatgatctgtatatcatggagcagtttcatgactacaaaatggctgacaaccgttctgtagtcgaacaggctcatgagatacaaaccatggctaaggaactcgaactccttaagtgtgtcttacccgacaaatttgtggccgggtgcattattgcaaaacttcctccatcttggaggagtttcggtactgcactcaaacacaagagacaggaatactccgttgaggggttgattgcgtctcttgatgttgaggagaaagctcgggaaaaagatgccgcgtctaagggcgatggtgggcagtccagtgccaatgttgtgcacaaggcccagaacaagagcaaggggaaatacaaagctcagcagaccaccaacttcaagaagcagaagaagaacaacaacaatcctaatcaggatgagaggacttgctttgtgtgtggccaagttggtcatctggctaggaagtgtccacaacgcaaggggatgaaggcacctgcagggcagacttctaagtctgctaatgtgaccattggcaacactggagatggaagcgggtatg

SEQ ID NO: 14969 - DNA, 1382 bp, Oryza sativa
  Clone ID: TFbOSC3839j.C1.o1.gm
atgttattgaaaaaattattgctgtctccatctccaatgcagcaatgatatctacaaagaagaggattcctcggacgccacccgccagggaaagggcaccgctggctgggggggcgccgaccgccaaggggagggcgccgcccctcgggggaaaggcgccgctggcctggtggaggatgccacgtctgaggcaccgggcgccgtcggccgggaggtcgccctggctgaggggtaggaagagcggtgccgccgactactccatcccgctcgccggcgtgcaccggcgattgggagagcaggtctccggaacctctgccttcgacgttctgcaccgggagaaggcggcaataaggcactgtgattttactatggctggttttgccgatgcactgaggccggataaattcaccggtgtgcattttaagagatggcagatcagggtcactctgtggctgacagctatgaaatgcttctgggtgagtactggcaaacctgaaggagttcttactgctaaacagcagaagcaattcgaggaagccactactctctttgtgggatgcattcttagcgttcttggcgatcgtctggtcgaggtgtatatgcatatgaccgacgctaaggagttgtgggatgcactgaatactaaattcggtgctactgatgctagcaatgatctgtatatcatggagcagtttcatgactacaaaatggctgacaaccgttctgtagtcgaacaggctcatgagatacaaaccatggctaaggaactcgaactccttaagtgtgtcttacccgacaaatttgtggccgggtgcattattgcaaaactacctccatcttggaggagtttcggtactgcactcaaacacaagagacaggaatactccgttgaggggttgattgcgtctcttgatgttgaggagaaagctcgggaaaaagatgccgcgtctaagggcgatggtgggcagtccagtgccaatgttgtgcacaaggcccagaacaagagcaaggggaaatacaaagctcagcaaaccaccaacttcaagaagcagaagaagaacaacaacaatcctaatcaggatgagaggacttgctttgtgtgtggccaagttggtcatctggctaggaagtgtccacagcgcaaggggatgaaggcacctgcagggcagacttctaagtctgctaatgtgaccattggcaacactggagatggaagcgggtatggtaatttacctactgtcgcacggggttccaccgtcctaatggggaatgggtcacatgcttctgttcatggtgttggcacggtagatctgaagtttacttcgggaaagatcgtgcagctgaagaacgtgcagcatgtcccttctatcgacaggaatctt

SEQ ID NO: 14970 - DNA, 3090 bp, Oryza sativa
  Clone ID: TFbOSC400036j.C1.o96.gm
atggctggttttgccgatgcactgaggccggataaattcaccggtgtgcattttaagagatggcagatcagggtcactctgtggctgacagctatgaaatgcttctgggtgagtactggcaaacctgaaggagttcttactgctgaacagcagaagcaattcgaggaagccactactctctttgtgggatgcattcttagcgttcttggcgatcgtctggtcgaggtgtatatgcatatgaccgacgctaaggagttgtgggatgcactgaatactaaattcggtgctactgatgctagcaatgatctgtatatcatggagcagtttcatgactacaaaatggctgacaaccgttctgtagtcgaacaggctcatgagatacaaaccatggctaaggaactcgaactccttaagtgtgtcttacccgacaaatttgtggccgggtgcattattgcaaaacttcctccatcttggaggagtttcggtactgcactcaaacacaagagacaggaatactccgttgaggggttgattgcgtctcttgatgttgaggagaaagctcgggaaaaagatgccgcgtctaagggcgatggtgggcagtccagtgccaatgttgtgcacaaggcccagaacaagagcaaggggaaatacaaagctcagcagaccaccaacttcaagaagcagaagaagaacaacaacaatcctaatcaggatgagaggacttgctttgtgtgtggccaagttggtcatctggctaggaagtgtccacaacgcaaggggatgaaggcacctgcagggcagacttctaagtctgctaatgtgaccattggcaacactggagatggaagcgggtatggtaatttacctactgtcgcacggggttccaccgtcctaatggggaatgggtcacatgcttctgttcatggtgttggcacggtagatctgaagtttacttcgggaaagatcgtgcagctgaagaacgtacagcatgtcccttctatcgacaggaatcttgttagtggctcccgtctgactagagacggatttaagttggtttttgagtctaataaagtagtcgtgtctaaacatggatattttattggtaaaggttatgagtgcggaggcctgttccgtttttccctttctgatttctgcaataacatgtgtttaattcctaagttttccattgtcaaaggttctaagtgccatagttgtgtgcaatcgaagcaacctcgcaagcctcacaaggctgccgaggagagaaacttggcaccactagaactcctacattcagatctttgtgaaatgaatggggtgttgacgaaggaagttgaaaatcaacttgacagaaagataaaaaggcttaggtctgatcgtggtggagagtttttctcgaacgagtttgacttattctgtgaggaacatggcatcatacatgagaggacgcctccctattctcccgagtctaatgggattgctgaaaggaagaaccgcacactgactgacttggtgaatgccatgttggacaccgcgggactgcctaaggcatgtgaagctcctcgaaggagtaagagacaaaggacggctaagtcttttggtgatgatttcactgtgtacctcgtggatgacactcctaagtcaatttcagaagcatatgcatctcctgatgcagactactggaaggaggctgtccgtagtgaaatggattccattatcgctaacgggacttgggaggtgacagagcgaccctatgggtgtaaacctgtggggtgcaagtgggtgttcaagaagaagcttaggcctgacgcctcacatggtcttctcgttcatcaaatggacgttaagacagcttttcttaatggagagctggatgaggagatctatatggatcaacctgatgggtttgtagttgaaggctttgcagtcaatgaggcagataaatgtgtgtactatcgccatggtgggggtgagggagttattttgtgcttgtatgttgacgacatactgatatttgggacaaaccttgaggtgataaatgagtcccattatgtggagaaaatcttgaatcgctttggctacattgatagtaagccttctccaacaccttatgatcctagcttgttgcttcgcaagaacaagagaattgctaggaatcaactggaatactcccaaatcattggctcgttgatgtacctggctagtgcaactaggcctgatatctcctttgctgtgagcaagttgagccgatttacttctaatccgggagatgatcactggcgtgcgcttgagcgagtaatgcgctatctgaaaggtactgtggaattggggcttcactatactgggtatcctgcggtactggagggttatagtgattctaactggatctctgatgtggatgagatcaaagccactagtggatatgttttcacactgggtggtggtgctgtttcatggagcaaagatgttgtcctgcagagcattcttgaaggaactcacctttgtgagcttgactgttggtcgcagtctatgaagattttggactactccatcccgctcgccggcgtgcaccagcgatcgggagagcaggtctccggaacctctgcctttgacgtcctgcaccgggagaaggcggcaataagagtcctgacatggaatgacgggttctacaacggcgagataaagacaaggaagatagagaacaacctagtgacggagctcacagctgagcagctcctcctacagagaagcgagcaactgagggagctgtacaactctctcctctctggtgagtctgcagaccaacagaggaggaggcctgtcactgcactatcgccggaggatctcggcaacgtagaatggtactacgttgtctgcatgacctacgccttccgccctggacaatgtgtgccaggtaaaagctttgcaagcaatggatgtgcctggctgtgcaacgctcagtctgccgatagcaaagccttcccgcgcaagctcttagccaagaacgcttctattcagacaattgtctgcgttccattcatgactggcgttcttgagcttgggaccactgatccgaaaaccgacaccttctag

SEQ ID NO: 14971 - DNA, 3963 bp, Oryza sativa
  Clone ID: TFbOSC400151j.C1.o72.fg
atggctggttttgccgatgcactgaggccggataaattcaccggtgtgcattttaagagatggcagatcagggtcactctgtggctgacagctatgaaatgcttctgggtgagtactggcaaacctgaaggagttcttactgctgaacagcagaagcaattcgaggaagccactactctctttgtgggatgcattcttagcgttcttggcgatcgtctggtcgaggtgtatatgcatatgaccgacgctaaggagttgtgggatgcactgaatactaaattcggtgctactgatgctagcaatgatctgtatatcatggagcagtttcatgactacaaaatggctgacaaccgttctgtagtcgaacaggctcatgagatacaaaccatggctaaggaactcgaactccttaagtgtgtcttacccgacaaatttgtggccgggtgcattattgcaaaactaccttcatcttggagaagtttcggtactgcactcaaacacaagagacaggaatactccgttgaggggttgatagcgtctcttgatgttgaggagaaagctcgggaaaaagatgccgcgtctaagggcgatggtgggcagtccagtgccaatgttgtgcacaaggcccagaacaagagcaagggaaaatacaaagctcagcagaccaccaacttcaagaagcagaagaagaacaacaacaatcctaatcaggatgagaggacttgctttgtgtgtggccaagttggtcatctggctaggaagtgtccacagcgcaaggggatgaaggcacctgcagggcagacttctaagtctgctaatgtgaccattggcaacactggagatggaagcggatatggtaatttacctactgttttttcagttaatcaatctactaattggtgggttgatactggggccaatgtacatgtttgtgctgacatctcattgttttcttcttatcaggtcgcacggggttccaccgtcctaatggggaatgggtcacatgcttctgttcatggtgttggcacggtagatctgaagtttacttcgggaaagatcgtgcagctgaagaacgtgcagcatgtcccttctatcgacaggaatcttgttagtggctcccgtctgactagagacggatttaagttggtttttgagtctaataaagtagtcgtgtctaaacatggatattttattggtaaaggttatgagtgcggaggcctgttccgtttttccctttctgatttctgcaataagtctgtgaaccatatttgtggcagtgtggatgatgaggctaatgtttggcattcacgtttatgtcatattaattttggcttaatgtctcggctttccagcatgtgtttaattcctaagttttccattgtcaaaggttctaagtgccatagttgtgtgcaatcgaagcaacctcgcaagcctcacaaggctgccaaggagagaaacttggcaccactagaactcctacattcagatctttgtgaaatgaatggggtgttgacgaatggtggaaaacgatatttcatgacattgattgatgatgctactagattttgctatgtgtacttgttgaaaacgaaagacgaggctctagactattttaaaatttataaggcagaagttgaaaatcaacttgacagaaagataaaaaggcttaggtctgatcgtggtggagagtttttctcgaacgagtttgacttattctgtgaggaacatggcatcatacatgagaggacgcctccctattctcccgagtctaatgggattgctgaaaggaagaatcgcacactgactgacttggtgaatgccatgttggacaccgcgggactgcctaaggcatggtggggggaggcattgttgacctcaaatcatgtgtcaaacagagttcctaacagaaataaggacaaaacaccatatgagatatggattggtagaaaaccatcactttcttatttgcgcacatgggggtgcttggcaaaagtcaatgtaccaataacgaagaagcgcaaacttggacctaagactgtggactgtgtttttctgggatatgctcatcatagcattgcctatagatttttaatagttaaatccgaggtaccggacatgcatgttggtacaattatggagtctcgtgattctatcttctttgagagctttttcccaatgaaggatacacatagtggttcgaaccaaccctctgaaataattcccagttcaatcacaccaccagaacaaactgaacatacacatgaacttgtctctgaggaggatgtcagtgaagctcctcgaaggagtaagagacaaaggacggctaaatcttttggtgatgatttcactgtgtacctcgtggatgacactcctaagtcaatttcagaagcatatgcatctcctgatgcagactactggaaggaggctgtccgtagtgaaatggattccattatcgctaacggaacttgggaggtgacagagcgaccctatgggtgtaaacctgtggggtgcaagtgggtgttcaagaagaagcttaggcctgacggtactattgaaaagtacaaggctcggcttgttgctaagggctatactcagaaagaaggcgaagatttctgtgacacttactcacctgttgctagattgaccacaattcgtgtgctactttccctagcagcctcacatggtcttctcgttcatcaaatggacgttaagacagcttttcttaatggagagctggatgaggagatctatatggatcaacctgatgggtttgtagttgaaggtcaagaaggcaaagtgtgcaaattgttgaagtctttgtatggtctgaaacaagctcctaagcaatggcatgagaaatttgacaaaacattgacatctgcaggctttgcagtcaatgaggcagataaatgtgtgtactatcgccatggtgggggtgagggagttattttgtgcttgtatgttgacgacatactgatatttgggacaaaccttgaggtgataaatgaggttaaatcattcttgtctcaaaattttgatatgaaggatttgggagtagctgatgttatcttaaacattaagctaattagaggtgagaatgggattacactcttgcagtcccattatgtggagaagatcttgaatcgctttggctacattgatagtaagccttctccaacaccttatgatcctagcttgttgcttcgcaagaacaagagaattgctaggaatcaactggaatactcccaaatcattggctcgttgatgtacctggctagtgcaactaggcctgatatctcctttgctgtgagcaagttgagccgatttacctctaatccgggagatgatcactggcgtgcgcttgagcgagtaatgcgctatctgaaaggtactgtggaattggggcttcactatactgggtatcctgcggtactggagggttatagtgattctaactggatctctgatgtggatgagatcaaagccactagtagatatgttttcacactgggtggtggtgctgtttcatggaggtcttgcaaacagaccattttgacgaggtcaaccatggaagcagagttaacggcactggatactgctactgttgaggcagaatggctgcgtgatctattaatggatctgcctgttgttgaaaaactggtgccggctatccttatgaactgtgacaatcaaacgacatgtgaaaagacgattgaagtctgtcaggaaattaagaaactccggagttataacgttggattacatccaaacagtgagaaacctggcagatcccttcacgaagggactatcacgaaatgtgatagacaatgcatcgaaggagatgtgtttgagacccatagcattcttgaaagaactcacctttgtgagcttgactgttggtcgcagtctatgaagattttgggtgaatcttctaggaagcttactaaagacctaggagtatga

SEQ ID NO: 14972 - DNA, 3645 bp, Oryza sativa
  Clone ID: TFbOSC400226j.C1.o50.fg
atggctggttttgccgatgcactgaggccggataaattcaccggtgtgcattttaagagatggcagatcagggtcactctgtggctgacagctatgaaatgcttctgggtgagtactggcaaacctgaaggagttcttactgctgaacagcagaagcaattcgaggaagccactactctctttgtgggatgcattcttagcgttcttggcgatcgtctggtcgaggtgtatatgcatatgaccgacgctaaggagttgtgggatgcactgaatactaaattcggtgctactgatgctagcaatgatctgtatatcatggagcagtttcatgactacaaaatggctgacaaccgttctgtagtcgaacaggctcatgagatacaaaccatggctaaggaactcgaactccttaagtgtgtcttacccgacaaatttgtggccgggtgcattattgcaaaactacctccatcttggaggagtttcggtactgcactcaaacacaagagacaggaatactccgttgaggggttgattgcgtctcttgatgttgaggagaaagctcgggaaaaagatgccgcgtctaagggcgatggtgggcagtccagcgccaatgttgtgcacaaggcccagaacaagagcaaggggaaatacaaagctcagcagaccaccaacttcaagaagcagaagaagaacaacaacaatcctaatcaggatgagaggacttgctttgtgtgtggccaagttggtcatctggctaggaagtgtccacagcgcaaggggatgaaggcacctgcagggcagacttctaagtctgctaatgtgaccattggcaacactggagatggaagcgggtatggtaatttacctactgttttttcagttaatcaatctactaattggtgggttgatactggggccaatgtcgcacggggttccaccgtcctaatggggaatgggtcacatgcttctgttcatggtgttggcacggtagatctgaagtttacttcgggaaagatcgtgcagctgaagaacgtgcagcatgtcccttctatcgacaggaatcttgttagtggctcccgtctgactagagacggatttaagttggtttttgagtctaataaagtagtcgtgtctaaacatggatattttattggtaaaggttatgagtgcggaggcctgttccgcttttccctttctgatttctgcaataagtctgtgaaccatatttgtggcagtgtggatgatgaggctaatgtttggcattcacgtttatgtcatattaattttggcttgatgtctcggctttccagtatgtgtttaattcctaagttttccattgtcaaaggttctaagtgccatagttgtgtgcaatcgaagcaacctcgcaagcctcacaaggctgccgaggagagaaacttggcaccactagaactcctacattcagatctttgtgaaatgaatggggtgttgacgaagggtggaaaacgatatttcatgacattgattgatgatgctactagattttgctatgtgtacttgttgaaaacgaaagacgaggctctagactattttaaaatttataaggcagaagttgaaaatcaacttgacagaaagataaaaaggcttaggtctgatcgtggtggagagtttttctcgaacgagtttaacttattctgtgaggaacatggcatcatacatgagaggacgcctccctattctcccgagtctaatgggattgctgaaaggaagaaccgcacactgactgacttggtgaatgccatgttggacaccgcgggactgcctaaggcatggtggggggaggcattgttgacctcaaatcatgtaccagacatgcatgttggtacaattatggagtctcgtgatgctaccttctttgagagctttttcccaatgaaggatacacatagtggttcgaaccaaccctctgaaataattcccagttcaatcacaccaccagaacaaactgaacatacacatgaacttgtctctgaggaggatgtcagtgaagctcctcgaaggagtaagagacaaaggacggctaagtcttttggtgatgatttcactgtgtacctcgtggatgacactcctaagtcaatttcagaagcatatgcatctcctgatgcagactactggaaggaggctgtccgtagtgaaatggattccattatcgctaacgggacttgggaggtgacagagcgaccctatgggtgtaaacctgtggggtgcaagtgggtgttcaagaagaagcttaggcctgacggtactattgaaaagtacaaggctcggcttgttgctaagggctatactcagaaagaaggcgaagatttctttgacacttactcacctgttgctagattgaccacaattcgtgtgctactttccctagcagcctcacatggtcttctcgttcatcaaatggacgttaagacagcttttcttaatggagagctggatgaggagatctatatggatcaacctgatgggtttgtagttgaaggtcaagaaggcaaagtgtgcaaattgttgaagtctttgtatggtctgaaacaagctcctaagcaatggcatgagaaatttgacaaaacattgacatctgcaggctttgcagtcaatgaggcagataaatgtgtgtactatcgccatggtgggggtgagggagttattttgtgcttgtatgttgacgacatactgatatttgggacaaaccttgaggtgataaatgaggttaaatcattcttgtctcagaattttgatatgaaagatttgggagtagctgatgttatcttaaacattaagctaattagaggtgagaatgggattacactcttgcaatcccattatgtggagaagatcttgaatcgctttggctacattgatagtaagccttctccaacaccttatgatcctagcttgttgcttcgcaagaacaagagaattgctaggaatcaactggaatactcccaaatcattggctcgttgatgtacctggctagtgcaactaggcctgatatctcctttgctgtgagcaagttgagccgatttacctctaatccgggagatgatcactggcgtgcgcttgagcgagtaatgcgctatctgaaaggtactgtggaattggggcttcactatactgggtatcctgcggtactggagggttatagtgattctaactggatctctgatgtggatgagatcaaagccactagtggatatgttttcacactgggtggtggtgctgtttcatggaggtcttgcaaacagacaattttgacgaggtcaaccatggaagcagagctaacggcactggatactgctactgttgaggcagaatggctgcgtgatctattaatggatctgcctgttgttgaaaaaccggtgccggctatccttatgaactgtgacaatcaaacagtaattgtcaaagtgaatagttctaaggataatatgaaatcgtctagacatgtgaaaagacgattgaagtctgtcaggaaattaagaaactccggagttataacgttggattacatccaaacagcgagaaacctggcagatcccttcatgaagggactatcacgaaatgtgatagacaatgcatcgaaggagatgggtttgagacccatgtga

SEQ ID NO: 14973 - DNA, 3303 bp, Oryza sativa
  Clone ID: TFbOSC400282j.C1.o49.gm
atggggggatccggccgattcggccggatgcagccgcccgagcgctcgggcgagcaggggcgaacgacatgtgggtcgcgtcacccctctcaccacgaggcgagctcggcggccaggcaaggcgacgccatggaggcgagctcgacggcggcggctagggtgacgcgagctcggcggctagggcaagccggcgacgagagaggagacgagctcggcgacgggagaggagacgagctcggcgacgagaaaggagatgagccggcgacgaccggatctgggagggcaccggcgagagcgagcgacggcggccggggagagaggatacgaggtggcgagggcggcccggaggggaatattccccctagatgccggatggggggatccggccgattcggccggatgcagccgcccgagcgctcgggcgagcaggggcgaacgacatgtgggtcgcgtcacccctctcaccacgaggcgagctcggcggccaggcaaggcgacgccatggaggcgagctcgacggcggcggctagggtgacgcgagctcggcggctagggcaagccggcgacgagagaggagacgagctcggcgacgggagaggagacgagctcggcgacgagaaaggagatgagccggcgacgaccggatctgggagggcaccggcgagagcgagcgacggcggccggggagagaggatacgaggtggcgagtctacctcgtacgcggtacgtcgggtcgccggcagccactactccatcccgctcgccggcgtgcaccggcgatcgggagagcaggtctccggaacctctgccttcgacgtcctgcaccgggagaaggcggcaataagggtcactctgtggctgacagctatgaaatgcttctgggtgagtactggcaaacctgaaggagttcttactgctgaacagcagaagcaattcgaggaagccactactctctttgtgggatgcattcttagcgttcttggcgatcgtctggtcgaggtgtatatgcatatgaccgacgctaaggagttgtgggatgcactgaatactaaattcggtgctactgatgctagcaatgatctgtatatcatggagcagtttcatgactacaaaatggctgacaaccgttctgtagtcgaacaggctcatgagatacaaaccatggctaaggaactcgaactccttaagtgtgtcttacccgacaaatttgtggccgggtgcattattgcaaaactacctccatcttggagaagtttcggtactgcactcaaacacaagagacaggaatactccgttgaggggttgatagcgtctcttgatgttgaggagaaagctcgggaaaaagatgccgcgtctaagggcgatggtgggcagtccagtgccaatgttgtgcacaaggcccagaacaagagcaaggggaaatacaaagctcagcagaccaccaacttcaagaagcagaagaagaacaacaacaatcctaatcaggatgagaggacttgctttgtgtgtggccaagttggtcatctggctaggaagtgtccacagcgcaaggggatgaaggcacctgcagggcagacttctaagtctgctaatgtgaccattggcaacactggagatggaagcgggtatggtaatttacctactgttttctcagttaatcaatctactaattggtgggttgatactggggccaatgtacatgtttgtgctgacatctcattgttttcttcttatcaggtcgcacggggttccaccgtcctaatggggaatgggtcacatgcttctgttcatggtgttggcatggtagatctgaagtttacttcgggaaagatcgtgcagctgaagaacgtgcagcatgtcccttctatcgacaggaatcttgttagtggctcccgtctgactagagacggatttaagttggtttttgagtctaataaagtagtcgtgtctaaacatggatattttattggtaaaggttatgagtgcggaggcctgttccgcttttccctttctgatttctgcaataagtctgtgaaccatatttgtggcaaagttgaaaatcaacttgacagaaagataaaaaggcttaggtctgatcgtggtggagagtttttctcgaacgagtttgacttattctgtgaggaacatggcatcatacatgagaggacgcctccctattctcccgagtctaatgggattgctgaaaggaagaatcgcacactgactgacttggtgaatgccatgttggacaccgcgggactgcctaaggcatgtgaagctcctcgaaggagtaagagacaaaggacggctaagtcttttggtgatgatttcactgtgtacctcgtggatgacactcctaagtcaatttcagaagcatatgcatctcctgatgcaaactactggaaggaggctgtccgtagtgaaatggattccattatcgctaacgggacttgggaggtgacagagcgaccctatgggtgtaaacctgtggggtgcaagtgggtgttcaagaagaagcttaggcctgacgcctcacatggtcttctcgttcatcaaatggacgttaagacagcttttcttaatggagagctggatgaggagatctatatggatcaacctgatgggtttgtagttgaaggctttgcagtcaatgaggcagataaatgtgtgtactatcgccatggtgggggtgagggagttattttgtgcttgtatgttgacgacatactgatatttgggacaaatcttgaggtgataaatgagtcccattatgtggagaagatcttgaatcgctttggctacattgatagtaagccttctccaacaccttatgatcctagcttgttgcttcgcaagaacaagagaattgctaggaatcaactggaatactcccaaatcattggctcgttgatgtacctggctagtgcaactaggcctgatatctcctttgctgtaagcaagttgagccgatttacctctaatccgggagatgatcactggcgtgcgcttgagcgagtaatgcgctatctgaaaggtactgtggaattggggcttcactatactgggtatcctgcggtactggagggttatagtgattctaactggatctctgatgtggatgagatcaaagccactagtggatatgttttcacactgggtggtggtgctgtttcatggagcgaagatgttgtcctgcagagcattcttgaaagaactcacctttgtgagcttgactgttggtcgcagtctataaagattttgggtgaatcttctaggaagcttactaaagacctaggagtatga

SEQ ID NO: 14974 - DNA, 5736 bp, Oryza sativa
  Clone ID: TFbOSC400302j.C1.o22.fg
atggctggttttgccgatgcactgaggccggataaattcaccggtgtgcattttaagagatggcagatcagggtcactctgtggctgacagctatgaaatgcttctgggtgagtactggcaaacctgaaggagttcttactgctgaacagcagaagcaattcgaggaagccactactctctttgtgggatgcattcttagcgttcttggcgatcgtctggtcgaggtgtatatgcatatgaccgacgctaaggagttgtgggatgcactgaatactaaattcggtgctactgatgctagcaatgatctgtatatcatggagcagtttcatgactacaaaatggctgacaaccgttctgtagtcgaacaggctcatgagatacaaaccatggctaaggaactcgaactccttaagtgtgtcttacccgacaaatttgtggccgggtgcattattgcaaaactacctccatcttggaggagtttcggtactgcactcaaacacaagagacaggaatactccgttgaggggttgattgcgtctcttgatgttgaggagaaagctcgggaaaaagatgccgcgtctaagggcgatggtgggcagtccagtgccaatgttgtgcacaaggcccagaacaagagcaaggggaaatacaaagctcagcagaccaccaacttcaagaagcagaagaagaacaacaacaatcctaatcaggatgagaggacttgctttgtgtgtggccaagttggtcatctggctaggaagtgtccacaacgcaaggggatgaaggcacctgcagggcagacttctaagtctgctaatgtgaccattggcaacactggagatggaagcgggtatggtaatttacctactgttttttcagttaatcaatctactaattggtgggttgatactggggccaatgtacatgtttgtgctgacatctcattgttttcttcttatcaggtcgcacggggttccaccgtcctaatggggaatgggtcacatgcttctgttcatggtgttggcacggtagatctgaagtttacttcgggaaagatcgtgcagctgaagaacgtgcagcatgtcccttctatcgacaggaatcttgttagtggctcccgtctgactagagacggatttaagttggtttttgagtctaataaagtagtcgtgtctaaacatggatattttattggtaaaggttatgagtgcggaggcctgttccgcttttccctttctgatttctgcaataagtctgtgaaccatatttgtggcagtgtggatgatgaggctaatgtttggcattcacgtttatgtcatattaattttggcttgatgtctcggctttccagcatgtgtttaattcctaagttttccattgtcaaaggttctaagtgccatagttgtgtgcaatcgaagcaacctcgcaagcctcacaaggctgccgaggagagaaacttggcaccactagaactcctacattcagatctttgtgaaatgaatggggtgttgacgaagggtggaaaacgatatttcatgacattgattgatgatgctactagattttgctatgtgtacttgttgaaaacgaaagacgaggctctagactattttaaaatttataaggcagaggttgaaaatcaacttgacagaaagataaaaaggcttaggtctgatcgtggtggagagtttttctcgaacgagtttgacttattctgtgaggaacatggcatcatacatgagaggacgcctccctattctcccgagtctaatgggattgctgaaaggaagaaccgcacactgactgacttggtgaatgccatgttggacaccgcgggactgcctaaggcatggtggggggaggcattgttgacctcaaatcatgtgttaaacagagttcctaacagaaataaggacaaaacaccatatgagatatggattggtagaaaaccatcactttcttatttgcgcacatgggggtgcttggcgaaagtcaatgtaccaataacgaagaagcgcaaacttggacctaagactgtggactgtgtttttctgggatatgctcatcatagcattgcctatagatttttaatagttaaatccgaggtaccggacatgcatgttggtacaattatggagtctcgtgatgctaccttctttgagagctttttcccaatgaaggatacacatagtggttcgaaccaaccctctgaaataattcccagttcaatcacaccaccagaacaaactgaacatacacatgaacttgtctctgaggaggatgtcagtgaagctcctcgaaggagtaagagacaaaggacggctaagtcttttggtgatgatttcactgtgtacctcgtggatgacactcctaagtcaatttcagaagcatatgcatctcctgatgcagactactggaaggaggctgtccgtagtgaaatggattccattatcgctaacgggacttgggaggtgacagagcgaccctatgggtgtaaacctgtggggtgcaagtgggtgttcaagaagaagcttaggcctgacggtactattgaaaagtacaaggctcggcttgttgctaagggctatactcagaaagaaggcgaagatttctttgacacttactcacctgttgctagattgaccacaattcgtgtgctactttccctagcagcctcacatggtcttctcgttcatcaaatggacgttaagacagcttttcttaatggagagctggatgaggagatctatatggatcaacctgatgggtttgtacttgaaggtcaagaaggcaaagtgtgcaaattgttgaagtctttgtatggtctgaaacaagctcctaagcaatggcatgagaaatttgacaaaacattgacgtttgcaggctttgcagtcaatgaggcagataaatgtgtgtactatcgccatggtgggggtgagggagttattttgtgcttgtatgttgacgacatactgatatttgggacaaacattgaggtgataaatgaggttaaatcattcttgtctcaaaattttgatatgaaagatttgggagtagctgatgttattttaaacattaagctaattagaggtgagaatgggattacactcttgcagtctcattatgtggagaagatcttgaatcgctttggctacattgatagtaagccttctccaacaccttatgatcctagcttgtcgcttcgcaagaacaagagaattgctaggaatcaactggaatactcccaaatcattggctcgttgatgtacctggctagtgcaactaggcctgatatctcctttgctgtgagcaagttgagccgatttacctctaatccgggagatgatcactggcgtgcgcttgagcgagtaatgcgctatctgaaaggtactgtggaattggggcttcactatactgggtatcctgcggtactggagggttatagtgattctaactggatctctgatgtggatgagatcaaagccactagtggatatgttttcacactgggtggtggtgctgtttcatggaggtcttgcaaacagacaattttgacgaggtcaaccatggaagcagagctaacggcactggatactgctactgttgaggcagaatggttgcgtgatctattaatggatctgcctgttgttgaaaaaccggtgccggctatccttatgaactgtgacaatcaaacggtaattgtcaaagtgaataattctaaggataatatgaaatcgtctagacatgtgaaaagacgattgaagtctgtcaggaaattaagaaactccggagttataacgttggattacatccaaacagcgagaaacctggcagatcccttcacgaagggactatcacgaaatgtgatagacaatgcatcgaaggagatgggtttgagacccatatctaatgatgcgttcatgctagttttcatctgtaatgtcatgacttatttatggaataaattaaatcattatatgcccataatctcaacagttctttcacatgacaaaacttgtggttatcaaagctctggacatctacagaagaacaaggaatctggcgatactgaaacagatccattgatgcctatccctgctgatatcgatttgccaatcttggaaaatatgccgaaaactaagaggggtggtgatgatctcgctagaagcttgcataagaacagaaaaacttgcaatggtggaagaactgactcattggcctcaggttgcttgcatggggaccctaatgaggatgtctggactgagctcaatgatgtggttaaatctaatttgtctaaaagtgtcgcgtcgcttagtttgcgcaatggtgtagctgtagaccgccaggggcgtcttacaaagttcctcacttctgcaagtttggtagagcttttggttagagctctcaatgatacaaacaaaaaccatggtgacttagagctcgaagtgtaccatgaaggcaatgaagtatgccagggttatttgactgattttgatttggatcacaatctggccatcgtcgaaatctggactgactttgatgttcatgttggacttctccaacatgcggtggaatttctgccccattgtaaggtaatagctatagggcgtgaaatcactggcaaactgatggccaggagggtgcagttaatggatgatttaagtgtatctgaagatagtgaagatcttgactgtaaaatcaaagaggcttgggaaggtgcaccacttttttcttttgatgggaactttgttggcatgaacctttttttggctatgggaagagcctttttcctgccatggggcactattcagaagcattgggcatccctgcaaaacaagacgggacttccagagtcaaacagtttgaaggtttataggtttggaacaagttccacagctgagaaatctaacagccatccagaagtaaacaacgatattctcgacccggagcagattcatatagactctatgggctatccaaagtttccaacacacatgtttgctgctttctgcaccactaacaactacgctataatgtatctatcaccagatgggatgattttggttaatactttcgaagagactttcggcgatctacgtggtgaaggtgtatggagtaaactcagtaaaaaatcttgttctaacatagaccgcagtgttgtcgcactagcttcattcagtggagagagaaggttttttgcatgcacaggcttttttgttgaatggaatggttctacagttattttgacatcagcaagcttggttagaagttctggcgatgagaacaagattgttgacaacttgaggattgaagtgttgcttccaaacaaacaacgcgtagaagggatgttacagcattgtaatcttcattacaatgttgctctagtcagtgtgggttaccgtgctcttcgcccagcacatggtcagcttgattggtggggcaagagtagtaaggtagtggctgtagggcgttgcttcaagtcaggtgcattgatggctgcaagtggaacggtaaccccctggacaggcacactcgattgcgacttcctcgaacgttcgtcatgtaaaatcacaaaggctgggattggaggccctgttgttactcttgatggggattgtattggtatgaacttctatgatacgagaataggaacccctttcctgtcgtgggaggtgattgttgatattgtagcatcctttgaggaaaaaaggtggccagtgcctatgccatattga

SEQ ID NO: 14975 - DNA, 3894 bp, Oryza sativa
  Clone ID: TFbOSC400397j.C1.o61.fg
atggctagttttgccgatgcactgaggccggataaattcaccggtgtgcattttaagagatggcagatcagggtcactctgtggctgacagctatgaaatgcttctgggtgagtactggcaaacctgaaggagttcttactgctgaacagcagaagcaattcgaggaagccactactctctttgtgggatgcattcttagcgttcttggcaatcgtctggtcgaggtgtatatgcatatgaccgacgctaaggagttgtgggatgcactgaatactaaattcggtgctactgatggtagcaatgatctgtatatcatggagcagtttcatgactacaaaatggctgacaaccgttctgtagtcgaacaggctcatgagatacaaaccatggctaaggaactcgaactccttaagtgtgtcttacccgacaaatttgtggccgggtgcattattgcaaaactacctccatcttggaggagtttcggtactgcactcaaacacaagagacaggaatactccgttgaggggttgattgcgtctcttgatgttgaggagaaagctcgggaaaaagatgccgcgtctaagggcgatggtgggcagtccagtgccaatgttgtgcacaaggcccagaacaagagcaaggggaaatacaaagctcagcagaccaccaacttcaagaagcagaagaagaacaacaacaatcctaatcaggatgagaggacttgctttgtgtgtggccaagttggtcatctggctaggaagtgtccacagcgcaaggggatgaaggcacctgcagggcaaacttctaagtctgctaatgtgaccattggcaacactggagatggaagcgggtatggtaatttacctactgttttttcagttaatcaatctactaattggtgggttgatactggggccaatgtacatgtttgtgctgacatctcattgttttcttcttatcaggtcgcacggggttccaccgtcctaatggggaatgggtcacatgcttctgttcatggtgttggcacggtagatctgaagtttacttcgggaaagatcgtgcagctgaagaacgtgcagcatgtcccttctatcgacaggaatcttgttagtggctcccgtctgactagagacggatttaagttggtttttgagtctaataaagtagtcgtgtctaaacatggatattttattggtaaaggttatgagtgcggaggactgttccgcttttccctttctgatttctgcaataagtctgtgaaccatatttgtggcagtgtggatgatgaggctaatgtttggcattcacgtttatgtcatattaattttggcttgatgtctcggctttccagcatgtgtttaattcctaagttttccattgtcaaaggttctaagtgccatagttgtgtgcaatcaaagcaacctcgcaagcctcacaaggctgccgaggagagaaacttggcaccactagaactcctacattcagatctttgtgaaatgaatggggtgttgacgaagggtggaaaacgatatttcatgacattcattgatgatgctactagattttgctatgtgtacttgttgaaaacgaaagacgaggctctagactattttaaaatttataaggcagaagttgaaaatcaacttgacagaaagataaaaaggcttaggtctgatcgtggtggagagtttttctcgaacgagtttgacttattctgtgaggaacatggcatcatatatgagatgacgcctccctattctcccgagtctaatgggattgctgaaaggaagaatcgcacactgactgacttggtgaatgccatgttggacaccgcgggactgcctaaggcatggtggggggaggcattgttgacctcaaatcatgtgttaaacagagttcctaacagaaataaggacaaaacaccatatgagatatggattggtagaaaaccatcactttcttatttgcgcacatgggggtgcttggcgaaagtcaatgtaccaataacgaagaagcgcaaacttggacctaagactgtggactgtgtttttctgggatatgctcatcatagcattgcctatagatttttaatagttaaatccgaggtaccggacatgcatgttggtacaattatggagtctcgtgatgctatcttctttgagagctttttcccaatgaaggatacacatagtggttcgaaccaaccatttgaaataattcccagttcaatcacaccaccagaacaaactgaacatacacatgaacttgtctctgaggaggatgtcagtgaagctcctcgaaggagtaagagacaaaggacggctaagtcttttggtgatgatttcactgtgtacctcgtggatgacactcctaagtcaatttcagaagcatatgcatctcctgatgcagactactggaaggaggctgtccgtagtgaaatggattccattatcgctaacgggacttgggaggtgatagagcgaccctatgggtgtaaacctgtggggtgcaagtgggtgttcaagaagaagcttaggcctgacggtactattgaaaagtacaaggctcggcttgttgctaagggctatactcagaaagaaggcgaagatttctttgacacttactcacctgttgctagattgaccacaattcgtgtgctactttccctagcagcctcacatggtcttctcgttcatcaaatggacgttaagacagcttttcttaatggagagctggatgaggagatctatatggatcaacctgatgggtttgtagttgaaggtcaagaacgcaaagtgtgcaaattgttgaagtctttgtatggtctaaaacaagctcctaagcaatggcatgagaaatttgacaaaacattgacatctgcaggctttgcagtcaatgaggcagataaatgtgtgtactatcgccatggtgggggtgagggagttattttgtgcttgtatgttgacgacatactgatatttgggacaaaccttgaggtgataaatgaggttaaatcattcttgtctcaaaattttgatatgaaggatttgggagtagctgatgttatcttaaacattaagctaattagaggtgagaatgggattacactcttgcagtcccattatgtggagaagatcttgaatcgctttggctacattgatagtaagccttctccaacaccttatgatcctagcttgttgcttcgcaagaacaagagaattgctaggaatcaactggaatactcccaaatcattggctcgttgatgtacctggctagtgcaactaggcctgatatctcctttgctgtgagcaagttgagccgatttacctctaatccgggagatgatcactggcgtgcgcttgagcgagtaatgcgctatctgaaaggtactgtggaattggggcttcactatactgggtatcctgcggtactggagggttatagtgattctaactggatctctgatgtggatgagatcaaagccactagtggatatgttttcacactgggtggtggtgctgtttcatggaggtcttgcaaacagaccattttgacgaggtcaaccatggaagcagagctaacggcactggatactgctactgttgaggcagaatggctgcgtgatctattaatggatctgcctgttgttgaaaaaccggtgccggctatccttatgaactgtgacaatcaaacgacatgtgaaaagacgattgaagtctgtcaggaaattaagaaactccggagttataacgttggattacatccaaacagcgagaaacctggcagatcccttcacgaagggactatcacgaaatgtgatagacaatgcatcgaaggagatgggtttgagacccatatgagttatactatggtggtaacccagtctatgtga

SEQ ID NO: 14976 - DNA, 3963 bp, Oryza sativa
  Clone ID: TFbOSC400429j.C1.o5.fg
atggctggttttgccgatgcactgaggccggataaattcaccggtgtgcattttaagagatggcagatcagggtcactctgtggctgacagctatgaaatgcttctgggtgagtactggcaaacctgaaggagttcttactgctgaacagcagaagcaattcgaggaagccactactctctttgtgggatgcattcttagcgttcttggcgatcgtctggtcgaggtgtatatgcatatgaccgacgctaaggagttgtgggatgcactgaatactaaattcggtgctactgatgctagcaatgatctgtatatcatggagcagtttcatgactacaaaatggctgacaaccgttctgtagtcgaacaggctcatgagatacaaaccatggctaaggaactcgaactccttaagtgtgtcttacccgacaaatttgtggccgggtgcattattgcaaaactacctccatcttggaggagtttcggtactgcactcaaacacaagagacaggaatactccgttgaggggttgattgcgtctcttgatgttgaggagaaagctcgggaaaaagatgccgcgtctaagggcgatggtgggcagtccagtgccaatgttgtgcacaaggcccagaacaagagcaaggggaaatacaaagctcagcagaccaccaacttcaagaagcagaagaagaacaacaacaatcctaatcaggatgagaggacttgctttgtgtgtggccaagttggtcatctggctaggaagtgtccacaacgcaaggggatgaaggcacctgcagggcagacttctaagtctgctaatgtgaccattggcaacactggagatggaagcgggtatggtaatttacctactgttttttcagttaatcaatctactaattggtgggttgatactggggccaatgtacatgtttgtgctgacatctcattgttttcttcttatcaggtcgcacggggttccaccgtcctaatggggaatgggtcacatgcttctgttcatggtgttggcacggtagatctgaagtttacttcgggaaagatcgtgcagctgaagaacgtgcagcatgtcccttctatcgacaggaatcttgttagtggctcccgtctgactagagacggatttaagttggtttttgagtctaataaagtagtcgtgtctaaacatggatattttattggtaaaggttatgagtgcggaggcctgttccgtttttccctttctgatttctgcaataagtctgtgaaccatatttgtggcagtgtggatgatgaggctaatgtttggcattcacgtttatgtcatattaattttggcttgatgtctcggctttccagcatgtgtttaattcctaagttttccattgtcaaaggttctaagtgccatagttgtgtgcaatcgaagcaacctcgcaagcctcacaaggctgccgaggagagaaacttggcaccactagaactcctacattcagatctttgtgaaatgaatggggtgttgacgaagggtggaaaacgatatttcatgacattgattgatgatgctactagattttgctatgtgtacttgttgaaaacgaaagacgaggctctagactattttaaaatttataaggcagaggttgaaaatcaacttgacagaaagataaaaaggcttaggtctgatcgtggtggagagtttttctcgaacgagtttgacttattctgtgaggaacatggcatcatacatgagaggacgcctccctattctcccgagtctaatgggattgctgaaaggaagaaccgcacactgactgacttggtgaatgccatgttggacaccgcgggactgcctaaggcatggtggggggaggcattgttgacctcaaatcatgtgttaaacagagttcctaacagaaataaggacaaaacaccatatgagatatggattggtagaaaaccatcactttcttatttgcgcacatgggggtgcttggcgaaagtcaatgtaccaataacgaagaagcgcaaacttggacctaagactgtggactgtgtttttctgggatatgctcatcatagcattgcctatagatttttaatagttaaatccgaggtaccggacatgcatgttggtacaattatggagtctcgtgatgctaccttctttgagagctttttcccaatgaaggatacacatagtggttcgaaccaaccctctgaaataattcccagttcaatcacaccaccagaacaaactgaacatacacatgaacttgtctctgaggaggatgtcagtgaagctcctcgaaggagtaagagacaaaggacggctaagtcttttggtgatgatttcactgtgtacctcgtggatgacactcctaagtcaatttcagaagcatatgcatctcctgatgcagactactggaaggaggctgtccgtagtgaaatggattccattatcgctaacgggacttgggaggtgacagagcgaccctatgggtgtaaacctgtggggtgcaagtgggtgttcaagaagaagcttaggcctgacggtactattgaaaagtacaaggctcggcttgttgctaagggctatactcagaaagaaggcgaagatttctttgacacttactcacctgttgctagattgaccacaattcgtgtgctactttccctagcagcctcacatggtcttctcgttcatcaaatggacgttaagacagcttttcttaatggagagctggatgaggagatctatatggatcaacctgatgggtttgtacttgaaggtcaagaaggcaaagtgtgcaaattgttgaagtctttgtatggtctgaaacaagctcctaagcaatggcatgagaaatttgacaaaacattgacatctgcaggctttgcagtcaatgaggcagataaatgtgtgtactatcgccatggtgggggtgagggagttattttgtgcttgtatgttgacgacatactgatatttgggacaaacattgaggtgataaatgaggttaaatcattcttgtctcaaaattttgatatgaaagatttgggagtagctgatgttattttaaacattaagctaattagaggtgagaatgggattacactcttgcagtctcattatgtggagaagatcttgaatcgctttggctacattgatagtaagccttctccaacaccttatgatcctagcttgtcgcttcgcaagaacaagagaattgctaggaatcaactggaatactcccaaatcattggctcgttgatgtacctggctagtgcaactaggcctgatatctcctttgctgtgagcaagttgagccgatttacctctaatccgggagatgatcactggcgtgcgcttgagcgagtaatgcgctatctgaaaggtactgtggaattggggcttcactatactgggtatcctgcggtactggagggttatagtgattctaactggatctctgatgtggatgagatcaaagccactagtggatatgttttcacactgggtggtggtgctgtttcatggaggtcttgcaaacagacaattttgacgaggtcaaccatggaagcagagctatcggcactggatactgctactgttgaggcagaatggttgcgtgatctattaatggatctgcctgttgttgaaaaaccggtgccggctatccttatgaactgtgacaatcaaacgacatgtgaaaagacgattgaagtctgtcaggaaattaagaaactccggagttataacgttggattacatccaaacagcgagaaacctggcagatcccttcacgaagggactatcacgaaatgtgatagacaatgcatcgaaggagatgggtttgagacccatagcattcttgaaggaactcacctttgtgagcttgactgttggtcgcagtccatgaagattttgggtgaatcttctaggaagcttactaaagacctaggagtatga

SEQ ID NO: 14977 - DNA, 3963 bp, Oryza sativa
  Clone ID: TFbOSC400522j.C1.o21.fg
atggctggttttgccgatgcactgaggccggataaattcaccggtgtgcattttaagagatggcagattagggtcactctgtggctgacagctatgaaatgcttctgggtgagtactggcaaacctgaaggagttcttactgctgaacagcagaagcaattcgaggaagccactactctctttgtgggatgcattcttagcgttcttggcgatcgtctggtcgaggtgtatatgcatatgaccgacgctaaggagttgtgggatgcactgaatactaaattcggtgctactgatgctagcaatgatctgtatatcatggagcagtttcatgactacaaaatggctgacaaccgttctgtagtcgaacaggctcatgagatacaaaccatggctaaggaactcgaactccttaagtgtgtcttacccgacaaatttgtggccgggtgcattattgcaaaactacctccatcttggaggagtttcggtactgcactcaaacacaagagacaggaatactccgttgaggggttgattgcgtctcttgatgttgaggagaaagctcgggaaaaagatgccgcgtctaagggcgatggtgggcagtccagtgccaatgttgtgcacaaggcccagaacaagagcaaggggaaatacaaagctcagcagaccaccaacttcaagaagcagaagaagaacaacaacaatcctaatcaggatgagaggacttgctttgtgtgtggccaagttggtcatctggctaggaagtgtccacaacgcaaggggatgaaggcacctgcagggcagacttctaagtctgctaatgtgaccattggcaacactggagatggaagcgggtatggtaatttacctactgttttttcagttaatcaatctactaattggagggttgatattggggccaatgtacatgtttgtgctgacatctcattgttttcttcttatcaggtcgcacggggttccaccgtcctaatggggaatgggtcacatgcttctgttcatggtgttggcacggtagatctgaagtttacttcgggaaagatcgtgcagctgaagaacgtgcagcatgtcccttctatcgacaggaatcttgttagtggctcccgtctgactagagacggatttaagttggtttttgagtctaataaagtagtcgtgtctaaacatggatattttattggtaaaggttatgagtgcggaggcctgttccgcttttccctttctgatttctgcaataagtctgtgaaccatatttgtggcagtgtggatgatgaggctaatgtttggcattcacgtttatgtcatattaattttggcttgatgtctcggctttccagcatgtgtttaatttctaagttttacattgtcaaaggttctaagtgccatagttgtgtgcaatcgaagcaacctcgcaagcctcacaaggctgccgaggagagaaacttggcaccactagaactcctacattcagatctttgtgaaatgaatggggtgttgacgaagggtggaaaacgatatttcatgacattgattgatgatgctactagattttgctatgtgtacttgttgaaaacgaaagacgaggctctagactattttaaaatttataaggcagaagttgaaaatcaacttgacagaaagataaaaaggcttaggtctgatcgtggtggagagtttttctcgaacgagtttgacttattctgtgaggaacatggcatcatacatgagaggacgcctccctattctcccgagtctaatgggattgctgaaaggaagaaccgcacactgactgacttggtgaatgccatgttggacaccgcgggactgcctaaggcatggtggggggaggcattgttgacctcaaatcatgtgttaaacagagttcctaacagaaataaggacaaaacaccatatgagatatggattggtagaaaaccatcactttcttatttgcgcacatgggggtgcttggcgaaagtcaatgtaccaataacgaagaagcgcaaacttggacctaagactgtggactgtgtttttctaggatatgctcatcatagcattgcctatagatttttaatagttaaatccgaggtaccggacatgcatgttggtacaattatggagtctcgtgatgctaccttctttgagagctttttcccaatgaaggatacacatagtggttcgaaccaaccctctgaaataattcccagttcaatcacaccaccagaacaaactgaacatacacatgaacttgtctctgaggaggatgtcagtgaagctcctcgaaggagtaagagacaaaggacggctaagtcttttggtgatgatttcaccgtgtacctcgtggatgacactcctaagtcaatttcagaagcatatgcatctcctgatgcagactactggaaggaggctgtccgtagtgaaatggattccattatcgctaacgggacttgggaggtgacagagcgaccctatgggtgtaaacctgtggggtgcaagtgggtgttcaagaagaagcttaggcctgacggtactattgaaaagtacaaggctcggcttgttgctaagggctatactcagaaagaaggcgaagatttctttgacacttactcacctgttgctagattgaccacaattcgtgtgctactttccctagcagcctcacatggtcttctcgttcatcaaatggacgttaagacagcttttcttaatggagagctggatgaggagatctatatggatcaacctgatgggtttgtagttgaaggtcaagaaggcaaagtgtgcaaattgttgaagtctttgtatggtctgaaacaagctcctaagcaatggcatgagaaatttgacaaaacattgacatctgcaggctttgcagtcaatgaggcagataaatgtgtgtactatcgccatggtgggggtgagggagttattttgtgcttgtatgttgacgacatactgatatttgggacaaaccttgaggtgataaatgaggttaaatcattcttgtctcaaaattttgatatgaaagatttgggagtagctgatgttatcttaaacattaagctaattagaggtgagaatgggattactctcttgcagtcccattatgtggagaagatcttgaatcgctttggctacattgatagtaagccttctccaacaccttatgatcctagcttgttgcttcgcaagaacaagagaattgctaggaatcaactggaatactcccaaatcattggctcgttgatgtacctggctagtgcaactaggcctgatatctcctttgctgtgagcaagttgagccgatttacttctaatccgggagatgatcactggcgtgcgcttgagcgagtaatgcgctatctgaaaggtactgtggaattggggcttcactatactgggtatcctgcggtactggagggttatagtgattctaactggatctctgatgtggatgagatcaaagccactagtggatatgtattcacactgggtggtggtgctgtttcatggaggtcttgcaaacagacaattttgacgaggtcaaccatggaagcagagctaacggcactggatactgctactgttgaggcagaatggctgcgtgatctattaatggatctgcctgttgttgaaaaaccggtgccggctatccttatgaactgtgacaatcaaacgacatgtgaaaagacgattgaagtctgtcaggaaattaagaaactccggagttataacgttggattacatccaaacagcgagaaacctggcagatcccttcacgaagggactatcacgaaatgtgatagacaatgcatcgaaggagatgggtttgagacccatagcattcttgaaggaactcacctttgtgagcttgactgttggtcgcagtctatgaagattttgggtgaatcttctaggaagcttactaaagacctaggagtatga

SEQ ID NO: 14978 - DNA, 3963 bp, Oryza sativa
  Clone ID: TFbOSC400522j.C1.o35.fg
atggctggttttgccgatgcactgaggccggataaattcaccggtgtgcattttaagagatggcagatcagggtcactctgtggctgacagctatgaaatgcttctgggtgagtactggtaaacctgaaggagttcttactgctgaacagcagaagcaattcgaggaagccactactctctttgtgggatgcattcttagcggtcttggcgatcgtctggtcgaggtgtatatgcatatgaccgacgctaaggagttgtgggatgcactgaatactaaattcggtgctactgatgctagcaatgatctgtatatcatggagcagtttcatgactacaaaatggctgacaaccgttctgtagtcgaacaggctcatgagatacaaaccatggctaaggaactcgaactccttaagtgtgtcttacccgacaaatttgtggccgggtgcattattgcaaaactacctccatcttggaggagtttcggtactgcactcaaacacaagagacaggaatactccgttgaggggttgattgcgtctcttgatgttgaggagaaagctcgggaaaaagatgccgcgtctaagggcgatggtgggcagtccagtgccaatgttgtgcacaaggcccagaacaagagcaaggggaaatacaaagctcagcagaccaccaacttcaagaagcagaagaagaataacaacaatcctaatcaggatgagaggacttgctttgtgtgtggccaagttggtcatctggctaggaagtgtccacaacgcaaggggatgaaggcacctgcagggcagacttctaagtctgctaatgtgaccattggcaacactggagatggaagcgggtatggtaatttacctactgttttttcagttaatcaatctactaattggtgggttgatactggggccaatgtacatgtttgtgctgacatctcattgttttcttcttatcaggtcgcacggggttccaccgtcctaatggggaatgggtcacatgcttctgttcatggtgttggcacggtagatctgaagtttacttcggaaaagatcgtgcagctgaagaacgtgcagcatgtcccttctatcgacaggaatcttgttagtggctcccgtctgactagagacggatttaagttggtttttgagtctaataaagtagtcgtgtctaaacatggatattttattggtaaaggttatgagtgcggaggcctgttccgcttttccctttctgatttctgcaataagtctgtgaaccatatttgtggcagtgtggatgatgaggctaatgtttggcattcacgtttatgtcatattaattttggcttgatgtctcggctttccagcatgtgtttaattcctaagttttccattgtcaaaggttctaagtgccatagttgtgtgcaatcgaagcaacctcgcaagcctcacaaggctgccgaggagagaaacttggcaccactagaactcctacattcagatctttgtgaaatgaatggggtgttgacgaagggtggaaaacgatatttcatgacattgattgatgatgctactagattttgctatgtgtacttgttgaaaacgaaagacgaggctctagactattttaaaatttataaggcagaagttgaaaatcaacttgacagaaagataaaaaggcttaggtctgatcgtggtggagagtttttctcgaacgagtttgacttattctgtgaggaacatggcatcatacatgagaggacgcctccctattctcccgagtctaatgggattgctgaaaggaagaaccgcacactgactgacttggtgaatgccatgttggacaccgcgggactgcctaaggcatggtggggggaggcattgttgacctcaaatcatgtgttaaacagagttcctaacagaaataaggacaaaacaccatatgagatatggattggtagaaaaccatcactttcttatttgcgcacatgggggtgcttggcgaaagtcaatgtaccaataacgaagaagcgcaaacttggacctaagactgtggactgtgtttttctgggatatgctcatcatagcattgcctatagatttttaatagttaaatccgaggtaccggacatgcatgttggtacaattatggagtctcgtgatgctaccttctttgagagctttttcccaatgaaggatacacatagtggttcgaaccaaccctctgaaataattcccagttcaatcacaccaccagaacaaactgaacatacacatgaacttgtctctgaggaggatgtcagtgaagctcctcgaaggagtaagagacaaaggacggctaagtcttttggtgatgatttcactgtgtacctcgtggatgacactcctaagtcaatttcagaagcatatgcatctcctgatgcagactactggaaggaggctgtccgtagtgaaatggattccattatcgctaacgggacttgggaggtgacagagcgaccctatgggtgtaaacctgtggggtgcaagtgggtgttcaagaagaagcttaggcctgacggtactattgaaaagtacaaggctcggcttgttgctaagggctatactcagaaagaaggcgaagatttctttgacacttactcacctgttgctagattgaccacaattcgtgtgctactttccctagcagcctcacatggtcttctcgttcatcaaatggacgttaagacagcttttcttaatggagagctggatgaggagatctatatggatcaacctgatgggtttgtagttgaaggtcaagaaggcaaagtgtgcaaattgttgaagtctttgtatggtctgaaacaagctcctaagcaatggcatgagaaatttgacaaaacattgacatctgcaggctttgcagtcaatgaggtagataaatgtgtgtactatcgccatggtgggggtgagggagttattttgtgcttgtatgttgacgacatactgatatttgggacaaaccttgaggtgataaatgaggttaaatcattcttgtctcaaaattttgatatgaaagatttgggagtagctgatgttatcttaaacattaagctaattagaggtgagaatgggattactctcttgcagtcccattatgtggagaagatcttgaatcgctttggctacattgatagtaagccttctccaacaccttatgatcctagcttgttgcttcgcaagaacaagagaattgctaggaatcaactggaatactcccaaatcattggctcgttgatgtacctggctagtgcaactaggcctgatatctcctttgctgtgagcaagttgagccgatttacttctaatccgggagatgatcactggcgtgcgcttgagcgagtaatgcgctatctgaaaggtactgtggaattggggcttcactatactgggtatcctgcggtactggagggttatagtgattctaactggatctctgatgtggatgagatcaaagccactagtggatatgttttcacactgggtggtggtgctgtttcatggaggtcttgcaaacagacaattttgacgaggtcaaccatggaagcagagctaacggcactggatactgctactgttgaggcagaatggctgcgtgatctattaatggatctgcctgttgttgaaaaaccggtgccggctatccttatgaactgtgacaatcaaacgacatgtgaaaagacgattgaagtctgtcaggaaattaagaaactccggagttataacgttggattacatccaaacagcgagaaacctggcagatcccttcacgaagggactatcacgaaatgtgatagacaatgcatcgaaggagatgggtttgagacccatagcattcttgaaggaactcacctttgtgagcttgactgttggtcgcagtctatgaagattttgggtgaatcttctaggaagcttactaaagacctaggagtatga

SEQ ID NO: 14979 - DNA, 4824 bp, Oryza sativa
  Clone ID: TFbOSC400525j.C1.o60.fg
atggcgctgcgcctcgctgccgtaccagagagcgccgccgccgacctgagcgccgccgccaataccctgccgtgcatctcctaccgcgactcgatccggagcgtcgccgccgtcgtctccggcggccgagggcctctcttccagtccgaagattccgcctccacctggtcgtcttcctcctacgcgtccgactgctccggccactcctccggcgtctccgccgccgcggccgctggcttcagggcactcacggcgcacgagctcagggaggtcgcgcgtcgcatggtcgccgacggctacgcccagcgcatggtccaagcgttcgacgacgcggcgacggtcgaggtcctcgagggggagatgttagccgattgtaggttagatgacgatattgccaaagattatgaggcgcgagcggctgtgcgggaagcgcgcgcggcgcgtgaggaagcagaggcgcggctgcaggtagccacgagggcggcacgtctcgtggcagcagaagctgaagcagcacgcaccgcggaggccgccaggcaggctgcagctgctgctgctactttgcgagctgaggaggaggaggagcgacgtgacctggagctgacagacgcggcccgcgtgcgacgcgacgcggaccgggatcgacacataggccgacgtgatcgcgacttcagcccccatcgcagaggatcagatctccaccgcggtgaggaggagcggcgcgatccatggcgcgatcctcgaatcaaccgcgctctggagacccagcgactccgggagcaggcagcggcgattgaggcacaactggacttcgaccgggagcagggtggacgagacgttggcgcacggagccctcgcaggcagcgcgcctccccttccccggaccggcgccgtggtcgccgtggacgctccggctctcctcccgttgtgcagatcgtcgtcaaggatgttggcggcgcatggcccatgctcaccaagactaactacgccgagtgggcgatggtgatgaaggtgaagttgcaggcgcgccacatgtgggacgcggttcgatacggcgacgtcgactacggggaagatcggcgggcgttggagcggttggcgcagctcggcgacaccaccatcgatgaggagagagccgtggagaagctcctttgcgtcgtccccgagaagtacacgcagctggctctgtcgatcgagacgctgctggacttcaccgagctcacgaacgaagaggtgacaggtcgcctcaaggccgtcgacaaccgcaagcagctacctccctcagagccgatcaccattggtggcaagcttttcttcaccaaggagaagtggctcgcccgccaacaagagcggaagaagggggaggccacaagctcttcggcttcgggatcgtcgagcagccgcaagcgtcgaccacgcaagtgggagaaggcgcgtagtggcgctcttggcggcgccgatggcgagcgcaagggcagccgcaacgacacctgccacaactgcgggaagaccggccactgggccaaggactgccggcaggcgaagcacggcggtcaagcacacgtcgctcaagcgcaggagggtgatgaggtggctctgtttttcgtacacggaagcatcgagccacacttcactcccacaccggacgctaccgcgcccctccacctcgacgagctgtgggcccacgtcttcctcagcaacggatcctgcgacgacaagatcgacgggtggtgcctcgacactggtgccactcaccacatgaccgggcgacgggaattcttctccaagcttgactccagtgttcaaggctccgtcaagtttgaggacgcctcagccgtggagatcaagggcgtcggctccatcctcttcaccaccaagaccggcgagcaccggctgctcaccggtgtctactacatccccgcgctgaggaactccatcatcagtttgggacaactggatgagaacggcttgctcgtggagatagaggacggggtcttgcgggtttgggatcgccatcgtcgccttctcgtcaaggtgaacaggggtgccaaccgcctctatgttctccatgtacaggtggcgcagcccgtgtgccttgcagcccgccgcgacgatgatgcatggcggtggcacgagcgctttgggcacctcaacttcgaggccttgaagcagctcagcaacaaggagatggtgcagggcatgccacgagtcgagcacgtggagcagttttgcgacacctgcgtcctcaccaagcagcggcgactcccctttccccgccaagcaagtttctgcgccaaggagaagttggagctcgtgcacggcgacctctgcggtcccgtgactccggccacacctggaggccggcgcttcttcctgctgctcgtcgacgacgtgtcctgctacatgtgggtggtcctgctcgactccaaggcagtggctgcagacgccatcaagcaccatcaagttgctgcggagaaggagtgcggccgcaagcttcgggtgctacacaccgacaacggtggcgagttcacgacggctgagttcgcagcgtactgcgccgacgagaggatccagcgccacttctccgcgccatacaccccgcagcagaacggcgttgtggagcgccgcaaccagacagtggtggccactgcccgcgccctcctcaagcaaagagggatgccggcaatctactggggggaggcggtgatgactgccgtccatctcctcaaccgctcgcccaccaaggcccttgatggcaagacgtcgtacgaggcctggcacgggcgcaagccggtggtgagccacctccgcgtctttggctgtctcgccttcgccaaggagctcaaccacgtcggcaagctcaacgaccggagctcgccgggagtcttcatcggctatgcggagggtgtcaaggcctaccgcatcctcgacccttcgacgcagcacgtccgcatttctcgggacgtcgtgttcgacgaagggcgaggttgggcttcgtacaaggcggtggacgacggctcgacttcgactctcagagacttcgtcgtcgactacgtccactttagggcagccgggggagctagcagctcatcttcaccgagctcgtccacctcggcacccggctcgccatcagctccggcgagtcctctaccacctacaccaccagcaactcctccatcaccagctacgccccgctctcctacaccggcgcccacaccaccggtggagttcgccactccgttgtccaacgacgaggatcgtgttgatgcgtaccacgacgacgagcctctgcgctaccgcaccatggacaacatcttcggtgatcagcccgtccctggactggagacgcgcgacttcgaggccgagttgcacctggcgcatgaggacggcgagccctgctccttcgcagaggcgaatggagatgtggcatggcgcactgcgatgcagcacgagatggacgcggtcgagcggaactggacgtgggtgttggcagatcttcctgccagccaccgcgccatcacccttaagtgggtctacaagctcaagaaggatgaggccggggcggtgatcaagcacaaggcacgtctagtggcgcgcggcttcgttcagcaggagggagtcgactttgacgacgccttcgcgcccgttgcgcgaatggagtctgttcgtctgctcctcgcgctggcagcccaggaaggatggcgtgtgcaccacatggatgtcaagtccgccttcctcaacggagacctgaaggaggaggtctacgtccaccagccgccgggattcgtcatccccggcaaggagaacaaggttctccgcctgcgcaaggccctctacggcttgcggcaggccctctacgccaagctggactccactctcaagcaaatggggttccagcagaactctcacgaagctgctgtctaccagcggggcaaggacggcaatgccctgttggtaggcgtctacgtcgacgacttggtgatcaccggcaccaaggaggctgaggtggaggcgtttaaggaggagatgaaggcgactttccagatgagcgatttgggccttctctctttctacctggggatcgaggtccaccaggacagctctggcatctcccttcgccaaaccgcctacgccaagtgcatcgtcgagttgggcgggctcaccggctgcaacccagcctacactcccatggaggaaaggttgaagctgagccgcgacagcacggctgaggaggtcgacgccacgcagtaccggcatattgtgggcagccttcgctacctcgtccacacgcggccagacttggcatttgctgttggctatgtcagccggttcatgcagcgaccgacgacagagcaccagcaggctgtcacgtcgagggcaccaccgactacggctttcactacccgaggtgtcccgtgcctgatcagctggcagtcggtcaagcaacaagtggtggccctgtctagttgcgaggcagagtacatcgctaccacaaccgcctcaactcaagctctctggttggctcggctgctgggtgatctcttgggcagaaacactgaagcagtggagctcaggatggacagcaagtccgctttggccttggcaaagaatcccgtcttccatgagcgcagcaagcacatccgcatcaagtatcatttcattcggagctgcttggaggaggggagcatcaaggccagctacattaacacccaggatcagctcgccgatcttctcaccaagtcccttgggcgggtcaagttccaggagtttcgcgccaggattggaatggttcaaattccccaaaaggcgccacacatgacttag

SEQ ID NO: 14980 - DNA, 1932 bp, Oryza sativa
  Clone ID: TFbOSC400758j.C1.o21.gm
atgtcggacaaaaccgaggctggtattggaggagctgtcatttgtgctttcttcttgacgagcagtccagtgtggagcaatagcagaggccctcacatcgcgtgcatgttgggagggctcggcgccagccagcgtccgaatggactagagaaatgcctgtgtgtttattgcatcaaactgctcgatagtgcttcatttgcttgctacaacacaggaaaaccgatccaggtggtgcggtgctatagcagaaaaccaaatatcattgccaaattggaagaggactactccatcccgctcgccggcgtgcaccagcgatcgggagagcaggtctccggaacctctgcctttgacgtcctgcactgggagaaggcggcaataaggcactgtgattttactatggctggttttgccgatgcactgaggccggataaattcaccggtgtgcattttaagagatggcagatcagggtcactctgtggctgacagctatgaaatgcttctgggtgagtactggcaaacctgaaggagttcttactgctgaacagcagaagcaattcgaggaagccactactctctttgtgggatgcattcttagcgttcttggcgatcgtctggtcgaggtgtatatgcatatgaccgacgctaaggagttgtgggatgcactgaatactaaattcggtgctactgatgctagcaatgatctgtatatcatggagcagtttcatgactacaagatggctgacaaccgttctgtagtcgaacaggctcatgagatacaaaccatggctaaggaactcgaactccttaagtgtgtcttacccgacaaatttgtggctgggtgcattattgcgaaactacctccatcttggagaagtttcggtactgcactcaaacacaagagacaggaatactccgttgaggggttgatagcgtctcttgatgttgaggagaaagctcgggaaaaagatgccgcgtctaagggcgatggtgggcagtccagcgccaatgttgtgcacaaggcccagaacaagagcaaggggaaatacaaagctcagcagaccaccaacttcaagaagcagaagaagaacaacaacaatcctaatcaggatgagaggacttgctttgtgtgtggccaagttggtcatctggctaggaagtgtccacagcgcaaggggatgaaggcacctgcagggcagacttctaagtctgctaatgtgaccattggcaacactggagatggaagcgggtatggtaatttacctactgtcgcacggggttccaccgtcctaatggggaatgggtcacatgcttctgttcatggtgttggcacggtagatctgaagtttacttcgggaaagatcgtgcagctgaagaacgtgcagcatgtcccttctatcgacaggaatcttgatacacatagtggttcgaaccaaccctctgaaataattcccagttcaatcacaccaccagaacaaattgaacatacacatgaacttgtctctgaggaggatgtcagtgaagctcctcgaaggagtaagagacaaaggacggctaagtcttttggtgatgattttactgtgtacctcgtggatgacactcctaagtcaatttcagaagcatatgcatctcctgatgcagactactggaaggaggctgtccgtagtgaaatggattccattatcgctaacgggacttgggaggtgacagagcaaccctatgggtgtaaacctgtggggtgcaagtgggtgttcaagaagaagcttaggcctgacgactactccatcccgctcgccggcgtgcaccagcgatcgggagagcaggtctccggaacctctgcctttgacgtcctgcactgggagaaggcggcaataaggcaacattcaatgaccggatttggttcctgtgcagtccttactatgactgcaacttag

SEQ ID NO: 14981 - DNA, 5112 bp, Oryza sativa
  Clone ID: TFbOSC400763j.C1.o16.fg
atgcgcctcctcgttctcatgtgtctggtcatcgcggccgccatgcagatgcaggctgcatcaggagcgcctcccacggccgccaagcttgctcactgcctcaaatcctgcgggggcgccaacatctcctatccttacggcgttggggccggctgtttccgccccggcttcgagctcacttgcgaccattccaccaaacccccaaagctcctcttattgggtgttgccaccaacactaacaccaccaccaccaagatcgtggatcaatatagagatgggtatgttcaagcctatgtttctttcaacatagccaccacaccgggtgtgctcggcacctacaacaggacatgggagtccccagggagaatccttagcatcgggccggattattatgctttggtggctgtcggttgcggaattgaggtctacttggtcgaccctgatacggaagatatgctgggctattgcttcagcatgtgtactgacatggcgatgatgcacaaggaagcagaggggaaagcttgcagtggcatgggctgctgcgtcgtcaccttccggagacctgtccgggctttcagagtttccatcactcagagagaagcaacgcagcctttccaagttgctaatgctagtactatcaaggttttcttatcagaagagagtacgacctaccattacaattttacaataggagatctcctctccgatgagataaatgaaaccactgttgcatctacttcggcgtacctatcaacctttatcgcagaccaaccaaactgtacaatagcgcagaaggatcctgagcggtatgcttgtggtgataacaaatgtttggatgcggatgacgaaaatggaggctaccgttgtgcatgcatcaaatatactaatagcaatccctacctcgacggtgactgcgaccaagactactccatcccgctcgccggcgtgcaccagcgatcgggagagcaggtctccggaacctctgcctttgacgtcctgcaccgggagaaggcggcaataagatctaatgatgcgttcatgctagttttcatctgtaatgtcatgacttatttatggaataaattaaatcattatatgcccataatctcaacaatccaaaaaccttattataggcactgtgattttactatggctggttttgccgatgcactgaggccggataaattcaccggtgtgcattttaagagatggcagatcagggtcactctgtggctgacagctatgaaatgcttctgggtgagtactggcaaacctgaaggagttcttactgctgaacagcagaagcaattcgaggaagccactactctctttgtgggatgcattcttagcgttcttggcgatcgtctggtcgaggtgtatatgcatatgaccgacgctaaggagttgtgggatgcactgaatactaaattcggtgctactgatgctagcaatgatctgtatatcatggagcagtttcatgactacaaaatggctgacaaccgttctgtagtcgaacaggctcatgagatacaaaccatggctaaggaactcgaactccttaagtgtgtcttacccgacaaatttgtggccgggtgcattattgcaaaactacctccatcttggaggagtttcggtactgcactcaaacacaagagacaggaatactccgttgaggggttgattgcgtctcttgatgttgaggagaaagctcgggaaaaagatgccgcgtctaagggcgatggtgggcagtccagtgccaatgttgtgcacaaggcccagaacaagagcaaggggaaatacaaagctcagcagaccaccaacttcaagaagcagaagaagaacaacaacaatcctaatcaggatgagaggacttgctttgtgtgtggccaagttggtcatctggctaggaagtgtccacaacgcaaggggatgaaggcacctgcagggcagacttctaagtctgctaatgtgaccattggcaacactggagatggaagcgggtatggtaatttacctactgttttttcagttaatcaatctactaattggtgggttgatactggggccaatgtacatgtttgtgctgacatcttattgttttcttcttatcaggtcgcacggggttccaccgtcctaatggggaatgggtcacatgcttctgttcatggtgttggcacggtagatctgaagtttacttcgggaaagatcgtgcagctgaagaacgtgcagcatgtcccttctatcgacaggaatcttgttagtggctcccgtctgactagagacggatttaagttggtttttgagtctaataaagtagtcgtgtctaaacatggatattttattggtaaaggttatgagtgcggaggcctgttccgcttttccctttctgatttctgcaataagtctgtgaaccatatttgtggcagtgtggatgatgaggctaatgtttggcattcacgtttatgtcatattaattttggcttgatgtctcggctttccagcatgtgtttaattcctaagttttccattgtcaaaggttctaagtgccatagttgtgtgcaatcgaagcaacctcgcaagcctcacaaggctgccgaggagagaaacttggcaccactagaactcctacattcagatctttgtgaaatgaatggggtgttgacgaagggtggaaaacgatatttcatgacattgattgatgatgctactagattttgctatgtgtacttgttgaaaacgaaagacgaggctctagactattttaaaatttataaggcagaggttgaaaatcaacttgacagaaagataaaaaggcttaggtctgatcgtggtggagagtttttctcgaacgagtttgacttattctgtgaggaacatggcatcatacatgagaggacgcctccctattctcccgagtctaatgggattgctgaaaggaagaaccgcacactgactgacttggtgaatgccatgttggacaccgcgggactgcctaaggcatggtggggggaggcattgttgacctcaaatcatgtgttaaacagagttcctaacagaaataaggacaaaacaccatatgagatatggattggtagaaaaccatcactttcttatttgcgcacatgggggtgcttggcgaaagtcaatgtaccaataacgaagaagcgcaaacttggacctaagactgtggactgtgtttttctgggatatgctcatcatagcattgcctatagatttttaatagttaaatccgaggtaccggacatgcatgttggtacaattatggagtctcgtgatgctaccttctttgagagctttttcccaatgaaggatacacatagtggttcgaaccaaccctctgaaataattcccagttcaatcacaccaccagaacaaactgaacatacacatgaacttgtctctgaggaggatgtcagtgaagctcctcgaaggagtaagagacaaaggacggctaagtcttttggtgatgatttcactgtgtacctcgtggatgacactcctaagtcaatttcagaagcatatgcatctcctgatgcagactactggaaggaggctgtccgtagtgaaatggattccattatcgctaacgggacttgggaggtgacagagcgaccctatgggtgtaaacctgtggggtgcaagtgggtgttcaagaagaagcttaggcctgacggtactattgaaaagtacaaggctcggcttgttgctaagggctatactcagaaagaaggcgaagatttctttgacacttactcacctgttgctagattgaccacaattcgtgtgctactttccctagcagcctcacatggtcttctcgttcatcaaatggacgttaagacagcttttcttaatggagagctggatgaggagatctatatggatcaacctgatgggtttgtacttgaaggtcaagaaggcaaagtgtgcaaattgttgaagtctttgtatggtctgaaacaagctcctaagcaatggcatgagaaatttgacaaaacattgacatctgcaggctttgcagtcaatgaggcagataaatgtgtgtactatcgcaatggtgggggtgagggagttattttgtgcttgtatgttgacgacatactgatatttgggacaaacattgaggtgataaatgaggttaaatcattcttgtctcaaaattttgatatgaaagatttgggagtagctgatgttattttaaacattaagctaattagaggtgagaatgggattacactcttgcagtctcattatgtggagaagatcttgaatcgctttggctacattgatagtaagccttctccaacaccttatgattctagcttgtcgcttcgcaagaacaagagaattgctaggaatcaactggaatactcccaaatcattggctcgttgatgtacctggctagtgcaactaggcctgatatctcctttgctgtgagcaagttgagccgatttacctctaatccgggagatgatcactggcgtgcgcttgagcgagtaatgcgctatctgaaaggtactgtggaattggggcttcactatactgggtatcctgcggtactggagggttatagtgattctaactggatctctgatgtggatgagatcaaagccactagtggatatgttttcacactgggtggtggtgctgtttcatggaggtcttgcaaacagacaattttgacgaggtcaaccatggaagcagagctaacggcactggatactgctactgttgaggcagaatggttgcgtgatctattaatggatctgcctgttgttgaaaaaccggtgccggctatccttatgaactgtgacaatcaaacgacatgtgaaaagacgattgaagtctgtcaggaaattaagaaactccggagttataacgttggattacatccaaacagcgagaaacctggcagatcccttcacgaagggactatcacgaaatgtgatagacaatgcatcgaaggagatgggtttgagacccatagcattcttgaaggaactcacctttgtgagcttgactgttggtcgcagtccatgaagattttgggtgaatcttctaggaagcttactaaagacctaggagtatga

SEQ ID NO: 14982 - DNA, 4968 bp, Oryza sativa
  Clone ID: TFbOSC400772j.C1.o45.fg
atggcacctcgcaagccgaaccccgcttccgcgacaggccctgatcccggccggatcgacgacgactccaccgcctttctaggggcttcacttgtggacgacgatgagctggcgaagcttgtcagcgccggccctctggtggaggggcaggccttcctcccgggaaaggccgtggtgccgaaacccggcgacaactggacggtggtttttgccgtattttttggggcgggccttcggttttcatgcaacgttttgttgctggagatccttcgcctcttccagacacttgcgaaaagtttcgaccaagcagccggtctttccgtcacctcggtgagtactggcaaacctgaaggagttcttactgctgaacagcagaagcaattcgaggaagccactactctctttgtgggatgcattcttagcgttcttggcgatcgtctggtcgaggtgtatatgcatatgaccgacgctaaggagttgtgggatgcactgaatactaaattcggtgctactgatgctagcaatgatctgtatatcatggagcagtttcatgactacaaaatggctgacaaccgttctgtagtcgaacaggctcatgagatacaaaccatggctaaggaactcgaactccttaagtgtgtcttacccgacaaatttgtggccgggtgcattattgcaaaactaccttcatcttggagaagtttcggtactgcactcaaacacaagagacaggaatacttcgttgaggggttgatagcgtctcttgatgttgaggagaaagctcgggaaaaagatgccgcgtctaagggcgatggtgggcagtccagtgccaatgttgtgcacaaggcccagaacaagagcaaggggaaatacaaagctcagcagaccaccaacttcaagaagcagaagaacaacaacaacaatcctaatcaggatgagaggacttgctttgtgtgtggccaagttggtcatctggctaggaagtgtccacagcgcaaggggatgaaggcacctgcagggcagacttctaagtctgctaatgtgaccattggcaacactggagatggaagcgggtatggtaatttacctactgtttttttagttaatcaatctactaattggtgggttgatactggggccaatgtacatgtttgtgctgacatctcattgttttcttcttatcaggtcgcacggggttccaccgacctaatggggaatgggtcacatgcttctgttcatggtgttggcacggtagatctgaagtttacttcgggaaagatcgtgcagctgaagaacgtgcagcatgtcccttctatcgacaggaatcttgttagtggctcccgtctgactagagacggatttaagttggtttttgagtctaataaagtagtcgtgtctaaacatggatattttattggtaaaggttatgagtgcggaggcctgttctgtttttccctttctgatttctgcaataagtctgtgaaccatatttgtggcagtgtggatgatgaggctaatgtttggcattcacgtttatgtcatattaattttggcttgatgtctcggctttccagcatgtgtttaattcctaagttttccattgtcaaaggttctaagtgccatagttgtgtgcaatcgaagcaacctcgcaagcctcacaaggctgccaaggagagaaacttggcaccactagaactcctacattcagatctttgtgaaatgaatggggtgttgacaaatggtggaaaacgatatttcatgacattgattgatgatgctactagattttgctatgtgtacttgttgaaaacgaaagacgaggctctagactattttaaaatttataaggcagaagttgaaaatcaacttgacagaaagataaaaaggcttaggtctgatcgtggtggagagtttttctcgaacgaatttgacttattctgtgaggaacatggcatcatacatgagaggacgcctccctattctcccgagtctaatgggattgctgaaaggaagaatcgcacgctgactgacttggtgaatgccatgttggacaccgcgggactgcctaaggcatggtggggggaggcattgttgacctcaaatcatgtgttaaacagagttcctaacagaaataaggacaaaacaccatatgagatatggattggtagaaaaccatcactttcttatttgcgcacatgggggtgcttggcgaaagtcaatgtaccaataacgaagaagcgcaaacttggacctaagactgtggactgtgtttttctgggatatgctcatcatagcattgcctatagatttttaatagttaaatccgaggtaccagacatgcatgttggtacaattatggagtctcgtgattctatcttctttgagagctttttcccaatgaaggatacacatagtggttcgaaccaaccctttgaaataattcccagttcaatcacaccaccaaaacaaactgaacatacacatgaacttgtctctgaggaggatgtcagtgaagctcctcgaaggagtaagagacaaaggacggctaagtcttttggtgatgatttcactgtgttcctcgtggatgacactcctaagtcaatttcagaagcatatgcatctcctgatgcagactactggaaggaggctgtccgtagtgaaatggattccattatcgctaacggaacttgggaggtgatagagctaccctatgggtgtaaacctatggggtgcaagtgggtgttcaagaagaagcttaggcctgacggtactattgaaaagtacaaggctcggcttgttgctaagggctatactcagaaagaaggcgaagatttctttgacacttactcacctgttgctagattgaccacaattcgtgtgctactttccctagcagcctcacatggtcttctcgttcatcaaatggacgttaagacagcttttcttaatggagagctggatgaggagatctatatggatcaacctgatgggtttgtagttgaaggtcaagaaggcaaagtgtgcaaattgttgaagtctttgtatggtctgaaacaagctcctaagcaatggcatgagaaatttgacaaaacattgacatctgcaggctttgcagtcaatgaggcagataaatgtgtgtactatcgccatggtgggggtgagggagttattttgtgcttgtatgttgacgacatactgatatttgggacaaaccttgaggtgataaatgaggttaaatcattcttgtctcaaaattttgatatgaaggatttgggagtagctgatgttatcttaaacattaagctaattagaggtgagaatgggattacactcttgcagtcccattatgtggagaagatcttgaatcgctttggctacattgatagtaagccttctccaacaccttatgatcctagcttgttgcttcgcaagaacaagagaattgctaggaatcaactggaatactcccaaatcattggctcgttgatgtacctggctagtgcaactaggcctgatatctcctttgctgtgagcaagttgagccgatttacctctaatccgggagatgatcactggcgtgcgcttgagcgagtaatgcgctatctgaaaggtactgtggaattggggcttcactatactgggtatcctgcggtactggagggttatagtgattctaactggatctctgatgtggatgagatcaaagccactagtggatatgttttcacactgggtggtggtgctgtttcatggaggtcttgcaaacagaccattttgacgaggtcaaccatggaagcagagctaacggcactggatactgctactgttgaggcagaatggctgcgtgatctattaatggatctgcctgttgttgaaaaaccggtgccggctatccttatgaactgtgacaatcaaacgacatgtgaaaagacgattgaagtctgtcaggaaattaagaaactccggagttataacgttggattacatccaaacagcgagaaacctggcagatcccttcacgaagggactatcacgaaatgtgatagacaatgtatcgaaggagatgggtttgagacccataaagaggaagcaaacaagagattgcaaggggttcaaataactaccacagctccaattataagccaccttttgtttgctgatgatagcttgttactattcaaagctactagtgtttgtgcagatgcagtgagtagagttttaactaactattgtgcagcttccggacaactggtcaacttttctaagtcctgcattttcttcagcaagaagtgtgatatggccatccgtgaggacatcaaacgaaaggttggaatgactaatgaatctataacagatcgctatttgggtttgccaacggatgtgggtagagccaaggaaggaaaatttaaatacttgaaggacagagtgtggaaaagagtgcagggatggatggagaaaacactttcagttggaggtaaagaagtccttattaaatcaatagttcaagccatcccaacttattcaatgagttgtttccgtttacccatgggcctttgcaaccatataaattctttaatccggaaattttggtgggcaagtaaacaaggttcaaggaaaaccaattgggtagcatgggacaagatgactgtgcctaagtttcttggtggaatgggatttagggacataaatattttcaatctagtattgcttgccaagcaagggtggagaatcttgcagtatcctaattcactagcagcaagagttttgaaagctgtctatttttcaaatggtgacttcctgaatgctggtttgggaagtaggccatcacatacttggcgtgctattattgaaggtcgtgaaattcttaaactaggaattattcgaaggattggaagtggaaaagatacttttatctgggatgataattggattccaagagattggatgcttcgaccaatcagggcctaa

SEQ ID NO: 14983 - DNA, 3921 bp, Oryza sativa
  Clone ID: TFbOSC400773j.C1.o24.fg
atggctggttttgccgatgcactgaggccggataaattcaccggtgtgcattttaagagatggcagatcagggtcactctgtggctgacagctatgaaatgcttctggcagaagcaattcgaggaagccactactctctttgtgggatgcattcttagcgttcttggcgatcgtctggtcgaggtgtatatgcatatgaccgacgctaaggagttgtgggatgcactgaatactaaattcggtgctactgatgctagcaatgatctgtatatcatggagcagtttcatgactacaaaatggctgacaaccgttctgtagtcgaacaggctcatgagatacaaaccatggctaaggaactcgaactccttaagtgtgtcttacccgacaaatttgtggccgggtgcattattgcaaaacttcctccatcttggaggagtttcggtactgcactcaaacacaagagacaggaatactccgttgaggggttgattgcgtctcttgatgttgaggagaaagctcgggaaaaagatgccgcgtctaagggcgatggtgggcagtccagtgccaatgttgtgcacaaggcccagaacaagagcaaggggaaatacaaagctcagcagaccaccaacttcaagaagcagaagaagaacaacaacaatcctaatcaggatgagaggacttgctttgtgtgtggccaagttggtcatctggctaggaagtgtccacaacgcaaggggatgaaggcacctgcagggcagacttctaagtctgctaatgtgaccattggcaacactggagatggaagcgggtatggtaatttacctactgttttttcagttaatcaatctactaattggtggattgatactggggccaatgtacatgtttgtgctgacatctcattgttttcttcttatcaggtcgcacggggttccaccgtcctaatggggaatgggtcacatgcttctgttcatggtgttggcacggtagatctgaagtttacttcgggaaagatcgtgcagctgaagaacgtgcagcatgtcccttctatcgacaggaatcttgttagtggctcccgtctgactagagacggatttaagttggtttttgagtctaataaagtagtcgtgtctaaacatggatattttattggtaaaggttatgagtgcggaggcctgttccgcttttccctttctgatttctgcaataagtctgtgaaccatatttgtggcagtgtggatgatgaggctaatgtttggcattcacgtttatgtcatattaattttggcttgatgtctcggctttccagcatgtgtttaattcctaagttttccattgtcaaaggttctaagtgccatagttgtgtgcaatcgaagcaacctcgcaagcctcacaaggctgccgaggagagaaacttggcaccactagaactcttacattcagatctttgtgaaatgaatggggtgttgacgaagggtggaaaacgatatttcatgacattgattgatgatgctactagattttgctatgtgtacttgttgaaaacgaaagacgaggctctagactattttaaaatttataaggcagaagttgaaaatcaacttgacagaaagataaaaaggcttaggtctgatcgtggtggagagtttttctcgaacgagtttgacttattctgtgaggaacatggcatcatacatgagaggacgcctccctattctcccgagtctaatgggattgctgaaaggaagaaccgcacactgactgacttggtgaatgccatgttggacaccgcgggactgcctaaggcatggtggggggaggcattgttgacctcaaatcatgtgttaaacagagttcctaacagaaataaggacaaaacaccatatgagatatggattggtagaaaaccatcactttcttatttgcgcacatgggggtgcttggcgaaagtcaatgtaccaataacgaagaagcgcaaacttggacctaagactgtggactgtgtttttctgggatatgctcatcatagcattgcctatagatttttaatagttaaatccgaggtaccggacatgcatgttggtacaattatggagtctcgtgatgctaccttctttgagagcttttttccaatgaaggatacacatagtggttcgaaccaaccctctgaaataattcccagttcaatcacaccaccagaacaaactgaacatacacatgaacttgtctctgaggaggatgtcagtgaagctcctcgaaggagtaagagacaaaggacggctaagtcttttggtgatgatttcactgtgtacctcgtggatgacactcctaagtcaatttcagaagcatatgcatctcctgatgcagactactggaaggaggctgtccgtagtgaaatggattccattatcgctaacgggacttgggaggtgacagagcgaccctatgggtgtaaacctgtggggtgcaagtgggtgtttaagaagaagcttaggcctgacggtactattgaaaagtacaaggctcggcttgttgctaagggctatactcagaaagaaggcgaagatttttttgacacttactcacctgttgctagattgaccacaattcgtgtgctactttccctagcagcctcacatggtcttctcgttcatcaaatggacgttaagacagcttttcttaatggagagctggatgaggagatctatatggatcaacctgatgggtttgtagttgaaggtcaagaaggcaaagtgtgcaaattgttgaagtctttgtatggtctgaaacaagctcctaagcaatggcatgagaaatttgacaaaacattgacatctgcaggctttgcagtcaatgaggcagataaatgtgtgtactatcgccatggtgggggtgagggagttattttgtgcttgtatgttgacgacatactgatatttgggacaaaccttgaggtgataaatgaggttaaatcattcttgtctcaaaattttgatatgaaagatttgggagtagctgatgttatcttaaacattaagctaattagaggtgagaatgggattactctcttgcagtcccattatgtggagaagatcttgaatcgctttggctacattgatagtaagccttctccaacaccttatgatcctagcttgttgcttcgcaagaacaagagaattgctaggaatcaactggaatactcccaaatcattggctcgttgatgtacctggctagtgcaactaggcctgatatctcctttgctgtgagcaagttgagccgatttacttctaatccgggagatgatcactggcgtgcgcttgagcgagtaatgcgctatctgaaaggtactgtggaattgggacttcactatactgggtatcctgcggtactggagggttatagtgattctaactggatctctgatgtgaatgagatcaaagccactagtggatatgttttcacactgggtggtggtgctgtttcatggaggtcttgcaaacagacaattttgacgaggtcaaccatggaagcagaactaacggtactggatactgctactgttgaggcagaatggctgcgtgatctattaatggatctgcctgttgttgaaaaaccggtgccggctatccttatgaactgtgacaatcaaacgacatgtgaaaagacgattgaagtctgtcaggaaattaagaaactccggagttataacgttggattacatccaaacagcgagaaacctggcagatcccttcacgaagggactatcacgaaatgtgatagacaatgcatcgaaggagatgggtttgagacccatagcattcttgaaggaactcacctttgtgagcttgactgttggtcgcagtctatgaagattttgggtgaatcttctaggaagcttactaaagacctaggagtatga

SEQ ID NO: 14984 - DNA, 3870 bp, Oryza sativa
  Clone ID: TFbOSC400800j.C1.o51.fg
atggctggttttgccgatgcactgaggccggataaattcaccggtgtgcattttaagagatggcagatcagggtcactatgtggctgacagctatgaaatgcttctgggtgagtactggcaaacctgaaggagttcttactgctgaacagcagaagcaattcgaggaagccactactctctttgtgggatgcattcttagcgttcttgtgcgatcgtcatggtcgacggtgtttcatgactacaaaatggctgacaaccgttctgtagtcgaacaggctcatgagatacaaaccatggctaaggaactcgaactccttaagtgtgtcttacccgacaaatttgtggccgggtgcattattgcaaaacttcctccatcttggaggagtttcggtactgcactcaaacacaagagacaggaatactccgttgaggggttgattgcgtctcttgatgttgaggagaaagctcgggaaaaagatgccgcgtctaagggcgatggtgggcagtccagtgccaatgttgtgcacaaggcccagaacaagagcaaggggaaatacaaagctcagcagaccaccaacttcaagaagcagaagaagaacaaccacaatcctaatcaggatgagaggacttgctttgtgtgtggccaagttggtcatctggctaggaagtgtccacaacgcaaggggatgaaggcacctgcagggcagacttctaagtctgctaatgtgaccattggcaacactggagatggaagcgggtatggtaatttacctagtgttttttcagttaatcaatctactaattggtgggttgatactggggccaatgtacatgtttgtgctgacatctcattgttttcttcttatcaggtcgcacggggttccaccgtcctaatggggaatgggtcacatgcttctgttcatggtgttggcacggtagatctgaagtttacttcgggaaagatcgtgcagctgaagaacgtgcagcatgtcccttctattgacaggaatcttgttagtggctcccgtctgactagagacggatttaagttggtttttgagtctaataaagtagtcgtgtctaaacatggatattttattggtaaaggttatgagtgcggaggcctgttccgcttttccctttctgatttctgcaataagtctgtgaaccatatttgtggcagtgtggatgatgaggctaatgtttggcattcacgtttatgtcatattaattttggcttgatgtctcggctttccagcatgtgtttaattcctaagttttccattgtcaaaggttctaagtgccatagttgtgtgcaatcgaagcaacctcgcaagcctcacaaggctgccgaggagagaaacttggcaccactagaactcctacattcagatctttgtgaaatgaatggggtgttgacgaagggtggaaaacgatatttcatgacattgattgatgatgctactagattttgctatgtgtacttgttgaaaacgaaagacgaggctctagactattttaaaatttataaggcagaagttgaaaatcaacttgacagaaggataaataggcttaggtctgatcgtggtggagagtttttctcgaacgagtttgacttattctgtgaggaacatggcatcatacatgagaggacgcctccctattctcccgagtctaatgggattgctgaaaggaagaaccgcacactgactgacttggtgaatgccatgttggacaccgccggactgcctaaggcatggtggggggaggcattgttgacctcaaattatgtgttaaacagagttcctaacagaaataaggacaaaacaccatatgagatatggattggtagaaaaccatcactttcttatttgcgcacatgggggtgcttggcgaaagtcaatgtaccaataacgaagaagcgcaaacttggacctaagactgtggactgtgtttttctgggatatgctcatcatagcattgcctatagatttttaatagttaaatccgaggtaccggacatgcatgttggtacaattatggagtctcgtgatgctaccttctttgagagcttttttccaatgaaggatacacatagtggttcgaaccaaccctctgaaataattcccagttcaatcacaccaccagaacaaactgaacatacacatgaacttgtctctgaggaggatgtcagtgaagctcctcgaaggagtaagagacaaaggacggctaagtcttttggtgatgatttcactgtgtacctcgtggatgacactcctaagtcaatttcagaagcatatgcatctcctgatgcagactactggaaggaggctgtccgtagtgaaatggattccattatcgctaacgggacttgggaggtgacagagcgaccctatgggtgtaaacctgtggggtgcaagtgggtgttcaagaagaagcttaggcctgacggtactattgaaaagtacaaggctcggcttgttgctaagggctatactcagaaagaaggcgaagatttctttgacacttactcacctgttgctagattgaccacaattcgtgtgctactttccctagcagcctcacatggtcttctcgttcatcaaatggacgttaagacagcttttcttaatggagagctggatgaggagatctatatggatcaacctgatgggtttgtagttgaaggtcaagaaggcaaagtgtgcaaattgttgaagtctttgtatggtctgaaacaagctcctaagcaatggcatgagaaatttgacaaaacattgacatctgcaggctttgcagtcaatgaggcagataaatgtgtgtactatcgccatggtgggggtgagggagttattttgtgcttgtatgttgacgacatactgatatttgggacaaaccttgaggtgataaatgaggttaaatcattcttgtctcaaaattttgatatgaaagatttgggagtagctgatgttatcttaaacattaagctaattagaggtgagaatgggattactctcttgcagtcccattatgtggagaagatcttgaatcgctttggctacattgatagtaagccttctccaacaccttatgatcctagcttgttgcttcgcaagaacaagagaattgctaggaatcaactggaatactcccaaatcattggctcgttgatgtacctggctagtgcaactaggcctgatatctcctttgctgtgagcaagttgagccgatttacttctaatccgggagatgatcactggcgtgtgcttgagcgagtaatgcgctatctgaaaggtactgtggaattgggacttcactatactgggtatcctgcggtactggagggttatagtgattctaactggatctctgatgtggatgagatcaaagccactagtggatatgttttcacactgggtggtggtgctgtttcatggaggtcttgcaaacagacaattttgacgaggtcaaccatggaagcagaactaacggcactggatactgctactgttgaggcagaatggctgcgtgatctattaatggatctgcctgttgttgaaaaaccggtgccggctatccttatgaactgtgacaatcaaacgacatgtgaaaagacgattgaagtctgtcaggaaattaagaaactccggagttataacgttggattacatccaaacagcgagaaacctggcagatcccttcacgaagggactatcacgaaatgtgatagacaatgcatcgaaggagatgggtttgagacccatagcattcttgaaggaactcacctttgtgagcttgactgttggtcgcagtctatgaagattttgggtgaatcttctaggaagcttactaaagacctaggagtatga

SEQ ID NO: 14985 - DNA, 3909 bp, Oryza sativa
  Clone ID: TFbOSC400978j.C1.o6.fg
atggctggttttgccgatgcactgaggccggataaattcaccggtgtgcattttaagagatggcagatcagggtcactctgtggctgacagctatgaaatgcttctgggtgagtactggcaaacctgaaggagttcttactgctgaacagcagaagcaattcgaggaagccactactctctttgtgggatgcattcttagcgttcttggcgatcgtctggtcgaggtgtatatgcatatgaccgacgctaaggagttgtgggatgcactgaatactaaattcggtgctactgatgctagcaatgatctgtatatcatggagcagtttcatgactacaaaatggctgacaaccgttctgtagtcgaacagtctcatgagatacaaaccatggctaaggaactcgaactccttaagtgtgtcttacccgacaaatttgtggccgggtgcattattgcaaaactacctccatcttggaggagtttcggtactgcactcaaacacaagagacaggaatactccgttgaggggttgattgcgtctcttgatgttgaggagaaagctcgggaaaaagatgccgcgtctaagggcgatggtgggcagtccagtgccaatgttgtgcacaaggcccagaacaagagcaaggggaaatacaaagctcagcagaccaccaacttcaagaagcagaagaagaacaacaacaatcctaatcaggatgagaggacttgctttgtgtgtggccaagttggtcatctggctaggaagtgtccacagcgcaaggggatgaaggcacctgcagggcagacttctaagtctgctaatgtgaccattggcaacactggagatggaagcgggtatggtaatttacctactgttttttcagttaatcaatctactaattggtgggttgatactggggccaatgtacatgtttgtgctgacatctcattgttttcttcttatcaggtcgcacggggttccaccgttctaatgtggaatgggtcacatgcttctgttcatggtgttggcacggtagatctgaagtttacttcgggaaagatcgtgcagctgaagaacgtgcagcatgtcccttctatcgacaggaatcttgttagtggctcccgtctgactagagacggatttaagttggtttttgagtctaataaagtagtcgtgtctaaacatggatattttattggtaaaggttatgagtgcggaggcctgttccgcttttccctttctgatttctgcaataagtctgtgaaccatatttgtggcagtgtggatgatgaggctattgtttggcattcacgtttatgtcatattaattttggcttgatgtctcggctttccagcatgtgtttaattcctaagttttccattgtcaaaggttctaagtgccatagttgtgtgcaatcgaagcaacctcgcaagcctcacaaggctgccgaggagagaaacttggcaccactagaactcctacattcagatctttgtgaaatgaatggggtgttgacgaagggtggaaaacgatatttcatgacattgattgatgatgctactagattttgctacgtgtacttgttgaaaacgaaagacgaggctctagactattttaaaatttataaggcagaagttgaaaatcaacttgacagaaagataaaaaggcttaggtctgatcgtggtggagagtttttctcgaacgagtttgacttattctgtgaggaacatggcatcatacatgagaggacgcctccctattctcccgagtctaatgggattgctgaaaggaagaaccgcacactgactgacttggtgaatgccatgttggacaccgcgggactgcctaaggcatggtggggggaggcattgttgacctcaaatcatgtgttaaacagagttcctaacagaaataaggacaaaacaccatatgagatatggattggtagaaaaccatcactttcttatttgcgcacatgggggtgcttggcgaaagtcaatgtaccaataacgaagaagcgcaaacttggacctaagactgtggactgtgtttttctgggatatgctcatcatagcattgcctatagatttttaatagttaaatccgagataccggacatgcatgttggtacaattatggagtctcgtgatgctaccttctttgagagctttttcccaatgaaggatacacatagtggttcgaaccaaccctctgaaataattcccagtttaattacaccaccagaacaaactgaacatacacatgaacttgtctctgaggaggatgtcagtgaagctcctcgaaggagtaagagacaaaggacggctaagtcttttggtgatgatttcactgtgtacctcgtggatgacactcctaagtcaatttcagaagcatatgcatctcctgatgcagactactggaaggaggctgtccgtagtgaaatggattccattatcgctaacgggacttgggaggtgacagagcgaccctatgggtgtaaacctgtggggtgcaagtgggtgttcaagaagaagcttaggcctgacggtactattgaaaagtacaaggctcggcttgttgctaagggctatactcagaaagaaggcgaagatttctttgacacttactcacctgttgctagattgaccacaattcatgtgctactttccctagcagcctcacatggtcttctcgttcatcaaatggacgttaagacagcttttcttaatggagagctggatgaggagatctatatggatcaacctgatgggtttgtagttgaaggtcaagaaggcaaagtgtgcaaattgttgaagtctttgtatggtctgaaacaagctcctaagcaatggcatgagaaatttgacaaaacattgacatctgcaggctttgcagtcaatgaggcagataaatgtgtgtactatcgccatggtgggggtgagggagttattttgtgcttgtatgttgacgacatactgatatttgggacaaaccttgaggtgataaatgaggttaaatcattcttgtctcaaaattttgatatgaaagatttgggagtagctgatgttatcttaaacattaagctaattagaggtgagaatgggattacactcttgcagtcccattatgtagagaagatcttgaatcgctttggctacattgatagtaagccttctccaacaccttatgatcctagcttgttgcttcgcaagaacaagagaattgctaggaatcaactggaatactcccaaatcattggctcgttgatgtacctggctagtgcaactaggcctgatatctcctttgctgtgagcaagttgagccgatttacctctaatccgggagatgatcactggcgtgcgcttgagcgagtaatgcgctatctgaaaggtactgtggaattggggcttcactatactgggtatcctgcggtactggagggttatagtgattctaactggatctctgatgtggatgagatcaaagccactagtggatatgttttcacactgggtggtggtgctgtttcatggaggtcttgcaaacagacaattttgacgaggtcaaccatggaagcagagctaacggcactggatactgctactgttgaggcagaatggctgcgtgatctattaatggatctgcctgttgttgaaaaaccggtgccggctatccttatgaactgtgacaatcaaacggtaattgtcaaagtgaatagttctaaggataatatgaaatcgtctagacatgtgaaaagacgattgaagtctgttaggaaattaagaaactccggagttataacgttggattacatccaaacagcgagaaacctggcagatcccttcacgaagggactatcacgaaatgtgatagacaatgcatcgaaggagatgggtttgagacccatgtga

SEQ ID NO: 14986 - DNA, 5433 bp, Oryza sativa
  Clone ID: TFbOSC401035j.C1.o18.fg
atgtctaaacgaaggggcaattgctcgagctcaaatgaagagaagaaaacttgcacaaatagtagaaagaaaggagatcagacgcatttttcaggcacaggcatagttgtcagaaacaaagatgaagtaactacaagtattctaacttcagcaaatgtgattagatgttttgatgatgacagcaagatcaatccgtttttggatgttgtgttgcttgcattatcactgcagattcgagttctgcttccaaataagcaacgtgtcatcgggtggatgggacactttgacttaaactacaatattgctgttgtggtgatcaaatatttacctggtttgcgagctgcgtcttttgatcacgaagtgcgatttgggtcccaaagtaaggatatggctggaggaccactcattgatttggatgggaactttgttggcatgaactttttttcggaggagaggactccattcctaccaaggaacaaaatttaccgaagcttggtgcgatcttgcacactctgggttgaaatcgacgatgaatgcacaagcataattgaaagatgcagatctaagatgatacacaacaattttgttggtacctcaagaggagtggcaaaaaaaaggaaccaggagcaaaccgtatccatcacaagcttttcagaaggtacttcagatgaagagaatgaaagtgagactcagaagcttcctgaatattctacaagtgattcagaagatttctgggaggaggaattgtttcctgaacttattaagcccttgccagatgatgaattcacgcagcttttgaaaaaggatctaaagtctcgtaattatcccatgccaatcaggttttgggggggtatgcgcttgaaaaatacttttgaagaggaatttgctgaagatacatggtgcaaactgagtaaaaaggttgctttaaatacatcccaaagtgttgtctcacttgcttcgttcaaagactactccatcccgctcgccggcgtgcaccagcgatcgggagagcaggtctccggaacctctgcctttgacgtcctgcaccgggagaaggcggcaataagatctaatgatgcgttcatgctagttttcatctgtaatgtcatgatttatttatggaataaattaaatccttatatgcccataatctcaacaatccaaaaaccttattataggcactgtgattttactatggctggttttgccgatgcactgaggccggataaattcaccggtgtgcattttaagagatggcagatcagggtcactctgtggctgacagctatgaaatgcttctgggtgagtactggcaaacctgaaggagttcttactgctgaacagcagaagcaattcgaggaagccactactctctttgtgggatgcattcttagcgttcttggcgatcgtctggtcgaggtgtatatgcatatgaccgacgctaaggagttgtgggatgcactgaatactaaattcggtgctactgatgctagcaatgatctgtatatcatggagcagtttcatgactacaaaatggctgacaaccgttctgtagtcgaacaggctcatgagatacaaaccatggctaaggaactcgaactccttaagtgtgtcttacccgacaaatttgtggccgggtgcattattgcaaaacttcctccatcttggaggagtttcggtactgcactcaaacacaagagacaggaatactccgttgaggggttgattgcgtctcttgatgttgaggagaaagctcgggaaaaagatgccgcgtctaagggcgatggtgggcagtccagtgccaatgttgtgcacaaggcccagaacaagagcaaggggaaatacaaagctcagcagaccaccaacttcaagaagcagaagaagaacaacaacaatcctaatcaggatgagaggacttgctttgtgtgtggccaagttggtcatctggctaggaagtgtccacaacgcaaggggatgaaggcacctgcagggcagacttctaagtctgctaatgtgaccattggcaacactggagatggaagcgggtatggtaatttacctactgttttttcagttaatcaatctactaattggtgggttgatactggggccaatgtcgcacggggttccaccgtcctaatggggaatgggtcacatgcttctgttcatggtgttggcacggtagatctgaagtttacttcgggaaagatcgtgcagctgaagaacgtgcagcatgtcccttctatcgacaggaatcttgttagtggctcccgtctgactagagacggatttaagttggtttttgagtctaataaagtagtcgtgtctaaacatggatattttattggtaaaggttatgagtgcggaggcctgttccgcttttccctttctgatttctgcaataagtctgtgaaccatatttgtggcagtgtggatgatgaggctaatgtttggcattcacgtttatgtcatattaattttggcttgatgtctcggctttccagcatgtgtttaattcctaagttttccattgtcaaaggttctaagtgccatagttgtgtgcaatcgaagcaacctcgcaagcctcacaaggctgccgaggagagaaacttggcaccactagaactcctacattcagatctttgtgaaatgaatggggtgttgacgaagggtggaaaacgatatttcatgacattgattgatgatgctactagattttgctatgtgtacttgttgaaaacgaaagacgaggctctagactattttaaaatttataaggcagaagttgaaaatcaacttgacagaaagataaaaaggcttaggtctgatcgtggtggagagtttttctcgaacgagtttgacttattctgtgaggaacatggcatcatacatgagaggacgcctccctattctcccgagtctaatgggattgctgaaaggaagaaccgcacactgactgacttggtgaatgccatgttggacaccgcgggactgcctaaggcatggtggggggaggcattgttgacctcaaatcatgtgttaaacagagttcctaacagaaataaggacaaaacaccatatgagatatggattggtagaaaaccatcactttcttatttgcgcacatgggggtgcttggcgaaagtcaatgtaccaataacgaagaagcgcaaacttggacctaagactgtggactgtgtttttctgggatatgctcatcatagcattgcctatagatttttaatagttaaatccgaggtaccggacatgcatgttggtacaattatggagtctcgtgatgctaccttctttgagagcttttttccaatgaaggatacacatagtggttcgaaccaaccctctgaaataattcccagttcaatcacaccaccagaacaaactgaacatacacatgaacttgtctctgaggaggatgtcagtgaagctcctcgaaggaagcgaccctatgggtgtaaacctgtggggtgcaagtgggtgttcaagaagaagcttaggcctgacggtactattgaaaagtacaaggctcggcttgttgctaagggctatactcagaaagaaggcgaagatttctttgacacttactcacctgttgctagattgaccacaattcgtgtgctactttccctagcagcctcacatggtcttctcgttcatcaaatggacgttaagacagcttttcttaatggagagctggatgaggagatctatatggatcaacctgatgggtttgtagttgaaggtcaagaaggcaaagtgtgcaaattgttgaagtctttgtatggtctgaaacaagctcctaagcaatggcatgagaaatttgacaaaacattgacatctgcaggctttgcagtcaatgaggcagataaatgtgtgtactatcgccatggtgggggtgagggagttattttgtgcttgtatgttgacgacatactgatatttgggacaaaccttgaggtgataaatgtggttaaatcattcttgtctcaaaattttgatatgaaagatttgggagtagctgatgttatcttaaacattaagctaattagaggtgagaatgggattactctcttgcagtcccattatgtggagaagatcttgaatcgctttggctacattgatagtaagccttctccaacaccttatgatcctagcttgttgcttcgcaagaacaagagaattgctaggaatcaactggaatactcccaaatcattggctcgttgatgtacctggctagtgcaactaggcctgatatctcctttgctgtgagcaagttgagccgatttacttctaatccgggagatgatcactggcgtgcgcttgagcgagtaatgcgctatctgaaaggtactatggaattgggacttcactatactgggtatcctgcggtactggagggttatagtgattctaactggatctctgatgtggatgagatcaaagccactagtggatatgttttcacactgggtggtggtgctgtttcatggaggtcttgcaaacagacaattttgacgaggtcaaccatggaagcagaactaacggcactggatactgctactgttgaggcagaatggctgcgtgatctattaatggatctgcctgttgttgaaaaaccggtgccggctatccttatgaactgtgacaatcaaacgacatgtgaaaagacgattgaagtctgtcaggaaattaagaaactccggagttataacgttggattacatccaaacagcgagaaacctggcagatcccttcacgaagggactatcacgaaatgtgatagacaatgcatcgaaggagatgggtttgagacccatagcattcttgaaggaactcacctttgtgagcttgactgttggtcgcagtctatgaagattttgggagaagaaaggttttttgcttgcacaggtgtatttatagacttcaatggatccacatcaagagttgtgacttcagcaagtttggttagaatatctgctgatgaaaacaagattgctgataacctgaagattaaagtgtaccttccaaataaacgaatcgccgtaggcgaattgcagcattgcaatttgagctacaatattgctgtggtcagtgtcaagggtttctgttgtcttcggacagcagaactcgacaaacagatgcaaatcgaacctcatagggaggtagtagctataggacgtatctttgaatcaggcaaattaatggctacaagtgggatattgtctgacgaggaaagcaagcttgactgcagagagcttatgatctccacttgtaaaatcactaaggccggtattggaggaccactgattgattttgatgggaatttcgttggcataaacttctatggaacaaaagaaacacattatctaccacgattaatgatacagagactattgaaggattttgacgggtaa

SEQ ID NO: 14987 - DNA, 3963 bp, Oryza sativa
  Clone ID: TFbOSC401137j.C1.o48.fg
atggctggttttgccgatgcactgaggccggataaattcaccggtgtgcattttaagagatggcagatcagggtcactctgtggctgacagctatgaaatgcttctgggtgagtactggcaaacctgaaggagttcttactgctgaacagcagaagcaattcaaggaagccactactctctttgtgggatgcattcttagcgttcttggcgatcgtctggtcgaggtgtatatgcatatgaccgacgctaaggagttgtgggatgtactgaatactaaattcggtgctactgatgctagcaatgatctgtatatcatggagcagtttcatgactacaagatggctgacaaccgttctgtagtcgaacaggctcatgagatacaaaccatggctaaggaactcgaactcattaagtgtgtcttacccgacaaatttgtggctgggtgcattattgcgaaactacctccatcttggagaagtttcggtactgcactcaaacacaagagacaggaatactccgttgaggggttgatagcgtctcttgatgttgaggagaaagctcgggaaaaagatgccgcgtctaagggcgatggtgggcagtccagcgccaatgttgtgcacaaggcccagaaaaagagcaaggggaaatacaaagctcagcagaccaccaacttcaagaagcagaagaagaacaacaacaatcctaatcaggatgagaggacttgctttgtgtgtggccaagttggtcatctggctaggaagtgtccacaacgcaaggggatgaaggcacctgcagggcagacttctaagtctgctaatgtgaccattggcaacactggagatggaagcgggtatggtaatttacctactgttttttcagttaatcaatctactaattggtgggttgatactggggccaatgtacatgtttgtgctgacatctcattgttttcttcttatcaggtcgcacggggttccaccgtcctaatggggaatgggtcacatgcttctgttcatggtgttggcacggtagatctgaagtttacttcgggaaagatcgtgcagctgaagaacgtgcagcatgtcccttctatcgacatgaatcttgttagtggctcccgtctgactagagacggatttaagttggtttttgagtctaataaagtagtcgtgtctaaacatggatattttattggtaaaggttatgagtgcggaggcctgttccgcttttctctttctgatttctgcaataagtctgtgaaccatatttgtggcagtgtggatgatgaggctaatgtttggcattcacgtttatgtcatattaattttggcttgatgtctcggctttccagcatgtgtttaattcctaagttttccattgtcaaaggttctaagtgccatagttgtgtgcaatcaaagcaacctcgcaagcctcacaaggctgccgaggagagaaacttggcaccactagaactcctacattcagatctttgtgaaatgaatggggtgttgacgaagggtggaaaacgatatttcatgacattcattgatgatgctactagattttgctatgtgtacttgttgaaaacgaaagacgaggctctagactattttaaaatttataaggcagaagttgaaaatcaacttgacagaaagataaaaaggcttaggtctgatcgtggtggagagtttttctcgcacgagtttgacttattttgtggggaacatggcatcatacatgagaggacgcctccctattctcccgagtctaatgggattgctgaaaggaagaaccgcacactgactgacttggtgaatgccatgttagacaccgcgggactgcctaaggcatggtggggggaggcattgttgacctcaaatcatgtgttaaacagagttcctaacagaaataaggacaaaacaccatatgagatatggattggtagaaaaccatcactttcttatttgcgcacatgggggtgcttggcgaaagtcaatgtaccaataacgaagaagcgcaaacttggacctaagactgtggactgtgtctttctgggatatgctcatcatagcattgcctatagatttttaatagttaaatccgaggtactggacatgcatgttggtacaattatggagtctcgtgatgctaccttctttgagagctttttcccaatgaaggatacacatagtggttcgaaccaaccctctgaaataattcccagttcaatcacaccaccagaacaaactgaacatacacatgaacttgtctctgaggaggatgtcagtgaagctcctcgaaggagtaagagacaaaggacggctaagtcttttggtgatgattttactgtgtacctcgtggatgacactcctaagtcaatttcagaagcatatgcatctcctgatgcagactactggaaggaggctgtccatagtgaaatggattccattatcgctaacgggacttgggaggtgacagagcaaccctatgggtgtaaacctgtggggtgcaagtgggtgttcaagaagaagcttaggcctgacggtactattgaaaagtacaaggctcggcttgttgctaagggctatactcagaaagaaggcgaagatttctttgacacttactcacctgttgctagattgaccacaattcgtgtgctactttccctagcagcctcacatggtcttctcgttcatcaaatggacgttaagacagcttttcttaatggagagctggatgaggagatctatatggatcaacctgatgggtttgtagttgaaggtcaagaaggcaaagtgtgcaaattgttgaagtctttgtatggtctgaaacaagctcctaagcaatggcatgagaaatttgacaaaacattgacatctgcaggctttggagtcaatgaggcagataaatgtgtgtactatcgccatggtgggggtgagggagttattttgtgcttgtatgttgacgacatactgatatttgggacaaaccttgaggtgataaatgaggttaaatcattcttgtctcaaaattttgatatgaaagatttgggagtagctgatgttatcttaaacattaagctaattagaggtgagaatgggattacactcttgcagtcccattatgtggagaagatcttgaatcgctttggctacattgatagtaagccttctccaacaccttatgatcctagcttgttgcttcgcaagaacaagagaattgctaggaatcaactggaatactcccaaatcattggctcgttgatgtacctggctagtgcaactaggcctgatatctcctttgctgtgagcaagttgagccgatttacctctaatccgggagatgatcactggcgtgcgcttgagcgagtaatacgctatctgaaaggtactgtggaattggggcttcactatactgggtatcctgcggtactggagggttatagtgattctaactggatctctgatgtggatgagatcaaagccactagtggatatgttttcacactgggtggtggtgctgtttcatggaggtcttgcaaacagacaattttgacgaggtcaaccatggaagcagagctaacggcactggatactgctactgttgaggcagaatggctgcgtgatctattaatggatctgcctgttgttgaaaaaccggtgccggctaatcttatgaactgtgacaatcaaacgacatgtgaaaagacgattgaagtctgtcaggaaattaagaaactccggagttataacgttggattacatccaaatagcgagaaacctggcagatcccttcacgaagggactatcacgaaatgtgatagacaatgcatcgaaggagatgggtttgagacccatagcattcttgaaagaactcacctttgtgagcttgactgttggtcgcagtctatgaagattttgggtgaatcttctaggaagcttactaaagacctaggagtatga

SEQ ID NO: 14988 - DNA, 3909 bp, Oryza sativa
  Clone ID: TFbOSC401186j.C1.o1.fg
atggctggttttgccgatgcactgaggccggataaattcaccggtgtgcattttaagagatggcagatcagggtcactctgtggctgacagctatgaaatgcttctgggtgagtactggcaaacctgaaggagttcttactgctgaacagcagaagcaattcgaggaagccactactctctttgtgggatgcattcttagcgttcttggcgatcgtctggtcgaggtgtatatgcatatgaccgacgctaaggagttgtgggatgcactgaatactaaattcggtgctactgatgctagcaatgatttgtatatcatggagcagtttcatgactacaagatggctgacaaccgttctgtagtcgaacaggctcatgagataaaaaccatggctaaggaactcgaactccttaagtgtgtcttacccgacaaatttgtggccgggtgcattattgcaaaactacctccatcttggagaagtttcggtgctgcactcaaacacaagagacaggaatactccgttgaggggttgattgcgtctcttgatgttgaggagaaagctcgggaaaaagatgccgcgtctaagggcgatggtgggcagtccagtgccaatgttgtgcacaaggcccagaacaagagcaaggggaaatacaaagctcagcagaccaccaacttcaagaagcagaagaagaacaacaacaatcctaatcaggatgagaggacttgctttgtgtgtggccaagttggtcatctggctagaaagtgtccacagcgcaaggggatgaaggcacctgcagggcagacttctaagtctgctaatgtgaccattggcaacactggagatggaagcgggtatggtaatttacctactgttttttcagttaatcaatctactaattggtgggttgatactggggccaatgtacatgtttgtgctgacatctcattgttttcttcttatcaggtcgcacggggttccaccgtcctaatggggaatgggtcacatgcttctgttcatggtgttggcacggtagatctgaagtttacttcgggaaagatcgtgcagctgaagaacgtgcagcatgtcccttctatcgacaggaatcttgttagtggctcccgtctgactagagacggatttaagttggtttttgagtctaataaagtagtcgtgtctaaacatggatattttattggtaaaggttatgagtgcggaggcctgttccgcttttccctttctgatttctgcaataagtctgtgaaccatatttgtggcagtgtggatgatgaggctaatgtttggcattcacgtttatgtcatattaattttgtcttgatgtctcggctttccagcatgtgtttaattcctaagttttctattgtcaaaggttctaagtgccatagttgtgtgcaatcgaagcaacctcgcaagcctcacaaggctgccgaggagagaaatttggcaccactagaactcttacattcagatctttgtgaaatgaatggggtgttgacgaagggtggaaaacgatatttcatgacattgattgatgatgctactagattttgctatgtgtacttgttgaaaacgaaagacgaggctctagactattttaaaatttataaggcagaagttgaaaatcaacttgacagaaagataaaaaggcttaggtctgatcgtggtggagagtttttctcgaacgagtttgacttattctgtgaggaacatggcatcatacatgagaggacgcctccctattctcccgagtctaatgggattgctgaaaggaagaaccgcacactgactgacttggtgaatgccatgttggacaccgcgggactgcctaaggcatggtggggggaggcattgttgacctcaaatcatgtgttaaacagagttcctaacagaaataaggacaaaacaccatatgagatatggattggtagaaaaccaacactttcttatttgcgcacatgggggtgcttggcgaaagtcaatgtaccaataacgaagaagcgaaaacttggacctaagactgtggactgtgtttttctgggatatgctcatcatagcattgcctatagattttcaatagttaaatctgaggtaccggacatgcatgttggtacaattatggagtctcgtgatgctaccttctttgagagctttttcccaatgaaggatacacatagtggttcgaaccaaccctctgaaataattcccagttcaatcacaccaccagaacaaactgaacatacacatgaacttgtctctgaggaggatgtcagtgaagctcctcgaaggagtaagagacaaaggacggctaagtcttttggtgatgatttcactgtgtacctcgtggatgacactcctaagtcaatttcagaagcatatgcatctcctgatgcagactactggaaggaggctgtccgtagtgaaatggattccattatcgctaacgggacttgggaggtgacagagcgaccctatgggtgtaaacctgtggggtgcaagtgggtgttcaagaagaagcttaggcctgacggtactattgaaaagtacaaggctcggcttgttgctaagggctatactcagaaagaaggcgaagatttctttgacacttactcacatgttgctagattgaccacaattcgtgtgctactttccctagcagcctcacatggtcttctcgttcatcaaatggacgttaagacaacttttcttaatggagagctggatgaggagatctatatgtatcaacctgatggttttgtagttgaaggtcaagaaggcaaagtgtgcaaattgttgaagtctttgtatggtctgaaacaagctcctaagcaatggcatgagaaatttgacaaaacattgacatctgcaggctttgcagtcaatgaggcagataaatgtgtgtactatcgccatggtaggggtgagggagttattttgtgcttgtatgttgacgacatactgatatttaagacaaatcttgaggtgataaatgaggttaaatcattcttgtctcaaaattttgatatgaaggatttgggagtagctgatgttatcttaaacattaagctaattagaggtgagaatgggattacactcttgcagtcccattatgtggagaagatcttgaatcgttttggctatattgatagtaagccttctccaacaccttatgatcctagcttgttgcttcgcaagaacaagagaattgctaggaatcaactggaatactcccaaatcattggctcgttgatgtacctggctagtgcaactaggcctgatatctcctttgctgtgagcaagttgagccgatttacctctaatccgggagatgatcactggcgtgcgcttgagcgagtaatgcgctatctgaaaggtactgtggaattggggcttcactatactgggtatcctgcggtactggagggttatagtgattctaactggatctctgatgtggatgagatcaaagccactagtggatatgttttcacactgggtggtggtgctgtttcatggaggtcttgcaaacagaccattttgacgaggtcaaccatggaagcagagctaacggcactggatactgctactgttgaggcagaatggctgcgtgatctattaatggatctgcctgttgttgaaaaaccggtgtcggctatccttatgaactgtgacaatcaaacggtaattgtcaaagtgaatagttctaaggataatatgaaatcgtctagacatgtgaaaagacgattgaagtctgtcaggaaattaagaaactccggagttataacgttggattacatccaaacagcgagaaacctggcagatcctttcacgaagggactatcacgaaatgtgatagacaatgcatcgaaggagatgggtttgagacccatgtga

SEQ ID NO: 14989 - DNA, 3963 bp, Oryza sativa
  Clone ID: TFbOSC401254j.C1.o2.fg
atggctggttttgccgatgcactgaggccggataaattcaccggtgtgcattttaagagatggcagatcagggtcactctgtggctgacagctatgaaatgcttctgggtgagtactggcaaacctgaaggagttcttactgctgaacagcagaagcaattcgaggaagccactactctctttgtgggatgcattcttagcgttcttggcgatcgtctggtcgaggtgtatatgcatatgaccgacgctaaggagttgtgggatgcactgaatactaaattcggtgctactgatgctagcaatgatctgtatatcatggagcagtttcatgactacaaaatggctgacaaccgttctgtagtcgaacaggctcatgagatacaaaccatggctaaggaactcgaactccttaagtgtgtcttacccgacaaatttgtggccgggtgcattattgcaaaacttcctccatcttggaggagtttcggtactgcactcaaacacaagagacaggaatactccgttgaggggttgattgcgtctcttgatgttgaggagaaagctcgggaaaaagatgccgcgtctaagggcgatggtgggcagtccagtgccaatgttgtgcacaaggcccagaacaagagcaaggggaaatacaaagctcagcagaccaccaacttcaagaagcagaagaagaacaacaacaatcctaatcaggatgagaggacttgctttgtgtgtggccaagttggtcatctggctaggaagtgtccacaacgcaaggggatgaaggcacctgcagggcagacttctaagtctgctaatgtgaccattggcaacactggagatggaagcgggtatggtaatttacctactgttttttcagttaatcaatctactaattggtgggttgatactggggccaatgtacatgtttgtgctgacatctcattgttttcttcttatcaggtcgcacggggttccaccgtcctaatggggaatgggtcacatgcttctgttcatggtgttggcacggtagatctgaagtttacttcgggaaagatcgtgcagctgaagaacgtgcagcatgtcccttctatcgacaggaatcttgttagtggctcccgtctgactagagacggatttaagttggtttttgagtctaataaagtagtcgtgtctaaacatggatattttattggtaaaggttatgagtgcggaggcctgttccgcttttccctttctgatttctgcaataagtctgtgaaccatatttgtggcagtgtggatgatgaggctaatgtttggcattcacgtttatgtcatattaattttggcttgatgtctcggctttccagcatgtgtttaattcctaagttttccattgtcaaaggttctaagtgccatagttgtgtgcaatcgaagcaacctcgcaagcctcacaaggctgccgaggagagaaacttggcaccactagaactcctacattcagatctttgtgaaatgaatggggtgttgacgaagggtggaaaacgatatttcatgacattgattgatgatgctactagattttgctatgtgtacttgttgaaaacgaaagacgaggctctagactattttaaaatttataaggcagaagttgaaaatcaacttgacagaaagataaaaaggcttaggtctgatcgtggtggagagtttttctcgaacgagtttgacttattctgtgaggaacatggcatcatacatgagaggacgcctccctattctcccgagtctaatgggattgctgaaaggaagaaccgcacactgactgacttggtgaatgccatgttggacaccgcgggactgcctaaggcatggtggagggaggcattgttgacctcaaatcatgtgttaaacagagttcctaacagaaataaggacaaaacaccatatgagatatggattggtagaaaaccatcactttcttatttgcgcacatgggggtgcttggcgaaagtcaatgtaccaataacgaagaagcgcaaacttggacctaagactgtggactgtgtttttctgggatatgctcatcatagcattgcctatagatttttaatagttaaatccgaggtaccggacatgcatgttggtacaattatggagtctcgtgatgctaccttctttgagagcttttttccaatgaaggatacacatagtggttcgaaccaaccctctgaaataattcccagttcaatcacaccaccagaacaaactgaacatacacatgaacttgtctctgaggaggatgtcagtgaagctcctcgaaggagtaagagacaaaggacggctaagtcttttggtgatgatttcactgtgtacctcgtggatgacactcctaagtcaatttcagaagcatatgcatctcctgatgcagactactggaaggaggctgtccgtagtgaaatggattccattatcgctaacgggacttgggaggtgacagagcgaccctatgggtgtaaacctgtggggtgcaagtgggtgttcaagaagaagcttaggcctgacggtactattgaaaagtacaaggctcggcttgttgctaagggctatactcagaaagaaggcgaagatttctttgacacttactcacctgttgctagattgaccacaattcgtgtgctactttccctagcagcctcacatggtcttctcgttcatcaaatggacgttaagacagcttttcttaatggagagctggatgaggagatctatatggatcaacctgatgggtttgtagttgaaggtcaagaaggcaaagtgtgcaaattgttgaagtctttgtatggtctgaaacaagctcctaagcaatggcatgagaaatttgacaaaacattgacatctgcaggctttgcagtcaatgaggcagataaatgtgtgtactatcgctatggtgggggtgagggagttattttgtgcttgtatgttgacgacatactgatatttgggacaaaccttgaggtgataaatgaggttaaatcattcttgtctcaaaattttgatatgaaagatttgggagtagctgatgttatcttaaacattaagctaattagaggtgagaatgggattactctcttgcagtcccattatgtggagaagatcttgaatcgctttggctacattgatagtaagccttctccaacaccttatgatcctagcttgttgcttcgcaagaacaagagaattgctaggaatcaactggaatactcccaaatcattggctcgttgatgtacctggctagtgcaactaggcctgatatctcctttgctgtgagcaagttgagccgatttacttctaatccgggagatgatcactggcgtgcgcttgagcgagtaatgcgctatctgaaaggtactgtggaattgggacttcactatactgggtatcctgcggtactggagggttatagtgattctaactggatctctgatgtggatgagatcaaagccactagtggatatgttttcacactgggtggtggtgctgtttcatggaggtcttgcaaacagacaattttgacgaggtcaaccatggaagcagaactaacggcactggatactgctactgttgaggcagaatggctgcgtgatctattaatggatctgcctgttgttgaaaaaccggtgccggctatccttatgaactgtgacaatcaaacgacatgtgaaaagacgattgaagtctgtcaggaaattaagaaactccggagttataacgttggattacatccaaacagcgagaaacctggcagatcccttcacgaagggactatcacgaaatgtgatagacaatgcatcgaaggagatgggtttgagacccatagcattcttgaaggaactcacctttgtgagcttgactgttggtcgcagtctatgaagattttgggtgaatcttctaggaagcttactaaagacctaggagtatga

SEQ ID NO: 14990 - DNA, 3891 bp, Oryza sativa
  Clone ID: TFbOSC401274j.C1.o11.fg
atggctggttttgccgatgcactgaggccggataaattcaccggtgtgcattttaagagatggcagatcagggtcactctgtggctgacagctatgaaatgcttctgggtgagtactggcaaacctgaaggagttcttactgctgaacagcagaagcaattcgaggaagccactactctctttgtgggatgcattcttagcattcttggcgatcgtctggtcgaggtgtatatgcatatgaccgacgctaaggagttgtgggatgcactgaatactaaattcggtgctactgatgctagcaatgatctgtatatcatggagcagtttcatgactacaaaatggctgataaccgttctgtagtcgaacaggctcatgagatacaaaccatggctaaggaactcgaactccttaagtgtgtcttacccgacaaatttgtggccgggtgcattattgcaaaactacctccatcttggaggagtttcggtactgcactcaaacacaagagacaggaatactccgttgaggggttgattgcgtctcttgatgttgaggagaaagctcgggaaaaagatgccgcgtctaagggcgatggtgggcagtccagtgccaatgttgtgcacaaggcccagaacaagagcaaggggaaatacaaagctcagcagaccaccaacttcaagaagcagaagaagaacaacaacaatcctaatcaggatgagaggacttgctttgtgtgtggccaagttggtcatctggctaggaagtgtccacagcgcaaggggatgaaggcacctgcagggcagacttctaagtctgctaatgtgaccattggcaacactggagatggaagcgggtatggtaatttacctactgttttttcagttaatcaatctactaattggtgggttgatactggggccaatgtacatgtttgtgctgacatctcattgttttcttcttatcaggtcgcacggggttccaccgtcctaatggggaatgggtcacatgcttctgttcatggtgttggcacggtagatctgaagtttacttcgggaaagatcgtgcagctgaagaacgtgcagcatgtcccttctatcgacaggaatcttgttagtggctcccgtctgactagagacggatttaagttggtttttgagtctaataaagtagtcgtgtctaaacatggatattttattggtaaaggttatgagtgcggaggcctgttccgcttttccctttctgatttctgcagtaagtctgtgaaccatatttgtggcagtgtggatgatgaggctaatgtttggcattcacgtttatgtcatattaattttggcttgatgtctcggctttccagcatgtgtttaattcctcagttttccattgtcaaaggttctaagtgccatagttgtgtgcaatcaaagcaacctcgcaagcctcacaaggctgccgaggagagaaacttggcaccactagaactcctacattcagatctttgtgaaatgaatagggtgttgacgaagggtggaaaacgatatttcatgacattcattgatgatgctactagattttgctatgtgtacttgttgaaaacgaaagacgaggctctagactattttaaaatttataaggcagaagttgaaaatcaacttgacagaaagataaaaaggcttaggtctgatcgtggtgaagagtttttctcgaacgagtttgacttattctgtgaggaacatggcatcatacatgagatgacgcctccctattctcccgagtctaatgggattgctgaaaggaagaatcgcacactgactgacttggtgaatgccatgttggacaccgcgggactgcctaaggcatggtggggggaggcattgttgacctcaaatcatgtgttaaacagagttcctaacagaaataaggacaaaacaccatatgagatatggattggtagaaaaccatcactttcttatttgcgcacatgggggtgcttggcgaaagtcaatgtaccaataacgaagaagcgcaaacttggacctaagactgtggactgtgtttttctgggatatgctcatcatagcattgcctatagatttttaatagttaaatccgaggtaccggacatgcatgttggtacaattatggagtctcgtgatgctatcttctttgagagctttttcccaatgaaggatacacatagtggttcgaaccaaccatctaaaataattcccagttcaatcacaccaccagaacaaactgaacatacacatgaacttgtctctgaggaggatgtcagtgaagctcctcgaaggagtaagagacaaaggacggctaagtcttttgatgatgatttcactgtgtacctcgtggatgacactcctaagtcaatttcagaagcatatgcatctcctgatgcagactactggaaggaggctgtccgtagtgaaatggattccattatcgctaacgggacttgggaggtgacagagcgaccctatgggtgtaaacctgtggggtgcaagtgggtgttcaagaagaagcttaggcctgacggtactattgaaaactacaaggctcggcttgttgctaagggctatactcagaaagaaggcgaagatttctttgacacttactcacctgttgctagattgaccacaattcgtgtgctactttccctagcagcctcacatggtcttctcgttcatcaaatggacgttaagacagcttttcttaatggagagctggatgaggagatctatatggatcaacctgatgggtttgtagttgaaggtcaagaaggcaaagtgtgcaaattgttgaagtctttgtatggtctaaaacaagctcctaagcaatggcatgagaaatttgacaaaacattgacatctgcaggctttgcagtcaatgaggcagataaatgtgtgtactatcgccatggtgggggtgagggagttattttgtgcttgtatgttgacgacatactgatatttgggacaaaccttgaggtgataaatgaggttaaatcattcttgtctcaaaattttgatatgaaggatttgggagtagctgatgttatcttaaacattaagctaattagaggtgagaatgggattacactcttgcagtcccattatgtggagaagatcttgaatcgctttggctacattgatagtaagccttctccaacaccttatgatcctagcttgttgcttcgcaagaacaagagaattgctaggaatcaactggaatactcccaaatcattggctcgttgatgtgcctggctagtgcaactaggcctgatatctcctttgctgtgagcaagttgagccgatttacctctaatccgggagatgatcactggcgtgcgcttgagcgagtaatgcgctatctgaaaggtactgtggaattggggcttcactatactgggtatcctgcggtactggagggttatagtgattctaactggatctctgatgtggatgagatcaaagccactagtggatatgttttcacactgggtggtggtgctgtttcatggaggtcttgcaaacagaccattttgacgaggtcaaccatggaagcagagctaacggcactggatactgctactgttgaggcagaatggctgcgtgatctattaatggatctgcctgttgttgaaaaaccggtgccggctatccttatgaactgtgacaatcaaacgagcattcttgaaagaactcacctttgtgagcttgactgttggtcgcagtctatgaagattttgggtgaatcttctaggaagcttactaaagacctagaaatgaagggaacatgtgtttgtgctgctgagcagagaacacagaacacagagacacacacgcgaggcatgctcaggcacaggcacagccttaagtga

SEQ ID NO: 14991 - DNA, 3099 bp, Oryza sativa
  Clone ID: TFbOSC401369j.C1.o2.fg
atggctggttttgccgatgcactgaggccggataaattcaccggtgtgcattttaagagatggcagatcagggtcactctgtggctgacagctataaaatgcttctgggtgtatatgcatatgaccgacgctaaggagttgtgggatgcactaaatactaaattcggtgctactgatggtagcaatgatctgtatatcatggagcagtttcatgactacaaaatggctgacaaccgttctgtagtcgaacaggctcatgagatacaaaccatggctaaggaactcgaactccttaagtgtgtcttacccgataaatttgtggccgggtgcattattgcaaaactacctccatcttggaggagtttcggtactgcactcaaacacaagagacaggaatactccgttgaggggttgattgcgtctcttgatgttgaggagaaagctcgggaaaaagatgccgcgtctaagggcgatggtgggcagtccagtgctaatgttgtgcacaaggcccagaacaagagcaaggggaaatacaaagctcagcagaccaccaacttcaagaagcagaagaagaacaacaacaatcctaatcaggatgagaggacttgctttgtgtgtggccaagttggtcatctggctaggaagtgtccacagcgcaaggggatgaaggcacctgcagggcagacttctaagtctgctaatgtgaccattggcaacactggagatggaagcgggtatggtaatttacctactgttttttcagttaatcaatctactaattggtgggttgatactggggccaatgtcgcacggggttccaccgtcctaatggggaatgggtcacatgcttctgttcatggtgttggcacggtagatctgaagtttacttcgggaaagatcgtgcaactgaagaacgtgcagcatgtcccttctatcgacaggaatcttgttagtggctcccgtctgactagagacggatttaagttggtttttgagtctaataaagtagtcgtgtctaaacatggatattttattggtaaaggttatgagtgtggaggcctgttccgcttttccctttctgatttctgcaataagtctgtgaaccatatttgtggcagtgtggatgatgaggctaatgtttggcattcacgtttatgtcatattaattttggcttgatgtctcggctttccagcatgtgtttaattcctaagttttccattgtcaaaggttctaagtgccatagttgtgtgcaatcgaagcaacctcgcaagcctcacaaggctgccgaggagagaaacttggcaccactagaactcctacattcagatctttgtgaaatgaatggggtgttgacgaagggtggaaaacgatatttcatgacattgattgatgatgctactagattttgctatgtgtacttgttgaaaacgaaagacgaggctctagactattttaaaatttataaggcagaagttgaaaatcaacttgacagaaagataaaaaggcttaggtctgatcgtggtggagagtttttctcgaacgagtttgacttattctgtgaggaacatggcatcatacatgagaggacgcctccctattctcccgagtctaatgggattgctgaaaggaagaaccgcacactgactgacttgtgggtgttcaagaagaagcttaggcctgacggtactattgaaaagtacaaggctcggcttgttgctaagggctatactcagaaagaaggcgaagatttctttgacacttactcacctgttgctagattgaccacaattcgtgtgctactttccctagcagcctcacatggtcttctcgttcatcaaatggacgttaagacagcttttcttaatggagagctggatgaggagatctatatggatcaacctgatgggtttgtagttgaaggtcaagaaggcaaagtgtgcaaattgttgaagtctttgtatggtctgaaacaagctcctaagcaatggcatgagaaatttgacaaaacattgacatctgcaggctttgcagtcaatgaggcagataaatgtgtgtactatcgccatggtgggggtgagggagttattttgtgcttgtatgttgacgacatactgatatttgggacaaaccttgaggtgataaatgaggttaaatcattcttgtctcaaaattttgatatgaaagatttgggagtagctgatgttatcttaaacattaagctaattagaggtgagaatgagattacactcttgcagtcccattatgtggagaagatcttgaatcgctttggctacattgatagtaagccttctccaacaccttatgatcctagcttgttgcttcgcaagaacaagagaattgctaggaatcatctggaatactcccaaatcattggctcgttgatgtacctggctagtgcaactaggcctgatatctcctttgctgtgagcaagttgagccgatttacctctaatccgggagatgatcactggcgtgcgcttgagcgagtaatgcgctatctgaaaggtactgtggaattggggcttcactatactgggtatcttgcggtactggagggttatagtgattctaactggatctctgatgtggatgagatcaaagccactagtggatatgttttcacactgggtggtggtgctgtttcatggaggttttgcaaacagacaattttgacgaggtcaaccatggaagcagagctaacggcactggatactgctactgttgaggcagaaaggctgcgtgatctattaatggatctgcctgttgttgaaaaaccggtgccggctatccttatgaactgtgacaatcaaacggtaattgtcaaagtgaatagttctaaggataatatgaaatcgtctagacatgtgaaaagacgattgaagtctgttaggaaattaagaaactccggagttataacgttggattacatccaaacagcgagaaacctggcagatcccttcacgaagggactatcacgaaatgtgatagacaatgcatcgaaggagatgggtttgagacccatagcattcttgaaagaactcacctttgtgagcttgactgttggtcgcagtctatga

SEQ ID NO: 14992 - DNA, 4137 bp, Oryza sativa
  Clone ID: TFbOSC401437j.C1.o27.gm
atgcggaaagcaaacagtcaccggcgaagtttcagccgtgtcacgccactgccgattgtcttcactcttcaggcgccgcccgcgggacgagtggacgacaccgcggaggcggccgggagggagcagtggggcacaccgtcgatgcggcggcggaggaggaggaggacgccggccaccgcgccgcggggggatccggcggggaaagcatttcttggaggtggtggtgggggagggaaggcggcggggaaggggcggcgtgcggacggcagaggacagtgcgctggcgacggggggaggagctgcgcgtgggcggcgggggatggcggcgcgcgggtggcggggggaggagcagcgcgcgggctcccccgtcagtcgccgcggtgggcgttgcggtggcacagtggcgctgggatcgggattgggatcgacctccgcgccgcgctgcagtctaggagcaacctcctcgcgtggtcgacggccgctgaggtcgacagccgccgagactactccatcccgctcgccggcgtgcaccggcgatcgggagagcaggtctccggaacctctgccttcgacgtcctgcaccgggagaaggcggcaataagggtcactctgtggctgacagctatgaaatgcttctgggtgagtactggcaaacctgaaggagttcttactgctgaacagcagaagcaattcgaggaagccactactctctttgtgggatgcattcttagcgttcttggcgatcgtctggtcgaggtgtatatgcatatgaccgacgctaaggagttgtgggatgcactgaatactaaattcggtactactgatgctagtaatgatttgtatatcatggagcagtttcatgactacaagatggctgacaaccgttctgtagtcgaacaggctcatgagatacaaaccatggctaaggaactcgaactccttaagtgtgtcttacccgacaaatttgtggctgggtgcattattgcaaaactacctccatcttggagaagttttggtactgcactcaaacacaagagacaggaatactccgttgaggggttgattgcgtctcttgatgttgaggagaaagctcgggaaaaagatgccgcgtctaagggcgatggtgggcagtccagtgccaatgttgtgcacaaggcccagaacaagagcaaggggaaatacaaagctcagcagaccaccaacttcaagaagcagaagaagaacaacaacaatcctaatcaggatgagaggacttgctttgtgtgtggccaagttggtcatctggctaggaagtgtccacagcgcaaggggatgaaggcacctgcagggcagacttctaagtctgctaatgtgaccattggcaacactggagatggaagcgggtatggtaatttacctactgtcgcacggggttccaccgtcctaatggggaatgggtcacatgcttctgttcatggtgttggcacggtagatctgaagtttacttcggaaaagatcgtgcagctgaagaacatgcagcatgtcccttctatcgacaggaatcttgttagtggctcccgtctgactagagacggatttaagttggtttttgagtctaataaagtagtcgtgtctaaacatggatattttattggtaaaggttatgagtgcggaggcctgttccgcttttccctttctgatttctgcaataagtctgtgaaccatatttgtggcagtgtggatgatgaggctaatgtttggcattcacaagttgaaaatcaacttgacagaaagataaaaaggcttaggtctgatcgtggtggagagtttttctcgaacgagtttgacttattctgtgaggaacatggcatcatacatgagaggacgcctccctattctcccaagtctaatgggattgctgaaaggaagaaccgcacactgactgacttggtgaatgccatgttggacaccgcgggactgcctaaggcatgtgaagctcctcgaaggagtaagagacaaaggacggctaagtcttttggtgatgatttcactgtgtacctcgtggatgacactcctaagtcaatttcagaagcatatgcatctcctgatgcagactactggaaggaggctgtccgtagtgaaatggattccattatcgctaacgggacttgggaggtgacagagcgaccctatgggtgtaaacctgtggggtgcaagtgggtgttcaagaagaagcttaggcctgacgcctcacatggtcttctcgttcatcaaatggacgttaagacagcttttcttaatggagagctggatgaggagatctatatgtatcaacctgatgggtttgtagttgaaggctttgcagtcaatgaggcagataaatgtgtgtactatcgccatggtgggggtgagggagttattttgtgcttgtatgttgacgacatactgatatttgggacaaaccttgaggtgataaatgagtcccattatgtggagaagatcttgaatcgttttggctacattgataataagccttctccaacaccttatgatcctagcttgttgcttcgcaagaacaagagaattgctaggaatcaactggaatactcccaaatcattggcttgttgatgtacctggctagtgcaactaggcctgatatctcctttgctgtgagcaagttaagccgatttacctctaatccgggagatgatcattggcgtgcgcttgagcgagtaatgcgctatctgaaaggtactgtggaattggggcttcactatactgggtatcctgcggtactggagggttatagtgattctaactggatctctgatgtggatgagatcaaagccactagtggatatgttttcacactgggtggtggtgctgtttcatggagctcccagcgacgacagcgcttggtcctggcgagccgtcgccatcgcgcctgtacctgcttcctgccgctccggctcccggcgccgacacgttcctcccgcctcgccgccatcaacaagccgacgccgacgccggccttcccgcgcctccccgccgtcatggcaccggtcctcgagcgccctcatggcgtcgccgtcctcaccgcgttcctcccgcctcgccgccaccgccaagccgacgtcggatttgtacttgggaggagctcgccggcctccccgcgcctctgccatgcttccccactgcggcggcggcggccgccaccgccgccgctgtcgcggcgccgcccccctcctctcccgtctcgcgtcggctaccttgcagataagcggatctaccatgggggctatagggtctcgagcctccacttccggtattcccctcctactagttcttcttggatttgccaggcggtgacgtggtcgccccgtcgctggatggcggagcaaactatgaacaaagcacttttaggcggcgactcgttgaggacagcctcgcggatgagcaagggcaggatggacaacggcggcgacgacagcgcgtcaaccggcaaactctctcctcgccgcctccatccccacctccctcccgttgccgcggtctctgtcttccgctcctccctcgccctggatgggagtttcgtcgaagcggcgccctcttcctccacctcgccaccaccgttcccctccagctcccccttcgctctgcccctatggtcctgccaccgacgcccctccccgctcgcgtgtgccgacctcgtcgaccggggtgacttcaacagggcacaccacgtcgcggcgtgccgtgctcgccgccgccgacccttggggagaggatacaaggaaggccatagcggcgacgaaggcatgacgaagacaaaagaggccatggcggcgcccgaccgcgattctgacatgtgcgacacatgcgggtcccacgccgagtcagctgttacgtcggacaataccggggtcaaaaccaccgaatggcctaaagtgaacggcgctgcagcggcggcgcacttcgctagagggcggagcgaagaggcacacggacgggcattcggcgagtgggcataccgctgcagggttcaggagctcaaggctcctcttggatcgttggtggtggctttgaaatcgagcaacgagagcacgtccgtgctgttcccagcgatcgtcgtgcaacgaatgcttccagttccatag

SEQ ID NO: 14993 - DNA, 3633 bp, Oryza sativa
  Clone ID: TFbOSC401487j.C1.o3.fg
atggctggttttgccgatgcactgaggccggataaattcaccggtgtgcattttaagagatggcagatcagggtcactctgtggctgacagctatgaaatgcttctgggtgagtactggcaaacctgaaggagttcttactgctgaacagcagaagcaattcgaggaagccactactctctttgtgggatgcattcttagcgttcttggcgatcgtctggtcgaggtgtatatgcatatgaccgacgctaaggagttgtgggatgcactgaatactaaattcggtgctactgatgctagcaatgatctgtatatcatggagcagtttcatgactacaaaatggctgacaaccgttctgtagtcgaacaggctcatgagatacaaaccatggctaaggaactcgaactccttaagtgtgtcttacccgacaaatttgtggccgggtgcattattgcaaaacttcctccatcttggaggagtttcggtactgcactcaaacacaagagacaggaatactccgttgaggggttgattgcgtctcttgatgttgaggagaaagctcgggaaaaagatgccgcgtctaagggcgatggtgggcagtccagtgccaatgttgtgcacaaggcccagaacaagagcaaggggaaatacaaagctcagcagaccaccaacttcaagaagcagaagaagaacaacaacaatcctaatcaggatgagaggacttgctttgtgtgtggccaagttggtcatctggctaggaagtgtccacaacgcaaggggatgaaggcacctgcagggcagacttctaagtctgctaatgtgaccattggcaacactggagatggaagcgggtatggtcgcacggggttccaccgtcctaatggggaatgggtcacatgcttctgttcatggtgttggcacggtagatctgaagtttacttcgggaaagatcgtgcagctgaagaacgtgcagcatgtcccttctatcgacaggaatcttgttatgagtgcggaggcctgttccgcttttccctttctgatttctgcaataagtctgtgaaccatatttgtggcagtgtggatgatgaggctaatgtttggcattcacgtttatgtcatattaattttggcttgatgtctcggctttccagcatgtgtttaattcctaagttttccattgtcaaaggttctaagtgccatagttgtgtgcaatcgaagcaacctcgcaagcctcacaaggctgccgaggagagaaacttggcaccactagaactcctacattcagatctttgtgaaatgaatggggtgttgacgaagggtggaaaacgatatttcatgacattgattgatgatgctactagattttgctatgtgtacttgttgaaaacgaaagacgaggctctagactattttaaaatttataaggcagaagttgaaaatcaacttgacagaaagataaaaaggcttaggtctgatcgtggtggagagtttttctcgaacgagtttgacttattctgtgaggaacatggcatcatacatgagaggacgcctccctattctcccgagtctaatgggattgctgaaaggaagaaccgcacactgactgacttggtgaatgccatgttggacaccgcgggactgcctaaggcatggtggggggaggcattgttgacctcaaatcatgtgttaaacagagttcctaacagaaataaggacaaaacaccatatgagatatggattggtagaaaaccatcactttcttatttgcgcacatgggggtgcttggcgaaagtcaatgtaccaataacgaagaagcgcaaacttggacctaagactgtggactgtgtttttctgggatatgctcatcatagcattgcctatagatttttaatagttaaatccgaggtaccggacatgcatgttggtacaattatggagtctcgtgatgctaccttctttgagagcttttttccaatgaaggatacacatagtggttcgaaccaaccctctgaaataattcccagttcaatcacaccaccagaacaaactgaacatacacatgaacttgtctctgaggaggatgtcagtgaagctcctcgaaggagtaagagacaaaggacggctaagtcttttggtgatgatttcactgtgtacctcgtggatgacactcctaagtcaatttcagaagcatatgcatctcctgatgcagactactggaaggaggctgtccgtagtgaaatggattccattatcgctaacgggacttgggaggtgacagagcgaccctatgggtgtaaacctgtggggtgcaagtgggtgttcaagaagaagcttaggcctgacgcctcacatggtcttctcgttcatcaaatggacgttaagacagcttttcttaatggagagctggatgaggagatctatatggatcaacctgatgggtttgtagttgaaggtcaagaaggcaaagtgtgcaaattgttgaagtctttgtatggtctgaaacaagctcctaagcaatggcatgagaaatttgacaaaacattgacatctgcaggctttgcagtcaatgaggcagataaatgtgtgtactatcgccatggtgggggtgagggagttattttgtgcttgtatgttgacgacatactgatatttgggacaaaccttgaggtgataaatgaggttaaatcattcttgtctcaaaattttgatatgaaagatttgggagtagctgatgttatcttaaacattaagctaattagaggtgagaatgggattactctcttgcagtcccattatgtggagaagatcttgaatcgctttggctacattgatagtaagccttctccaacaccttatgatcctagcttgttgcttcgcaagaacaagagaattgctaggaatcaactggaatactcccaaatcattggctcgttgatgtacctggctagtgcaactaggcctgatatctcctttgctgtgagcaagttgagccgatttacttctaatccgggagatgatcactggcgtgcgcttgagcgagtaatgcgctatctgaaaggtactgtggaattgggacttcactatactgggtatcctgcggtactggagggttatagtgattctaactggatctctgatgtggatgagatcaaagccactagtggatatgttttcacactgggtggtggtgctgtttcatggaggtcttgcaaacagacaattttgacgaggtcaaccatggaagcagaactaacggcactggatactgctactgttgaggcagaatggctgcgtgatctattaatggatctgcctgttgttgaaaaaccggtgccggctatccttatgaactgtgacaatcaaacgacatgtgaaaagacgattgaagtctgtcaggaaattaagaaactccggagttataacgttggattacatccaaacagcgagaaacctggcagatcccttcacgaagggactatcacgaaatgtgatagacaatgcatcgaaggagatgggtttgagacccatagcattcttgaaggaactcacctttgtgagcttgactgttggtcgcagtctatgaagattttgggtgaatcttctaggaagcttactaaagacctaggagtatga

SEQ ID NO: 14994 - DNA, 3459 bp, Oryza sativa
  Clone ID: TFbOSC401546j.C1.o23.fg
atggctggttttgccgatgcactgaggccggataaattaaccggtgtgcattttaagagatggcaaatcagggtcactctgtggctgacagctatgaaatgcttctgggtgagtactggcaaacctgaaggagttcttactgctgaacagcagaagcaattcgaggaagccactactctctttgtgggatgcattcttagcgttcttggcgatcgtctggtcgaggtgtatatgcatatgaccgacgctaaggagttgtgggatgcactgaatactaaattcggtgctactgatgctagcaatgatctgtatattatggagcagtttcatgactacaagatggctgacaaccgttctgtagtcgaacaggctcatgagatacaaaccatggctagggaactcgaactccttaagtgtgtcttacccgacaaatttgtggccgggtgcattattgcaaaactacctccatcttggagaagtttcggtactgcactcaaacacaagagacaggaatactccgttgaggggttgatagcgtctcttgatgttgaggagaaagctcgggaaaaagatgccgcgtctaagggcgatggtgggcagtccagtgccaatgttgtgcacaaggcccagaacaagagcaaggggaaatacaaagctcagcagaccaccaacttcaagaagcagaagaagaacaacaacaatcctaatcagaatgagaggacttgctttgtgtgtggccaagttggtcatctggctaggaagtgtccacagcgcaaggggatgaaggcacctgcagggcagacttctaagtctgctaatgtgaccattggcaacactggacatggaagcgggtatggtaatttacctactgttttttcagttaatcaatctactaattggtgggttgatactggggccaatgtacatgtttgtgctgacatttcattgttttcttcttatcaggtcgcacggggttccaccgtcctaatagggaatgggtcacatgcttctgttcatggtgttggcacggtagatctgaagtttacttcgggaaagatcgtgcagctgaagaacatgcagcatgtcccttctatcgacaggaatcttgttagtggctcccgtctgactagagacggatttaagttggtttttgagtctaataaagtagtcgtgtctaaacatgtatattttattggtaaaggttatgagtgcggaggcctgttccgtttttccctttctgatttctgcaataagtctgtgaaccatatttgtggcagtgtggatgatgaggctaatgtttggcattcacgtttatgtcatattaattttggcttgatgtctcggctttccagcatgtgtttaattcctaagttttccattgtcaaaggttctaagtgccatagttgtgtgcaatcgaagcaacctcgcaagcctcacaaggctgccgaggagagaaacttggcaccactagaactcctacattcagatctttgtgaaatgaatggggtgttgacgaagggtggaaaacgatatttcatgacattgattgatgatgctactagattttgctacgtgtacttgttgaaaacgaaagacgaggctctagactattttaaaatttataaggcagaagttgaaaatcaacttgacagaaagataaaaaggcttagatctgatcgtggtggagagtttttctcgaacgagtttgacttattctgtgaggaacatggcatcatacatgagaggacgcctccctattctcccgagtctaatgggattgctgaaaggaagaaccgcacactgactgacttggtgaatgccatgttggacaccgcgggactgcctaaggcatggtggggggaggcattgttgacctcaaatcatgtgttaaacatagttcctaacagaaataaggacaaaacaccatatgagatatggattggtaaaaaaccaccactttcttatttgcgcacatgggggtgcttggcgaaagtcaatgtaccaataacgaagaagcgcaaacttggacctaagactgtggactgtgtttttctgggatatgctcatcatagcattgcctatagatttttaatagttaaatccgaggtaccggacatgcatgttggtacaattatggagtctcgtgattctatcttctttgagagctttttcccaatgaaggatacacatagtggttcgaaccaaccctctgaaataattcccagtccaatcacaccaccagaacaaactgaacatacacatgaacttgtctctgaggaggatgtcagtgaagctcctcgaaggagtaagagacaaaggacggctaagtcttttgatgatgatttcactgtgtaccttgtggatgacactcctaagtcaatttcagaagcatatgcatctcctgatgcagactactggaaggaggctgtccgtagtgaaatggattccattatcgctaacggaacttgggaggtgacagagcgaccctatgggtgtaaacctgtggggtgcaagtgggtgttcaagaagaagcttaggcctgacggtactattgaaaagtacaaggctcggcttgttgctaagggctatactcagaaagaaggcgaatatttctttgacacttactcacctgttgctagattgaccacaattcgtgtgctactttccctagcagcctcacatggtcttctcgttcatcaaatggacgttaagacagcttttcttaatggagagctggatgaggagatctatatggatcaacctgatgggtttgtagttgaaggtcaagaaggcaaagtgtgcaaattgttgaagtctttgtatggtctgaaacaagctcctaagcaatggcatgagaaatttgacaaaacattgacatctgcaggctttgcagtcaatgaggcagataaatgtgtgtactatcgccatggtgggggtgagggagttattttgtgcttgtatgttgacgacatactgatatttgggacaaaccttgaggtgataaatgaggttaaatcattcttgtctcaaaattttgatatgaaggatttgggagtagctgatgttatcttaaacattaagctaattagaggtgagaatgggattacactcttgcagtcccattatgtggagaagatcttgaatcgttttggctacattgatagtaagccttctccaacaccttatgatcctagcttgttgcttcgcaagaacaagagaattgctaggaatcaactggaatactcccaaatcattggctcgttgatgtacctggctagtgcaactaggcctgatatctcctttgctgtgagcaagttgagccgatttacctctaatccgggagatgatcactggcgtgcgcttgagcgagtaatgcgctatctgaaaggtactgtggaattggggcttcactatactgggtatcctgcggtactggagggttatagtgattctaactag

SEQ ID NO: 14995 - DNA, 3591 bp, Oryza sativa
  Clone ID: TFbOSC401589j.C1.o1.fg
atgcgcctctgcctcgattcgatcgtatgcctgtttgccaagaggacgtcaaggcggggtgttgacgggatggaacaacgaactagcattgccaacgttttgttggattattcatgttcgaaagtactttctactccctccgtttcacgattcaaatacgccttatatttctgggcggaggagaaagctcgggaaaaagatgccgcgtctaagggcgatggtgggcagtccagtgccaatgttgtgcacaagacccagaacaagagcaaggggaaatacaaagctcagcagaccaccaacttcaagaagaagaagaagaacaacaacaatcctaatcaggatgagaggacttgctttgtgtgtggccaagttggtcatctggctaggaagtgtccacaacgcaaggggatgaaggcacctgcagggcagacttctaagtctgctaatgtgaccattggcaacactggagatggaagcgggtatggtaatttacctactgttttttcagttaatcaatctactaattggtgggttgatactgggaccaatgtacatgtttgtgctgacatctcattgttttcttcttatcaggtcgcacggggttccaccgtcctaatggggaatgggtcacatgcttctgttcatggtgttggcatggtagatctgaagtttacttcgggaaagatcgtgcagctgaagaacgtgcagcatgtcccttctatcgacaggaatcttgttagtggctcccgtctgactagagacggatttaagttggtttttgagtctaataaagtagtcgtgtctaaacatggatattttattggtaaaggttatgagtgcggaggcctgttccgcttttccctttctgatttctgcaataagtctgtgaaccatatttgtggcagtgtggatgatgaggctaatgtttggcattcacgtttatgtcatattaattttggcttgatgtctcggctttccagcatgtgtttaattcctaagctttccattgtcaaaggttctaagtgccatagttgtgtgcaatcgaagcaacctcgcaagcctcacaaggctgccgaggagagaaacttggcaccactagaactcctacattcagatctttgtgaaatgaatggggtgttgacgaagggtggaaaacgatatttcatgacattgattgatgatgctactagattttgctatgtgtacttgttgaaaacgaaagacgaggctctagactattttaaaatttataaggcagaagttgaaaatcaacttgacagaaagataaaaaggcttaggtctgatcgtggtggagagtttttctcgaacgagtttgacttattctgtgaggaacatggcatcatacatgagaggacgcctccctattctctcgagtctaatgggattgctgaaaggaagaaccgcacactgactgacttggtgaatgccatgttggacaccgcgggactgcctaaggcatggtggggggaggcattgttgacctcaaatcatgtgttaaacagagttcctaacagaaataaggacaaaacaccatatgagatatggattggtagaaaactatcactttcttatttgcgcacatgggggtgcttggcgaaagtcaatgtaccaataacgaagaagcgtaaacttggacctaagactgtggactgtgtttttctgggatatgctcatcatagcattgcctatagatttttaatagttaaatctgaggtaccggacatgcatgttggtacaattatggagtctcgtgatgctaccttctttgagagctttttcccaatgaaggatacacatagtggttcgaaccaaccctctgaaataattctcagttcaatcacaccaccagaacaaactgaacatacacatgaacttgtctctgaggaggatgtcagtgaagctcctcgaaggagtaagagacaaaggatggctaagtcttttggtgatgatttcactgtgtacctcgtggatgacactcctaagtcaatttcagaagcatatgcatctcctgatgcagactactggaaggaggctgtccgtagtgaaatggattccattatcgctaacgggacttgggaggtgacagagcgaccctatgggtgtaaacctgtggggtgcaagtgggtgttcaagaagaagcttaggcctgacggtactattgaaaagtacaaggctcggcttgttgctaagggctatactcagaaagaaggcgaagatttctttgatacttactcacctgttgctagattgaccacaattcgtgtgctactttccctagcagcctcacatggtcttctcgttcatcaaatggacgttaagacagcttttcttaatggagagctggatgaggagatctatatgtatcaacctgatgggtttgtagttgaaggtcaagaaggcaaagtgtgcaaattgttgaagtctttgtatggtctgaaacaagctcctaagcaatggcatgagaaatttgacaaaacattgacatctgcaggctttgcagtcaatgaggcagataaatgtgtgtactatcgccatggtgggggtgagggagttattttgtgcttgtatgttgacgacatactgatatttgggacaaaccttgaggtgataaatgaggttaaatcattcttgtctcaaaattttgatatgaaggatttgggagtagctgatgttatcttaaacattaagctaattagaggtgagaatgggattacactcttgcagtcccattatgtggagaagatcttgaatcgttttggctacattgatagtaagccttttccaacaccttatgatcctagcttgttgcttcgcaagaacaagagaattgctaggaatcaactggaatactcccaaatcattggctcgttgatgtacctggctagtgcaactaggcctgatatctcctttgctgtgagcaagttgagccgatttacctctaatccgggagatgatcactggcgtgcgcttgagcgagtaatgcgctatctgaaaggtactgtggaattggggcttcactatactgggtatcctacggtactggagggttatagtgattctaactggatctctgatgtggatgagatcaaagccactagtggatatgttttcacactgggtggtggtgctgtttcatggaggtcttgcaaacagaccattttgacgaggtcaaccatggaagcagagctaacggcactggatactgctactgttgaggcagaatggctgcgtgatctattaatggatctgcctgttgttgaaaaaccggtgccggctatccttatgaactgtgacaatcaaacgacatgtgaaaagacgattgaagtctgtcaggaaattaagaaactccggagttataacgttggattacatccaaacagcgagaaacctggcagatcccttcacgaagggactatcacgaaatgtgatagacaatgcatcgaaggagatgggtttgagacccatagcattcttgaaagaactcacctttgtgagcttgactgttggtcgcagtctatgaagattttgggtgaatcttctaggaagcttactaaagacctaggagtatga

SEQ ID NO: 14996 - DNA, 3963 bp, Oryza sativa
  Clone ID: TFbOSC401620j.C1.o13.fg
atggctggttttgccgatgcactgaggccggataaattcaccggtgtgcattttaagagatggcagatcagggtcactctgtggctgacagctatgaaatgcttctgggtgagtactggcaaacctgaaggagttcttactgctgaacagcagaagcaattcgaggaagccactactctctttgtgggatgcattcttagcattcttggcgatcgtctggtcgaggtgtatatgcatatgaccgacgctaaggagttgtgggatgcactgaatactaaattcggtgctactgatgctagcaatgatctgtatatcatggagcagtttcatgactacaaaatggctgacaaccgttctgtagtcgaacaggctcatgagatacaaaccatggctaaggaactcgaactccttaagtgtgtcttacccgacaaatttgtggccgggtgcattattgcaaaacttcctccatcttggaggagtttcggtactgcactcaaacacaagagacaggaatactccgttgaggggttgattgcgtctcttgatgttgaggagaaagctcgggaaaaagatgccgcgtctaagggcgatggtgggcagtccagtgccaatgttgtgcacaaggcccagaacaagagcaaggggaaatacaaagctcagcagaccaccaacttcaagaagcagaagaagaacaacaacaatcctaatcaggatgagaggacttgctttgtgtgtggccaagttggtcatctggctaggaagtgtccacaacgcaaggggatgaaggcacctgcagggcagacttctaagtctgctaatgtgaccattggcaacactggagatggaagcgggtatggtaatttacctactgttttttcagttaatcaatctactaattggtgggttgatactggggccaatgtacatgtttgtgctgacatctcattgttttcttcttatcaggtcgcacggggttccaccgtcctaatggggaatgggtcacatgcttctgttcatggtgttggcacggtagatctgaagtttacttcgggaaagatcgtgcagctgaagaacgtgcagcatgtcccttctatcgacaggaatcttgttagtggctcccgtctgactagagacggatttaagttggtttttgagtctaataaagtagtcgtgtctaaacatggatattttattggtaaaggttatgagtgcggaggcctgttccgcttttccctttctgatttctgcaataagtctgtgaaccatatttgtggcagtgtggatgatgaggctaatgtttggcattcacgtttatgtcatattaattttggcttgatgtctcggctttccagcatgtgtttaattcctaagttttccattgtcaaaggttctaagtgccatagttgtgtgcaatcgaagcaacctcgcaagcctcacaaggctgccgaggagagaaacttggcaccactagaactcctacattcagatctttgtgaaatgaatggggtgttgacgaagggtggaaaacgatatttcatgacattgattgatgatgctactagattttgctatgtgtacttgttgaaaacgaaagacgaggctctagactattttaaaatttataaggcagaagttgaaaatcaacttgacagaaagataaaaaggcttaggtctgatcgtggtggagagtttttctcgaacgagtttgacttattctgtgaggaacatggcatcatacatgagaggacgcctccctattctcccgagtctaatgggattgctgaaaggaagaaccgcacactgactgacttggtgaatgccatgttggacaccgcgggactgcctaaggcatggtggggggaggcattgttgacctcaaatcatgtgttaaacagagttcctaatagaaataaggacaaaacaccatatgagatatggattggtagaaaaccatcactttcttatttgcgcacatgggggtgcttggcgaaagtcaatgtaccaataacgaagaagcgcaaacttggacctaagactgtggactgtgtttttctgggatatgctcatcatagcattgcctatagatttttaatagttaaatccgaggtaccggacatgcatgttggtacaattatggagtctcgtgatgctaccttctttgagagcttttttccaatgaaggatacacatagtggttcgaaccaaccctctgaaataattcccaattcaatcacaccaccagaacaaactgaacatacacatgaacttgtctctgaggaggatgtcagtgaagctcctcgaaggagtaagagacaaaggacggctaagtcttttggtgatgatttcactgtgtacctcgtggatgacactcctaagtcaatttcagaagcatatgcatctcctgatgcagactactggaaggaggctgtccgtagtgaaatggattccattatcgctaacgggacttgggaggtgacagagcgaccctatgggtgtaaacctgtggggtgcaagtgggtgttcaagaagaagcttaggcctgacggtactattgaaaagtacaaggctcggcttgttgctaagggctatactcagaaagaaggcgaagatttctttgacacttactcacctgttgctagattgaccacaattcgtgtgctactttccctagcagcctcacatggtcttctcgttcatcaaatggacgttaagacagcttttcttaatggagagctggataaggagatctatatggatcaacctgatgggtttgtagttgaaggtcaagaaggcaaagtgtgcaaattgttgaagtctttgtatggtctgaaacaagctcctaagcaatggcatgagaaatttgacaaaacattgacatctgcaggctttgcagtcaatgaggcagataaatgtgtgtactatcgccatggtgggggtgagggagttattttgtgcttgtatgttgacgacatactgatatttgggacaaaccttgaggtgataaatgaggttaaatcattcttgtctcaaaattttgatatgaaagatttgggagtagctgatgttatcttaaacattaagctaattagaggtgagaatgggattactctcttgcagtcccattatgtggagaagatcttgaatcgctttggctacattgatagtaagccttctccaacaccttatgatcctagcttgttgcttcgcaagaacaagagaattgctaggaatcaactggaatactcccaaatcattggctcgttgatgtacctggctagtgcaactaggcctgatatctcctttgctatgagcaagttgagccgatttacttctaatccgggagatgatcactggcgtgcgcttgagcgagtaatgcgctatctgaaaggtactgtggaattgggacttcactatactgggtatcctgcggtactggagggttatagtgattctaactggatctctgatgtggatgagatcaaagccactagtggatatgttttcacactgggtggtggtgctgtttcatggaggtcttgcaaacagacaattttgacgaggtcaaccatggaagcagaactaacggcactggatactgctactgttgaggcagaatggctgcgtgatctattaatggatctgcctgttgttgaaaaaccggtgccggctatccttatgaactgtgacaatcaaacgacatgtgaaaagacgattgaagtctgtcaggaaattaagaaactccggagttataacgttggattacatccaaacagcgagaaacctggcagatcccttcacgaagggactatcacgaaatgtgatagacaatgcatcgaaggagatgggtttgagacccatagcattcttgaaggaactcacctttgtgagcttgactgttggtcgcagtctatgaagattttgggtgaatcttctaggaagcttactaaagacctaggagtatga

SEQ ID NO: 14997 - DNA, 3687 bp, Oryza sativa
  Clone ID: TFbOSC401828j.C1.o40.fg
atggctggttttgccgatgcactgaggccggataaattcaccggtgtgcattttaagagatggcagatcagggtcactctatggctgacagctatgaaatgcttctgggtgagtactggcaaacctgaaggagttcttactgctgaacagcagaagcaattcgaggaagccactactctctttgtgggatgcattcttagcgttcttggcgatcgtctggtcgaggtgtatatgcatatgaccgacgctaaggagttgtgggatgcactgaatactaaattcggtgctactgatgctagcaatgatctgtatatcatggagcagtttcatgactacaaaatggctgacaaccgttctgtagtcgaacaggctcatgagatacaaaccatggctaaggaactcgaactccttaagtgtgtcttacccgacaaatttgtggccgggtgcattattgcaaaacttcctccatcttggaggagtttcggtactgcactcaaacacaagagacaggaatactccgttgaggggttgattgcgtctcttgatgttgaggagaaagctcgggaaaaagatgccgcgtctaagggcgatggtgggcagtccagtgccaatgttgtgcacaaggcccagaacaagagcaaggggaaatacaaagctcagcagaccaccaacttcaagaagcagaagaagaacaacaacaatcctaatcaggatgagaggacttgctttgtgtgtggccaagttggtcatctggctaggaagtgtccacaacgcaaggggatgaaggcacctgcagggcagacttctaagtctgctaatgtgaccattggcaacactggagatggaagcgggtatggtaatttacctactgttttttcagttaatcaatctactaattggtgggttgatactggggccaatgtacatgtttgtgctgacatctcattgttttcttcttatcaggtcgcacggggttccaccgtcctaatggggaatgggtcacatgcttctgttcatggtgttggcacggtagatctgaagtttactttgggaaagatcgtgcagctgaagaacgtgcagcatgtcccttctatcgacaggaatcttgttagtggctcccgtctgactagagacggatttaagttggtttttgagtctaataaagtagtcgtgtctaaacatggatattttattggtaaaggttatgagtgcggaggcctgttccgcttttccctttctgatttctgcaataagtctgtgaaccatatttgtggcagtgtggatgatgaggctaatgtttggcattcacgtttatgtcatattaattttggcttgatgtctcggctttccagcatgtgtttaattcctaagttttccattgtcaaaggttctaagtgccatagttgtgtgcaatcgaagcaacctcgcaagcctcacaaggctgccgaggagagaaacttggcaccactagaactcctacattcagatctttgtgaaatgaatggggtgttgacgaagggtggaaaacgatatttcatgacattgattgatgatgctactagattttgctatgtgtacttgttgaaaacgaaagacgaggctctagactattttaaaatttataaggcagaagttgaaaatcaacttgacagaaagataaaaaggcttaggtctgatcgtggtggagagtttttctcgaacgagtttgacttattctgtgaggaacatggcatcatacatgagaggacgcctccctattctcccgagtctaatgggattgctaaaaggaagaaccgcacactgacagacttggtgaatgccatgttggacaccgcgggactgcctaaggcatggtggggggaggcattgttgacctcaaatcatgtgttaaacagagttcctaacagaaataaggacaaaacaccatatgagatatggattggtagaaaaccatcactttcttatttgcgcacatgggggtgcttggcgaaagtcaatgtaccaataacgaagaagcgcaaacttggacctaagactgtggactgtgtttttctgggatatgctcatcatagcattgcctatagatttttaatagttaaatccgaggtaccggacatgcatgttggtacaattatggagtctcgtgatgctaccttctttgagagcttttttccaatgaaggatacacatagtggttcgaaccaaccctctgaaataattcccagttcaatcacaccaccagaacaaactgaacatacacatgaacttgtctctgaggaggatgtcagtgaagctcctcgaaggagtaagagacaaaggacggctaagtcttttggtgatgatttcactgtgtacctcgtggatgacactcctaagtcaatttcagaagcatatgcatctcctgatgcagactactggaaggaggctgtccgtagtgaaatggattccattatcgctaacgggacttgggaggtgacagagcgaccctatgggtgtaaacctgtggggtgcaagtgggtgttcaagaagaagcttaggcctgacggtactattgaaaagtacaaggctcggcttgttgctaagggctatactcagaaagaaggcgaagatttctttgacacttactcacctgttgctagattgaccacaattcgtgtgctactttccctagcagcctcacatggtcttctcgttcatcaaatggacgttaagacagcttttcttaatggagagctggatgaggagatctatatggatcaacctgatgggtttgtagttgaaggtcaagaaggcaaagtgtgcaaattgttgaagtctttgtatggtctgaaacaagctcctaagcaatggcatgagaaatttgacaaaacattgacatctgcaggctttgcagtcaatgaggcagataaatgtgtgtactatcgccatggtgggggtgagggagttattttgtgcttgtatgttgacgacatactgatatttgggacaaaccttgaggtgataaatgaggttaaatcattcttgtctcaaaattttgatatgaaagatttgggagtagctgatgttatcttaaacattaagctaattagaggtgagaatgggattactctcttgcagtcccattatgtggagaagatcttgaatcgctttggctacattgatagtaagccttctccaacaccttatgatcctagcttgttgcttcgcaagaacaagagaattgctaggaatcaactggaatactcccaaatcattggctcgttgatgtacctggctagtgcaactaggcctgatatctcctttgctgtgagcaagttgagccgatttacttctaatccgggagatgatcactggcgtgcgcttgagcgagtaatgcgctatctgaaaggtactgtggaattgggacttcactatactgggtatcctgcggtactggagggttatagtgattctaactggatctctgatgtggatgagatcaaagccactagtggatatgttttcacactgggtggtggtgctgtttcatggaggtcttgcaaacagacaattttgacgaggtcaaccatggaagcagaactaacggcactggatactgctactgttgaggcagaatggctgcgtgatctattaatggatctgcctgttgttgaaaaaaccggtgccggctatccttatgaactgtga

SEQ ID NO: 14998 - DNA, 3513 bp, Oryza sativa
  Clone ID: TFbOSC401831j.C1.o15.gm
atgggaagcgccttatacccgctcggcgaaatgcggcggtcgcagcgcgccgacgggctcgccgccgtgctcgccatcggcaccgccaaccctcccaactgcgttacccaggaggagttccccgacttctacttccgcgtcaccaacagcgaccacctcactgccctcaaggacaagttcaagcgtatctgtcaggaaatgggcgtgcagaggcggtacctgcaccacacggaggagatgctgtccgcacacccggagttcgtggaccgcgacgcgccgtcgctcgacgcgcggctggacatcgccgcggacgccgtgccggagctggcggcggaggccgccaagaaggcgatcgccgagtggggccgcccggccgccgacatcacccacctcgtcgtcaccaccaactccggcgcccacgtcccgggtgtcgacttccgcctcgtcccgctcctcggcctccgcccctccgtgcgccgcaccatgctccacctcaacggctgcttcgccggctgcgccgcgctccgcctcgccaaggacctcgccgagaacagccgcggcgcgcgcgtcctcgtcgtcgccgccgagctcaccctcatgtacttcaccgggcccgacgagggctgcttcaggacgctcctcgtccagggcctgttcggcgacggcgcggccgccgtcattgtcggcgccgacgccgacgacgtcgagcgcccgctgttcgagatagtgtcggcggcgcagacgatcatcccggagtcggaccacgccctgaacatgcggttcacggagcgccgcttggacggcgtcctcgggcggcaggtcccggggctcatcggggacaacgtcgagcggtgcctcctggacatgttcggcccacttctcggcggcgacggcggcggcgggtggaacgacctgttctgggcggtgcacccgggctcgtcgacgatcatggaccaggtcgacgcggcgctcggcctcgagcccggcaagctggcggcgagccgccgtgtgctcagcgactacgggaacatgtctggcgctacggtgatcttcgcgctggacgagctgcgccggcagcgcaaggaggcggcggcggcgggtgaatggccggagttgggagtgatgatggcgttcggcccggggatgaccgttgatgcgatgctgttgcacgccacctctcatggtgatggggggcttctcgactttttggatatgtggaacatcaaagctgtcgctaggacgtctccgaagatgcacggtggaaagactctgggaaactactccatcccgctcgccggcgtgcaccagcgatcgggagagcaggtctccggaacctctgcctttgacgtcctgcaccgggagaaggcggcaataaggcactgtgattttactatggctggttttgccgatgcactgaggccggataaattcaccggtgtgcattttaagagatggcagatcagggtcactctgtggctgacagctatgaaatgcttctgggtgagtactggcaaacctgaaggagttcttactgctgaacagcagaagcaattcgaggaagccactactctctttgtgggatgcattgttagcgttcttggcgatcgtctggtcgaggtgtatatgcatatgaccgacgctaaggagttgtgggatgcactgaatactaaattcggtgctactgatgctagcaatgatctgtatatcatggagcagtttcatgactacaaaatggctgacaaccgttctgtagtcgaacaggctcatgagatacaaaccatggataaggaactcgaactccttaagtgtgtcttacccgacaaatttgtggccgggtgcattattgcaaaactacctccatcttggaggagtttcggtactgcactcaaacacaagagacaggaatactccgttgaggggttgattgcgtctcttgatgttgaggagaaagctcgggaaaaagatgccgcgtctaagggcgatggtgggcagtccagtgccaatgttgtgcacaaggcccagaacaagagcaaggggaaatacaaagctcagcagaccaccaacttcaagaagcagaagaagaacaacaacaatcctaatcaggatgagaggacttgctttgtgtgtggccaagttggtcatctggctaggaagtgtccacaacgcaaggggatgaaggcacctgcagggcagacttctaagtctgctaatgtgaccattggcaacactggagatggaagcgggtatggtaatttacctactgtcgcacggggttccaccgtcctaatggggaatgggtcacatgcttctgttcatggtgttggcacggtagatctgaagtttacttcgggaaagatcgtgcagctgaagaacgtgcagcatgtcccttctatcgacaggaatcttgatacacatagtggttcgaaccaaccctctgaaataattcccagttcaatcacaccaccagaacaaactgaacatacacatgaacttgtctctgaggaggatgtcagtgaagctcctcgaaggagtaagagacaaaggacggctaagtcttttggtgatgacttcactgtgtacctcgtggatgacactcctaagtcaatttcagaagcatatgcatctcctgatgcagactactggaaggaggctgtccgtagtgaaatggattccattatcgctaacgggacttgggagtcccattatgtggagaagatcttgaatcgctttggctacattgatagtaagccttctccaacaccttatgatcctagcttgttgcttcgcaagaacaagagaattgctaggaatcaactggaatactcccaaatcattggctcgttgatgtacctggctagtgcaactaggcctgatatctcctttgctgtgagcaagttgagccgatttacttctaatccgggagatgatcactggcgtgcgcttgagcgagtaatgcgctatctgaaaggtactgtggaattggggcttcactatactgggtatcctgcggtactggagggttatagtgattctaactggatctctgatgtggatgagatcaaagccactagtggatatgttttcacactgggtggtggtgctgtttcatggaggtcttgcaaacagacaattttgacgaggtcaaccatggaagcagagctaacggcactggatactgctattgttgaggcagaatggctgcgtgatctattaatggatctgcctgttgttgaaaaaccggtgccggctatccttatgaactgtgacaatcaaacggaaattaagaaactccggagttataacgttggattacatccaaacagcgagaaacctggcagatcccttcacgaagggactatcacgaaatgtgatagacaatgcatcgaaggagatgggtttgagacccatagcattcttgaaggaactcacctttgtgagcttgactgttggtcgcagtctatgaagattttgggtgaatcttctaggaagcttactaaagacctaggagtatga

SEQ ID NO: 14999 - DNA, 4185 bp, Oryza sativa
  Clone ID: TFbOSC401876j.C1.o5.fg
atgcagcctccttttgcagttttgttttgctgcaaattcggattcgtttttgttttggaaacgttccgaaaaatccgatctaatgatgcgttcatgctagttttcatctgtaatgtcatgatttatttatggaatagattaaatcattatatgtctataatctcaacaatccaaaaaccttattataggcactgtgattttactttggctggttttgccgatgcactgaggccggataaattcaccggtgtgcattttaagagatggcagatcagggtcactctgtggctgacagttatgaaatgcttctgggtgagtactggcaaacctgaaggagttcttactgctgaacagcagaagcaattcgaggaagccactactctctttgtgggatgcattcttagcgttcttggcgatcgtctggtcgaggtgtatatgcatatgaccgacgctaaggagttgtgggatgcactgaatactaaattcggtgctactgatgctagcaatgatctgtatatcatggagcagtttcatgactacaaaatggctgacaaccgttctgtagtcgaacaggctcatgagatacaaaccatggctaaggaactcgaactccttaagtgtgttttacccgacaaatttgtggccgggtgcattattgcaaaactacctccatcttggaggagtttcggtactgcactcaaacacaagagacaggaatactccgttgaggggttgattgcgtctcttgatgttgaggagaaagctcgggaaaaagatgccgcgtctaagggcgatggtgggcagtccagtgccaatgttgtgcacaaggcccagaacaagagcaaggggaaatacaaagctcagcagaccaccaacttcaagaagcagaagaagaacaacaacaatcctaatcaggatgagaggacttgctttgtgtgtggccaagttggtcatctggctaggaagtgtccacagcgcaaggggatgaaggcacctgcagggcagacttctaagtctgctaatgtgaccattggcaacactggagatggaagcgggtatggtaatttacctgctgttttttcagttaatcaatctactaattggtgggttgatactggggccaatgtacatgtttgtgctgacatctcattgttttcttcttatcaggtcgcacggggttccaccgtcctaatggggaatgggtcacatgcttctgttcatggtgttggcacggtagatctgaagtttacttcgggaaagatcgtgcagctgaagaacgtgcagcatgtcccttctatcgacaggaatcttgttagtggctcccgtctgactagagacggatttaagttggtttttgagtctaataaagtagtcgtgtctaaacatggatattttattggtaaaggttatgagtgcggaggcctgttccgcttttccctttctgatttctgcaataagtctgtgaaccatatttgtggcagtgtggatgatgaggctaatgtttggcattcacgtttatgtcatattaattttggcttgatgtctcggctttccagcatgtgtttaattcctaagttttccattgtcaaaggttctaagtgccatagttgtgtgcaatcaaagcaacctcgcaagcctcacaaggctgccgaggagagaaacttggcaccactggaactcctacattcagatctttgtgaaatgaatggggtgttgacgaagggtggaaaacgatatttcatgacattcattgatgatgctactagattttgctatgtgtacttgttgaaaacgaaagacgaggctctagactattttaaaatttataaggcagaagttgaaaatcaacttgacagaaagataaaaaggcttaggtctgatcgtggtggagagtttttctcgaacgagtttgacttattctgtgaggaacatggcatcatacatgagatgacgcctccctattctcccgagtctaatgggattgctgaaaggaagaatcgcacactgactgacttggtgaatgccatgttggacaccgcgggactgcctaaggcatggtggggggaggcattgttgacctcaaatcatgtgttaaacagagttcctaacagaaataaggacaaaacaccatatgagatatggattggtagaaaaccatcactttcttatttgcgcacatgggggtgcttggcgaaagtcaatgtaccaataacgaagaagcgcaaacttggacctaagactgtggactgtgtttttctgggatatgctcatcatagcattgcctatagatttttaatagttaaatccgaggtaccggacatgcatgttggtacaattatggagtctcgtgatgctatcttctttgagagctttttcccaatgaaggatacacatagtggttcgaaccaaccatctgaaataattcccagttcaatcacaccaccagaacaaactgaacatacacatgaacttgtctctgaggaggatgtcagtgaagctcctcgaaggagtaagagacaaaggacggctaagtcttttggtgatgatttcactgtgtacctcgtggatgacactcctaagtcaatttcagaagcatatgcatctcctgatgcagactactggaaggaggctgtccgtagtgaaatggattccattatcgctaacgggacttgggaggtgacagagcgaccctatgggtgtaaacctgtggggtgcaagtgggtgttcaagaagaagcttaggcctgacggtactattgaaaagtacaaggctcggcttgttgctaagggctatactcagaaagaaggcgaagatttctttgacacttactcacctgttgctagattgaccacaattcgtgtgctactttccctagcagcctcacatggtcttctcgttcatcaaatggacgttaagacagcttttcttaatggagagctggatgaggagatctatatggatcaacctgatgggtttgtagttgaaggtcaagaaggcaaagtgtgcaaattgttgaagtctttgtatggtctaaaacaagctcctaagcaatggcatgagaaatttgacaaaacattgacatctgcaggctttgcagtcaatgaggcagataaatgtgtgtactatcgccatggtgggggtgagggagttattttgtgcttgtatgttgacgacatactgatatttgggacaaaccttgaggtgataaatgaggttaaatcattcttgtctcaaaattttgatatgaaggatttgggagtagctgatgttatcttaaacattaagctaattagaggtgagaatgggattacactcttgcagtcccattatgtggagaagattttgaatcgctttggctacattgatagtaagccttctccaacaccttataaacctagcttgttgcttcgcaagaacaagagaattgctaggaatcaactggaatactcccaaatcattggctcgttgatgtacctggctagtgcaactaggactgatatctcctttgctgtgagcaagttgagccgatttacctttaatccgggagatgatcactggcgtgcgcttgagcgagtaatgcgctatctgaaaggtactgtggaattggggcttcactatactgggtatcctgcggtactggagggttatagtgattctaactggatctctgatgtggatgagatcaaagccactagtggatatgttttcacactgggtggtggtgctgtttcatggaggtcttgcaaacagaccattttgacgaggtcaaccatggaagcagagctaacggcactggatactgctactgttgaggcagaatggctgcgtgatctattaatggatctgcctgttgttgaaaaaccggtgccggctatccttatgaactgtgacaatcaaacgacatgtgaaaagacgattgaagtctgtcaggaaattaagaaactccggagttataacgttggattacatccaaacagcgagaaacctggcagatcccttcacgaagggactatcacgaaatgtgatagacaatgcatcgaaggagatgggtttgagacccatatgagttatactatggtgagcattcttgaaagaactcacctttgtgagcttgactgttggtcgcagtctatgaagattttgggtgaatcttctaggaagcttactaaagacctaggagtatga

SEQ ID NO: 15000 - DNA, 3939 bp, Oryza sativa
  Clone ID: TFbOSC402429j.C1.o11.fg
atggctggttttgccgatgcactgaggccggataaattcaccggtgtgcattttaagagatggcagatcagggtcactctgtggctgacagctatgaaatgcttctgggtgagtactggcaaacctgaaggagttcttactgctgaacagcagaagcaattcgaggaagccactactctctttgtgggatgcattcttagcgttcttggcgatcgtctggtcgaggtgtatatgcatatgaccgacgctaaggagttgtgggatgcactgaatactaaattcggtgctactgatgctagcaatgatctgtatatcatggagcagtttcatgactacaagatggctgacaaccgttctgtagtcgaacaggctcatgagatacaaaccatggctaaggaactcgaactccttaagtgtgtcttacccgacaaatttgtggccgggtgcattattgcaaaactacctccatcttggagaagtttcggtactgcactcaaacacaagagacaggaatactccgttgaggggttgatagcgtctcttgatgttgaggagaaagctcgggaaaaagatgccgcgtctaagggcgatggtgggcagtccagtgccaatgttgtgcacaaggcccagaacaagagcaaggggaaatacaaagctcagcagaccaccaacttcaagaagcagaagaagaacaacaacaatcctaatcaggatgagaggacttgctttgtgtgtggccaagttggtcatctggctaggaagtgtccacagcgcaaggggatgaaggcacctgcagggcagacttctaagtctgctaatgtgaccattggcaacactggagatggaagcgggtatggtaatttacctactgttttttcagttaatcaatctactaattggtgggttgatactggggccaatgtacatgtttgtgctgacatctcattgttttcttcttatcaggtcgcacggggttccaccgtcctaatggggaatgggtcacatgcttctgttcatggtgttggcacggtagatctgaagtttacttcgggaaagatcgtgcagctgaagaacgtgcagcatgtcccttctatcgaccggaatcttgttagtggctcccgtctgactagagacggatttaagttggtttttgagtctaataaagtagtcgtgtctaaacatggatattttattggtaaaggttatgagtgcggaggcctgttccgcttttccctttctgatttctgcaataagtctgtgaaccatatttgtggcagtgtggatgatgaggctaatgtttggcattcacgtttatgtcatattaattttggcttgatgtctcggctttccagcatgtgtttaattcctaagttttccattgtcaaaagttctaagtgccatagttgtgtgcaatcgaagcaacctcgcaagcctcacaaggctgccaaggagagaaacttggcaccactagaacttctacattcagatctttgtgaaatgaatggggtgttgacgaagggtggaaaacgatatttcatgacattgattgatgatgctactagattttgctatgtgtacttgttgaaaacgaaagacgaggctctagactattttaaaatttataaggcagaaattgaaaatcaacttgacagaaagataaaaaggcttaggtctgatcgtggtggagagtttttctcgaacgagtttgacttattctgtgaggaacatggcatcatacatgagaggacgcctccctattctcccgagtctaatgggattgctgaaaggaagaaccgcacactgactgacttggtgaatgccatgttggacaccgcgggactgcctaaggcatggtggggggaggcattgttgacctcaaatcatgtgttaaacagagttcctaacagaaataaggacaaaacaccatatgagatatggattggtagaaaaccatcactttcttatttgcgcacatgggggtgcttggcgaaagtcaatgtaccaataacgaagaagcgcaaacttggacctaagactgtggactgtgtttttctgggatatgctcatcatagcattgcctatagatttttaatagttaaatccgaggtaccagacatgcatgttggtacaattatggagtctcgtgatgctaccttctttgagagctttttcccaatgaaggatacacatagtggttcgaaccaaccctctgaaataattcccagttcaatcacaccatcagaacaaactgaacatacacatgaacttgtctctgaggaggatgtcagtgaagctcctcgaaggagtaagagacaaaggacggctaagtcttttggtgatgatttcactgtgtacctcgtggatgacactcctaagtcaatttcagaagcatatgcatctcctgatgcagactactggaaggaggctatctgtagcgaaatggattccattatcgctaacgggacttgggaggtgacagagcgaccctatgggtgtaaacctgtggggtgcaagtgggtgttcaagaagaagcttaggcctgacggtactattgaaaagtacaaggctcggcttgttgctaagggctatactcagaaagaaggcgaagatttctttgacacttactcacctgttgctagattgaccacaattcgtgtgctactttccctagcagcctcacatggtcttctcgttcatcaaatggacgttaagacagcttttcttaatggagagctggatgaggagatctatatggatcaacctgatgggtttgtagttgaaggtcaagaaggcaaagtgtgcaaattgttgaagtctttgtatggtctgaaacaagctcctaagcaatggcatgagaaatttgacaaaacattgatatctgcaggctttgcagtcaatgaagcagataaatgtgtgtactatcgccatggtgggggtgagggagttattttgtgcttgtatgttgacgacatactgatatttgggacaaaccttgaggtgataaatgaggttaaatcattcttgtctcaaaattttgatatgaaggatttgggagtagctgatgttatcttaaacattaagttaattagaggtgagaatgggattacactcttgcagtcccattatgtggagaagatcttgaatcgctttggctacattgatagtaagccttctccaacaccttatgatcctagcttgttgcttcgcaagaacaagagaattgctaggaatcaactggaatactcccaaatcattggctcgttgatgtacctggctagtgcaactaggcctgatatctcctttgctgtgagcaagttgagccgatttacctctaatccgggagatgatcactggcgtgcgcttgagcgagtaatgcgctatctgaaaggtactgtggaattggggtttcactatactgggtatcctgcggtactggagggttatagtgattctaactggatctctgatgtggatgagatcaaagccactagtggatatgttttcacactgggtggtggtgctgtttcatggaggtcttgcaaacagaccattttgacgaggtcaaccatggaagcagagctaacggcactggatactgctactgttgaggcagaatggctgcgtgatctattaatggatctgcctgttgttgaaaaaccggtgccagctatccttatgaactgtgacaatcaaacgacatgtgaaaagacgattgaagtctgtcaggaaattaagaaactccggagttataacgttggattacatccaaacagcgagaaatctggcagatcccttcacgaagggactatcacgaaatgtgatagacaatgcatcgaaggagatgggtttgagacccatattaaatcattatatgtctataatctcaacacaaacaatcagaaaaaacaaccgtttctgggcacagatatcacaacctga

SEQ ID NO: 15001 - DNA, 3963 bp, Oryza sativa
  Clone ID: TFbOSC402924j.C1.o5.fg
atggctggttttgccgatgcactgaggccggataaattcaccggtgtgcattttaagagatggcagatcagggtcactctgtggctgacagctatgaaatgcttctgggtgagtactggcaaacctgaagaagttcttactgctgaacagcagaagcaattcgaggaagccactactctctttgtgggatgcattcttagcgttcttggcgatcgtctggtcgaggtgtatatgcatatgaccgacgctaaggagttgtgggatgcactgaatactaaattcggtgctactgatgctagcaatgatctgtatatcatggagcagtttcatgactataaaatggctgacaaccgttctgtagtcgaacaggctcatgagatacaaaccatggctaaggaactcgaactccttaagtgtgtcttacccgacaaatttgtggccgggtgcattattgcaaaactacctccatcttggaggagtttcggtactgcactcaaacacaagagacaggaatactccgttgaggggttgattgcgtctcttgatgttgaggagaaagctcgggaaaaagatgccgcgtctaagggcgatggtgggcagtccagtgccaatgttgtgcacaaggcccagaacaagagcaatgggaaatacaaagctcagcagaccaccaacttcaagaagcagaagaagaacaacaacaatcctaatcaggatgagaggacttgctttgtgtgtggccaagttggtcatctggctaggaagtgtccacagcgcaaggggatgaaggcacctgcagggcagacttctaagtctgctaatgtgaccattggtaacactggagatggaagcgggtatggtaatttacctactgttttttcagttaatcaatctactaattggtgggttgatactggggccaatgtacatgtttgtgctgacatctcattgttttcttcttatcaggtcgcacggggttccaccgtcctaatggggaatgggtcacatgcttctgttcatggtgttggcacggtagatctgaagtttacttcgggaaagatcgtgcagctgaagaacgtgcaacatgtcccttctatcgacaggaatcttgttagtggctcccgtctgactagagacggatttaagttggtttttgagtctaataaagtagtcgtgtctaaacatggatattttattggtaaaggttatgagtacggaggcctgttccgcttttccctttctgatttctgcaataagtctgtgaaccatatttgtggtactgtggatgatgaggctaatgtttggcattcacgtttatgtcatattaattttggcttgatgtctcggctttccagcatgtgtttaattcctaagttttccattgtcaaaggttctaagtgccatagttgtgtgcaatcgaagcaacctcgcaagcctcacaaggctgccgaggagagaaacttggcaccactagaactcctacattcagatctttgtgaaatgaatggggtgttgacgaagggtggaaaacgatatttcatgacattgattgatgatgctactagattttgctatgtgtacttgttaaaaacgaaagacgaggctctagactattttaaaatttataaggcagaagttgaaaatcaacttgacagaaagataaaaaggcttaggtctgatcgtggtggagagtttttctcgaacgagtttgacttattctgtgaggaacatggcatcatacatgagaggacgcctccctattctcccgagtctaatgggattgctgaaaggaagaaccgcacactgactgacttggtgaatgccatgttggacaccgcgggactgcctaaggcatggtggggggaggcattgttgacctcaaatcatgtgttaaacagagttcctaacagaaataaggacaaaacaccatatgagatatggattggtagaaaaccatcactttcttatttgcgcacatgggggtgcttggtgaaagtcaatgtaccaataacgaagaagcgcaaacttggacctaagactgtggactgtgtttttctgggatatgctcatcatagcattgcctacagatttttaatagttaaatccgaggtaccggacatgcatgttggtacaattatggagtctcgtgatgctaccttctttgagagctttttcccaatgaaggatacaaatagtggttcgaaccaaccctctgaaataattcccagttcaatcacaccaccagaacaaactgaacatacacatgaacttgtctctgaggaggatgtcagtgaagctcctcgaaggagtaagagacaaaggacggctaagtcttttggtgatgatttcactgtgtacctcgtggatgacactcctaagtcaatttcagaagcatatgcatctcctgatgcagactactggaaggaggctgtccgtagtgaaatggattccattatcgctaacgggacttgggaggtgacagagcgaccctatgggtgtaaacctgtggggtgcaagtgggtgttcaagaagaagcttaggcctgacggtactattgaaaagtacaaggctcggcttgttgctaagggctatactcagaaagaaggcgaagatttctttgacacttactcacctgttgctagattgaccacaattcgtgtgctactttccctagcagcctcacatggtcttctcgttcatcaaatggacgttaagacagcttttcttaatggagagctggatgaggagatctatatggatcaacctgatgggtttgtagttgaaggtcaagaaggcaaagtgtgcaaattgttgaagtctttgtatggtctgaaacaagctcctaagcaatggcatgagaaatttgacaaaacattgacatctgcaggctttgcagtcaatgaggcagataaatgtgtgtactatcgccatggtgggggtgagggagttattttgtgcttgtatgttgacgacatactgatatttgggacaaaccttgaggtgataaatgaggttaaatcattcttgtctcaaaattttgatatgaaggatttgggagtagctgatgttatcttaaacattaagctaattagaggtgagaatgggattacactcttgcagtcccattatgtggagaagatcttgaatcgctttggctacattgatagtaagccttctccaacaccttatgatcctagcttgttgcttcgcaagaacaagagaattgctaggaatcaactggaatactcccaaatcattggctcgttgatgtacctggctagtgcaactaggcctgatatctcctttgctgtgagcaagttgagccgatttacctctaatccgggagatgatcactggcgtgcgcttgagcgagtaatgcgctatctgaaaggtactgtggaattggggcttcactatactgggtatcctgcggtactggagggttatagtgattctaactggatctctgatgtggatgagatcaaagccactagtggatatgttttcacactgggtggtggtgctgtttcatggaggtcttgcaaacagaccattttgacgaggtcaaccatggaagcagagctaacggcactggatactgctactgttgaggcagaatggctgcgtgatctattaatggatctgcctgttgttgaaaaaccggtgccggctatccttatgaactgtgacaatcaaacgacatgtgaaaagacgattgaagtctgtcaggaaattaagaaactccggagttataacgttggattacatccaaacagcgagaaacctggcagatcccttcacgaagggactatcacgaaatgtgatagacaatgcatcgaaggagatgggtttgagacccatagcattcttgaaagaactcacctttgtgagcttgactgttggtcgcagtctatgaagattttgggtgaatcttctaggaagcttactaaagacctaggagtatga

SEQ ID NO: 15002 - DNA, 4611 bp, Oryza sativa
  Clone ID: TFbOSC403329j.C1.o39.gm
atgtactggtcggtgtccagtgctgtcatgtggggccgcacctatgtgcgtcagcgtcgagcccgcgacgtcaggagagccgcggcccgagcacgatcctcgccgcgccgcgccgtctccccaccacccgccacatcctcgccaccaccagccgccgcgccaccatcctcggactcgtcctccggcgcgtcctgcccacccggcatgggtgaccccaatgacctcaagacctccgtggaggctctcaccaccgccatgaaggagatgcaggcctcgatcgccgccaacgccaaggccattgccgccctctcctccggccgcacctcatcctcgggcgccacgacagactccggcgaaccccgcaccgtccggccgccgcgatttcagaaaatggatttcccgcgctatgatgggaagtccgatccgctcaccttcctcaattggtgtgagtcgtacttccaccaacaacggatcatggacgaagagaaggtttggatggcgtcctacaaccttgaagatggtgcacagctatggtacatgcaagtccaggcggatgagggtaaaccgtcgtggcgtcgcttccgggaactcctcgtcctacggtacgggccgccactccgttcggctcccctcttcgagttagccgactgccgccgcactaccaccgtggaggactaccaggaccacttccaagcgctcctgccccgcgccggccgcctgacgaaggcacaacgggttcagctcttcaccggcggtctgcttcctccgctcagtctcaaggtccagatgcagaatccgcagtccctcgtcaccgccatgagtttggctcggcagttcgagctgatggagcagtgcactgccaccctggccaaagcccctggccacgggatactgccgacgctgggtccgcgccaggccccgccccagccgccggcgcctagggccgcatcgccccctgtcctcatcgacggtcgcccggtgaagcggctctctcaggcggagcaggacgagcgtcgccgcctcgggctatgctttaactactactccatcccgctcgccggcgtgcaccagcgatcaggagagcaggtctccggaacctctgcctttgacgtcctgcaccgggagaaggcggcaataaggcactgtgattttactatggctggttttgctgatgcactgaggccggataaattcaccggtgtgcattttaagagatggcagatcagggtcactctgtggctgacagctatgaaatgcttctgggtgagtactggcaaacctgaaggaattcttactgctgaacagcagaagcaattcgaggaagccactactctctttgtgggatgcattcttagcgttcttggcgatcgtctggtcgaggtgtatatgcatatgaccgacgctaaggagttgtgggatgcactgaatactaaattcggtgctactgatgctagcaatgatctgtatatcatggagcagtttcatgactacaaaatggctgacaaccgttctgtagtcgaacaggctcaagagatacaaaccatggctaaggaactcgaactccttaagtgtgtcttacccgacaaatttgtggccgggtgcattattgcaaaactacctccatcttggaggagtttcggtactgcactcaaacacaagagacaggaatactccgttgaggggttgattgcgtctcttgatgttgaggagaaagctcgggaaaaagatgccgcgtctaagggcgatggtgggcagtccagtgccaatgttgtgcacaaggcccagaacaagagcaaggggaaatacaaagctcagcagaccaccaacttcaagaagcagaagaagaacaacaacaatcctaatcaggatgagaggacttgctttgtgtgtggccaagttggtcatctggctaggaagtgtccacaacgcaaggggatgaaggcacctgcagggcagacttctaagtctgctaatgtgaccattggcaacactggagatggaagcgggtatggtaatttacctactgtcgcacggggttccaccgtcctaatggggaatgggtcacatgcttctgttcatggtgttggcacggtagatctgaagtttacttcgggaaagatcgtgcagctgaagaacgtgcagcatgtcccttctatcgacaggaatcttgttagtggctcccgtctgactagagacggatttaagttggtttttgagtctaataaagtagtcgtgtctaaacatggatattttattggtaaaggttatgagtgcggaggcctgttccgcttttccctttctgatttctgcaataacatgtgtttaattcctaagttttccattgtcaaaggttctaagtgccatagttgtgtgcaatcgaagcaacctcgcaagcctcacaaggctgccgaggagagaaacttggcaccactagaactcctacattcagatctttgtgaaatgaatggggtgttgacgaaggaagttgaaaatcaacttgacagaaagataaaaaggcttaggtctgatcgtggtggagagtttttctcgaacgagtttgacttattctgtgaggaacatggcatcatacatgagaggacacctccctattctcccgagtctaatgggattgctgaaaggaagaaccgcacactgactgacttggtgaatgccatgttggacaccgcgggactgcctaaggcatgtgaagctcctcgaaggagtaagagacaaaggacggctaagtcttttggtgatgatttcactgtgtacctcgtggatgacactcctaagtcaatttcagaagcatatgcatctcctgatgcagactactggaaggaggctgtccatagtgaaatggattccattatcgctaacgggacttgggaggtgacagagcgaccctatgggtgtaaacctgtggggtgcaagtgggtgttcaagaagaagcttaggcctgacgcctcacatggtcttctcgttcatcaaatggacgttaagacagcttttcttaatggagagctggatgaggagatctatatggatcaacctgatgggtttgtagttgaagtcaatgaggcagataaatgtgtgtactatcgccatggtgggggtgagggagttattttgtgcttgtatgttgacgacatactgatatttgggacaaaccttgaggtgataaatgagtcccattatgtggagaagatcttgaatcgctttggctatattgatagtaagccttctccaacaccttatgatcctagcttgttgcttcgcaagaacaagagaattgctaggaatcaactggaatactcccaaatcattggctcgttgatgtacctggctagtgcaactaggcctgatatctcctttgctgtgagcaagttgagccgatttacttctaatccgggagatgatcactggcgtgcgcttgagcgagtaatgcgctatctgaaaggtactgtggaattgtggcttcactatactgggtatcctgcggtactggagggttatagtgattctaactggatctctgatgtggatgagatcaaagccactagtggatatgttttcacactgggtggtggtgctgtttcatggagcaaagatgttgtcctgcagagcattcttgaaggaactcacctttgtgagcttgactgttggtcgcagtctatgaagattttggactactccatcccgctcgccggcgtgcaccagcgatcgggagagcaggtctccggaacctctgcctttgacgtcctgcaccgggagaaggcggcaataagccgtggccataacaaaatctgcaagcacttgttcctcttggactgcgctatggatgacgacgacgacaccgacgcggctgaggaaccgcaggacttggagtccccggtgttctccctccacgcgatcgccggcgtaccggtcgccgacaccatgcaggtacaggtgaccgtcggcgccaccaccctcaccgctctcctcgacagcggctccacccacagcttcattgccgaggaggcagcgtgccgcacgggtctgccggtccagccacgcccacgcatgacggcgactgtggccaatggcgagaaggtcgcatgtcctggcgtcatccgacaggccgtgctctccatcgacggctcgctcttcaccgtcgatctctttgtcattccacttgcaggttacgacatggtgctcggcacccagtggatggcgtctctggggccgattgtttgggacttcacggagcggacgatgtccttccagtaccacggccgcaccatctgctgggcaggcgtgccgtcgtctcctgcaccacgcatccgagtcacaacagcggccagcgagtcgctactcgatgagctcctagccgacttcggcgacgtcttcgccgagcccaaggggctgcccctgcagcatgctcgagatcacaccatcgtcctcaagccggacgcgccccctgtcgctgttcgtccgtaccggtacccggcggcccataaggatgaactggaacggcagtgcgccgctatgatcgagcagggcatcgtccgccgtagcgactcggcgttctcttcaccagtccttctcattaagaaggctgacgggtcgtga

SEQ ID NO: 15003 - DNA, 3963 bp, Oryza sativa
  Clone ID: TFbOSC404997j.C1.o16.fg
atggctggttttgccgatgcactgaggccggataaattcaccggtgtgcattttaagagatggcagatcagggtcactctgtggctgacagctatgaaatgcttctgggtgagtactggcaaacctgaaggagttcttactgctgaacaacagaagcaattcgaggaagctactactctctttgtgggatgcattcttagcgttcttggcgattgtctggtcgaggtgtatatgcatatgaccgacgctaaggagttgtgggatgcactgaatactaaattcggtgctactgatgctagcaatgatctgtatatcatggaggagtttcatgactacaaaatggctgacaaccgttctgtagtcgaacaggctcatgagatacaaaccatggctaaggaactcgaactccttaagtgtgtcttacccgacaaatttgtggccgggtgcattattgcaaaactacctccatcttggaggagtttcggtactgcactcaaacacaagagacaggaatactccgttgaggggttgattgcgtctcttgatgttgaggagaaagctcgggaaaaagatgccgcgtctaagggcgatggtgggcagtccagtgccaatgttgtgcacaaggcccagaacaagagcaaggggaaatacaaagctcagcagaccaccaactttaagaagcagaagaagaacaacaacaatcctaatcaggatgagaggacttgctttgtgtgtggccaagttggtcatctggctaggaagtgtccacagcgcaaggggatgaaggcacctgcagggcagacttctaagtctgctaatgtgaccattggcaacactggagatggaagcgggtatggtaatttacctactgttttttcagttaatcaatctactaattggtgggttgatactggggccaatgtacatgtttgtgctgacatctcattgttttcttcttatcaggtcgcacggggttccaccgtcctaatggggaatgggtcacatgcttctgttcatggtgttggcacggtagatctgaagtttacttcgggaaagatcgtgcagctgaagaacgtgcagcatgtcccttctatcgacaggaatcttgttagtggctcccgtctgactagagacggatttaagttggtttttgagtctaataaagtagtcgtgtctaaacatggatattttattggtaaaggttatgagtgcggaggcctgttccgcttttccctttctgatttctgcaataagtctgtgaaccatatttgtggcagtgtggatgatgaggctaatgtttggcattcacgtttatgtcatattaattttggcttgatgtctcggctttccagcatgtgtttaattcctaagttttccattgtcaaaggttctaagtgccatagttgtgtgcaatcgaagcaacctcgcaagcctcacaaggctgccgaggagagaaacttggcaccactagaactcctacattcagatctttgtgaaatgaatggggtgttgacgaagggtggaaaacgatatttcatgacattgattgatgatgctactagattttgctatgtgtacttattgaaaacgaaagacgaggctctagactattttaaaatttataaggcagaagttgaaaatcaacttgacagaaagataaaaaggcttaggtctgatcgtggtggagagtttttctcgaacgagtttgacttattctgtgaggaacatggcatcatacatgagaggacgcctccctattctcccgagtctaatgggattgctgaaaggaagaaccgcacactgactgacttggtgaatgccatgttggacaccgcgggactgcctaaggcatggtggggggaggcattgttgacctcaaatcatgtgttaaacagagttcctaacagaaataaggacaaaacaccatatgagatatggattggtagaaaaccatcactttcttatttgcgcacatgggggtgcttggcgaaagtcaatgtaccaataacgaagaagcgcaaacttggacctaagactgtggactgtgtttttctgggatatgctcatcatagcattgcctatagatttttaatagttaaatccgaggtaccggacatgcatgttggtacaattatggagtctcgtgatgctaccttctttgagagctttttcccaatgaaggatacacatagtggttcgaaccaaccctctgaaataattcccagttcaatcacaccaccagaacaaactgaacatacacatgaacttgtctctgaggaggatgtcagtgaagctcctcgaaggagtaagagacaaaggacggctaagtcttttggtgatgatttcactgtgtacctcgtggatgacactcctaagtcaatttcagaagcatatgcatctcctgatgcagactactggaaggaggctgtccgtagtgaaatggattccattatcgctaacgggacttgggaggtgacagagcgaccctatgggtgtaaacctgtggggtgcaagtgggtgttcaagaagaagcttaggcctgacggtactattgaaaagtacaaggctcggcttgttgctaagggctatactcagaaagaaggcgaagatttctttgacacttactcacctgttgctagattgaccacaattcgtgtgctactttccctagcagcctcacatggtcttctcgttcatcaaatggacgttaagacagcttttcttaatggagagctggatgaggagatctatatggatcaacctgatgggtttgtagttgaaggtcaagaaggcaaagtgtgcaaattgttgaagtctttgtatggtctgaaacaagctcctaagcaatggcatgagaaatttgacaaaacattgacatctgcaggctttgcagtcaatgaggcagataaatgtgtgtactatcgccatggtgggggtgagggagttattttgtgcttgtatgttgatgacatactgatatttgggacaaaccttgaggtgataaatgaggttaaatcattcttgtctcaaaattttgatatgaaagatttgggagtagctgatgttatcttaaacattaagctaattagatgtgagaatgggattacactcttgcagtctcattatgtggagaagatcttgaatcgctttggctacattgatagtaagccttctccaacaccttatgatcctagcttgttgcttcgcaagaacaagagaattgctagaaatcaactggaatactcccaaatcattggctcgttgatgtacctggctagtgcaactaggcctgatatctcctttgctgtgagcaagttgagccgatttacctctaatccgggagatgatcactggcgtgcacttgagcgagtaatgcgctatctgaaaggtactgtggaattggggcttcactatactgggtatcctgcggtactggagggttatagtgattctaactggatctctgatgtggatgagatcaaagccactagtggatatgttttcacactgggtggtggtgctgtttcatggaggtcttgcaaacagacaattttgacgaggtcaaccatggaagcagagctaacggcactggatactgctactgttgaggcagaatggctgcgtgatctattaatggatctgcctgttgttgaaaaaccggtgccggctatccttatgaactgtgacaatcaaacgacatgtgaaaagacgattgaagtctgtcaggaaattaagaaactccggagttataacgttggattacatccaaacagcgagaaacctggcagatctcttcacgaagggactatcacgaaatgtgatagacaatgcatcgaaggagatgggtttgagacccatagcattcttgaaagaactcacctttgtgagcttgactgttggtcgcagtctatgaagattttgggtgaatcttctaggaagcttactaaagacctaggagtatga

SEQ ID NO: 15004 - DNA, 4557 bp, Oryza sativa
  Clone ID: TFbOSC405015j.C1.o1.fg
atggcggattcgacggcgaggacggtgaaggacgtgaaccctcatgagttcgtcaaggcctactccgcccacctcaagcgctccggcaagatggagctccctgagtgggttgacatcgtgaagactgcgaggttcaaggagctccctccttatgatccggactggtactacacgagggctgcctcgattgcaaggaagatctacctgaggcagggtattggtgtaggtggcttccagaagatctatggtggccgccagaggaacggctcacgccccccgcacttctgcaagagcagcggcgctatctcacgcaacatccttcagcagctgcagaagatgggcatcattgatgtcgacccgaagggtggaagactcatcacctcccagggaaggcgtgatctggaccaagtggccggaagagttgatgaatcaatcagagacaggaaagttgaagcaactggccagcaatcccagacgttagattcaacttggacggccaagatgcaccctaacgccctaccatctaatgatgcgttcatgctagttttcatctgtaatgtcatgatttatttatggaataaattaaatcattatatgcccataatctcaacaatccaaaaaccttattataggcactgtgattttactatggctggttttgccgatgcactgaggccggataaattcaccggtgtgcattttaagagatggcagatcagggtcactctgtggctgacagctatgaaatgcttctgggtgagtactggcaaacctgaaggagttcttactgctgaacagcagaagcaattcgaggaagccactactctctttgtgggatgcattcttagcgttcttggcgatcgtctggtcgaggtgtatatgcatatgaccgacgctaaggagttgtgggatgcactgaatactaaattcggtgctactgatgctagcaatgatctgtatatcatggagcagtttcatgactacaaaatggctgacaaccgttctgtagtcgaacaggctcatgagatacaaaccatggctaaggaactcgaactccttaagtgtgtcttacccgacaaatttgtggccgggtgcattattgcaaaactacctccatcttggaggagtttcggtactgcactcaaacacaagagacaggaatactccgttgaggggttgattgcgtctcttgatgttgaggagaaagctcgggaaaaagatgccgcgtctaagggcgatggtgggcagtccagtgccaatgttgtgcacaaggcccagaacaagagcaaggggaaatacaaagctcagcagaccaccaacttcaagaagcagaagaagaacaacaacaatcctaatcaggatgagaggacttgctttgtgtgtggccaagttggtcatctggctaggaagtgtccacaacgcaaggggatgaaggcacctgcagggcagacttctaagtctgctaatgtgaccattggcaacactggagatggaagcgggtatggtaatttacctactgttttttcagttaatcaatctactaattggtgggttgatactagggccaatgtacatgtttgtgctgacatctcattgttttcttcttatcaggtcgcacggggttccaccgtcctaatggggaatgggtcacatgcttctgttcatggtgttggcacggtagatctgaagtttacttcgggaaagatcgtgcagctgaagaacgtgcagcatgtcccttctatcgacaggaatcttgttagtggctcccgtctgactagagacggatttaagttggtttttgagtctaataaagtagtcgtgtctaaacatggatattttattggtaaaggttatgagtgcggaggcctgttccgcttttccctttctgatttctgcaataagtctgtgaaccatatttgtggcagtgtggatgatgaggctaatgtttggcattcacgtttatgtcatattaattttggcttgatgtctcggctttccagcatgtgtttaattcctaagttttccattgtcaaaggttctaagtgccatagttgtgtgcaatcgaagcaacctcgcaagcctcacaaggctgccgaggagagaaacttggcaccactagaactcctacattcagatctttgtgaaatgaatggggtgttgacgaagggtggaaaacgatatttcatgacattgattgatgatgctactagattttgttatgtgtacttgttgaaaacgaaagacgaggctctagactattttaaaatttataaggcagaagttgaaaatcaacttgacagaaagataaaaaggcttaggtctgatcgtggtggagagtttttctcgaacgagtttgacttattctgtgaggaacatggcatcatacatgagaggacgcctccctattctcccgagtctaatgggattgctgaaaggaagaaccgcacactgactgacttggtgaatgccatgttggacaccgcgggactgcctaaggcatggtggggggaggcattgttgacctcaaatcatgtgttaaacagagttcctaacagaaataaggacaaaacaccatatgagatatggattggtagaaaaccattactttcttatttgcgcacatgggggtgcttggcgaaagtcaatgtaccaataacgaagaagcgcaaacttggacctaagactgtggactgtgtttttctgggatatgctcatcatagcattgcctatagatttttaatagttaaatccgaggtaccggacatgcatgttggtacaattatggagtctcgtgatgctaccttttttgagagctttttcccaatgaaggatacacatagtggttcgaaccaaccctctgaaataattcccagttcaatcacaccaccagaacaaactgaacatacacatgaacttgtctctgaggaggatgtcagtgaagctcctcgaaggagtaagagacaaaggacggctaagtcttttggtgatgacttcactgtgtacctcgtggatgacactcctaagtcaatttcagaagcatatgcatctcctgatgcagactactggaaggaggctgtccgtagtgaaatggattccattatcgctaacgggacttgggaggtgacagagcgaccctatgggtgtaaacctgtggggtgcaagtgggtgttcaagaagaagcttaggcctgacggtactattgaaaagtacaaggctcggcttgttgctaagggctatactcagaaagaaggcgaagatttctttgacacttactcacctgttgctagattgaccacaattcgtgtgctactttccctagcagcctcacatggtcttctcgttcatcaaatggacgttaagacagcttttcttaatggagagctggatgaggagatctatatggatcaacctgatgggtttgtagttgaaggtcaagaaggcaaagtgtgcaaattgttgaagtctttgtatggtctgaaacaagctcctaagcaatggcatgagaaatttgacaaaacattgacatctgcaggctttgcagtcaatgaggcagataaatgtgtgtactatcgccatggtgggggtgagggagttattttgtgcttgtatgttgacgacatactgatatttgggacaaaccttgaggtgataaatgaggttaaatcattcttgtctcaaaattttgatatgaaagatttgggagtagctgatgttatcttaaacattaagctaattagaggtgagaatgggattactctcttgcagtcccattatgtggagaagatcttgaatcgctttggctacattgatagtaagccttctccaacaccttatgatcctagcttgttgcttcgcaagaacaagagaattgctaggaatcaactggaatactcccaaatcattggctcgttgatgtacctggctagtgcaactaggcctgatatctcctttgctgtgagcaagttgagccgatttacttctaatccgggagatgatcactggcgtgcgcttgagcgagtaatgcgctatctgaaaggtactgtggaattggggcttcactatactgggtatcctgcggtactggagggttatagtgattctaactggatctctgatgtggatgagatcaaagccactagtggatatgttttcacactgggtggtggtgctgtttcatggaggtcttgcaaacagacaattttgacgaggtcaaccatggaagcagagctaacggcactggatactgctactgttgaggcagaatggctgcgtgatctattaatggatctgcctgttgttgaaaaaccggtgccggctatccttatgaactgtgacaatcaaacggtaattgtcaaagtgaatagttctaaggataatatgaaatcgtctagacatgtgaaaagacgattgaagtctgtcaggaaattaagaaactccggagttataacgttggattacatccaaacagcgagaaacctggcagatcccttcacaaagggactatcacgaaatgtgatagacaatgcatcgaaggagatgggtttaagacccatgtga

SEQ ID NO: 15005 - DNA, 2361 bp, Oryza sativa
  Clone ID: TFbOSC405836j.C1.o5.gm
atgtccaaccaggcggacaagaagttactgctcaggctgcttccacaacactaccaccaccatcttaagcctaaggcgaatgactactccatcccgctcgccggcgtgcaccggcgatcgggagagcaggtctccagaacctttgccttcgacgttctgcaccgggagaaggcggcaataaggcactgtgattttactatggctggtttttccgatgcactgaggccggataaattcaccggtgtgcattttaagagatggcagatcagggtcactctgtggctgacagctatgaaatgcttctgggtgagtactggcaaacctgaaggagttcttactgctgaacagcagaagcaattcgaggaagccactactctctttgtgggatgcattcttagcgttcttggcgatcgtctggtcgaggtgtatatgcatatgaccgacgctaaggagttgtgggatgcactgaatactaaattcggtgctactgatgctagcaatgatctgtatatcatggagcagtttcatgactacaaaatggctgacaaccgttctgtagtcgaacaggctcatgagatacaaaccatggctaaggaactcgaactccttaagtgtgtcttacccgacaaatttgtggccgggtgcattattgcaaaactacctccatcttggaggagtttcggtactgcactcaaacacaagagacaggaatactccgttgaggggttgattgcgtctcttgatgttgaggagaaagctcgggaaaaagatgccgcgtctaagggcgatggtgggcagtccagtgccaatgttgtgcacaaggcccagaacaagagcaaggggaaatacaaagctcagcagaccaccaacttcaagaagcagaagaagaacaaaaacaatcctaatcaggatgagaggacttgctttgtgtgtggccaagttggtcatctggctaggaagtgtccacagcgcaaggggatgaaggcacctgcagggcagacttctaagtctgctaatgtgaccattggcaacactggagatggaagcgggtatggtaatttacctactgtcgcacggggttccaccgtcctaatggggaatgggtcacatgcttctgttcatggtgttggcacggtatatctgaagtttacttcgggaaagatcgtgcagctgaagaacgtgcagcatgtcccttctatcgacaggaatcttgttagtggctcccgtctgactagagacggatttaagttggtttttgagtctaataaagtagtcgtgtctaaacatggatattttattggtaaaggttatgagtgcggatgcctgttccgcttttccctttctgatttctgcaataagtctgtgaaccatatttgtggtagtgtggatgatgaggctaatgtttggcattcacactactggaaggaggctgtccatagtgaaatggattccattatcgctaacgggacttgggaggtgacagagcgaccctatgggtgtaaacctgtggggtgcaagtgggtgttcaagaagaagcttaggcctgacgatactattgaaaagtacaaggctcggcttgttgctaagggctatactcagaaagaaggcgaagatttctttgacacttactcacctgttgctagattgaccacaattcgtgtgctactttccctagcagcctcacatggtcttctcgttcatcaaatggacgttaagacagcttttcttaatggagagctggatgaggagatctatatggatcaacctgatgggtttgtagttgaaggctttgcagtcaatgaggcagataaatgtgtgtactatcgccatggtgggggtgagggagttattttgtgcttgtatgttgacgacatactgatatttgggacaaaccttgaggtgataaatgagtcccattatgtggagaagatcttgaatcgctttggctacattgatagtaagccttctccaacaccttatgatcctagcttgttacttcgcaagaacaagagaattgctaggaatcaactggaatactcccaaatcattggctcgttgatgtacctggctagtgcaactaggcctgatatctcctttgctgtgagcaagttgagccgatttacctctaatccgggagatgatcactggcgtgcgcttgagcgagtaatgcgctatctgaaagactactccatcccgctcgccggcgtgcaccggcgatcgggagagcaggtctccggaacctctgccttcgacgttctgcaccgggagaaggcggcaataagtcctccacgctccacgccatgtcggagctcatcgccggcggccgcgtcctacgtcatccacgcctcatgccgaagctag

SEQ ID NO: 15006 - DNA, 1815 bp, Oryza sativa
  Clone ID: TFbOSC407908j.C1.o8.fg
atgtgggatgcacttgaggccaagttcggagttttcgacgccggcagtgagctgtatgtcatagagcagttctatgactacaagatggtcgatgaccattctatagtagaacaagctcatgagattcagatgctggctaaggaacttgagaacaacaattgtaagttgctggacaagtttgtggcgggtggcattattgccaaattgccaccttcttggttggactttgccacttctctaaagcacaagagacaagagttcagtgtttctgatctcattggctctttgggtgttgaggagaaggcgagggcaaaggacaaggcaaaaaggttgagggagaaagtcaagcctgatgtcaaacccaaggctgcaaccaactttaagaagaaaggcaagggaaaggcaaagggaagctgctttgtgtgtggcaagtctgggcattgggccaaggactgtcctgagcgcaaagacaagaagtcttccaacatggttattagcgagggcggaggaacatcggggtacggtaaaatattacctacagttctctctgtttttcactcacctgattggtgggtggatactggcgctaatattcatgtcgggagaggttcctccttgttgatgggaaacgggtcgcttgcggctgttcatggtgttggttctaagtgccatacttgtgttcaatcgaaacaacctcgcaagcctcacaaggcatctgagcataaggaaatgacaccattcgaggaatgggaaaggaagaaattaaatctctcatacctacgaatatggggctgtttggctaagtccagagatgctacattctttgagaatgaatttcccatgaaacatacacctagcacttctagtcaagaaactgtcatgccccatgagcactttgcaccgatagaacacaatgatcaaacgcctgaggaaaatcctgaggaggacaacattgtagatactcgtaagagtaagagacaaagggttgcaaaatcctttggagatgactacattgtatacctcgtggatgacaccccaagaaccatagaagaggcatattcatctcctgacgctgactactggaaggaagcagtacgcagtgagatggactcgattatgtctaatggtacttgggaagtcgttgagcgtccatatgggtgcaagcctgtaggatgcaaatgggttttcaagaaaaagcttaggcctgatggtacaattgaaaagtacaaggcaaggcttgtggccaagggttatacccaaaaggaaggcgaggattttttcgacacatactcaccagttgctcgcttgaccacgattcgagtactacttgctctggcggcctctcatggttttctcgtccatcagatggacgttaagacagctttcctaaacggagagctggaggaggagatctatatggatcaaccagacgggtatgtactagaaggtcaggagggaatggtgtgtaaactgttgaaatccttgtatggccttaagcaagcacctaagcaatggcatgagaagtttgacaccacgcttacatctgtaggctttgttgtgaacgaagctgacaaatgtgtgtactatcgctatggtgggggagaaggagtgatcttgtgcttatatgtcgatgacatattgatctttgggaccagcctcaatgtgattgaggaggtcaaggactatctgtccaagagttttgaaatgaaggatttgggagaggctgatgttattcttaagggaaaagtccattttacaccctctaacttttatgtttgtctaaaatgcacccctaaattacaaaaccggatataa

SEQ ID NO: 15007 - DNA, 3726 bp, Oryza sativa
  Clone ID: TFbOSC408072j.C1.o12.fg
atggctggttttgccgatgcactgaggccggataaattcaccggtgtgcattttaagagatggcagatcagggtcactctgtggctgacagctatgaaatgcttctgggtgagtactggcaaacctgaaggagttcttactgctgaacagcagaagcaattcgaggaagccactactctctttgtgggatgcattcttagcgttcttggcgatcgtctggtcgaggtgtatatgcatatgaccgacgctaaggagttgtgggatgcactgaatactaaattcggtgctactgatgctagcaatgatctgtatatcatggagcagtttcatgactacaagatggctgacaaccgttctgtagtcgaacaggctcatgagatacaaacgatggctaaggaactcgaactccttaagtgtgtcttacccgacaaatttgtggccgggtgcattattgcaaaactacctccatcttggagaagtttcggtactgcactcaaacacaagagacaggaatactccgttgaggggttgattgcgtctcttgatgttgaggagaaagctcgggaaaaagatgccgcgtctaagggcgatggtgggcagtccagtgccaatgttgtgcacaaggcccagaacaagagcaaggggaaatacaaagctcagcagaccaccaacttcaagaagcagaagaagaacaacaacaatcctaatcaggatgagaggacttgctttgtgtgtggccaagttggtcatctggctagaaagtgtccacagcgcaaggggatgaaggcacctgcagggcagacttctaagtctgctaaagtgaccattggcaacactggagatggaagcgggtatggtaatttacctactgttttttcagttaatcaatctactaattggtgggttgatactggggccaatgtatatgtttgtgctgacatctcattgttttcttcttatcaggtcgcacggggttccaccgtcctaatggggaatgggtcacatgcttctgttcatggtgttggcacggtagatctgaagtttacttcgggaaagatcgtgcagctgaagaacgtgcagcatgtcccttctatcgacaggaatcttgttagtggctcccgtctgactagagacggatttaagttggtttttgagtctaataaagtagtcgtgtctaaacatggatattttattggtaaaggttatgagtgcggaggcctgttccgcttttccctttctgatttctgcaataagtctgtgaaccatatttgtggcagtgtggatgatgaggctaatgtttggcattcacgtttatgtcatattaattttggcttgatgtctcggctttccagcatgtgtttaattcctaatttttccattgtcaaaggttctaagtgccatagttgtgtgcaatcgaagcaacctcgcaagcctcacaaggctgccgaggagagaaacttggcaccactagaactcctacattcagatctttgtgaaatgaatggggtgttgacgaagggtggaaaacgatatttcatgacattgattgatgatgctactagattttgctatgtgtacttgttgaaaacgaaagacgaggctctagactattttaaaatttataaggcagaagttgaaaatcaacttgacagaaagataaaaaggcttaggtctgatcgtggtggagagtttttctcgaacgagtttgacttattctgtgaggaacatggcatcatacatgagaggacgcctccctattctcccgagtctaatgggattgctgaaaggaagaaccgcacactgactgacttggtgaatgccatgttggacaccgcgggactgcctaaggcatggtggggggaggcattgttgacctcaaatcatgtgttaaacagagttcctaacagaaataaggacaaaacaccatatgagatatggattggtagaaaaccatcactttcttatttgcgcacatgggggtgcttggcgaaagtcaatgtaccaataacgaagaagcgcaaacttggacctaagactgtggactgtgtttttctgggatatgctcatcatagcattgcctatagatttttaatagttaaatccgagttcatcacaccaccagaacaaactgaacatacacatgaacttgtctctgaggaggatgtcagtgaagctcctcgaaggagtaagagacaaaggacggctaagtcttttggtgatgatttcactgtgtacctcgtggatgacactcctaagtcaatttcagaagcatatgcatctcctgatgcagactactggaaggaggttgtccatagtgaaatggattccattatcgctaacgggacttgggaggtgacagagcgaccctatgggtgtaaacctgtggggtgcaagtgggtgttcaagaagaagcttaggcctgacggtactattgaaaagtacaaggctcggcttgttgctaagggctatactcagaaagaaggcgaagatttatttgacacttactcacctgttgctagattgaccacaattcgtgtgctactttccctagcagcctcacatggtcttctcgttcatcaaatggacgttaagacagcttttcttaatggagagctggatgaggagatctatatgtatcaacctgatgggtttgtagttgaaggtcaagaaggcaaagtgtgcaaattgttgaagtctttgtatggtctgaaacaagctcctaagcaatggcatgagaaatttgacaaaacattgacatctgcaggctttgcagtcaatgaggcagataaatgtgtgtactatcgccatggtgggggtgagggagttattttgtgcttgtatgttgacgacatactgatatttgggacaaatcttgaggtgataaatgaggttaaatcattcttgtctcaaaattttgatatgaaggatttgggagtagctgatgttatcttaaacattaagctaattagaggtgagaatgggattacactcttgcagtcccattatgtggagaagatcttgaatcgtttggctacattgataaacaagagaattgctaggaatcaactggaatactcccaaatcattggctcgttgatgtacctggctagtgcaactaggcctgatatttcctttgctgtgagcaagttgagccgatttacctctaatccgggagatgatcactggcgtgcgtttgagcgagtaatgcgctatctgaaaggtactatggaattggggcttcactatactgggtatcctgcggtactggagggttatagtgattctaactggatctctgatgtggatgagatcaaagccactagtggatatgttttcacactgggtggtggtgctgtttcatggaggtcttgcaaacagaccattttgacgaggtcaaccatggaagcagagctaacggcactggatactgctactgttgaggcagaatggctgcgtgatctattaatggatctgcctgttgttgaaaaaccggtgccgactatccttatgaactgtgacaatcaaacgacatgtgaaaagacgattgaagtctgtcaggaaattaagaaactccggagttataacgttggattacatccaaacagcgagaaacctggcagatcccttcacgaagggactatcacgaaatgtgatagacaatgcatcgaaggagatgggtttgagacccatgtgagttatactatggtggtaacccagtctatgtga

SEQ ID NO: 15008 - DNA, 3963 bp, Oryza sativa
  Clone ID: TFbOSC408663j.C1.o15.fg
atggctggttttgccgatgcactgaggccggataaattcaccggtgtgcattttaagagatggcagatcagggtcactctgtggctgacagctatgaaatgcttctgggtgagtactggcaaacctgaaggagttcttactgctgaacagcagaagcaattcgaggaagccactactctctttgtgggatgcattcttagcgttcttggcgatcgtctggtcgaggtgtatatgcatatgaccgacgctaaggagttatgggatgcactgaatactaaattcggtgctactgatgctagcaatgatctgtatatcatggagcagtttcatgactacaaaatggctgacaaccgttctgtagtcgaacaggctcatgagatacaaaccatggctaaggaactcgaactccttaagtgtgtcttacccgacaaatttgtggccgggtgcattattgcaaaactacctccatcttggaggagtttcggtactgcactcaaacacaagagacaggaatactccgttgaggggttgattgcgtctcttgatgttgaggagaaagctcgggaaaaagatgccgcgtctaagggcgatggtgggcagtccagtgccaatgttgtgcacaaggcccagaacaagagcaaggggaaatacaaagctcagcagaccaccaacttcaagaagcagaagaagaacaacaacaatcctaatcaggatgagaggacttgctttgtgtgtggccaagttggtcatctggctaggaagtgtccacaacgcaaggggatgaaggcacctgcagggcagacttctaagtctgctaatgtgaccattggcaacactggagatggaagcgggtatggtaatttacctactgttttttcagttaatcaatctactaattggtgggttgatactggggccaatgtacatgtttgtgctgacatctcattgttttcttcttatcaggtcgcacggggttccaccgtcctaatggggaatgggtcacatgcttctgttcatggtgttggcacggtagatctaaagtttacttcgggaaagatcgtgcagctgaagaacgtgcagcatgtcccttctatcgacaggaatcttgttagtggctcccgtctgactagagacggatttaagttggtttttgagtctaataaagtagtcgtgtctaaacatggatattttattggtaaaggttatgagtgcggaggcctgttccgcttttccctttctgatttctgcaataagtctgtgaaccatatttgtggcagtgtggatgatgaggctaatgtttggcattcacgtttatgtcatattaattttggcttgatgtctcggctttccagcatgtgtttaattcctaagttttccattgtcaaaggttctaagtgccatagttgtgtgcaatcgaagcaacctcgcaagcctcacaaggctgccgaggagagaaacttggcaccactagaactcctacattcagatctttgtgaaatgaatggggtgttgacgaagggtggaaaacgatatttcatgacattgattgatgatgctactagattttgctatgtgtacttgttgaaaacgaaagacgaggctctagactattttaaaatttataaggcagaagttgaaaatcaacttgacagaaagataaaaaggcttaggtctgatcgtggtggagagtttttctcgaacgagtttgacttattctgtgaggaacatggcatcatacatgagaggacgcctccctattctcccgagtctaatgggattgctgaaaggaagaaccgcacactgactgacttggtgaatgccatgttggacaccgcgggactgcctaaggcatggtggggggaggcattgttgacctcaaatcatgtgttaaacagagttcctaacagaaataaggacaaaacaccatatgagatatggattggtagaaaaccatcactttcttatttgcgcacatgggggtgcttggcgaaagtcaatgtaccaataacgaagaagcgcaaacttggacctaagactgtggactgtgtttttctgggatatgctcatcatagcattgcctatagatttttaatagttaaatccgaggtaccggacatgcatgttggtacaattatggagtctcgtgatgctaccttctttgagagctttttcccaatgaaggatacacatagtggttcgaaccaaccctctgaaataattcccagttcaatcacaccaccagaacaaactgaacatacacatgaacttgtctctgaggaggatgtcagtgaagctcctcgaaggagtaagagacaaaggacggctaagtcttttggtgatgatttcactgtgtacctcgtggatgacactcctaagtcaatttcagaagcatatgcatctcctgatgcagactactggaaggaggctgtccgtagtgaaatggattccattatcgctaacgggacttgggaggtgacagagcgaccctatgggtgtaaacctgtggggtgcaagtgggtgttcaagaagaagcttaggcctgacggtactattgaaaagtacaaggctcggcttgttgctaagggctatactcagaaagaaggcgaagatttctttgacacttactcacctgttgctagattgaccacaattcgtgtgctactttccctagcagcctcacatggtcttctcgttcatcaaatggacgttaagacagcttttcttaatggagagctggatgaggagatctatatggatcaacctgatgggtttgtacttgaaggtcaagaaggcaaagtgtgcaaattgttgaagtctttgtatggtctgaaacaagctcctaagcaatggcatgagaaatttgacaaaacattgacatctgcaggctttgcagtcaatgaggcagataaatgtgtgtactatcaccatggtgggggtgagggagttattttgtgcttgtatgttgacgacatactgatatttgggacaaaccttgaggtgataaatgaggttaaatcattcttgtctcaaaattttgatatgaaagatttgggagtagctgatgttattttaaacattaagctaattagaggtgagaatgggattacactcttgcagtctcattatgtggagaagatcttgaatcgctttggctacattgatagtaagccttctccaacaccttatgatcctagcttgtcgcttcgcaagaacaagagaattgctaggaatcaactggaatactcccaaatcattggctcgttgatgtacctggctagtgcaactaggcctgatatctcctttgctgtgagcaagttgagccgatttacctctaatccgggagatgatcactggcgtgcgcttgagcgagtaatgcgctatctgaaaggtactgtggaattggggcttcactatactgggtatcctgcggtactggagggttatagtgattctaactggatctctgatgtggatgagatcaaagccactagtggatatgttttcacactgggtggtggtgctgtttcatggaggtcttgcaaacagacaattttgacgaggtcaaccatggaagcagagctaacggcactggatactgctactgttgaggcagaatggttgcgtgatctattaatggatctgcctgttgttgaaaaaccggtgccggctatccttatgaactgtgacaatcaaacgacatgtgaaaagacgattgaagtctgtcaggaaattaagaaactccggagttataacgttggattacatccaaacagcgagaaacctggcagatcccttcacgaagggactatcacgaaatgtgatagacaatgcatcgaaggagatgggtttgagacccatagcattcttgaaggaactcacctttgtgagcttgactgttggtcgcagtccatgaagattttgggtgaatcttctaggaagcttactaaagacctaggagtatga

SEQ ID NO: 15009 - DNA, 4230 bp, Oryza sativa
  Clone ID: TFbOSC409798j.C1.o5.fg
atgcagtctagggtttgcctcctactctgtactgcgccgtcgctcgtagactactccatcccgctcgccggcgtgcacctgcgatcgggagagcaggtctccggaacctctgcctttgacgtcctgcaccgggagaaggcggcaataagatctaatgatgcgttcatgctagttttcatctgtaatgtcatgatttatttatggaataaattaaatccttatatgcccataatctcaacaatccaaaaaccttattataggcactgtgattttactatggctggttttgccgatgcactgaggccggataaattcaccggtgtgcattttaagagatggcagatcagggtcactctgtggctgacagctatgaaatgcttctgggtgagtactggcaaacctgaaggagttcttactgctgaacagcagaagcaattcgaggaagccactactctctttgtgggatgcgttcttggcgatcgtctggtcgaggtgtatatgcatatgaccgacgctaaggagttgtgggatgcactgaatactaaattcggtgctactgatgctagcaatgatctgtatatcatggagcagtttcatgactacaaaatggctgacaaccgttctgtagtcgaacaggctcatgagatacaaaccatggctaaggaactcgaactccttaagtgtgtcttacccgacaaatttgtggccgggtgcattattgcaaaacttcctccatcttggaggagtttcggtactgcactcaaacacaagagacaggaatactccgttgaggggttgattgcgtctcttgatgttgaggagaaagctcgggaaaaagatgccgcgtctaagggcgatggtgggcagtccagtgccaatgttgtgcacaaggcccagaacaagagcaaggggaaatacaaagctcagcagaccaccaacttcaagaagcagaagaagaacaacaacaatcctaatcaggatgagaggacttgctttgtgtgtggccaagttggtcatctggctaggaagtgtccacaacgcaaggggatgaaggcacctgcagggcagacttctaagtctgctaatgtgaccattggcaacactggagatggaagcgggtatggtaatttacctactgttttttcagttaatcaatctactaattggtgggttgatactggggccaatgtacatgtttgtgctgacatctcattgttttcttcttatcaggtcgcacggggttccaccgtcctaatggggaatgggtcacatgcttctgttcatggtgttggcacggtagatctgaagtttacttcgggaaagatcgtgcagctgaagaacgtgcagcatgtcccttctatcgacaggaatcttgttagtggctcccgtctgactagagacggatttaagttggtttttgagtctaataaagtagtcgtgtctaaacatggatattttattggtaaaggttatgagtgcggaggcctgttccgcttttccctttctgatttctgcaataagtctgtgaaccatatttgtggcagtgtggatgatgaagctaatgtttggcattcacgtttatgtcatattaattttggcttgatgtctcggctttccagcatgtgtttaattcctaagttttccattgtcaaaggttctaagtgccatagttgtgtgcaatcgaagcaacctcgcaagcctcacaaggctgccgaggagagaaacttggcaccactagaactcctacattcagatctttgtgaaatgaatggggtgttgacgaagggtggaaaacgatatttcatgacattgattgatgatgctactagattttgctatgtgtacttgttgaaaacgaaagacgaggctctagactattttaaaatttataaggcagaagttgaaaatcaacttgacagaaagataaaaaggcttaggtctgatcgtggtggagagtttttctcgaacgagtttgacttattctgtgaagaacatggcatcatacatgagaggacgcctccctattctcccgagtctaatgggattgctgaaaggaagaaccgcacactgactgacttggtgaatgccatgttggacaccgcgggactgcctaaggcatggtggggggaggcattgttgacctcaaatcatgtgttaaacagaattcctaacagaaataaggacaaaacaccatatgagatatggattggtagaaaaccatcactttcttatttgcgcacatgggggtgcttggcgaaagtcaatgtaccaataacgaagaagcgcaaacttggacctaagactgtggactgtgtttttctgggatatgctcatcatagcattgcctatagatttttaatagttaaatccgaggtaccggacatgcatgttggtacaattatggagtctcgtgatgctaccttctttgagagcttttttccaatgaaggatacacatagtggttcgaaccaaccctctgaaataattcccagttcaatcacaccaccagaacaaactgaacatacacatgaacttgtctctgaggaggatgtcagtgaagctcctcgaaggagtaagagacaaaggacggctaagtcttttggtgatgatttcactgtgtacctcgtggatgacactcctaagtcaatttcagaagcatatgcatctcctgatgcagactactggaaggaggctgtccgtagtgaaatggattccattatcgctaacgggacttgggaggtgacagagcgaccctatgggtgtaaacctgtggggtgcaagtgggtgttcaagaagaagcttaggcctgacggtactattgaaaagtacaaggctcggcttgttgctaagggctatactcagaaagaaggcgaagatttctttgacacttactcacctgttgctagattgaccacaattcgtgtgctactttccctagcagcctcacatggtcttctcgttcatcaaatggacgttaagacagcttttcttaatggagagctggatgaggagatctatatggatcaacctgatgggtttgtagttgaaggtcaagaaggcaaagtgtgcaaattgttgaagtctttgtatggtctgaaacaagctcctaagcaatggcatgagaaatttgacaaaacattgacatctgcaggctttgcagtcaatgaggcagataaatgtgtgtactatcgccatggtgggggtgagggagttattttgtgcttgtatgttgacgacatactgatatttgggacaaaccttgaggtgataaatgaggttaaatcattcttgtctcaaaattttgatatgaaagatttgggagtagctgatgttatcttaaacattaagctaattagaggtgagaatgggattactctcttgcagtcccattatgtggagaagatcttgaatcgctttggctacattgatagtaagccttctccaacaccttatgatcctagcttgttgcttcgcaagaacaagagaattgctaggaatcaactggaatactcccaaatcattggctcgttgatgtacctggctagtgcaactaggcctgatatctcctttgctgtgagcaagttgagccgatttacttctaatccgggagatgatcactggcgtgcgcttgagcgagtaatgcgctatctgaaaggtactgtggaattgggacttcactatactgggtatcctgcggtactggagggttatagtgattctaactggatctctgatgtggatgagatcaaagccactagtggatatgttttcacactgggtggtggtgctgtttcatggaggtcttgcaaacagacaattttgacgaggtcaaccatggaagcagaactaacggcactggatactgctactgttgaggcagaatggctgcgtgatctattaatggatctgcctgttgttgaaaaaccggtgccggctatccttatgaactgtgacaatcaaacgacatgtgaaaagacgattgaagtctgtcaggaaattaagaaactccggagttataacgttggattacatccaaacagcgagaaacctggcagatcccttcacaaagggactatcacgaaatgtgatagacaatgcatcgaaggagatgggtttgagacccatagcattcttgaaggaactcacctttgtgagcttgactgttggtcgcagtctatgaagattttgggtgaatcttctaggaagcttaccaaagacctaggagtatga

SEQ ID NO: 15010 - DNA, 8493 bp, Oryza sativa
  Clone ID: TFbOSC409831j.C1.o21.gm
atgccgcccccaatcgtcgggaacggccgcgccaagtccggccgccttcctttgccgccggccaccattcccgtcgccgttcccgcgcctcccgtggccggctccctcccccatcctataaaatgggatcctcatcccccgttctctcgttttagccccatcccgagcctccccgtgccctccacctcgtccactcctcggtttcgccggaacgccatcgccgcgaacctctacatccgcctcgccggagttgttcggccgcctgtccctcctcgccgtgcaccggtcgaccacacctccaccacctccggcatcgcagcggcaagcggcgtggtcctcgtcgtcctcgtccccgtgcagccgctgccggctgtcctcgtcgcctcctcgccggtcccggtcgtcgtcgtcgtcgtcgtcgtcatcctctcgtcgttcccggtcgtcgtggcgttcgtccctccgtcaagccgttctcgttcgtcgtcctcgcttcgtcaagatcgctgcagccccgtcctcgtgttcgtcctcggttccgcgtcgtcaagcctcgtgccggccgcgtctcgccttcgcccaaggatcgccgccgaagccgtcccctcgccgttcgtctccgttgtgcccgtctgtctccgccgcgcccgttcgtcgttgtcgttcccacgcctcgtcgcgtggtgggcaaatgaaggctacacgagctgcggcccggtagtcgagatgtcatacggcggagggttggtgcccaatgctaggggctcagttctgcctgcctgtcccgggtatcccggccgtagggctaaggagcatgctttgagggagaatatgacaaagatcttttgtccgtgccgtcattgcaagaatcagaaattgttggtagatcctggtgaaatattgggtcacataatggagtacggattcaccgccaactacaaggtttggacctatcacggggaattcgccaatccggaagatgacgatgaagagttaagtttcgagatgaatgaggcagagaattttataatcgaagacatgtcgcgtgaaagaatgattgtcgatgtttccaccgatagtgatgatttcgatggtggttttgatttagaggatatgctacgccatgttgaaccagaggaccgcctgaagcgtctgtactcaaacccgactgatgctgagttgatgagatggcatcaagagagccggaaaatagatggtatgattcgacatcccgccgacgctcgccagtggaagacatttgatgcaaaacacccagaatttgctaaggatcctaggaatgtaaggtttgcgttgagcactgatggaatgaacccgtttggtgacttaagcagctcgcacagcacatggccagtccttctcacaatgtataatcttccaacatggatatgtcagaaacgaaagtacattctactcactatcctcatacaaggtccaaaccaacctggaatcgacatagatgttttccttgagcctttgatggaggacatggaggagctttggaaagaggggttacgactatgggatgagtttaagcgggagcacttcaatctacgtgcaatcatattcgttaccatcaatgacctacctgcaaacttttcattatctgggcagattaaagggaagactggatgtctgatatgtctggagaaaacttcatacaaatacctgacgtcgtctttgaagacagtgtacatgcgacatcgacggttcctaccacaaagacataggtaccgtaagatggctagattgttcgataatacagtggagaatgacactgccccagtagcaagaggtggtacatacgtgtatgagataacaaagaagattaaggttgtatatggaaagggaaagaagaagacagtaaagaggaagaaagctgatggtgacaacggtactgcgtcgcctttcaagaagcactcaattttctttaaatacttagattactggaaggacctagagattcgacatgcaattgatgttatgcacctcgagaagaacgtgtttgatagcaccgttggcacattgctggacatcccgagtccgcttcagacatttgccgtcgagactgtatgccagcttgagatgtatttcccaccatcatttttagatatgatggagcatttgatcgttcacatcgtccctcagattattgaacttggtccattatacttacatcagatgtgggcctatgagcgttacatgtcgatcctcaaaggctatgtacacaatcgcgctcacccggaaggatcaatgatagagggatacacaactgaagaggcagtcgagtgttgtatggactacataaaggatgctaatgccattggcattcctgttcatcgacatgaaggtagattgtctggaaggggtactgttggtaggaagcagttcttcgataatgattacaaaaaggtgtccgcggcacacaacagcgttcttcaacagctcgctatcgttgagccattcattgagcgacacctagaagaaatcaaagcctgcttcccagggcggtccaatgattggatatcaagagagcacaagcgtcgctttcctctgtggttgaaagatctaaacctgccagttggtgattctgtggaggaacttactttacaaagattggcatgtgggccttcaagtattgtcaattcatggcaaggttacgacatcaatggatttaccttgagtacgactacgaaggacatgaaaagcacatcacaaaacagtgggatccgtgtcgaagcgattgacacgagtggagaaaagaggtcgtattatgggaccattcaagaaatatgggaactggactatggcctaaacatccagatccctgtgctccgttgtgaatgggttaaagacacaataggggtttccgttgatgactacgggctaacgatagtcgatcacagtaaaacaggccacaaggatgatccatgggttttagcagagcgtgtggctcaggtgttttatgtgaaggacccttcagatgaaagaaaaactattgtcatatccggaaagcaacagatcgtcggcatcgacaacatcgaagaccccaatgattacaaccagttcgacgatgtaccattgtttactgatcttcctatgcgaattaagaaggttgagagaacaatcgatgaagcaaatatgtcgtacgttcgagcagatggtgttgccaaggacctctcccccctcgccgtcgccgtcgctgccgccaggacctctcccccctcgccgtcgccgtcgccgccggcaggtcgccgtcgccactgcacggaactctcccccctcgccgttgccatccccgccgccaggtcgtccccgccgccaagtcgtccccgctaccgccggctcctccccgaagtcgccccgcccctcgccgtcgccgacgccactgccaggacctctcccccctcgccgtcgccgtcgccgccgcacggacctctcccccctcgccgttgccatcgccgccgccaggtcgtcgccgccgccaggtcgtccccgccgtcgctcggcgcttctagtgaagaaacgtggcgcacaccaagtgacccgtttccaatggaaataacacaagtcgccccccgcgatgatgatccggactacatacctatcgaacaggccatggtagtccgacgccgctcgaaacgtaaagccgggaggaacaggacagagcaagaagttgagatggacaccgctacgtctgcacctgaacgtacggagacatctacaagtgcaggcgggagtgggaaaaaaagacgtggtgagagaagcaagaataaattacccaaggaaacttacaacgtgattgctctcgatcaggatgggaagcccatcgagccaccgatagtgcggtccaagttcagcaacgcctgtggcactctagtcaggacgcgttgtcccattaatgtcaagttgtgggaaacagtggacgacaacatcaagacacttctctggaatgagttgcagaagtattttgtgttccctcctggatcagaggctgactgggacacgtttgttgcggatcgtacaacagctgaagcattggctttgaggaaaaaaatgtccgagctcgcgaagaagaacaaatatccccatagattggggtcgagcggatacgctggtcacgtcgatcaatggcgggagatcgagcaaagatttgccgcggccggtaagcccctgctggtagaccccatggttgaacgtagcaagaactgggtttgggcgcgcagcacaggtcaagtctcggatgagggagacatactattcgagactccagacatagaagaagtgactactaatttgcagcagatagtcgagaaagaaagatcaggacagttcgtcccacggagggagagagatcagcttactgcggcgttggggacggctgaacactctggacgtgtaaggggtttgtcctcaaagacaagttggaaggtcgggtttccacaagacgcaccaagttataagaagagagacaaatacaaagaacaactatcggacaagatctatgcgcaagtgaaggaacacttctactcgttggcagctgaaaacccgacagcatttccaaggaattctgagaagagaaaagaacttgctcacgtcttgtcagactcccagaagtcagtactagcggcccaagatgaagtgcaatcctggttatctgccgatgtgcctgaaacttatgagtatggcaagccattcttgccaacttatcttatgaacaagctaccatgggaaatgagggtaatgcacgaatgtatgcaattccacgaagctgatagaactggagcaaaggttggatacgtcgatccaacaagaatatgcaaaacacaacacaccatagagctgagacaggactgcgagcaattggttggcaagaccccggaagaaaaggaagaatatgtgaagacattgcacaagaggaagaagctagaagtagcaacatacttggcaatagcaatgttggcgcacgccgacaaagatgtcttaatggtcccctaccagttcacagcacacaagtactaccgcaaaagaggtggaccagtacatattccatcccagaagaagttatccgtcaggactggctggccgatccccgaaatcccatatattgcacaacgattcaaccacactactatcttgaacgtggccgctgacctctgccgattcatccgtcgcgatgtctgcaacgcaagaggtctcttctacgacaaccagagtgtcacgcctgagtcagcaagctttgccgatactggatatgaccccccgccaaaaaaatggaaagggatttgccaggttggcccatcgtttgaggccataagttgcaaccggaagtttatcggtgcacggtggtacatcgatgacgagattctaagtagcatatccgataacgaggttctttctcctagggatgtcgaaggccacggcacgcacacagcctcaacggctggcggcaacatcatccacaatgttagctttctggggctagctgcagggacagttcggggtggagcgccccgtgcacgattagccatatacaaggcctgttggtccggttatggctgctccggtgccaccgtgttgaaagccatggacgacgctgtctatgatggtgttgatgtcttatcactttctataggtggtacaaaagaagatgtgggaaccctacatgtcgtcgctaatggtatctcggttgtctacgctggtggaaacgatggtcccattgctcagacggtggagaaccaatcaccatggctagtaacggtcgctgcaaccaccattgatcggtccttgcctgtggttatcaccttgggaaacggcgaaaagttggtggcgcaatcctttgtcctcctggaaactgcaagtcagttcagtgagatacagaagtacacagacgaggaatgcaatgccaacaatattatgaacagcacggtgaaggggaaaatagccttctgcttcatgggagagatgttgaataataagcagcagacatcataccctgatgtcaccacggcagtggcagccaaaggaggcagagcaccggacattgctgcaccaggggtttcgattttagccgctgctcagattccatattacaaaggtgtttcctaccatttcgattctggaacatctatggcttgcccccatgtagctgggatcattgcggtgctcaagtccattcatccaaaatggtcacctgcggctctcaaatccgcaatcatgacaacagactactccatcccgctcgctggcgtgcaccagcgatcgggagagcaggtctccggaacctctgcctttgacgtcctgcaccgggagaaggcggcaataaggcactgtgattttactatggctgattttgccgatgcactgaggccggataaattcaccggtgtgcattttaagagatggcagatcagggtcactctgtggctgacagctatgaaatgcttctgggtgagtactggcaaacctgaaggagttcttactgctgaacagcagaagcaattcgaggaagccactactctatttgtgggatgcattcttagcgttcttggcgatcgtctggtcgaggaatactccgttgaggggttgatagcgtctcttgatgttgaggagaaagctcgggaaaaagatgccgcgtctaagggcgatggtgggcagtccagcgccaatgttgtgcacaaggcccagaacaagagtaaggggaaatacaaagctcagcagaccaccaacttcaagaagcagaagaagaacaacaacaatcctaatcaggatgagaggacttgctttgtgtgtggccaagttggtcatctggctaggaagtgtccacagcgcaaggggatgaaggcacctgcagggcagacttctaagtctgctaatgtgaccattggcaacactggagatggaagcgggtatggtaatttacctactgtcgcacggggttccaccgtcctaatggggaatgggtcacatgcttctgttcatggtgttggcacggtagatctgaagtttacttcgggaaagatcgtgcagctgaagaacgtgcagcatgtcccttctatcgacaggaatcttgatacacatagtggttcgaaccaaccctctgaaataattcccagttcaatcataccaccagaacaaactgaacatacacatgaacttgtctctgaggaggatgtcagtgaagctcctcgaaggagtaagagacaaaggacggctaagtcttttggtgatgattttactgtgtacctcgtggatgacactcctaagtcaatttcagaagcatatgcatctcctgatgcagactactggaaggaggctgtccgtagtgaaatggattccattatcgctaacgggacttgggaggtgacagagcaaccctatgggtgtaaacctgtggggtgcaagtgggtgttcaagaagaagcttaggcctgacgcctcacatggtcttctcgttcatcaaatggacgttaagacagcttttcttaatggagagctggatgaggagatctatatggatcaacctgatgggtttgtagttgaaggctttggagtcaatgaggcagataaatgtgtgtattatcgccatggtgggggtgagggagttattttgtgcttgtatgttgacgacatactgatatttgggacaaaccttgaggtgataaatgagtcccattatgtggagaagatcttgaatcgctttggctacattgatagtaagccttctccaacaccttatgatcctagcttgttgcttcgcaagaacaagagaattgctaggaatcaactggaatactcccaaatcattggctcgttgatgtacctggctagtgcaactaggcctgatatctcctttgctgtgagcaagttgagccgatttacctctaatccgggagatgatcactggcgtgcgcttgagcgagtaatgcgctatctgaaaggtactgtggaattggggcttcactatactgggtatcctgcggtactggagggttatagtgattctaactggatctctgatgtggatgagatcaaagccactagtggatatgttttcacactgggtggtggtgctgtttcatggaggtcttgcaaacagacaattttgacgaggtcaaccatggaagcagagctaacggcactggatactgctactgttgaggcagaatggctgcgtgatctattaatggatctgcctgttgttgaaaaaccggtgccggctatccttatgaactgtgacaatcaaacggaaattaagaaactccggagttataacgttggattacatccaaacagcgagaaacctggcagatcccttcacgaagggactatcacgaaatactactccatgccgctcgccggcgtgcaccagcgatcgggagagcaggtctccggaacctctgcctttgacgtcctgcaccgggagaaggcggcaataagacacctgcgaaaagtttcgaccaagcagcagatctaa

SEQ ID NO: 15011 - DNA, 3963 bp, Oryza sativa
  Clone ID: TFbOSC411700j.C1.o3.fg
atggctggttttgccgatgcactgaggccggataaattcaccgctgtgcattttaagagatggcagatcagggtcactctgtggctgacagctatgaaatgcttctgggtgagtactggcaaacctgaaggagttcttactgctgaacagcagaagcaattcgaggaagccactactctctttgtgggatgcattcttagcgttcttggcgatcgtctggtcgaggtgtatatgcatatgaccgacgctaaggagttgtgggatgcactgaatactaaattcggtgctactgatgctagcaatgatctgtatatcatggagcagtttcatgactacaaaatggctgacaaccgttctgtagtcgaacaggctcatgagatacaaaccatggctaaggaactcgaactccttaagtgtgtcttacccgacaaatttgtggccgggtgcattattgcaaaactacctccatcttggaggagtttcggtactgcactcaaacacaagagacaggaatactccgttgaggggttgattgcgtctcttgatgttgaggagaaagctcgggaaaaagatgccgcgtctaagggcgatggtgggcagtccagtgccaatgttgtgcacaaggcccagaacaagagcaaggggaaatacaaagctcagcagaccaccaacttcaagaagcagaagaagaacaacaacaatcctaatcaggatgagaggacttgctttgtgtgtggccaagttggtcatctggctaggaagtgtccacagcgcaaggggatgaaggcacctgcagggcagacttctaagtctgctaatgtgaccattggcaacactggagatggaagcgggtatggtaatttacctactgttttttcagttaatcaatctactaattggtgggttgatactggggccaatgtacatgtttgtgctgacatctcattgttttcttcttatcaggtcgcacggggttccaccgtcctaatggggaatgggtcacatgcttctgttcatggtgttggcacggtagatctgaagtttacttcgggaaagatcgtgcagctgaagaacgtgcagcatgtcccttctatcgacaggaatcttgttagtggctcccgtctgactagagacggatttaagttggtttttgagtctaataaagtagtcatgtctaaacatggatattttattggtaaaggttatgagtgcggagacctgttccgcttttccctttctgatttctgcaataagtctgtgaaccatatttgtggcagtgtggatgatgaggctaatgtttggcattcacgtttatgtcatattaattttggcttgatgtctcggctttccagcatgtgtttaattcctaagttttccattgtcaaaggttctaagtgccatagttgtgtgcaatcgaagcaacctcgcaagcctcacaaggctgccgaggagagaaacttggcaccactagaactcctacattcagatctttgtgaaatgaatggggtgttgacgaagggtggaaaacgatatttcatgacattgattgatgatgctactagattttgctatgtgtacttgttgaaaacgaaagacgatgctctagactattttaaaatttataaggcagaagttgaaaatcaacttgacagaaagataaaaaggcttaggtctgatcgtggtggagagtttttctcgaacgagtttgacttattctgtgaggaacatggcatcatacatgagaggacgcctccctattctcccgagtctaatgggattgctgaaaggaagaatcgcacactgactgacttggtgaatgccatgttggacaccgcgggactgcctaaggcatggtggggggaggcattgttgacctcaaatcatgtgttaaacagagttcctaacagaaataaggacaaaacaccatatgagatatggattggtagaaaaccatcactttcttatttgcgcacatgggggtgcttggcgaaagtcaatgtaccaataacgaagaagcgcaaacttggtcctaagactgtggactgtgtttttctgggatatgctcatcatagcattgcctatagatttttaatagttaaatccgaggtaccggacatgcatgttggtacaattatggagtctcgtgattctatcttctttgagagctttttcccaatgaaggatacacatagtggttcgaaccaaccctctgaaataattcccagttcaatcacaccaccagaacaaactgaacatacacatgaacttgtctctgaggaggatgtcagtgaagctcctcgaaggagtaagagacaaaggacggctaagtcttttggtgatgatttcactgtgtacctcgtggatgacactcctaagtcaatttcagaagcatatgcatctcctgatgcagactactggaaggaggctgtccgtagtgaaatggattccattatcgctaacggaacttgggaggtgacagagcgactctatgggtgtaaacctgtgtggtgcaagtgggtgttcaagaagaagcttaggcctgacggtactattgaaaagtacaaggctcggcttgttgctaagggctatactcagaaagaaggcgaagatttctttgacacttactcacctgttgctagattgaccacaattcgtgtgctactttccctagcagcctcacatggtcttctcgttcatcaaatggacgttaagacagcttttcttaatggagagctggatgaggagatctatatggatcaacctgatgggtttgtagttgaaggtcaagaaggcaaagtgtgcaaattgtttaagtctttgtatggtctgaaacaagctcctaagcaatggcatgagaaatttgacaaaacattgacatctgcaggctttgcagtcaatgaggcagataaatgtgtgtactatcgccatggtgggggtgagggagttattttgtgcttgtatgttgacgacatactgatatttgggacaaaccttgaggtgataaatgaggttaaatcattcttgtctcaaaattttgatatgagggatttgggagtagctgatgttatcttaaacattaagctaattagaggtgagaatgggattacactcttgcagtcccattatgtggagaagatcttgaatcgctttggctacattgatagtaagccttctccaacaccttatgatcctagcttgttgcttcgcaagaacaagagaattgctaggaatcaactggaatactcccaaatcattggctcgttgatgtacctggctagtgcaactaggcctaatatctcctttgctgtgagcaagttgagccgatttacctctaatccgggagatgatcactggcgtgcgcttgagcgagtaatgcgctatctgaaaggtactgtggaattgaggcttcactatactgggtgtcctgcggtactggagggttatagtgattctaactggatctctgatgtggatgagatcaaagccactagtggatatgttttcacactaggtggtggtgctgtttcatggaggtcttgcaaacagaccattttgacgaggtcaaccatggaagcagagctaacggcactggatactgctactgttgaggcagaatggctgcgtgatctattaatggatctgcctgttgttgaaaaaccggtgccggctatccttatgaactgtgacaatcaaacgacatgtgaaaagacgattgaagtctgtcaggaaattaagaaactccggagttataacgttggattacatccaaacagcgagaaacctggcagatcccttcacgaagggactatcacgaaatgtgatagacaatgcatcgaaggagatgggtttgagacccatagcattcttgaaagaactcacctttgtgagcttgactgttggtcgcagtctatgaagattttgggtgaatcttctaggaagcttactaaagacctaggagtatga

SEQ ID NO: 15012 - DNA, 3963 bp, Oryza sativa
  Clone ID: TFbOSC412577j.C1.o22.fg
atggctggttttgccgatgcactgaggccggataaattcaccggtgtgcattttaagagatggcagatcagggtcactctgtggctgacagctatgaaatgcttctgggtgagtactggcaaacctgaaggagttcttactgctgaacagcagaagcaattcgaggaagccactactctctttgtgggatgcattcttagtgttcttggcgatcgtctggtcgaggtgtatatgcatatgaccgacgctaaggagttgtgggatgcactgaatactaaattcggtgctactgatgctagcaatgatctgtatatcatggagcagtttcatgactacaaaatggctgacaaccgttctgtagtcgaacaggctcatgagatacaaaccatggctaaggaactcgaactccttaagtgtgtcttacccgacaaatttgtggccgggtgcattattgcaaaactacctccatcttggaggagtttcggtactgcactcaaacacaagagacaggaatactccgttgaggggttgattgcgtctcttgatgttgaggagaaagctcgggaaaaagatgccgcgtctaagggcgatggtgggcagtccagtgccaatgttgtgcacaaggcccagaacaagagcaaggggaaatacaaagctcagcagaccaccaacttcaagaagcagaagaagaacaacaacaatcctaatcaggatgagaggacttgctttgtgtgtggccaagttggtcatctggctaggaagtgtccacagcgcaaggggatgaaggcacctgcagggcagacttctaagtctgctaatgtgaccattggcaacactggagatggaagcgggtatggtaatttacctactgttttttcagttaatcaatctactaattggtgggttgatactggggccaatgtacatgtttgtgctgacatctcattgttttcttcttatcaggtcgcacggggttccaccgtcctaatggggaatgggtcacatgcttctgttcatggtgttggcacggtagatctgaagtttacttcgggaaagatcgtgcagctgaagaacgtgcagcatgtcccttctatcgacaggaatcttgttagtggctcccgtctgactagagacggatttaagttggtttttgagtctaataaagtagtcgtgtctaaacatggatattttattggtaaaggttatgagtgcggaggcctgttccgctttttcctttctgatttctgcaataagtctgtgaaccatatttgtggcagtgtggatgatgaggctaatgtttggcattcacgtttatgtcatattaattttggcttgatgtctcggctttccagcatgtgtttaattcctaagttttccattgtcaaaggttctaagtgctatagttgtgtgcaatcgaagcaacctcgcaagcctcacaaggctgccgaggagagaaacttggcaccactagaactcctacattcagatctttgtgaaatgaatggggtgttgacgaagggtggaaaacgatatttcatgacattgattgatgatgctactagattttgctatgtgtacttgttgaaaacgaaagacgaggctctagactattttaaaatttataaggcagaagttgaaaatcaacttgacagaaagataaaaaggcttaggtctgatcgtggtggagagtttttctcgaacgagtttgacttattctgtgaggaacatggcatcatacatgagaggacgcctccctattctcccgagtctaatgggattgctgaaaggaagaaccgcacactgactgacttggtgaatgccatgttggacaccgcgggactgcctaaggcatggtggggggaggcattgttgacctcaaatcatgtgttaaacagagttcctaacagaaataaggacaaaacaccatatgagatatggattggtagaaaaccatcactttcttatttgcgcacatggggttgcttggcgaaagtcaatgtaccaataacaaagaagcgcaaacttggacctaagactgtggactgtgtttttctgggatatgctcatcatagcattgcctatagatttttaatagttaaatccgaggtaccggacatgcatgttggtacaattatggagtctcgtgatgctaccttctttgagagctttttcccaatgaaggatacacatagtggttcgaaccaaccctctgaaataattcccagttcaatcacaccaccagaacaaactgaacatacacatgaacttgtctctgaggaggatgtcagtgaagctcctcgaaggagtaagagacaaaggacggctaagtcttttggtgatgatttcactgtgtacctcgtggatgacactcctaagtcaatttcagaagcatatgcatctcctgatgcagactactggaaggaggctgtccgtagtgaaatggattccattatcgctaacgggacttgggaggtgacagagcgaccctatgggtgtaaacctgtggggtgcaagtgggtgttcaagaagaagcttaggcctgacggtactattgaaaagtacaaggctcggcttgttgctaagggctatactcagaaagaaggcgaagatttctttgacacttactcacctgttgctagattgaccacaattcgtgtgctactttccctagcagcctcacatggtcttctcgttcatcaaatggacgttaagacagcttttcttaatggagagctggatgaggagatctatatggatcaacctgatgggtttgtagttgaaggtcaagaaggcaaagtgtgcaaattgttgaagtctttgtatggtctgaaacaagctcctaagcaatggcatgagaaatttgacaaaacattgacatctgcaggctttgcagtcaatgaggcagataaatgtgtgtactatcgccatggtgggggtgagggagttattttgtgcttgtatgttgatgacatactgatatttgggacaaaccttgaggtgataaatgaggttaaatcattcttgtctcaaaattttgatatgaaagatttgggagtagctgatgttatcttaaacattaagctaattagaggtgagaatgggattacactcttgcagtcccattatgtggagaagatcttgaatcgctttggctacattgatagtaagccttctccaacaccttatgatcctagcttgttgcttcgcaagaacaagagaattgctaggaatcaactggaatactcccaaatcattggctcgttgatgtacctggctagtgcaactaggcctgatatctcctttgctgtgagcaagttgagccgatttacctctaatccgggagatgatcactggcgtgcgcttgagcgagtaatgcgctatctgaaaggtactgtggaattggggcttcactatactgggtatcctgcggtactggagggttatagtgattctaactggatctctgatgtggatgagatcaaagccactagtggatatgttttcacactgggtggtggtgctgtttcatggaggtcttgcaaacagaccattttgacgaggtcaaccatggaagcagagctaacggcactggatactgctactgttgaggcagaatggctgcgtgatctattaatggatctgcctgttgttgaaaaaccggtgccggctatccttatgaactgtgacaatcaaacgacatgtgaaaagacgattgaagtctgtcaggaaattaagaaactccggagttataacgttgaattacatccaaacagcgagaaacctggcagatcccttcacgaagggactatcacgaaatgtgataaacaatgcatcgaaggagatgggtttgagacccatagcattcttgaaagaactcacctttgtgagcttgactgttggtcgcagtctatgaagattttgggtgaatcttctaggaagcttactaaagacctaggagtatga

SEQ ID NO: 15013 - DNA, 4383 bp, Oryza sativa
  Clone ID: TFbOSC413111j.C1.o1.fg
atggctggttttgccgatgcactgaggccggataaattcaccggtgtgcattttaagagatggcagatcagggtcactctgtggctgacagctatgaaatgcttctgggtgagtactggcaaacctgaaggagttcttactgctgaacagcagaagcaattcgaggaagccactactctctttgtgggatgcattcttagcgttcttggcgatcgtctggtcgaggtgtatatgcatatgaccgacgctaaggagttgtgggatgcactgaatactaaattcggtgctactgatgctagcaatgatctgtatatcatggagcagtttcatgactacaaaatggctgacaaccgttctgtagtcgaacaggctcatgagatacaaaccatggctaaggaactcgaactccttaagtgtgtcttacccgacaaatttgtggccgggtgcattattgcaaaactacctccatcttggaggagtttcggtactgcactcaaacacaagagacaggaatactccgttgaggggttgattgcgtctcttgatgttgaggagaaagctcgggaaaaagatgccgcgtctaagggcgatggtgggcagtccagtgccaatgttgtgcacaaggcccagaacaagagcaaggggaaatacaaagctcagcagaccaccaacttcaagaagcagaagaagaacaacaacaatcctaatcaggatgagaggacttgctttgtgtgtggccaagttggtcatctggctaggaagtgtccacaacgcaaggggatgaaggcacctgcagggcagacttctaagtctgctaatgtgaccattggcaacactggagatggaagcgggtatggtaatttacctactgttttttcagttaatcaatctactaattggtgggttgatactggggccaatgtacatgtttgtgctgacatctcattgttttcttcttatcaggtcgcacggggttccaccgtcctaatggggaatgggtcacatgcttctgttcatggtgttggcacggtagatctgaagtttacttcgggaaagatcgtgcagctgaagaacgtgcagcatgtcccttctatcgacaggaatcttgttagtggctcccgtctgactagagacggatttaagttggtttttgagtctaataaagtagtcgtgtctaaacatggatattttattggtaaaggttatgagtgcggaggcctgttccgcttttccctttctgatttctgcaataagtctgtgaaccatatttgtggcagtgtggatgatgaggctaatgtttggcattcacgtttatgtcatattaattttggcttgatgtctcggctttccagcatgtgtttaattcctaagttttccattgtcaaaggttctaagtgccatagttgtgtgcaatcgaagcaacctcgcaagcctcacaaggctgccgaggagagaaacttggcaccactagaactcctacattcagatctttgtgaaatgaatggggtgttgacgaagggtggaaaacgatatttcatgacattgattgatgatgctactagattttgctatgtgtacttgttgaaaacgaaagacgaggctctagactattttaaaatttataaggcagaagttgaaaatcaacttgacagaaagataaaaaggcttaggtctgatcgtggtggagagtttttctcgaacgagtttgacttattctgtgaggaacatggcatcatacatgagaggacgcctccctattctcccgagtctaatgggattgctgaaaggaagaaccgcacactgactgacttggtgaatgccatgttggacaccgcgggactgcctaaggcatggtggggggaggcattgttgacctcaaatcatgtgttaaacagagttcctaacagaaataaggacaaaacaccatatgagatatggattggtagaaaaccatcactttcttatttgcgcacatgggggtgcttggcgaaagtcaatgtaccaataacgaagaagcgcaaacttggacctaagactgtggactgtgtttttctgggatatgctcatcatagcattgcctatagatttttaatagttaaatccgaggtaccggacatgcatgttggtacaattatggagtctcgtgatgctaccttctttgagagctttttcccaatgaaggatacacatagtggttcgaaccaaccctctgaaataattcccagttcaatcacaccaccagaacaaactgaacatacacatgaacttgtctctgaggaggatgtcagtgaagctcctcgaaggagtaagagacaaaggacggctaagtcttttggtgatgatttcactgtgtacctcgtggatgacactcctaagtcaatttcagaagcatatgcatctcctgatgcagactactggaaggaggctgtccgtagtgaaatggattccattatcgctaacgggacttgggaggtgacagagcgaccctatgggtgtaaacctgtggggtgcaagtgggtgttcaagaagaagcttaggcctgacggtactattgaaaagtacaaggctcggcttgttgctaagggctatactcagaaagaaggcgaagatttctttgacacttactcacctgttgctagattgaccacaattcgtgtgctactttccctagcagcctcacatggtcttctcgttcatcaaatggacgttaagacagcttttcttaatggagagctggatgaggagatctatatggatcaacctgatgggtttgtacttgaaggtcaagaaggcaaagtgtgcaaattgttgaagtctttgtatggtctgaaacaagctcctaagcaatggcatgagaaatttgacaaaacattgacatctgcaggctttgcagtcaatgaggcagataaatgtgtgtactatcgccatggtgggggtgagggagttattttgtgcttgtatgttgacgacatactgatatttgggacaaaccttgaggtgataaatgaggttaaatcattcttgtctcaaaattttgatatgaaagatttgggagtagctgatgttattttaaacattaagctaattagaggtgagaatgggattacactcttgcagtctcattatgtggagaagatcttgaatcgctttggctacattgatagtaagccttctccaacaccttatgatcctagcttgtcgcttcgcaagaacaagagaattgctaggaatcaactggaatactcccaaatcattggctcgttgatgtacctggctagtgcaactaggcctgatatctcctttgctgtgagcaagttgagccgatttacctctaatccgggagatgatcactggcgtgcgcttgagcgagtaatgcgctatctgaaaggtactgtggaattggggcttcactatactgggtatcctgcggtactggagggttatagtgattctaactggatctctgatgtggatgagatcaaagccactagtggatatgttttcacactgggtggtggtgctgtttcatggaggtcttgcaaacagacaattttgacgaggtcaaccatggaagcagagctaacggcactggatactgctactgttgaggcagaatggttgcgtgatctattaatggatctgcctgttgttgaaaaaccggtgccggctatccttatgaactgtgacaatcaaacgacatgtgaaaagacgattgaagtctgtcaggaaattaagaaactccggagttataacgttggattacatccaaacagcgagaaacctggcagatcccttcacgaagggactatcacgaaatgtgatagacaatgcatcgaaggagatgggtttgagacccatagcattcttgaaggaactcacctttgtgagcttgactgttggtcgcagtccatgaagattttgggtgaatcttctaggaagcttactaaagacctaggacgacagcatcaaccacgaatcgagcagcaacaatccaatcaacaacgcagcaagcagcagtggtggtggcggccggcgggaggggacggattcggcggtggctcaagcaaatccgccgccggtggcaggttcggctgcggctcagcgcggaacagcgcaaggacgcctggtggtggtgaagactcgaagacggcggtgagatccatccccatccttctcgaagacgacgatggcggtggcacggattcggtggtggctcaagcaaatccgccgccggtggtagtctggcagtcgagggagcacattcaatggtggcggcgaggtcgtggtgagctcatcgcagcggtggacggcgggtccggctgcggctcggcgcggagcagcgcgaggatgcccagtggcggtgaagattcaaagacgcggtga

SEQ ID NO: 15014 - DNA, 4287 bp, Oryza sativa
  Clone ID: TFbOSC413293j.C1.o2.fg
atggctggttttgccgatgcactgaggccggataaattcaccggtgtgcattttaagagatggcagatcagggtcactctgtggctgacagctatgaaatacttctgggtgagtactggcaaacctgaaggagttcttactgctgaacagcagaagcaattcgaggaagccactactctctttgtgggatgcattcttagcgttcttggcgatcgtctggtcgaggtgtatatgcatatgaccgacgctaaggagttgtgggatgcactgaatactaaattcggtgctactgatgctagcaatgatctgtatatcatggagcagtttcatgactacaagatggctgacaaccgttctgtagtcgaacaggctcatgagatacaaaccatggctaaggaactcgaactccttaagtgtgtcttacccgacaaatttgtggctgggtgcattattgcgaaactacctccatcttggagaagtttcggtactgcactcaaacacaagagacaggaatactccgttgaggggttgatagcgtctcttgatgttgaggagaaagctcgggaaaaagatgccgcgtctaagggcgatggtgggcagtccagcgccaatgttgtgcacaaggcccagaacaagagcaaggggaaatacaaagctcagcagaccaccaacttcaagaagcagaagaagaacaacaacaatcctaatcaggatgagaggacttgctttgtgtgtggccaagttggtcatctggctaggaagtgtccacagcgcaagggcatgaaggcacttgcagggcagacttctaagtctgctaatgtgaccattggcaacactggagatggaagcgggtatggtaatttacctactgttttttcagttaatcaatctactaattggtgggttgatactggggccaatgtacatgtttgtgctgacatctcattgttttcttcttatcaggtcgcacggggttccaccgtcctaatggggaatgggtcacatgcttctgttcatggtgttggcacggtagatctgaagtttacttcgggaaagatcgtgcagctgaagaacgtgcagcatgtcccttctatcgacaggaatcttgttagtggctcccgtctgactagagacggatttaagttggtttttgagtctaataaagtagtcgtgtctaaacatggatattttattagtaaaggttatgagtgcggaggcctgttccgcttttccctttctgatttctgcaataagtctgtgaaccatatttgtggcagtgtggatgatgaggctaatgtttggcattcacgtttatgtcatattaattttggcttgatgtctcggctttccagcatgtgtttaattcctaagttttctattgtcaaaggttctaagtgccatagttgtgtgcaatcgaagcaacctcgcaagcctcacaaggctgccgaggagagaaacttggcaccactagaactcctacattcagatctttgtgaaatgaatggggtgttgacgaagggtgaaaaacgatatttcatgacattgattgatgatgctactagattttgctatgtgtacttgttgaaaacgaaagacgaggctctagactattttaaaatttataaggcagaagttgaaaatcaacttgacagaaagataaaaaggcttaggtctgatcgtggtggagagtttttctcgaacgagtttgacttattctgtgaggaacatggcatcatacatgagaggacgcctccctgttctcccgagtctaatgggattgctgaaaggaagaaccgcacactgactgacttggtgaatgccatgttggacaccgcgggactgcctaaggcatggtggggggaggcattgttgacctcaaatcatgtgttaaacagagttcctaacagaaataaggacaaaacaccatatgagatatggattggtagaaaaccatcactttcttatttgcgcacatgggggtgcttggcgaaagtcaatgtaccaataacgaagaagcgcaaacttggacctaagactgtggactgtgtttttctgggatatgctcatcatagcattgcctatagatttttaatagttaaatccgaggtaccggacatgcatgttggtacaattatggagtctcgtgatgctaccttctttgagagcttttttccaatgaaggatacacatagtggttcgaaccaaccctctgaaataattcccagttcaatcacaccaccagaacaaactgaacatacacatgaacttgtctctgaggaggatgtcagtgaagctcctcgaaggagtaagagacaaaggacggctaagtcttttggtgatgatttcactgtgtacctcgtggatgacactcctaagtcaatttcagaagcatatgcatctcctgatgcagactactggaaggaggctgtccgtagtgaaatggattccattatcgctaacgggacttgggaggtgacagagcgaccctatgggtgtaaacctgtggggtgcaagtgggtgttcaagaagaagcttaggcctgacggtactattgaaaagtacaaggctcggcttgttgctaagggctatactcagaaagaaggcgaagatttctttgacacttactcacctgttgctagattgaccacaattcgtgtgctactttccctagcagcctcacatggtcttctcgttcatcaaatggacgttaagacagcttttcttaatggagagctggatgaggagatctatatggatcaacctgatgggtttgtagttgaaggtcaagaaggcaaagtgtgcaaattgttgaagtctttgtatggtctgaaacaagctcctaagcaatggcatgagaaatttgacaaaacattgacatctgcaggctttgcagtcaatgaggcagataaatgtgtgtactatcgccatggtgggggtgagggagttattttgtgcttgtatgttgacgacatactgatatttgggacaaaccttgaggtgataaatgaggttaaatcattcttgtctcaaaattttgatatgaaagatttgggagtagctgatgttatcttaaacattaagctaattagaggtgagaatgggattactctcttgcagtcccattatgtggagaagatcttgaatcgctttggctacattgatagtaagccttctccaacaccttatgatcctagcttgttgcttcgcaagaacaagagaattgctaggaatcaactggaatactcccaaatcattggctcgttgatgtacctggctagtgcaactaggcctgatatctcctttgctgtgagcaagttgagccgatttacttctaatccgggagatgatcactggcgtgcgcttgagcgagtaatgcgctatctgaaaggtactgtggaattgggacttcactatactgggtatcctgcggtactggagggttatagtgattctaactggatctctgatgtggatgagatcaaagccactagtggatatgttttcacactgggtggtggtgctgtttcatggaggtcttgcaaacagacaattttgacgaggtcaaccatggaagcagaactaacggcactggatactgctactgttgaggcagaatggctgcgtgatctattaatggatctgcctgttgttgaaaaaccggtgccggctatccttatgaactgtgacaatcaaacgacatgtgaaaagacgattgaagtctgtcaggaaattaagaaactccggagttataacgttggattacatccaaacagcgagaaacctggcagatcccttcacgaagggactatcacgaaatgtgatagacaatgcatcgaaggagatgggtttgagacccatactactccatcccgctcgccggcgtgcaccagcgatcgggagaagcaggtctccggaacctctgcctttgacgtcctgcaccgggagaaggcggcaataaggtacatcggcacaactacgacacaggatctttctctgaccgaggttatgtcatgggactccgaaatctacctcccggaaattccaaattcattgcagatgtgcaactggggtatctacacggggtaccgccctaacctgctctcacctctcaccttcgcgtcccaacaagatgacgacgaagatgaagaagacgagtctggtccgttcatccgccagttgctgtgtgcaattcgacacaagaaattgttgaaacgcagcttgcccatgacgtcgaccaatcacaccagcggcaaaagaatttgctccggaaattcatgcatatgctaa

SEQ ID NO: 15015 - DNA, 2832 bp, Oryza sativa
  Clone ID: TFbOSC413295j.C1.o5.fg
atggcagcgatctgcggggagacgatctccgtcgacgagttgtggcgggagatcttgctcagggcgccaaccaaagacgtcgcccgttcatgctgcgtctcgacgcagtggcgcggcatcgtcagggacccctccttccggaagctccaccatgacaggcatgccgtgccgtccaaggacgacgtcccggacgctctgctcgtcatcacggtcaacgccgacggccaaagcgtctccaccgtcgtcccagctatggtctctccggtgtcgacgagccagcgggcgcccatgtaccgggttattaagaacggcatcagctatagcctcgccaatgtctgcaatggcttcctctgcttcgcgtcatggagcagggccaaggtcgtcgtgtgcaaccccatcaccggcgagaagctggcgatccccagggctcctcccatcgggccagattataaatcgtcgcgtgccaggatcgacgtgtacacgctgcccacaagcggtggcaagatatgcgtgatgaccgctactggcaccccgagctggcacccacccgaaattcccacactcggtccggtgttggtggtcgacgtcgcgagcgagaagcatcgcatgtatagcccaccggacaacgggtgcccagcggctgacgaaacgtcgttcactgcctttgagctgcacggacggttgtgcctggccatcaggatatccatgaccaacacagtccagttctggactttgtcggttgaagaagacgacgacgacgacgacgacctgccgtggcagcttctctacacgatcaaaatcaacatgaaagatggctataataatggattccaggaactagagcctatgaatgattggttcaatggcggcaataatggatttatccaggtaccagagcccatggatgcttggctcgacggcgagacccacacccttgctacagagagggcagcacattgtactttagactactccatcccgctcgccggcgtgcaccagcgatcgggagagcaggtctccggaacctctgcctttgacgtcctgcaccgggagaaggcggcaataagatctaatgatgcgttcatgctagttttcatctgtgatgtcatgatttatttatggaataaattaaatccttatatgcccataatctcaacaatccaaaaaccttattataggcactgtgattttactatggctggttttgccgatgcactgaggccggataaattcaccggtgtgcattttaagagatggcagatcagggtcactctgtggctgacagctatgaaatgcttctgggtgagtactggcaaacctgaaggagttcttactgctgaacagcagaagcaattcgaggaagccactactctctttgtgggatgcattcttagcgttcttggcgatcgtctggtcgaggtgtatatgcatatgaccgacgctaaggagttgtgggatgcactgaatactaaattcggtgctactgatgctagcaatgatctgtatatcatggagcagtttcatgactacaaaatggctgacaaccgttctgtagtcgaacaggctcatgagatacaaaccatggctaaggaactcgaactccttaagtgtgtcttacccgacaaatttgtggccgggtgcattattgcaaaacttcctccatcttggaggagtttcggtactgcactcaaacacaagagacaggaatactccgttgaggggttgattgcgtctcttgatgttgaggagaaagctcgggaaaaagatgccgcgtctaagggcgatggtgggcagtccagtgccaatgttgtgcacaaggcccagaacaagagcaaggggaaatacaaagctcagcagaccaccaacttcaagaagcagaagaagaacaacaacaatcctaatcaggatgagaggacttgctttgtgtgtggccaagttggtcatctggctaggaagtgtccacaacgcaaggggatgaaggcacctgcagggcagacttctaagtctgctaatgtgaccattggcaacactggagatggaagcgggtatggtaatttacctactgttttttcagttaatcaatctactaattggtggattgatactggggccaatatacatgtttgtgctgacatctcattgttttcttcttatcaggtcgcacggggttccaccgtcctaatggggaatgggtcacatgcttctgttcatggtgttggcacggtagatctgaagtttacttcgggaaagatcgtgcagctgaagaacgtgcagcatgtcccttctatcgacaggaatcttgttagtggctcccgtctgactagagacggatttaagttggtttttgagtctaataaagtagtcgtgtctaaacatggatattttattggtaaaggttatgagtgcggaggcctgttccgcttttccctttctgatttctgcaataagtctgtgaaccatatttgtggcagtgtggatgatgaggctaatgtttggcattcacgtttatgtcatattaattttggcttgatgtctcggctttccagcatgtgtttaattcctaagttttccattgtcaaaggttctaagtgccatagttgtgtgcaatcgaagcaacctcgcaagcctcacaaggctgccgaggagagaaacttggcaccactagaactcctacattcagatctttgtgaaatgaatggggtgttgacgaagggtggaaaacgatatttcatgacattgattgatgatgctactagattttgctatgtgtacttgttgaaaacgaaagacgaggctctagacttttttaaattttttaaggcagaaagttga

SEQ ID NO: 15016 - DNA, 4230 bp, Oryza sativa
  Clone ID: TFbOSC413883j.C1.o1.fg
atggctggttttgccgatgcactgaggccggataaattcaccggtgtgcattttaagagatggcagatcagggtcactctgtggctgacagctatgaaatgcttctgggtgagtactggcaaacctgaaggagttcttactgctgaacagcagaagcaattcgaggaagccactactctctttgtgggatgcattcttagcgttcttggcgatcgtctggtcgaggtgtatatgcatatgaccgacgctaaggagttgtgggatgcactgaatactaaattcggtgctactgatgctagcaatgatttgtatatcatggagcagtttcatgactacaagatggctgacaaccgttctgtagtcgaacaggctcatgagataaaaaccatggctaaggaactcgaactccttaagtgtgtcttacccgacaaatttgtggccgggtgcattattgcaaaactacctccatcttggagaagtttcggtgctgcactcaaacacaagagacaggaatactccgttgaggggttgattgcgtctcttgatgttgaggagaaagctcgggaaaaagatgccgcgtctaagggcgatggtgggcagtccagtgccaatgttgtgcacaaggcccagaacaagagcaaggggaaatacaaagctcagcagaccaccaacttcaagaagcagaagaagaacaacaacaatcctaatcaggatgagaggacttgctttgtgtgtggccaagttggtcatctggctagaaagtgtccacagcgcaaggggatgaaggcacctgcagggcagacttctaagtctgctaatgtgaccattggcaacactggagatggaagcgggtatggtaatttacctactgttttttcagttaatcaatctactaattggtgggttgatactggggccaatgtacatgtttgtgctgacatctcattgttttcttcttatcaggtcgcacggggttccaccgtcctaatggggaatgggtcacatgcttctgttcatggtgttggcacggtagatctgaagtttacttcgggaaagatcgtgcagctgaagaacgtgcagcatgtcccttctatcgacaggaatcttgttagtggctcccgtctgactagagacggatttaagttggtttttgagtctaataaagtagtcgtgtctaaacatggatattttattggtaaaggttatgagtgcggaggcctgttccgcttttccctttctgatttctgcaataagtctgtgaaccatatttgtggcagtgtggatgatgaggctaatgtttggcattcacgtttatgtcatattaattttgtcttgatgtctcggctttccagcatgtgtttaattcctaagttttctattgtcaaaggttctaagtgccatagttgtgtgcaatcgaagcaacctcgcaagcctcacaaggctgccgaggagagaaatttggcaccactagaactcttacattcagatctttgtgaaatgaatggggtgttgacgaagggtggaaaacgatatttcatgacattgattgatgatgctactagattttgctatgtgtacttgttgaaaacgaaagacgaggctctagactattttaaaatttataaggcagaagttgaaaatcaacttgacagaaagataaaaaggcttaggtctgatcgtggtggagagtttttctcgaacgagtttgacttattctgtgaggaacatggcatcatacatgagaggacgcctccctattctcccgagtctaatgggattgctgaaaggaagaaccgcacactgactgacttggtgaatgccatgttggacaccgcgggactgcctaaggcatggtggggggaggcattgttgacctcaaatcatgtgttaaacagagttcctaacagaaataaggacaaaacaccatatgagatatggattggtagaaaaccaacactttcttatttgcgcacatgggggtgcttggcgaaagtcaatgtaccaataacgaagaagcgaaaacttggacctaagactgtggactgtgtttttctgggatatgctcatcatagcattgcctatagattttcaatagttaaatctgaggtaccggacatgcatgttggtacaattatggagtctcgtgatgctaccttctttgagagctttttcccaatgaaggatacacatagtggttcgaaccaaccctctgaaataattcccagttcaatcacaccaccagaacaaactgaacatacacatgaacttgtctctgaggaggatgtcagtgaagctcctcgaaggagtaagagacaaaggacggctaagtcttttggtgatgatttcactgtgtacctcgtggatgacactcctaagtcaatttcagaagcatatgcatctcctgatgcagactactggaaggaggctgtccgtagtgaaatggattccattatcgctaacgggacttgggaggtgacagagcgaccctatgggtgtaaacctgtggggtgcaagtgggtgttcaagaagaagcttaggcctgacggtactattgaaaagtacaaggctcggcttgttgctaagggctatactcagaaagaaggcgaagatttctttgacacttactcacatgttgctagattgaccacaattcgtgtgctactttccctagcagcctcacatggtcttctcgttcatcaaatggacgttaagacaacttttcttaatggagagctggatgaggagatctatatgtatcaacctgatggttttgtagttgaaggtcaagaaggcaaagtgtgcaaattgttgaagtctttgtatggtctgaaacaagctcctaagcaatggcatgagaaatttgacaaaacattgacatctgcaggctttgcagtcaatgaggcagataaatgtgtgtactatcgccatggtaggggtgagggagttattttgtgcttgtatgttgacgacatactgatatttaagacaaatcttgaggtgataaatgaggttaaatcattcttgtctcaaaattttgatatgaaggatttgggagtagctgatgttatcttaaacattaagctaattagaggtgagaatgggattacactcttgcagtcccattatgtggagaagatcttgaatcgttttggctatattgatagtaagccttctccaacaccttatgatcctagcttgttgcttcgcaagaacaagagaattgctaggaatcaactggaatactcccaaatcattggctcgttgatgtacctggctagtgcaactaggcctgatatctcctttgctgtgagcaagttgagccgatttacctctaatccgggagatgatcactggcgtgcgcttgagcgagtaatgcgctatctgaaaggtactgtggaattggggcttcactatactgggtatcctgcggtactggagggttatagtgattctaactggatctctgatgtggatgagatcaaagccactagtggatatgttttcacactgggtggtggtgctgtttcatggaggtcttgcaaacagaccattttgacgaggtcaaccatggaagcagagctaacggcactggatactgctactgttgaggcagaatggctgcgtgatctattaatggatctgcctgttgttgaaaaaccggtgtcggctatccttatgaactgtgacaatcaaacgacatgtgaaaagacgattgaagtctgtcaggaaattaagaaactccggagttataacgttggattacatccaaacagcgagaaacctggcagatcctttcacgaagggactatcacgaaatgtgatagacaatgcatcgaaggagatgggtttgagacccatattaaatcattatatgtctataatctcaacaggctgtacctcccgctggcgccggtctgcatcaccagcgcgccgccattgctgaggcgacgccgagcctcgtctgcaaggacgctgaacagcacggccgacctcgcaaagcacctcccgaccggcgccgtgctcgccttcgaggtgctctcgccgtcctccaccgcggacgacagctacacggccaccaaccgtgcgctcatcgcctgcctcgtcggcgcctatgcactctgctgcttcctgctctccttcaccgacagctaccgcgacggcacgggcgccgtgcgctacgacttcgtcacgcccaagacttattgtgctgtgcgtgcagcccgtgggtag

SEQ ID NO: 15017 - DNA, 4134 bp, Oryza sativa
  Clone ID: TFbOSC414138j.C1.o4.fg
atggcgatcaggggcatcccgtcctctcgcgagatgaccgtggacgacttcaagaactggctgaagcagttcgacaccgacaacgacggccggataagccggggcgagctccgggaggccatccgccgccgcggcggctggttctccggcctgaaagccggccgcgccgtccgccacgccgacagggacaacagcggcttcgtggacgagtccgagatcgagaacctcgtcgccttcgcccagaaaactctgggcatgaaggttactgcctggcactgtgattttactatggctgattttgccgatgcactgaggccggataaattcaccggtgtgcattttaagagatggcagatcagggtcactctgtggctgacagctatgaaatgcttctgggtgagtactggcaaacctgaaggagttcttactgctgaacagcagaagcaattcgaggaagccactactctctttgtgggatgcattcttagcgttcttggcgatcgtctggtcgaggtgtatatgcatatgaccgacgctaaggagttgtgggatgcactgaatactaaattcggtgctactgatgctagcaatgatctgtatatcatggagcagtttcatgactacaaaatggctgacaaccgttctgtagtcgaacaggctcatgagatacaaaccatggctaaggaactcgaactccttaagtgtgtcttacccgacaaatttgtggccaggtgcattattgcaaaactacctccatcttggaggagtttcggtactgcactcaaacacaagagacaggaatactccgttgaggggttgattgcgtctcttgatgttgaggagaaagctcgggaaaaagatgccgcgtctaagggcgatggtgggcagtccagtgccaatgttgtgcacaaggcccagaacaagagcaaggggaaatacaaagctcagcagaccaccaacttcaagaagcagaagaagaacaacaacaatcctaatcaggatgagaggacttgctttgtgtgtggccaagttggtcatctggctaggaagtgtccacaacgcaaggggatgaaggcacctgcagggcagacttctaagtctgctaatgtgaccattggcaacactggagatggaagcgggtatggtaatttacctactgttttttcagttaatcaatctactaattggtgggttgatactggggccaatgtcgcacggggttccaccgtcctaatggggaatgggtcacatgcttctgttcatggtgttggcacggtagatctgaagtttacttcgggaaagatcgtgcagctgaagaacgtgcagcatgtcccttctatcgacaggaatcttgttagtggctcccgtctgactagagacggatttaagttggtttttgagtctaataaagtagtcgtgtctaaacatggatattttattggtaaaggttatgagtgcggaggcctgttccgcttttccctttctgatttctgcaataagtctgtgaaccatatttgtggcagtgtggatgatgaggctaatgtttggcattcacgtttatgtcatattaattttggcttgatgtctcggctttccagcatgtgtttaattcctaagttttccattgtcaaaggttctaagtgccatagttgtgtgcaatcgaagcaacctcgcaagcctcacaaggctgccgaggagagaaacttggcaccactagaactcctacattcagatctttgtgaaatgaatggggtgttgacgaagggtggaaaacgatatttcatgacattgattgatgatgctactagattttgctatgtgtacttgttgaaaacgaaagacgaggctctagactattttaaaatttataaggcagaggttgaaaatcaacttgacagaaagataaaaaggcttaggtctgatcgtggtggagagtttttctcgaacgagtttgacttattctgtgaggaacatggcatcatacatgagaggacgcctccctattctcccgagtctaatgggattgctgaaaggaagaaccgcacactgactgacttggtgaatgccatgttggacaccgcgggactgcctaaggcatggtggggggaggcattgttgacctcaaatcatgtgttaaacagagttcctaacagaaataaggacaaaacaccatatgagatatggattggtagaaaaccatcactttcttatttgcgcacatgggggtgcttggcgaaagtcaatgtaccaataacgaagaagcgcaaacttggacctaagactgtggactgtgtttttctgggatatgctcatcatagcattgcctatagatttttaatagttaaatccgaggatacacatagtggttcgaaccaaccctctgaaataattcccagttcaatcacaccaccagaacaaactgaacatacacatgaacttgtctctgaggaggatgtcagtgaagctcctcgaaggagtaagagacaaaggacggctaagtcttttggtgatgatttcactgtgtacctcgtggatgacactcctaagtcaatttcagaagcatatgcatctcctgatgcagactactggaaggaggttgtccgtagtgaaatggattccattatcgctaacgggacttgggaggtgacagagcgaccctatgggtgtaaacctgtggggtgcaagtgggtgttcaagaagaagcttaggcctgacggtactattgaaaagtacaaggctcggcttgttgctaagggctatactcagaaagaaggcgaagatttctttgacacttactcacctgttgctagattgaccacaattcgtgtgctactttccctagcagcctcacatggtcttctcgttcatcaaatggacgttaagacagcttttcttaatggagagctggatgaggagatctatatggatcaacctgatgggtttgtacttgaaggtcaagaaggcaaagtgtgcaaattgttgaagtctttgtatggtctgaaacaagctcctaagcaatggcatgagaaatttgacaaaacattgacatctgcaggctttgcagtcaatgaggcagataaatgtgtgtactatcgccatggtgggggtgagggagttattttgtgcttgtatgttgacgacatactgatatttgggacaaaccttgaggtgataaatgaggttaaatcattcttgtctcaaaattttgatatgaaagatttgggagtagctgatgttattttaaacattaagctaattagaggtgagaatgggattacactcttgcagtctcattatgtggagaagatcttgaatcgctttggctacattgatagtaagccttctccaacaccttatgatcctagcttgtcgcttcgcaagaacaagagaattgctaggaatcaactggaatactcccaaatcattggctcgttgatgtacctggctagtgcaactaggcctgatatctcctttgctgtgagcaagttgagccgatttacctctaatccgggagatgatcactggcgtgcgcttgagcgagtaatgcgctatctgaaaggtactgtggaattggggcttcactatactgggtatcctgcggtactggagggttatagtgattctaactggatctctgatgtggatgagatcaaagccactagtggatatgttttcacactgggtggtggtgctgtttcatggaggtcttgcaaacagacaattttgacgaggtcaaccatggaagcagagctaacggcactggatactgctactgttgaggcagaatggttgcgtgatctattaatggatctgcctgttgttgaaaaaccggtgccggctatccttatgaactgtgacaatcaaacgacatgtgaaaagacgattgaagtctgtcaggaaattaagaaactccggagttataacgttggattacatccaaacagcgagaaacctggcagatcccttcacgaagggactatcacgaaatgtgatagacaatgcatcgaaggagatgggtttgagacccatagcattcttgaaggaactcacctttgtgagcttgactgttggtcgcagtccatgaagattttgggtgaatcttctaggaagcttactaaagacctaggagtatga

SEQ ID NO: 15018 - DNA, 4824 bp, Oryza sativa
  Clone ID: TFbOSC417160j.C1.o3.fg
atggcgctgcgcctcgctgccgtaccagagagcgccgccgccgacctgagcgccgccgccaataccctgccgtgcatctcctaccgcgactcgatccggagcgtcgccgccgtcgtctccggcggccgagggcctctcttccagtccgaagattccgcctccacctggtcgtcttcctcctacgcgtccgactgctccggccactcctccggcgtctccgccgccgcggccgctggcttcagggcactcacggcgcacgagctcagggaggtcgcgcgtcgcatggtcgccgacggctacgcccagcgcatggtccaagcgttcgacgacgcggcgacggtcgaggtcctcgagggggagatgttagccgattgtaggttagatgacgatattgccaaagattatgaggcgcgagcggctgtgcgggaagcgcgcgcggcgcgtgaggaagcagaggcgcggctgcaggtagccacgagggcggcacgtctcgtggcagcagaagctgaagcagcacgcaccgcggaggccgccaggcaggctgcagctgctgctgctactttgcgagctgaggaggaggaggagcgacgtgacctggagctgacagacgcggcccgcgtgcgacgcgacgcggaccgggatcgacacataggccgacgtgatcgcgacttcagcccccatcgcagaggatcagatctccaccgcggtgaggaggagcggcgcgatccatggcgcgatcctcgaatcaaccgcgctctggagacccagcgactccgggagcaggcagcggcgattgaggcacaactggacttcgaccgggagcagggtggacgagacgttggcgcacggagccctcgcaggcagcgcgcctccccttccccggaccggcgccgtggtcgccgtggacgctccggctctcctcccgttgtgcagatcgtcgtcaaggatgttggcggcgcatggcccatgctcaccaagactaactacgccgagtgggcgatggtgatgaaggtgaagttgcaggcgcgccacatgtgggacgcggttcgatacggcgacgtcgactacggggaagatcggcgggcgttggagcggttggcgcagctcggcgacaccaccatcgatgaggagagagccgtggagaagctcctttgcgtcgtccccgagaagtacacgcagctggctctgtcgatcgagacgctgctggacttcaccgagctcacgaacgaagaggtgacaggtcgcctcaaggccgtcgacaaccgcaagcagctacctccctcagagccgatcaccattggtggcaagcttttcttcaccaaggagaagtggctcgcccgccaacaagagcggaagaagggggaggccacaagctcttcggcttcgggatcgtcgagcagccgcaagcgtcgaccacgcaagtgggagaaggcgcgtagtggcgctcttggcggcgccgatggcgagcgcaagggcagccgcaacgacacctgccacaactgcgggaagaccggccactgggccaaggactgccggcaggcgaagcacggcggtcaagcacacgtcgctcaagcgcaggagggtgatgaggtggctctgtttttcgtacacggaagcatcgagccacacttcactcccacaccggacgctaccgcgcccctccacctcgacgagctgtgggcccacgtcttcctcagcaacggatcctgcgacgacaagatcgacgggtggtgcctcgacactggtgccactcaccacatgaccgggcgacgggaattcttctccaagcttgactccagtgttcaaggctccgtcaagtttgaggacgcctcagccgtggagatcaagggcgtcggctccatcctcttcaccaccaagaccggcgagcaccggctgctcaccggtgtctactacatccccgcgctgaggaactccatcatcagtttgggacaactggatgagaacggcttgctcgtggagatagaggacggggtcttgcgggtttgggatcgccatcgtcgccttctcgtcaaggtgaacaggggtgccaaccgcctctatgttctccatgtacaggtggcgcagcccgtgtgccttgcagcccgccgcgacgatgatgcatggcggtggcacgagcgctttgggcacctcaacttcgaggccttgaagcagctcagcaacaaggagatggtgcagggcatgccacgagtcgagcacgtggagcagttttgcgacacctgcgtcctcaccaagcagcggcgactcccctttccccgccaagcaagtttctgcgccaaggagaagttggagctcgtgcacggcgacctctgcggtcccgtgactccggccacacctggaggccggcgcttcttcctgctgctcgtcgacgacgtgtcctgctacatgtgggtggtcctgctcgactccaaggcagtggctgcagacgccatcaagcaccatcaagttgctgcggagaaggagtgcggccgcaagcttcgggtgctacacaccgacaacggtggcgagttcacgacggctgagttcgcagcgtactgcgccgacgagaggatccagcgccacttctccgcgccatacaccccgcagcagaacggcgttgtggagcgccgcaaccagacagtggtggccactgcccgcgccctcctcaagcaaagagggatgccggcaatctactggggggaggcggtgatgactgccgtccatctcctcaaccgctcgcccaccaaggcccttgatggcaagacgtcgtacgaggcctggcacgggcgcaagccggtggtgagccacctccgcgtctttggctgtctcgccttcgccaaggagctcaaccacgtcggcaagctcaacgaccggagctcgccgggagtcttcatcggctatgcggagggtgtcaaggcctaccgcatcctcgacccttcgacgcagcacgtccgcatttctcgggacgtcgtgttcgacgaagggcgaggttgggcttcgtacaaggcggtggacgacggctcgacttcgactctcagagacttcgtcgtcgactacgtccactttagggcagccgggggagctagcagctcatcttcaccgagctcgtccacctcggcacccggctcgccatcagctccggcgagtcctctaccacctacaccaccagcaactcctccatcaccagctacgccccgctctcctacaccggcgcccacaccaccggtggagttcgccactccgttgtccaacgacgaggatcgtgttgatgcgtaccacgacgacgagcctctgcgctaccgcaccatggacaacatcttcggtgatcagcccgtccctggactggagacgcgcgacttcgaggccgagttgcacctggcgcatgaggacggcgagccctgctccttcgcagaggcgaatggagatgtggcatggcgcactgcgatgcagcacgagatggacgcggtcgagcggaactggacgtgggtgttggcagatcttcctgccagccaccgcgccatcacccttaagtgggtctacaagctcaagaaggatgaggccggggcggtgatcaagcacaaggcacgtctagtggcgcgcggcttcgttcagcaggagggagtcgactttgacgacgccttcgcgcccgttgcgcgaatggagtctgttcgtctgctcctcgcgctggcagcccaggaaggatggcgtgtgcaccacatggatgtcaagtccgccttcctcaacggagacctgaaggaggaggtctacgtccaccagccgccgggattcgtcatccccggcaaggagaacaaggttctccgcctgcgcaaggccctctacggcttgcggcaggccctctacgccaagctggactccactctcaagcaaatggggttccagcagaactctcacgaagctgctgtctaccagcggggcaaggacggcaatgccctgttggtaggcgtctacgtcgacgacttggtgatcaccggcaccaaggaggctgaggtggaggcgtttaaggaggagatgaaggcgactttccagatgagcgatttgggccttctctctttctacctggggatcgaggtccaccaggacagctctggcatctcccttcgccaaaccgcctacgccaagtgcatcgtcgagttgggcgggctcaccggctgcaacccagcgtacactcccatggaggaaaggttaaagctgagccgcgacagcacgctgagggaggtcgacgccacgcagtaccggcatattgtgggcagccttcgctacctcgtccacacgcggccagacttggcatttgctgttggctatgtcagccggttcatgcagcgaccgacgacagagcaccagcaggctgtcacgtcgagggcaccaccgactacggctttcactacccgaggtgtcccgtgcctgatcagctggcagtcggtcaagcaacaagtggtggccctgtctagttgcgaggcagagtacatcgctaccacaaccgcctcaactcaagctctctggttggctcggctgctgggtgatctcttgggcagaaacactgaagcagtggagctcaggatggacagcaagtccgctttggccttggcaaagaatcccgtcttccatgagcgcagcaagcacatccgcatcaagtatcatttcattcggagctgcttggaggaggggagcatcaaggccagctacattaacacccaggatcagctcgccgatcttctcaccaagtcccttgggcgggtcaagttccaggagtttcgcgccaggattggaatggttcaaattccccaaaaggcgccacacatgacttag

SEQ ID NO: 15019 - DNA, 1715 bp, Oryza sativa
  Clone ID: TFbOSC417394j.C1.o2.gm
atggctggttttgccgatgcactgagaccggataaattcaccggtgtgcattttaagagatggcagatcagggtcactctgtggctgacagctatgaaatgcttctgggtgagtactggcaaacctgaaggagttcttactgctgaacagcagaagcaattcgaggaagccactactctctttgtgggatgcattcttagcgttcttggcgatcgtctggtcgaggtgtatatgcatatgaccgacgctaaggagttgtgggatgcactgaatactaaattcggtgctactgatgctagcaatgatctgtatatcatggagcagtttcatgactacaagatggctgacaaccgttctgtagtcgaacaggctcatgagatagaaaccatggctaaggaactcgaactccttaagtgtgtcttacccgacaaatttgtggccgggtgcattattgcaaaactacctccatcttggagaagtttcggtactgcactcaaacacaagagacaggaatactccgttgaggggttgattgcgtctcttgatgttgaggagaaaactcgggaaaaagatgccgcgtctaagggcgatggtgggcagtccagtgccaatgttgtgcacaaggcccagaacaagagcaaggggaaatacaaagctcagcagaccaccaacttcaagaagcagaagaagaacaacaacaatcctaatcaggatgagaggacttgctttgtgtgtggccaagttggtcatctggctagaaagtgtccacagcgcaaggggatgaaggcacctgcagggcagacttctaagtctgctaatgtgaccattggcaacactggagatggaagcgggtatggtaatttacctactgtcgcacggggttccaccgtcctaatggggaatgggtcacatgcttctgttcatggtgttggcacggtagatctgaagtttacttcgggaaagatcgtgcagctgaagaacgtgcagcatgtcccttctatcgacaggaatcttgttagtggctcccgtctgactagagacggatttaagttggtttttgagtctaataaaatagtcgtgtctaaacatggatattttattggtaaaggttatgagtgcggaggcctgttccgcttttccctttctgatttctgcaataagtctgtgaaccatatttatggcactgtggatgatgaggctaatgtttggcattcacactactggaaggaggctgtccgtagtgaaatggattccattatcgctaacgggacttgggaggtgacagagcgaccctatgggtgtaaacctgtggggtgcaagtgggtgttcaagaagaagcttaggcctgacgactactccatcccgctcgccggcgtgcaccggcgatcgggagagcaggtctccggaacctctgccttcgacgtcctgcaccgggagaaggcggcaataaggttagagcatgaagacagagcctctggtatcgtgccagtgaggccattagaggtgaggttcagtgactcgagatgtgtggctcttgctacaagtgacaccgggccattgacagtattgcgaagaatcatttctccaggaagccatgactccggcattgtcattgagatggagcttgaggcaaagcagagcctgaaaatcgggatgctgtgggagcccaaaggcgccatcagttttgctaatgagaattacaatgtgagcaacag

SEQ ID NO: 15020 - DNA, 5808 bp, Oryza sativa
  Clone ID: TFbOSC418579j.C1.o4.fg
atgggcatgggaagtgaattgtacgtcgctacgggatggagggagcggagcgcgatgcaggccgttggacgcgagactcgatggtgccttcggttggctggagggagcggcgcaactcactactccatcccgctcgccggcgtgcaccagcgatcgggagagcaggtctccggaacctctgcctttgacgtcctgcaccgggagaaggcggcaataagattaaatcattatatgtctataatctcaacaatccaaaaaccttattataggcactgtgattttactatggctggttttgccgatgcactgaggccggataaattcaccggtgtgcattttaagagatggcagatcagggtcactctgtggctgacagctatgaaatgcttctgggtgagtactggcaaacctgaaggagttcttactgctgaacagcagaagcaattcgaggaagccactactctctttgtgggatgcattcttagtgttcttggcgatcgtctggtcgaggtgtatatgcatatgaccgacgctaaggagttgtgggatgcactgaatactaaattcggtgctactgatgctagcaatgatctgtatatcatggagcagtttcatgactacaaaatggctgacaaccgttctgtagtcgaacaggctcatgagatacaaaccatggctaaggaactcgaactccttaagtgtgtcttacctgacaaatttgtggccgggtgcattattgcaaaactacctccatcttggaggagtttcggtactgcactcaaacacaagagacaggaatactccgttgaggggttgattgcgtctcttgatgttgaggagaaagctcgggaaaaagatgccgcgtctaagggcgatggtgggcagtccagtgccaatgttgtgcacaaggcccagaacaagagcaaggggaaatacaaagctcagcagaccaccaacttcaagaagcagaagaagaacaacaacaatcctaatcaggatgagaggacttgctttgtgtgtggccaagttggtcatctggctaggaagtgtccacagcgcaaggggatgaaggcacctgcagggcagacttctaagtctgctaatgtgaccattggcaacactggagatggaagcgggtatggtaatttacctactgttttttcagttaatcaatctactaattggtgggttgatactggggccaatgtacatgtttgtgctgacatctcattgttttcttcttatcaggtcgcacggggttccaccgtcctaatggggaatgggtcacatgcttctgttcatggtgttggcacggtagatctgaagtttacttcgggaaagatcgtgcagctgaagaacgtgcagcatgtcccttctatcgacaggaatcttgttagtggctcccgtctgactagagacggatttaagttggtttttgagtctaataaagtagttgtgtctaaacatggatattttattggtaaaggttatgagtgcggaggcctgttccgcttttccctttctgatttctgcaataagtctgtgaaccatatttgtggcagtgtggatgatgaggctaatgtttggcattcacgtttatgtcatattaattttggcttgatgtctcggctttccagcatgtgtttaattcctaagttttccattgtcaaaggttctaagtgccatagttgtgtgcaatcgaagcaacctcgcaagcctcacaaggctgccgaggagagaaacttggcaccactagaactcctacattcagatctttgtgaaatgaatggggtgttgacgaagggtggaaaacgatatttcatgacattgattgatgatgctactagattttgctatgtgtacttgttgaaaacgaaagacgaggctctagactattttaaaatttataaggcagaagttgaaaatcaacttgacagaatgataaaaaggcttaggtctgatcgtggtggagagtttttctcgaacgagtttgacttattctgtgaggaacatggcatcatacatgagaggacgcctccctattctccaaagtctaatgggattgctgaaaggaagaaccgcacactgactgacttggtgaatgccatgttggacaccgcgggactgcctaaggcatggtggggggaggcattgttgacctcaaatcatgtgttaaacagagttcctaacagaaataaggacaaaacaccatatgagatatggattggtagaaaaccatcactttcttatttgcgcacatgggggtgcttggcgaaagtcaatgtaccaataacgaagaagcgcaaacttggacctaagactgtggactgtgtttttctgggatatgctcatcatagcattgcctatagatttttaatagttaaatccgaggtaccggacatgcatgttggtacaattatggagtctcgtgatgctaccttctttgagagctttttcccaatgaaggatacacatagtggttcgaaccaaccctctgaaataattcccagttcaatcacaccaccagaacaaactgaacatacacatgaacttgtctctgaggaggatgtcagtgaagctcctcgaaggagtaagagacaaaggacggctaagtcttttggtgatgatttcactgtgtacctcgtggatgacactcctaagtcaatttcagaagcatatgcatctcctgatgcagactactggaaggaggctgtccgtagtgaaatggattccattatcgctaacgggacttgggaggtgacagagcgaccctatgggtgtaaacctgtggggtgcaagtgggtgttcaagaagaagcttaggcctgacggtactattgaaaagtacaaggctcggcttgttgctaagggctatactcagaaagaaggcgaagatttctttgacacttactcatctgttgctagattgaccacaattcgtgtgctactttccctagcagcctcacatggtcttctcgttcatcaaatggacgttaagacagcttttcttaatggagagctggatgaggagatctatatggatcaacctgatgggtttgtagttgaaggtcaagaaggcaaagtgtgcaaattgttgaagtctttgtatggtctgaaacaagctcctaagcaatggcatgagaaatttgacaaaacattgacatctgcaggctttgcagtcaatgaggcagataaatgtgtgtactatcgccatggtgggggtgagggagttattttgtgcttgtatgttgacgacatactgatatttgggacaaaccttgaggtgataaatgaggttaaatcattcttgtctcaaaattttgatatgaaagatttgggagtagctgatgttatcttaaacattaagctaatagagaagatcttgaatcgctttggctacattgatagtaagccttctccaacaccttatgattctagcttgttgcttcgcaagaacaagagaattgctaggaatcaactggaatactcccaaatcattggctcgttgatgtacctggctagtgcaactaggcctgatatctcctttgctgtgagcaagttgagccgatttacctctaatccgggagatgatcactggcgtgcgcttgagcgagtaatgcgctatctgaaaggtactgtggaattggggcttcactatactgggtatcctgcggtactggagggttatagtgattctaactggatctctgatgtggatgagatcaaagccactagtggatatgttttcacactgggtggtggtgctgtttcatggaggtcttgcaaacagaccattttgacgaggtcaaccatggaagcagagctaacggcactggatactgctactgttgaggcagaatggctgcgtgatctattaatggatctgcctgttgttgaaaaaccggtgccggctatccttatgaactgtgacaatcaaacgacatgtgaaaagacgattgaagtctgtcaggaaattaagaaactccggagttataacgttggattacatccaaacagcgagaaacctggcagatcccttcacgaagggactatcacgaaatgtgataaacaatgcatcgaaggagatgggtttgagacccatattaaatcattatatgtctataatctcaacagggctgtgcatgccttcaagccgttcgacaagttagcgagacgagaaagccccagagtggaatcgatcatgtcaacgacgccaacggcagcatcgcgccggctcgtcctgatcctctgcaccctcgctatctcctgcagcagcggcatcgccggattcgccgccggcgatgacgacgcgttcatccgctgcctcgccgccgccgctgtcccgccacggctggtccacaccccgggctccgcgtcctacgccccgacgctcgtctcctccatccggaacctccgcttcgtcacgccggggacgccgaggccgctcgccatcgtcgcggccgccgaggcgggccacgcccaggccgcggtgcggtgcggccggcgccacggggtccgcgtccgcgcgcgcagcggcgggcacgactacgagggcctctcctacctctccctcgaccgccgcgagcggttcgcggtgctcgacctcgccgcgctccgcgacgtccgcgtggacgccgatcgcgccgaggcgtgggtcgggtcgggcgccacgctcggcgagctctactacgcggtgggcgccgcgagccgcactctcgcgttcccggccggtgtctgcccgaccgtcggcgtcgggggccacatcagcggcgggggattcggcacgctgatgcgcaggtacggcctcgccgcggacaacgtcctcgacgccgtcctcgtggacgccgacggccggctcctgaacaggaccaccatgggggagggcctcttctgggcaatcaggggcggcggcggcgagagcttcggcgtcgtgctgtcctggaagctgcggctggtccgcgtcccggagacggtcaccgtgttcaccatccgccgcccgagaaaccaatccgccaccgacctcatcaccaaatggcaagagatctccccctcactgccccgagacgtcatcctccgcgtcgtcgtgcagagccagcacgcgcagttcgagtccctgttcctcggccggtgccgccgcctcgcccgcctcatgcgagctcgcttcccggagctcgggatgacgcagtccgactgcgaggagatcacctggatccaatccaccgtctacttcgccttctactccagctccaagccactggagctcctcctggacaggggcaccgagccggacagatacttcaaggccaaatccgactacgtccaagaacccatcccacgccacgcctgggagagcacatggccatggctggaggagcacgacgccgggctgctcatcctcgacccctacggcggcgagatggcccgcgtctcgccggcggcgacgccgttcccgcaccggaagggcaacctgtacaacctccagtactactcgttctggttcgagcacggagcagagacattggagaggcatctgagctgggtcagggggctgtatggcgagatggagccgtacgtgtccaagaacccaagaactgggtatgtcaactacagggacatggatcttgggaggaatgagatcgaggggaatgtgacgagctacacgaagggtaaggtttggggggagaagtatttcaggggcaatttcgagaggttggcggcggtgaaggccatggttgatcctgatgatttcttcaggaatgagcagagtattcctcctcttcctgctgcaaaggggtggagctccatttaa

SEQ ID NO: 15021 - DNA, 2904 bp, Oryza sativa
  Clone ID: TFbOSC418806j.C1.o3.gm
atggcgctgtatactgactgtgcctgggacatgcagataccgggggacatggtggtgaacgcgatgatggtggcaatggcggcgcactccggggaacaggcgcagaccatctaccacgtgacgtcgtcgctgagcaacccggcgccgtacgcggtgctgtcggacgccggccaccgctacttcttcgccaacccgccgccgcgcgcggggaagaacgggcggctgcgcaggatgcgcttcttcagcacggtggccagcttccgcgcccacatggccatcaactacaagcttcccctcgagatccttcggctggtgaacattgcgctctgtggcatgttctcccggcgctacgacgagctgagcaggaagtacaagttcgtcatgcatctcgtcgagctctacgcgccctacaccttgttcaaaggctgcttcgacgacatcaacacggagaagctaaggattacgatgaggaagcaggaggacaaaaacgatggaggatattgttttgattttgaccccaagtcgattgattgggatgagtatttctacaaggtccacatccccgactactccatcccgctcgccggcgtgcaccggcgatcgggagagcaggtctccggaacctctgccttcgacgttctgcaccgggagaaggcggcaatcagggtcactctgtggctgacagctatgaaatgcttctgggtgagtactggcaaacctgaaggagttcttactgctgaacagcagaagcaattcgaggaagccactactctctttatgggatgcattctgagcgttcttggcgatcgtctggtcgaggtgtatatgcatatgaccgacgctaaggagttgtgggatgcactgaatactaaattcggtgctacttatgctagcaatgatctgtatatcatggagcagtttcatgactacaaaatggctgacaaccgttctgtagtcgaacaggctcatgagatacaaaccatggctaaggaactcgaactccttaagtgtgtcttacccgacaaatttgtggccgggtgcattattgcaaaactacctccatcttggaggagtttcggtactgcactcaaacacaagagacaggaatactccgttgaggggttgattgcgtctcttgatgttgaggagaaagctcgggaaaaagatgccgcgtctaagggcgatggtgggcagtccagtgccaatgttgtgcacaaggcccagaacaagagcaaggggaaatacaaagctcagcagaccaccaacttcaagaagcagaagaagaacaacaacaatcctaatcaggatgagaggacttgctttgtgtgtggccaagttggtcatctggctaggaagtgtccacagcgcaaggggatgaaggcacctgcagggcagacttctaagtctgctaatgtgaccattggcaacactggagatggaagcgggtatggtaatttacctactgtcgcacggggttccaccgtcctaatggggaatgggtcacatgcttctgttcatggtgttggcacggtagatctgaagtttacttcgggaaagatcgtgcagctgaagaacgtgcagcatgtcccttctatcgacaggaatcttgttagtggctcccgtctgactagagacggatttaagttggtttttgagtctaataaagtagtcgtgtctaaacatggatattttattggtaaaggttatgagtgcggaggcctgttccgcttttccctttctgatttctgcaataagtttgtgaaccatatttgtggcagtgtggatgatgaggctaatgtttggcattcaccctcacatggtcttctcgttcatcaaatggacgttaagacagcttttcttaatggagagctggatgaggagatctatatggatcaacctgatgggtttgtagttgaaggctttgcagtcaatgaggcagataaatgtgtgtactatcgccatggtgggggtgagggagttattttgtgcttgtatgttgacgacatactgatatttgggacaaaccttgaggtgataaatgagtcccattatgtggagaagatcttgaatcgctttggctacattgatagcaagccttctccaacaccttatgatcctagcttgttgcttcgcaataacaagagaattgctaggaatcaactggaatactcccaaatcattggctcgttgatgtacctggctagtgcaactaggcctgatatctcctttgctgtgagcaagttgagccgatttacctctaatccgggagatgatcactggcgtgcgcttgagcgagtaatgcgctatctgaaaggtactgtggaattggggcttcactatactgggtatcctgcggtactggagggttatagtgattctaactggatctctgatgtggatgagatcaaagccactagtggatatgttttcacactgggtggtggtgctgtttcatggaggtcttgcaaacagaccattttgacgaggtcaaccatggaagcagagctaacggcactggatactgctactgttgaggcagaatggctgcgtgatctattaatggatctgcctgttgttgaaaaaccggtgccggctatccttatgaactgtgacaatcaaacgagcattcttgaaagaactcacctttgtgagcttgactgttggtcgcagtctatgaagattttggactactccatcccactcgccggcgtgcaccggcgatcgggagagcaggtctccggaacctctgccttcgacgttctgcaccgggagaaggcggcaataagtgggtatacaatgtcttttatatttatgggccctgaggtggtcttcctgggccgacccattaggtggcgaagggcctccatggaccaccaggtctcctatgcccttagccgaaggtaa

SEQ ID NO: 15022 - DNA, 3459 bp, Oryza sativa
  Clone ID: TFbOSC419888j.C1.o1.fg
atggctggttttgccgatgcactgaggccggataaattcaccggtgtgcattttaagagatggcagatcagggtcactctgtggctgacagctatgaaatgcttctgggtgagtactggcaaacctgaaggagttcttattgctgaacagcagaagcaattcgaggaagccactactctctttgtgggatgcattcttagcgttcttggcaatcgtctggtcgaggtgtatatgcatatgaccgacgctaaggagttgtgggatgcactgaatactaaattcggtgctactgatgctagcaatgatctgtatatcatggagcagtttcatgactacaagatggctgacaaccgttctgtagtcaaacgggctcatgagatacaaaccatggctaaggaactcgaactccttaagtgtgtcttacccgacaaatttgtggccgggtgcattattgcaaaactacctccatcttggagaagtttcggtactgcactcaaacacaagagacaggaatactccgttgaggggttgatagcgtctcttgatgttgaggagaaagctcgggaaaaagatgccgcgtctaagggcgatggtgggcagtccagtgccaatgttgtgcacaaggcccagaacaagagcaaggggaaatacaaagctcagcagaccaccaacttcaagaagcagaagaagaacaacatcaatcctaatcaggatgagaggacttgctttgtgtgtggccaagttggtcatctggctaggaagtgtccacagcgcaaggggatgaaggcacctgcagggcagacttctaagtctgctaatgtgaccattggcaacactggagatggaagcgggtatggtaatttacctactgttttttcagttaatcaatctactaattggtgggttgatactggggccaatatacatgtttgtgctgacatctcattgttttcttcttatcaggtcgcacggggttccaccgtcctaatggggaatgggtcacatgcttctgttcatggtgttggcacggtagatctgaagtttacttcgggaaagatcgtgcagctaaagaacgtgcagcatgtcccttctatcgacaggaatcttgttagtggctcccgtctgactagagacggatttaagttggtttttaagtctaataaagtagtcgtgtctaaacatggatattttattggtaaaggttatgagtgcggaggcctgttccgtttttccctttctgatttctgcaataagtctgtgaaccatatttttggcagtatggatgatgaggctaatgtttggcattcacgtttatgtcatattaattttggcttgatgtctcggctttccagcatgtgtttaattcctaagttttccattgtcaaaggttctaagtgccatagttgtgtgcaatcgaagcaacctcgcaagcctcacaaggctgccgaggagataaacttggcaccactagaactcctacattcagatctttgtgaaatgaatggggtgttgacgaagggtggaaaacgatatttcatgacattgattgatgatgctactagattttgctatgtgtacttgttgaaaacgaaagacgaggctctagactattttaaaatttataaggcagaagttgaaaatcaacttgacagaaagataaaaaggcttaggtctgatcgtggtggagagtttttctcgaacgagtttgacttattctgtgagaaacatggcatcatacatgagaggacgcctccctattctcccgagtctaatgggattggtgaaaggaagaaccgcacactgactgacttggtgaatgccatgttggacaccgcgggactgcctaaggcatggtggggggaggcattgttgacctcaaatcatgtgttaaacagagttcctaacagaaataaggacaaaacaccatatgagatatggattggtagaaaaccatcactttcttatttgcgcacatgggggtgcttggcgaaagtcaatgtaccaataacgaagaagcgcaaacttggacctaagactgtggactgtgtttttctgggatatgctcatcatagcattgcctatagatttttaatagttaaatccgaggtaccggacatgcatgttggtacaattatggagtctcgtgatgctaccttctttgagagttttttcccaatgaaggatacacatagtggttcgaaccaaccctctgaaataattcccaattcaatcacaccaccagaacaaactgaacatacacatgaacttgtctctgaggaggatgtcagtgaagctcctcgaaggagtaagagacaaaggacggctaagtcttttggtgatgatttcactgtgtacctcgtggatgacactcctaagtcaatttcagaagcatatgcatctcctgatgcagactactggaaggaggctgtccgtaatgaaatggattccattatcgctaacgggacttgggaggtgacagagcgaccctatgggtgtaaacctgtggggtgcaagtgggtgtttaagaagaagcttaggcctgacggtactattgaaaagtacaaggctcggcttgttgctaagggctatactcggaaagaaggcgaagatttctttaacacttactcacctgttgctagattgaccacaattcgtgtgctactttccctagcagcctcacatggtcttctcgttcatcaaatggacgttaagacagcttttcttaatggagagctggatgaggagatctatatgtatcaacctgatgggtttgtagttgaaggtcaagaaggcaaagtgtgcaaattgttgaagtctttgtatggtctgaaacaagctcctaagcaatggcatgagaaatttgacaaaacattgacatctgcaggctttgtagtcaatgaggcagataaatgtgtgtactatcgccatggtgggggtgagggagttattttgtgcttgtatgttgatgacatactgatatttgggacaaaccttgaggtgataaatgaggttaaatcattcttgtctcaaaattttgatatgaaggatttgggagtagctgatgttatcttaaacattaagctaattagaggtgagaatgggattacactcttgcagtcccattatgtggagaagatcttgaatcgttttggctacattgatagtaagccttctccaacaccttatgatcctagcttgttgcttcgcaagaacaagagaattgctaggaatcaactggaatactcccaaatcattggctcgctgatgtacctggctagtgcaactaggcctgatatctcctttgctgtgagcaagttgagccggtttacctctaatccaggagatgatcactggcgtgcgcttgagcgagtaatgcgctatctgaaaggtactatggaattggggcttcactatactgggtatcctgcggtactggagggttatagtgattctaactag

SEQ ID NO: 15023 - DNA, 3963 bp, Oryza sativa
  Clone ID: TFbOSC420440j.C1.o14.fg
atggctggttttgtcgatgcactgaggccggataaattcaccggtgtgcattttaagagatggcagatcagggtcactctgtggctgacagctatgaaatgcttctgggtgagtactggcaaacctgaaggagttcttactgctgaacagcagaagcaattcgaggaagccactactctctttgtgggatgcattcttagcgttcttggcgatcgtctggtcgaggtgtatatgcatatgaccgacgctaaggagttgtgggatgcactgaatactaaattcggtgctactgatgctagcaatgatctgtatatcatggagcagtttcatgactacaaaatggctgacaaccgttctgtagtcgaacaggctcatgagatacaaaccatggctaaggaactcgaactccttaagtgtgtcttacccgacaaatttgtggccgggtgcattattgcaaaactacctccatcttggaggagtttcggtactgcactcaaacacaagagacaggaatactccgttgaggggttgattgcgtctcttgatgttgaggagaaagctcgggaaaaagatgccgcgtctaagggcgatggtgggcagtccagtgccaatgttgtgcacaaggcccagaacaagagcaaggggaaatacaaagctcagcagaccaccaacttcaagaagcagaagaagaacaacaacaatcctaatcaggatgagaggacttgctttgtgtgtggccaagttggtcatctggctaggaagtgtccacaacgcaaggggatgaaggcacctgcagggcagacttctaagtctgctaatgtgaccattggcaacactggagatggaagcgggtatggtaatttacctactgttttttcagttaatcaatctactaattggtgggttgatactggggccaatgtacatgtttgtgctgacatctcattgttttcttcttatcaggtcgcacggggttccaccgtcctaatggggaatgggtcacatgcttctgttcatggtgttggcacggtagatctgaagtttacttcgggaaagatcgtgcagctgaagaacgtgcagcatgtcccttctatcgacaggaatcttgttagtggctcccgtctgactagagacggatttaagttggtttttgagtctaataaagtagtcgtgtctaaacatggatattttattggtaaaggttatgagtgcggaggcctgttccgcttttccctttctgatttctgcaataagtctgtgaaccatatttgtggcagtgtggatgatgaggctaatgtttggcattcacgtttatgtcatattaattttggcttgatgtctcggctttccagcatgtgtttaattcctaagttttccattgtcaaaggttctaagtgccatagttgtgtgcaatcgaagcaacctcgcaagcctcacaaggctgccgaggagagaaacttggcaccactagaactcctacattcagatctttgtgaaatgaatggggtgttgacgaagggtggaaaacgatattttatgacattgattgatgatgctactagattttgctatgtgtacttgttgaaaacgaaagacgaggctctagactattttaaaatttataaggcagaggttgaaaatcaacttgacagaaagataaaaaggcttaggtctgatcgtggtggagagtttttctcgaacgagtttgacttattctgtgaggaacatggcatcatacatgagaggacgcctccctattctcccgagtctaatgggattgctgaaaggaagaaccgcacactgactgacttggtgaatgccatgttggacaccgcgggactgcctaaggcatggtggggggaggcattgttgacctcaaatcatgtgttaaacagagttcctaacagaaataaggacaaaacaccatatgagatatggattggtagaaaaccatcactttcttatttgcgcacatgggggtgcttggcgaaagtcaatgtaccaataacgaagaagcgcaaacttggacctaagactgtggactgtgtttttctgggatatgctcatcatagcattgcctatagatttttaatagttaaatccgaggtaccggacatgcatgttggtacaattatggagtctcgtgatgctaccttctttgagagctttttcccaatgaaggatacacatagtggttcgaaccaaccctctgaaataattcccagttcaatcacaccaccagaacaaactgaacatacacatgaacttgtctctgaggaggatgtcagtgaagctcctcgaaggagtaagagacaaaggacggctaagtcttttggtgatgatttcactgtgtacctcgtggatgacactcctaagtcaatttcagaagcatatgcatctcctgatgcagactactggaaggaggctgtccgtagtgaaatggattccattatcgctaacgggacttgggaggtgacagagcgaccctatgggtgtaaacctgtggggtgcaagtgggtgttcaagaagaagcttaggcctgacggtactattgaaaagtacaaggctcggcttgttgctaagggctatactcagaaagaaggcgaagatttctttgacacttactcacctgttgctagattgaccacaattcgtgtgctactttccctagcagcctcacatggtcttctcgttcatcaaatggacgttaagacagcttttcttaatggagagctggatgaggagatctatatggatcaacctgatgggtttgtacttgaaggtcaagaaggcaaagtgtgcaaattgttgaagtctttgtatggtctgaaacaagctcctaagcaatggcatgagaaatttgacaaaacattgacatctgcaggctttgcagtcaatgaggcagataaatgtgtgtactatcgccatggtgggggtgagggagttattttgtgcttgtatgttgacgacatactgatatttgggacaaacattgaggtgataaatgaggttaaatcattcttgtctcaaaattttgatatgaaagatttgggagtagctgatgttattttaaacattaagctaattagaggtgagaatgggattacactcttgcagtctcattatgtggagaagatcttgaatcgctttggctacattgatagtaagccttctccaacaccttatgatcctagcttgtcgcttcgcaagaacaagagaattgctaggaatcaactggaatactcccaaatcattggctcgttgatgtacctggctagtgcaactaggcctgatatctcctttgctgtgagcaagttgagccgatttacctctaatccgggagatgatcactggcgtgcgcttgagcgagtaatgcgctatctgaaaggtactgtggaattggggcttcactatactgggtatcctgcggtactggagggttatagtgattctaactggatctctgatgtggatgagatcaaagccactagtggatatgttttcacactgggtggtggtgctgtttcatggaggtcttgcaaacagacaattttgacgaggtcaaccatggaagcagagctaacggcactggatactgctactgttgaggcagaatggttgcgtgatctattaatggatctgcctgttgttgaaaaaccggtgccggctatccttatgaactgtgacaatcaaacgacatgtgaaaagacgattgaagtctgtcaggaaattaagaaactccggagttataacgttggattacatccaaacagcgagaaacctggcagatcccttcacgaagggactatcacgaaatgtgatagacaatgcatcgaaggagatgggtttgagacccatagcattcttgaaggaactcacctttgtgagcttgactgttggtcgcagtccatgaagattttgggtgaatcttctaggaagcttactaaagacctaggagtatga

SEQ ID NO: 15024 - DNA, 1005 bp, Oryza sativa
  Clone ID: TFbOSC420751j.C1.o1.fg
atggctggttttgccgatgcactgaggccggataaattcaccggtgtgcattttaagagatggcagatcagggtcactctgtggctgacagctatgaaatgcttctgggtgagtactggcaaacctgaaggagttcttactgctgaacagcagaagcaattcgaggaagccactactctctttgtgggatgcattcttagcgttcttggcgatcgtctggtcgaggtgtatatgcatatgaccgacgctaaggagttgtgggatgcactgaatactaaattcggtgctactgatgctagcaatgatctgtatatcatggagcagtttcatgactacaaaatggctgacaaccgttctgtagtcgaacaggctcatgagatacaaaccatggctaaggaactcgaactccttaagtgtgtcttacccgacaaatttgtggccgggtgcattattgcaaaactacctccatcttggaggagtttcggtactgcactcaaacacaagagacaggaatactccgttgaggggttgattgcgtctcttgatgttgaggagaaagctcgggaaaaagatgccgcgtctaagggcgatggtgggcagtccagtgccaatgttgtgcacaaggcccagaacaagagcaaggggaaatacaaagctcagcagaccaccaacttcaagaagcagaagaagaacaacaacaatcctaatcaggatgagaggacttgctttgtgtgtggccaagttggtcatctggctaggaagtgtccacaacgcaaggggatgaaggcacctgcagggcagacttctaagtctgctaatgtgaccattggcaacactggagatggaagcgggtatggtcgcacggggttccaccgtcctaatggggaatgggtcacatgcttctgttcatggtgttggcacggtagatctgaagtttacttcgggaaagatcgtgcagctgaagaacgtgcagcatgtcccttctatcgacaggaatcttgttag

SEQ ID NO: 15025 - DNA, 3963 bp, Oryza sativa
  Clone ID: TFbOSC422154j.C1.o1.fg
atggctggttttgccgatgcactgaggccggataaattcaccggtgtgcattttaagagatggcagatcagggtcactctgtggctgacagctatgaaatgcttctgggtgagtactggcaaacctgaaggagttcttactgctgaacagcagaagcaattcgaggaagccactactctctttgtgggatgcattcttagcgttcttggcgatcgtctggtcgaggtgtatatgcatatgaccgacgctaaggagttgtgggatgcactgaatactaaattcggtgctactgatgctagcaatgatctgtatatcatggagcagtttcatgactacaaaatggctgacaaccgttctgtagtcgaacaggctcatgagatacaaaccatggctaaggaactcgaactccttaagtgtgtcttacccgacaaatttgtggccgggtgcattattgcaaaactacctccatcttggaggagtttcggtactgcactcaaacacaagagacaggaatactccgttgaggggttgattgcgtctcttgatgttgaggagaaagctcgggaaaaagatgccgcgtctaagggcgatggtgggcagtccagtgccaatgttgtgcacaaggcccagaacaagagcaaggggaaatacaaagctcagcagaccaccaacttcaagaagcagaagaagaacaacaacaatcctaatcaggatgagaggacttgctttgtgtgtggccaagttggtcatctggctaggaagtgtccacaacgcaaggggatgaaggcacctgcagggcagacttctaagtctgctaatgtgaccattggcaacactggagatggaagcgggtatggtaatttacctactgttttttcagttaatcaatctactaattggtgggttgatactggggccaatgtacatgtttgtgctgacatctcattgttttcttcttatcaggtcgcacggggttccaccgtcctaatggggaatgggtcacatgcttctgttcatggtgttggcacggtagatctgaagtttacttcgggaaagatcgtgcagctgaagaacgtgcagcatgtcccttctatcgacaggaatcttgttagtggctcccgtctgactagagacggatttaagttggtttttgagtctaataaagtagtcgtgtctaaacatggatattttattggtaaaggttatgagtgcggaggcctgttccgcttttccctttctgatttctgcaataagtctgtgaaccatatttgtggcagtgtggatgatgaggctaatgtttggcattcacgtttatgtcatattaattttggcttgatgtctcggctttccagcatgtgtttaattcctaagttttccattgtcaaaggttctaagtgccatagttgtgtgcaatcgaagcaacctcgcaagcctcacaaggctgccgaggagagaaacttggcaccactagaactcctacattcagatctttgtgaaatgaatggggtgttgacgaagggtggaaaacgatatttcatgacattgattgatgatgctactagattttgctatgtgtacttgttgaaaacgaaagacgaggctctagactattttaaaatttataaggcagaggttgaaaatcaacttgacagaaagataaaaaggcttaggtctgatcgtggtggagagtttttctcgaacgagtttgacttattctgtgaggaacatggcatcatacatgagaggacgcctccctattctcccgagtctaatgggattgctgaaaggaagaaccgcacactgactgacttggtgaatgccatgttggacaccgcgggactgcctaaggcatggtggggggaggcattgttgacctcaaatcatgtgttaaacagagttcctaacagaaataaggacaaaacaccatatgagatatggattggtagaaaaccatcactttcttatttgcgcacatgggggtgcttggcgaaagtcaatgtaccaataacgaagaagcgcaaacttggacctaagactgtggactgtgtttttctgggatatgctcatcatagcattgcctatagatttttaatagttaaatccgaggtaccggacatgcatgttggtacaattatggagtctcgtgatgctaccttctttgagagctttttcccaatgaaggatacacatagtggttcgaaccaaccctctgaaataattcccagttcaatcacaccaccagaacaaactgaacatacacatgaacttgtctctgaggaggatgtcagtgaagctcctcgaaggagtaagagacaaaggacggctaagtcttttggtgatgatttcactgtgtacctcgtggatgacactcctaagtcaatttcagaagcatatgcatctcctgatgcagactactggaaggaggctgtccgtagtgaaatggattccattatcgctaacgggacttgggaggtgacagagcgaccctatgggtgtaaacctgtggggtgcaagtgggtgttcaagaagaagcttaggcctgacggtactattgaaaagtacaaggctcggcttgttgctaagggctatactcagaaagaaggcgaagatttctttgacacttactcacctgttgctagattgaccacaattcgtgtgctactttccctagcagcctcacatggtcttctcgttcatcaaatggacgttaagacagcttttcttaatggagagctggatgaggagatctatatggatcaacctgatgggtttgtacttgaaggtcaagaaggcaaagtgtgcaaattgttgaagtctttgtatggtctgaaacaagctcctaagcaatggcatgagaaatttgacaaaacattgacatctgcaggctttgcagtcaatgaggcagataaatgtgtgtactatcgccatggtgggggtgagggagttattttgtgcttgtatgttgacgacatactgatatttgggacaaacattgaggtgataaatgaggttaaatcattcttgtctcaaaattttgatatgaaagatttgggagtagctgatgttattttaaacattaagctaattagaggtgagaatgggattacactcttgcagtctcattatgtggagaagatcttgaatcgctttggctacattgatagtaagccttctccaacaccttatgatcctagcttgtcgcttcgcaagaacaagagaattgctaggaatcaactggaatactcccaaatcattggctcgttgatgtacctggctagtgcaactaggcctgatatctcctttgctgtgagcaagttgagccgatttacctctaatccgggagatgatcactggcgtgcgcttgagcgagtaatgcgctatctgaaaggtactgtggaattggggcttcactatactggatatcctgcggtactggagggttatagtgattctaactggatctctgatgtggatgagatcaaagccactagtggatatgttttcacactgggtggtggtgctgtttcatggaggtcttgcaaacagacaattttgacgaggtcaaccatggaagcagagctaacggcactggatactgctactgttgaggcagaatggttgcgtgatctattaatggatctgcctgttgttgaaaaaccggtgccggctatccttatgaactgtgacaatcaaacgacatgtgaaaagacgattgaagtctgtcaggaaattaagaaactccggagttataacgttggattacatccaaacagcgagaaacctggcagatcccttcacgaagggactatcacgaaatgtgatagacaatgcatcgaaggagatgggtttgagacccatagcattcttgaaggaactcacctttgtgagcttgactgttggtcgcagtccatgaagattttgggtgaatcttctaggaagcttactaaagacctaggagtatga

SEQ ID NO: 15026 - DNA, 2638 bp, Oryza sativa
  Clone ID: TFbOSC4254j.C1.o16.gm
ggtcactctgtggttgacagctatgaaatgcttctgggtgagtactggcaaacctgaaggagttcttactgctgaacagcagaagcaattcgaggaagccactactctctttgtgggatgcattcttagcgttcttggcgatcgtctggtcgaggtgtatatgcatatgaccgacgctaaggagttgtgggatgcactgaatactaaattcggtgctactgatgctagcaatgatctgtatatcatggagcagtttcatgactacaaaatggctgacaaccgttctgtagtcgaacaggctcatgagatacaaaccatggctaaggaactcgaactccttaagtgtgtcttacccgacaaatttgtggccgggtgcattattgcaaaactacctccatcttggaggagtttcggtactgcactcaaacacaagagacaggaatactccgttgaggggttgattgcgtctcttgatgttgaggagaaagctcgggaaaaagatgccgcgtctaagggcgatggtgggcagtccagtgccaatgttgtgcacaaggcccagaacaagagcaaggggaaatacaaagctcagcagaccaccaacttcaagaagcagaagaagaacaacaacaatcctaatcaggatgagaggacttgctttgtgtgtggccaagttggtcatctggctaggaagtgtccacagcgcaaggggatgaaggcacctgcagggcagacttctaagtctgctaatgtgaccattggcaacactggagatggaagcgggtatggtaatttacctactgtcgcacggggttccaccgtcctaatggggaatgggtcacatgcttctgttcatggtgttggcacggtagatctgaagtttacttcgggaaagatcgtgcagctgaagaacgtgcagcatgtcccttctatcgacaggaatcttgttagtggctcccgtctgactagagacggatttaagttggtttttgagtctaataaagtagtcgtgtctaaacatggatattttattggtaaaggttatgagtgcggaggcctgttccgcttttccctttctgatttctgcaataacatgtgtttaattcctaagttttccattgtcaaaggttctaagtgccatagttgtgtgcaatcgaagcaacctcgcaagcctcacaaggctgccgaggagagaaacttggcaccactagaactcctacattcagatctttgtgaaatgaatggggtgttgacgaaggaagttgaaaatcaacttgacagaaagataaaaaggcttaggtctaatcgtggtggagagtttttctcgaacgagtttgacttattctgtgaggaacatggcatcatacatgagaggacgcctccctattctcccgagtctaatgggattgctgaaaggaagaaccgcacactgactgacttggtgaatgccatgttggacaccgcgggactgcctaaggcatgtgaagctcctcgaaggagtaagagacaaaggacggctaagtcttttggtgatgatttcactgtgtacctcgtggatgacactcctaagtcaatttcagaagcatatgcatctcctgatgcagactactggaaggaggctgtccgtagtgaaatggattccattatcgctaacgggacttgggaggtgacagagcgaccctatgggtgtaaacctgtggggtgcaagtgggtgttcaagaagaagcttaggcctgacgcctcacatggtcttctcgttcatcaaatggacgttaagacagcttttcttaatggagagctggatgaggagatctatatggatcaacctgatgggtttgtagttgaaggctttgcagtcaatgaggcagataaatgtgtgtactatcgccatggtgggggtgagggagttattttgtgcttgtatgttgacgacatactgatatttgggacaaaccttgaggtgataaatgagtcccattatgtggagaagatcttgaatcgctttggctacattgatagtaagccttctccaacaccttatgatcctagcttgttgcttcgcaagaacaagagaattgctaggaatcaactggaatactcccaaatcattggctcgttgatgtacctggctagtgcaactaggcctgatatctcctttgctgtgagcaagttgagccgatttacctctaatccgggagatgatcactggcgtgcgcttgagcgagtaatgcgctatctgaaaggtactgtggaattggggcttcactatactgggtatcctgcggtactggagggttatagtgattctaactggatctctgatgtggatgagatcaaagccactagtggatatgttttcacactgggtggtggtgctgtttcatggagcaaagatgttgtcctgcagagcattcttgaaagaactcacctttgtgagcttgactgttggtcgcagtctatgaagattttggactactccatcccgctcgccggcgtgcaccggcgatcgggagagcaggtctccggaacctctgccttcgacgttctgcaccgggagaaggcgacacttgcgaaaagtttcgaccaagcagccggtctttccgtcacctcggtacgtgttcaatatgttgcgcatatttga

SEQ ID NO: 15027 - DNA, 4071 bp, Oryza sativa
  Clone ID: TFbOSC4267j.C1.o2.fg
atggctggttttgccgatgcactgaggccggataaattcaccggtgtgcattttaagagatggcagatccgggtcactctgtggctgacagctatgaaatgcttccgggtgagtactggcaaacctgaaggagttcttactgctgaacagcagaagcaattcgaggaagccactactctctttgtgggatgcattcttagcgttcttggcgatcgtctggtcgaggtgtatatgcatatgaccgacgctaaggagttgtgggatgcactgaatactaaattcggtgctactgatgctagcaatgatctgtatatcatggagcagtttcatgactacaagatggctgacaaccgttctgtagtcgaacaggctcatgagatacaaaccatggctaaggaactcgaactccttaagtgtgtcttacccgacaaatttgtggctgggtgcattattgcgaaactacctccatcttggagaagtttcggtactgcactcaaacacaagagacaggaatactccgttgaggggttgatagcgtctcttgatgttgaggagaaagctcgggaaaaagatgccgcgtctaagagcgatggtgggcagtccagcgccaatgttgtgcacaaggcccagaacaagagcaaggggaaatacaaagctcagcagaccaccaacttcaagaagcagaagaagaacaacaacaatcctaatcaggatgagaggacttgctttgtgtgtggccaagttggtcatctggctaggaagtgtccacagcgcaaggggatgaaggcacctgcagggcagacttctaagtctgctaatgtgaccattggcaacactggagatggaagcgggtatggtaatttacctactgttttttcagttaatcaatctactaattggtgggttgatactggggccaatgtacatgtttgtgctgacatctcattgttttcttcttatcaggtcgcacggggttccaccgtcctaatggggaatgggtcacatgcttctgttcatggtcttggcacggtagatctgaagtttacttcgggaaagatcgtgcagctgaagaacgtgcagcatgtcccttctatcgataggaatcttgttagtggctcccgtctgactagagacggatttaagttggtttttgagtctaataaagtagtcgtgtctaaacatggatattttattggtaaaggttatgagtgcggaggcctgttccgcttttccctttctgatttctgcaataagtctgtgaaccatatttgtggcagtgtggatgatgaggctaatgtttggtattcacgtttatgtcatattaattttggcttgatgtctcggctttccagcatgtgtttaattcctaagttttccattgtcaaaggttctaagtgccatagttgtgtgcaatcgaagcaacctcgcaagcctcacaaggctgccgagaagagaaacttggcaccactagaactcctacattcagatctttatgaaatgaatggggtgttgacgaagggtggaaaacgatatttcatgacattgattgatgatgctactacattttgctatgtgtacttgttgaaaatgaaagacgaggctctagactattttaaaatttataaggcagaagttgaaaatcaacttgacagaaagataaaaaggcttaggtctgatcgtggtggagagtttttctcgaacgagtttgacttattctgtgaggaacatggcatcatacatgagaggacgcctccctattctcccgagtctaatgggattgctgaaaggaagaaccgcacactgactgacttggtgaatgccatgttagacaccgcgggactgcctaaggcatggtggggggaggcattgttgacctcaaatcatgtgttaaacagagttcctaacagaaataaggacaaaacaccatatgagatatggattggtagaaaaccatcactttcttatttgcgcacatgggggtgcttggcgaaagtcaatgtaccaataacgaagaagcgcaaacttggacctaagactgtggactgtgtctttctgggatatgctcatcatagcattgcctatagatttttaatagttaaatccgaagtactggacatgcatgttggtacaattatggagtctcgtgatgctaccttctttgagagctttttcccaatgaaggatacacatagtggttcgaaccaaccctctgaaataattcccagttcaatcacaccaccagaacaaactgaacatacacatgaacttgtctctgaggaggatgtcagtgaagctcctcgaaggagtaagagacaaaggacggctaaatcttttggtgatgatttcactgtgtacctcgtggatgacactcctaagtcaatttcagaagcatatgcatctcctgatgcagactactggaaggaggctgtccgtagtgaaatggattccattatcgctaacgggatttgggaggtgacagagcgaccctatgggtgtaaacctgtggggtgcaagtgggtgttcaagaagaagcttaggcctgacggtactattgaaaagtacaaggctcggcttgttgctaagggctatactcagaaagaaggcgaagatttctttgacacttactcacctattgctagattgaccacaattcgtgtgctactttccctagcagcctcacatggtcttctcgttcatcaaatggacgttaagacagcttttcttaatggagagctggatgaggagatctatatggatcaacctgatgggtttgtagttgaaggtcaagaaggcaaagtgtgcaaattgttgaagtctttgtatggtctgaaacaagctcctaagcaatggcatgagaaatttgacaaaacattgacatctgcaggctttgcagtcaatgaggcagataaatgtgtgtactatcgccatggtgggggtaagggagttattttgtgcttgtatgttgacgacatactgatatttgggacaaaccttgaggtgataaatgaggttaaatcattcttgtctcaaaattttgatatgaaggatttgggagtagctgatgttatcataaacattaagctaattagaggtgagaatgggattacactcttgcagtcccattatgtggagaagatcttgaatcgctttggctacattgatagtaagccttctccaacaccttatgatcctagcttgttgcttcgcaagaacaatagaattgctaggaatcaactggaatactcccaaattattggctcgttgatgtacctggctagtgcaactaggcctgatatctcctttgctgtgagcaagttgagccgatttacctctaatccgggagatgatcactggcgtgcgcttgagcgaataatgcgctatctgaaaggtactgtggaattggggcttcactatactgggtatcctgcggtactggagggttatagtgattctaactggatctctgatgtggatgagatcaaagccactagtggatatgttttcacactgggtggtggtgctgtttcatggaggtcttgcaaacagaccattttgacgaggtcaaccatggaagcagagctaacggcactggatactgctactgttgaggcagaatggctgcgtgatctattaatggatctgcctgttgttgaaaaaccggtgccggctatccttatgaactgtgacaatcaaacgacatgtgaaaagacgattgaagtctgtcaggaaattaagaaactccggagttataacgttggattacatccaaacagcgagaaacctggcagatcccttcacgaagggactatcacgaaatgtgatagacaatgcatcgaaggagatgggtttgagacccatattcaaaatggatactatagcattagtttggtggaaacaacaatagaaccaaacaaggttggttatgatctttgtgttggaatcacgagcctgggttacacgcagaaagacatgtattctcaaaaggttacaacatgtgttgtttttacttttggctccaccacttctcctatagcaaaaattccaccaccatttgtggaatcaaggcaatga

SEQ ID NO: 15028 - DNA, 4299 bp, Oryza sativa
  Clone ID: TFbOSC4900j.C1.o8.fg
atggcgaagactatggagcaagaatggcgtgaggcgaagagtcgtgcgagtgccttgccaggccagaggcgtctcaggcgaagggtgcaaggcgaagactatctgccgaaggaagacgacttcgccttggcaagttcgcccccgcgagggccgaagaagcctttccggcccatcaagcctaggggcaatagggccggcgatcgccagatggcccatcaagggcccatgagcccctatatcatcatgtacccttgtaaatgtccctttcataaggactactctatcccgctcgccggcgtgcaccggcgatcgggagagcaggtctccggaacctctgccttcgacgttctgcaccgggagaaggcggcaataaggcactgtgattttactatggctggttttgccgatgcactgaggccggataaattcaccggtgtgcattttaagagatggcagatcagggtcactctgtggctgacagctatgaaatgcttctgggtgagtactggcaaacctgaaggagttcttactgctgaacagcagaagcaattcgaggaagccactactctctttgtgggatgcattcttagcgttcttggcgatcgtctggtcgaggtgtatatgcatatgatcgacgctaaggagttgtgggatgcactgaatactaaattcggtgctactgatgctagcaatgatctgtatatcatggagcagtttcatgactacaaaatggctgacaaccattctgtagtcgaacaggctcatgagatacaaaccatggctaaggaactcgaactccttaagtgtgtcttacccgacaaatttgtggccgggtgcattattgcaaaactacctccatcttggaggagtttcggtactgcactcaaacacaagagacaggaatactccgttgaggggttgattgcgtctcttgatgttgaggagaaagctcgggaaaaagatgccgcgtctaagggcgatggtgggcagtccagtgccaatgttgtgcacaaggcccagaacaagagcaaggggaaatacaaagctcagcagaccaccaacttcaagaagcagaagaagaacaacaacaatcctaatcaggatgagaggacttgctttgtgtgtggccaagttggtcatctagctaggaagtgtccacagcgcaaggggatgaaggcacctgcagagcagacttctaagtctgctaatgtgaccattggcaacactggagatggaagcgggtatggtaatttacctactgttttttcagttaatcaatctactaattggtgggttgatactggggccaatgtacatgtttgtgctgacatctcattgttttcttcttatcaggtcgcacggggttccaccgtcctaatggggaatgggtcacatgcttctgttcatggtgttggcacggtagatctgaagtttacttcgggaaagatcgtacagctgaagaacgtgcagcatgtcccttctatcgacaggaatcttattagtggctcccgtctgactagagacggatttaagttggtttttgagtctaataaagtagtcgtgtctaaacatggatattttattggtaaaggttatgagtgcggaggcctgttccgcttttccctttctgatttctgcaataagtctgtgaaccatacttgtggcagtgtggatgatgaggctaatgtttggcattcacgtttatgtcatattaattttggcttgatgtctcggctttccagcatgtgtttaattcctaagttttccattgtcaaaggttctaagtgccatagttgtgtgcaatcgaagcaacctcgcaagcctcacaaggctgccgaggagagaaacttggcaccactagaactcctacattcagatctttgtgaaatgaatggggtgttgacgaagggtggaaaacgatatttcatgacattgattgatgatgctactagattttgctatgtgtacttgttgaaaacgaaagacgaggctctagactattttaaaatttataaggcagaagttgaaaatcaacttgacagaaagataaaaaggcttaggtctgatcgtggtggagagtttttctcgaacgagtttgacttattctgtgaggaacatggcatcatacatgagaggacgcctccctattctcccgagtctaatgggattgctgaaaggaagaaccgcacactgactgacttggtgaatgccatgttggacactgcgggactgcctaaggcatggtggggggaggcattgttgacctcaaatcatgtgttaaacagagttcctaacagaaataaggacaaaacaccatatgagatatggattggtagaaaaccatcactttcttatttgcgcacatgggggtgcttggtgaaagtcaatgtaccaataacgaagaagcgcaaacttggacctaagactgtggactgtgtttttctgggatatgctcatcatagcattgcctatagatttttaatagttaaatccgaggtaccggacatgcatgttggtacaattatggagtctcgtgatgctaccttctttgagagctttttcccaatgaaggatacacatagtggttcgaaccaaccctctgaaataattcccagttcaatcacaccaccagaacaaactgaatatacacatgaacttgtctctgaggaggatgtcagtgaagctcctcgaaggagtaagagacaaaggacggctaagtcttttggtgatgatttcactgtgtacctcgtggatgacactcctaagtcaatttcagaagcatatgcatctcctgatgcagactactggaaggaggctgtccgtagtgaaatggattccattatcgctaacgggacttgggaggtgacagagcgaccctatgggtgtaaacctgtggggtgcaagtgggtgttcaagaagaagcttaggcctgacggtactattgaaaagtacaaggctcggcttgttgctaagggctatactcagaaagaaggcgaagatttctttgacacttactcacctgttgctagattgaccacaattcgtgtgctactttccctagcagcctcacatggtcttctcgttcatcaaatggacgttaagacagcttttcttaatggagagctggatgaggagatctatatggatcaacctgatgggtttgtagttgaaggtcaagaaggcaaagtgtgcaaattgttgaagtctttgtatggtctgaaacaagctcctaagcaatggcatgagaaatttgacaaaacattgacatctgcaggctttggagtcaatgaggcagataaatgtgtgtactatcgccatggtgggggtgagggagttattttgtgcttgtatgttgacgacatactgatatttgggacaaaccttgaggtgataaatgaggttaaatcattcttgtctcaaaattttgatatgaaagatttgggagtagctgatgttatcttaaacattaagctaattagaggtgagaatgggattacactcttgcagtcccattatatggagaagatcttgaatcgctttggctacattgatagtaagccttctccaacaccttatgatcctagattgttgcttcgcaagaacaagagaattgctaggaatcaactggaatactcccaaatcattggctcgttgatgtacctggctagtgcaactaggcctgatatatcctttgctgtgagcaagttgagccgatttacctctaatccgggagatgatcactggcgtgcgcttgagcgagtaatgcgctatctgaaaggtactgtggaattggggcttcactatactgggtatcctgcggtactggagggttatagtgattctaactggatctctgatgtggatgagatcaaagccactagtggatatgttttcacactgggtggtggtgctgtttcatggaggtcttgcaaacagacaattttgacgaggtcaaccatggaagcagagctaacggcactggatactgctactgttgaggcagaatggctgcgtgatctattaatggatctgcctgttgttgaaaaaccggtgccggctatccttatgaactgtgacaatcaaacgataattgtcaaagtgaatagttctaaggataatatgaaatcttctagacatgtgaaaagacgattgaagtctgtcaggaaattaagaaactccggacttataacgttggattacatccaaacagcgagaaacctggcagatcccttcacgaagggactatcacgaaatgtgatagacaatgcatcgaaggagatgggtttgagacccatgtga

SEQ ID NO: 15029 - DNA, 3894 bp, Oryza sativa
  Clone ID: TFbOSC549j.C1.o1.fg
atggctggttttgccgatgcactgaggccggataaattcaccggtgtgcattttaagagatggcagatcagggtcactctgtggctgacagctatgaaatgcttctgggtgagtactggcaaacctgaaggagttcttactgctgaacagcagaagcaattcgaggaagccactactctctttgtgggatgcattcttagcgttcttggcgatcgtctggtcgaggtgtatatgcatatgaccgacgctaaggagttgtgggatgcactgaatactaaattcggtgctactgatgctagcaatgatctgtatatcatggagcagtttcatgactacaagatggctgacaaccgttctgtagtcgaacaggctcatgagatacaaaccatggctaaggaactcgaactccttaagtgtgtcttacccgacaaatttgtggccgggtgcattattgcaaaactacctccatcttggagaagtttcggtactgcactcaaacacaagagacaggaatactccgttgaggggttgatagcgtctcttgatgttgaggagaaagctcgggaaaaagatgccgcgtctaagggcgatggtgggcagtccagtgccaatgttgtgcacaaggcccagaacaagagcaaggggaaatacaaagctcagcagaccaccaacttcaagaagcagaagaagaacaacaacaatcctaatcaggatgagaggacttgctttgtgtgtggccaagttggtcatctggctaggaagtgtccacagcacaaggggatgaaggcacctgcagggcagacttttaagtctgctaatgtgaccattggcaacactggagatggaagcgggtatggtaatttacctactgttttttcagttaatcaatctactaattggtgggttgatactggggccaatgtatatgtttgtgctgacatcttattgttttcttcttatcaggtcgcacggggttccaccgtcctaatggggaatgggtcacatgcttctgttcatggtgttggcacggtagatctgaagtttacttcgggaaagatcgtgcagctgaagaacgtgcagcatgtcccttctatcgacaagaatcttgttagtggctcccgtctgactagagacggatttaagttggtttttgagtctaataaagtagtcgtgtctaaacatggatattttattggtaaaggttatgagtgcggaggcctgttccgcttttccctttctgatttctgcaataagtctgtgaaccatatttgtggcagtgtggatgatgaggctaatgtttggcattcacgtttatatcatattaattttggcttgatgtctcggctttccagcatgtgtttaattcctaagttttccattgtcaaaggttctaagtgccatagttgtgtgcaatcgaagcaacctcgcaagcctcacaaggctgccgaggagagaaacttggcaccactagaactcctacattcagatctttgtgaaatgaatggggtgttgacgaagggtggaaaacgatatttcatgacattgattgatgatgctactagattttgctatatgtacttgttgaaaacgaaagacgaggctctagactattttaaaatttataaggcagaagttgaaaatcaacttgacagaaagataaaaaggcttaggtctgatcgtggtggagagtttttctcgaacaagtttgacttattctgtgaggaacatggcatcatacatgagaggacgcctccctattctcccgagtctaatgggattgctgaaaggaagaaccgcacactgactgacttggtgaatgccatgttggacaccgcgggactgcctaaggcatggtggggggaggcattgttgacctcaaatcatgtgttaaacagagttcctaacagaaataaggacaaaacaccatatgagatatggattggtagaaaaccatcactttcttatttgcgcacatgggggtgcttggcgaaagtcaatgtaccaataacgaagaagcgcaaacttggacctaagactgtggactgtgtttttctgggatatgctcatcatagcattgcctatagatttttaatagttaaatccgaggtaccggacatgcatgttggtacaattatggagtctcgtgatgctaccttctttgagagctttttcccaatgaaggatacacatagtggttcgaaccaaccctctgaaataattcccagttcaatcacaccaccagaacaaactgaacatacacatgaacttgtctctgaggaggatgtcagtgaagctcctcgaaggagtaagagacaaaggacggctaagtcttttggtgatgatttcactgtgtacctcgtggatgacactcctaagtcaatttcagaagcatatgcatctcctgatgcagactactggaaggaggctgtccgtagtgaaatggattccattatcgctaacgggacttgggaggtgacagagcgaccctatgggtgtaaacctgtggggtgcaagtgggtgttcaagaagaagcttaggcctgacggtactattgaaaagtacaaggctcggcttgttgctaagggctatactcagaaagaaggcgaagatttctttgacacttactcacctgttgctagattgaccacaattcgtgtgctactttccctagcagtctcacatggtcttctcgttcatcaaatggacgttaagacagcttttcttaatggagagctggatgaggagatctatatggatcaacctgatgggtttgtagttgaaggtcaagaaggcaaagtgtgcaaattgttgaagtctttgtatggtctgaaacaagctcctaagcaatgtcatgagaaatttgacaaaccattgacatctgcaggctttgcagtcaatgaggcagataaatgtgtgtactatcgccatggtgggggtgagggagttattttgtgcttgtatgttgacgacatactgatatttgggacaaaccttgaggtgataaatgaggttaaatcattcttgtctcaaaattttgatatgaaggatttgggagtagctgatgttatcttaaacattaagctaattagaggtgagaatgggattacactcttgcagtcccattatgtggagaagatcttgaatcgctttggctacattgatagtaagccttctccaacaccttatgatcctagcttgttgcttcacaagaacaaaagaattgctaggaatcaactggaatactcccaaatcattggctcgttgatgtacctggctagtgcaactaggcctgatatctcctttgctgtgagcaagttgagccgatttacctctaatccgggagatgatcactggcgtgcgcttgagcgagtaatgcgctatctgaaaggtactgtggaattggggcttcactatactgggtatcctgcggtactggagggttatagtgattctaactggatctctgatgtggatgagatcaaagccactagtggatatgttttcacactgggtggtggtgctgtttcatggaggtcttgcaaacagaccattttgacgaggtcaaccatggaagcagagctaacggcactggatactgctactgttgaggcagaatggctgcgtgatctattaatggatctgcctattgttgaaaaaccggtgccggctatccttatgaactgtgacaatcaaacgacatgtgaaaagacgattgaagtctgtcaggaaattaagaaactccggagttataacgttggattacatacaaacagcgagaaacctggcagatcccttcacgaagggactatcacgaaatgtgatagacaatgcatcgaaggagatgggtttgagacccatgtgagttatactatggtggtaacccagtctatgtga

SEQ ID NO: 15030 - DNA, 56 bp, Oryza sativa
  Clone ID: TFbOSC549j.C1.o1.gm
atggcggcggcggcggctctcacgtccagcatccgtgacggtcctccgccgtcgag

SEQ ID NO: 15031 - DNA, 3657 bp, Oryza sativa
  Clone ID: TFbOSC5516j.C1.o2.gm
atggctgacctcctcggcgacccgacgtggccgcagctccaccggcgtccctgcacggacacgccatggccgggactccagtgcgagctcgcccccgacgacgcccgccacctgcgcgccaccaggctccacttcggccccgacgtcgccaccccgccgtgcaggcccggcgccaggctcgccgcgcccgtgctcctgggactcccccacctcaagacgctctccctcttcggctgcttcgtcgtcgccgacttgagtagtgagccaataaaaagccaggagatgagagcacatgccgccgccgccgccgccgccgtcgagctcccgccggcgctcttcaccaacgcctcctccctcgagcagctcgtgctcaagtctaaccccggcctcaccggccggatcccggcgacgctgagcgacctgaggagcctgcgcgtgcttagcctgtcccagaacggcttccgcggcgagatcccgccggagctcggccgcctcgccccgctgcagcagctcgacctcagctacaacaacctcaccggcgagattccggaggagatcggaggcatggagagcctgtccatcctggacctgagctggaacagcctcgccggcggcttgccggcggcgctggggagcctgaggatgctggagaaggccgacctgagccacaacgagctcgccgggagggtgccggcggaggtcgggtcgctgcgggagctggtgttcctggacctgagccacaacgagctcgccgggccgctgccggcgtcgatggccgggctggggaagctgcagtacctgctcctgcaggagaaccccatcggcacggcggtgccggcggcggtggtcgggtcgctccggcggctgcaggtggtgggcatgtccgggtgcggcctgacggggccgatcccgcgcggcgcgttcgccgcgctggccagcctggcggcgctgtcgctcgaccggaacaggctcgacgggccgatcccggcgagcctcgccgcgctgccgcggctggggcggctcaacctgagccagaaccggctggccggggagatcgcgctgccggcggagttcgtggcgcggctgggcaggcgcctcgacgtgcggggcaacgacaagctgtgcgtcggccgggaaaggtacggcggcgcgcaggcgagctacctgggcgcgccgccgtgcgctgcggctggcggtggctcgggggcagccgtaggagggacgtcgtcgtctccggtggagagctccgccggcgccgcggcgacggccggccgtggcttccgggtttacgggatcgctgggatgttcggcggcatgttttgttttgctgcaaatgcgccgtcgctcgtagactactccatcccgctcgccggcgtgcaccagcgatcgggagagcaggtcttccttttgcagttttgttttgctgcaaatgcgccgtcgctcgtagactactccatcccgctcgccggcgtgcaccaacgatcgggagagcaggtctccggaacctctgcctttgacgtcctgcaccgggagaaggcggcaataagggtcactctgtcgctgacagctatgaaatgcttctgggtgagtactggcaaacctgaacgagttcttactgctgaacagcagaagcaattcgaggaagccactactctctttgtgggatgcattcttagcgttcttggcgatcgtctggtcgagatgtatatgcatatgaccgacgctaaggagttgtgggatgcactgaatactaaattcggtgctactgatgctagcaataatctgtatatcatggagcagtttcatgactacaaaatggctgacaaccgttctgtagtcgaacaggctcatgagatacaaaccatggctaaggaactcgaactccttaagtgtgtcttacccgacaaatttgtggccgggtgcattattgcaaaactacctccatcttggaggagtttcggtactgcactcaaacacaagagacaggaatactccgttgaggggttgattgcgtctcttgatgttgaggagaaagctcgggaaaaagatgccgcgtctaagggcgatggtgggcagtccagtgccaatgttgtgcacaaggcccagaacaagagcaaggggaaatacaaagctcagcagaccaccaacttcaagaagcagaagaagaacaacaacaatcctaatcaggatgagaggacttgctttgtgtgtggccaagttggtcatctggctaggaagtgtccacagcgcaaggggatgaaggcacctgcagggcagacttctaagtctgctaatgtgaccattggcaacactggagatggaagcgggtcgcacgggctgaagaacgtgcagcatgtcccttctatcgacaggaatcttgttagtggctcccgtctgactagagacggatttaagttggtttttgagtctaataaagtagtcgtgtctaaacatggatattttattggtaaaggttatgagtgcggaggcctgttccgcttttccctttctgatttctgcaataagtctgtgaaccatatttgtggcagtgtggatgatgaggctaatgtttggcattcacactactggaaggaggctgtccgtagtgaaatggattccattatcgctaacgggacttgggaggtgacagagcgaccctatgggtgtaaacctgtggggtgcaagtgggtgttcaagaagaagcttaggcctgacgcctcacatggtcttctcgttcatcaaatggacgttaagacagcttttcttaatggagagctggatgaggagatctatatggatcaacctgatgggtttgtagttgaaggctttgcagtcaatgaggcagataaatgtgtgtactatcgccatggtgggggtgagggagttattttgtgcttgtatgttgacgacatactgatatttgggacaaaccttgaggtgataaatgagtcccattatgtggagaagatcttgaatcgctttggctacattgatagtaagccttctccaacaccttatgatcctagcttgttgcttcgcaagaacaagagaattgctaggaatcaactggaatactcccaaatcattggctcgttgatgtacctggctagtgcaactaggcctgatatctcctttgctgtgagcaagttgagccgatttacctctaatccgggagatgatcactggcgtgcgcttgagcgagtaatgcgctatctgaaaggtactgtggaattggggcttcactatactgggtatcctgcggtactggagggttatagtgattctaactggatctctgatgtggatgagatcaaagccactagtggatatgttttcacactgggtggtggtgctgtttcatggagcaaagatgttgtcctgcagagcattcttgaaggaactcacctttgtgagcttgactgttggtcgcagtctatgaagattttgggtgaatcttctaggaagctgacggagcttggggctcctcaccgggagaccgcgcaggcccccctttgccggttcggccgggggccctgggttcgggccgctgagaagcgtaataccctactcctgtgttttggtggatctgtgtatgaagaagctacaaagtgcgagccagcccccgatcgttctgggatcgtttcctcccgtctctaa

SEQ ID NO: 15032 - DNA, 1941 bp, Oryza sativa
  Clone ID: TFbOSC6238j.C1.o1.gm
gaatactccgttgaggggttgattgcgtctcttgatgttgaggagaaagctcgggaaaaagatgccgcgtctaagggcgatggtgggcagtccagtgccaatgttgtgcacaaggcccagaacaagagcaaggggaaatacaaagctcagcagaccaccaacttcaagaagcagaagaagaacaacaacaatcctaatcaggatgagaggacttgctttgtgtgtggccaagttggtcatctggctaggaagtgtccacagcgcaaggggatgaaggcacctgcagggcagacttctaagtctgctgatgtgaccattggcaacattggagatggaagcgggtatggtaatttacctactgtcgcacggggttccaccgtcctaatggggaatgggtcacatgcttctgttcatggtgttggcacggtagatctgaagtttacttcgggaaagatcgtgcagctgaagaacgtgcagcatgtcccttctatcgacaggaatcttgttagtgactcccgtctgattagagacggatttaagttggtttttgagtctaataaagtagtcgtgtctaaacatggatattttattggtaaaggttatgagtgcggaggcctgtttcgcttttccctttctgatttctgcaataagtctgtgaaccatatttgtggcagtgtggatgatgaggctaatgtttggcattcacaagttgaaaatcaacttgacagaaagataaaaaggcttaggtctgatcgtggtggagagtttttctcgaacgagtttgacttattctttgaggaacatggcatcatacatgagaggacgcctccctattctcccgagtctaatgggattgctgaaaggaagaaccgcacactgactgacttggtgaatgccatgttggacaccgcgggactgcctaaggcatgtgaagctcctcgaaggagtaagagacaaaggacggctaagtcttttggtgatgatttcactgtgtacctcgtggatgacactcctaagtcaatttcagaagcatatgcatctcctgatgcagactactggaaggaggctgtccgtagtgaaatggattccattatcgctaacgggacttgggaggtgacggagcgaccctatgggtgtaaacctgtggggtgcaagtgggtgttcaagaagaagcttaggcctgacgcctcacatggtcttctcgttcatcaaatggacgttaagacagcttttcttaatggagagctggatgaggagatctatatggatcaacctgatgggtttgtagttgaaggctttgcagtcaatgaggcagataaatgtgtgtactatcgccatggtgggggtgagggagttattttgtgcttgtatgttgacgacatactgatatttgggacaaaccttgaggtgataaatgagtcccattatgtggagaagatcttgaatcgctttggctacattgatagtaagccttctccaacaccttatgatcctagcttgttgcttcgcaagaacaagagaattgctaggaatcaactggaatactcccaaatcattggctcgttgatgtacctggctagtgcaactaggcctgatatctcctttgctagcattcttgaaagaactcacctttgtgagcttgactgttggtcgcagtctatgaagattttggactactccatcccgctcgccggcgtgcaccagcgatcgggagagcaggtctccggaacctctgcctttgacgtcctgcaccgggagaaggcggcaataagaggtgtcatcggtatcattatcgacatccacctgatcaccacccaatggggaagcgacaagcatatcttcgtgtccttcctcgttcacaaggctgctcgcttcattgccttccattattcagtgcctattgctcttcgtgctttgtccaacatgtgtaacccttcatga

SEQ ID NO: 15033 - DNA, 7872 bp, Oryza sativa
  Clone ID: TFbOSC8778j.C1.o2.fg
atgtcgaacgaaaaggttccatcgaacgcaccaatagcgcctcaagaaggtaacgctcctcaaaattccggtagcaataagcatccaggcgcttctagtgaagaaacgtggcgcacaccaagtgacccgtttccaatggaaataacacaagtcgccccccgcgatgatgatccggactacatacctatcgaacaggccatggtagtccgacgccgctcgaaacgtaaagccgggaggaacaggacagagcaagaagttgagatggacaccgctacgtctgcacctgaacgtacggagacatctacaagtgcaggcgggagtgggaaaaaaagacgtggtgagagaagcaagaataaattacccaaggaaacttacaacgtgattgctctcgatcaggatgggaagcccatcgagccaccgatagtgcggtccaagttcagcaacgcctgtggcactctagtcaggacgcgttgtcccattaatgtcaagttgtgggaaacagtggacgacaacatcaagacacttctctggaatgagttgcagaagtattttgtgttccctcctggatcagaggttagggggagagattacgcacttaaaaagatgggagatcgatggcgacagtggaagtccgatctaaatcgggattatgttcagaagaatctcccaccgtttacggattatggacatatatcgcaggctgactgggacacgtttgttgcggatcgtacaacagctgaagcattggctttgaggaaaaaaatgtccgagctcgcgaagaagaacaaatatccccatagattggggtcgagcggatacgctggtcacgtcgatcaatggcgggagatcgagcaaagatttgccgcggccggtaagcccctgctggtagaccccatggttgaacgtagcaagaactgggtttgggcgcgcagcacaggtcaagtctcggatgagggagacatactattcgagactccagacatagaagaagtgactactaatttgcagcagatagtcgagaaagaaagatcaggacagttcgtcccacggagggagagagatcagcttactgcggcgttggggacggctgaacactctggacgtgtaaggggtttgtcctcaaagacaagttggaaggtcgggtttccacaagacgcaccaagttataagaagagagacaaatacaaagaacaactatcggacaagatctatgcgcaagtgaaggaacacttctactcgttggcagctgaaaacccgacagcatttccaaggttattccctgatagccagcaacccacacaatccgcacagcaaacaactaatgtacccagcagtgtaggctcagtgcagacaagtaccttccctgtggatagtataactggaccaactccgtgcagtctcgtcgtaccaatcggccgcgctggaaagactaaggaggttgcaacgggtttagcgatacccggacgtcaattccacaacacggcaatccctgaggattacgcaagggtacaggtcgccaaggtccatagcgaccacgtttccttggaactagacatacctgcacctgaggggattgaacttctcggtgatgcagtgaatcagtttatcttgtggcaccgcagagacataatcctgagcgcggccgttcttgcagcaggatcttcaaccccatcctcatcgcaggcaatgactgctgccgctcctgcaccaccgtcgcctcctgaaccaccgtcacctcgacatccgccgtcaccaccaccgcttaggtcaccggctcgccaacctacaccaccaccctccccttctcaacaaccgcctctcccgaccccgcaaccagttcaagcctctcccacctccccaactaaacagcatgctcccccggctccgccctcagttcaaacctctccacctacaccccaatctgctctggtagaagaagtgcacataccagatggtactacatccgaaccaaagtctaatactttggaacctcgtcgtataattccaaagttgatatcgacatacgacccaaaggagattgacaaggataaggagaagttcatgttttcagctttcaggaattctgagaagagaaaagaacttgctcacgtcttgtcagactcccagaagtcagtactagcggcccaagatgaagtgcaatcctggttatctgccgatgtgcctgaaacttatgagtatggcaagccattcttgccaacttatcttatgaacaagctaccatgggaaatgagggtaatgcacgaatggtatatgaaggcatctaggaaaggtctcggtttcataagcgtcgccgtcccggaaggcgctttcatgagtggtcctaatgggatattttttatctctttccaagacctttacgccctctacaagctagataaaatggacgttaatctcgttgcggctttctgtcttatgcaattccacgaagctgatagaactggagcaaaggttggatacgtcgatccaacaagaatatgcaaaacacaacacaccatagagctgagacaggactgcgagcaattggttggcaagaccccggaagaaaaggaagaatatgtgaagacattgcacaagaggaagaagctagaagtagcaacatacttggcaatagcaatgttggcgcacgccgacaaagatgtcttaatggtcccctaccagttcacagaccactacatattattccttgtatatccgaaagaccaattgatcatatcattggaccccgcacactatgacaaggagacatttatggaattcctcactattttgaatttagcacacaagtactaccgcaaaagaggtggaccagtacatattccatcccagaagaagttatccgtcaggactggctggccgtgctacaaacaaccaccaggaaccaacttgtgtggttattacgtgtgcgagatgctcagagtaaatgggaggtacaaaacaaccagtaaccgaatccccgaaatcccatatattgcacaacgattcaaccacactactatcttgaacgtggccgctgacctctgccgattcatccgtcgcgatgtctgcaacgcaagaggtgtcacgcctgagtcagcaagctttgccgatactggatatgaccccccgccaaaaaaatggaaagggatttgccaggttggcccatcgtttgaggccataagttgcaaccggaagtttatcggtgcacggtggtacatcgatgacgagattctaagtagcatatccgataacgaggttctttctcctagggatgtcgaaggccacggcacgcacacagcctcaacggctggcggcaacatcatccacaatgttagctttctggggctagctgcagggacagttcggggtggagcgccccgtgcacgattagccatatacaaggcctgttggtccggttatggctgctccggtgccaccgtgttgaaagccatggacgacgctgtctatgatggtgttgatgtcttatcactttctataggtggtacaaaagaagatgtgggaaccctacatgtcgtcgctaatggtatctcggttgtctacgctggtggaaacgatggtcccattgctcagacggtggagaaccaatcaccatggctagtaacggtcgctgcaaccaccattgatcggtccttgcctgtggttatcaccttgggaaacggcgaaaagttggtggcgcaatcctttgtcctcctggaaactgcaagtcagttcagtgagatacagaagtacacagacgaggaatgcaatgccaacaatattatgaacagcacggtgaaggggaaaatagccttctgcttcatgggagagatgttgaataataagcagcagacatcataccctgatgtcaccacggcagtggcagccaaaggaggcagagcaccggacattgctgcaccaggggtttcgattttagccgctgctcagattccatattacaaaggtgtttcctaccatttcgattctggaacatctatggcttgcccccatgtagctgggatcattgcggtgctcaagtccattcatccaaaatggtcacctgcggctctcaaatccgcaatcatgacaacagactactccatcccgctcgctggcgtgcaccagcgatcgggagagcaggtctccggaacctctgcctttgacgtcctgcaccgggagaaggcggcaataaggcactgtgattttactatggctgattttgccgatgcactgaggccggataaattcaccggtgtgcattttaagagatggcagatcagggtcactctgtggctgacagctatgaaatgcttctgggtgagtactggcaaacctgaaggagttcttactgctgaacagcagaagcaattcgaggaagccactactctatttgtgggatgcattcttagcgttcttggcgatcgtctggtcgaggtgtatatgcatatgaccgatgctaaggagttgtgggatgcactgaatactaaattcggtgctactgatgctagcaatgatctgtatatcatggagcagtttcatgactacaagatggctgacaaccgttctgtagtcgaacaggctcatgagatacaaaccatggctaaaagtttcggtactgcactcaaacacaagagacaggaatactccgttgaggggttgatagcgtctcttgatgttgaggagaaagctcgggaaaaagatgccgcgtctaagggcgatggtgggcagtccagcgccaatgttgtgcacaaggcccagaacaagagtaaggggaaatacaaagctcagcagaccaccaacttcaagaagcagaagaagaacaacaacaatcctaatcaggatgagaggacttgctttgtgtgtggccaagttggtcatctggctaggaagtgtccacagcgcaaggggatgaaggcacctgcagggcagacttctaagtctgctaatgtgaccattggcaacactggagatggaagcgggtatggtaatttacctactgttttttcagttaatcaatctactaattggtgggttgatactggggccaatgtcgcacggggttccaccgtcctaatggggaatgggtcacatgcttctgttcatggtgttggcacggtagatctgaagtttacttcgggaaagatcgtgcagctgaagaacgtgcagcatgtcccttctatcgacaggaatcttgttagtggctcccgtctgactagagacggatttaagttggtttttgagtctaataaagtagtcgtgtctaaacatggatattttattggtaaaggttatgagtgcggaggcctgttccgcttttccctttctgatttctgcaataagtctgtgaaccatatttgtggcagtgtggatgatgaggctaatgtttggcattcacgtttatgtcatattaattttggcttgatgtctcggctttccagcatgtgtttaattcctaagttttccattgtcaaaggttctaagtgccatagttgtgtgcaatcgaagcaacctcgcaagcctcacaaggctgccgaggagagaaacttggcaccactagaactcctacattcagatctttgtgaaatgaatggggtgttgacgaagggtggaaaacgatatttcatgacattcattgatgatgctactagattttgctatgtgtacttgttgaaaaagaaagacgaggctctagactattttaaaatttataaggcagaagttgaaaatcaacttgacagaaagataaaaaggcttaggtctgatcgtggtggagagtttttctcgaacgagtttgacttattctgtgaggaacatggcatcatacatgagaggacgcctccctattctcccgagtctaatgggattgctgaaaggaagaactgcacactgactgacttggtgaatgccatgttggacaccgcgggactgcctaaggcatggtggggggaggtattgttgacctcaaatcatgtgttaaacagagttcctaacagaaataaggacaaaacaccatatgagatatggattggtagaaaaccatcactttcttatttgcgcacatgggggtgcttggcgaaagtcaatgtaccaataacgaagaagcgcaaacttggacctaagactgtggactgtgtctttctgggatatgctcatcatagcattgcctatagatttttaatagttaaatccgaggtactggacatgcatgttggtataattatggagtctcgtgatgctaccttctttgagagctttttcccaatgaaggatacacatagtggttcgaaccaaccctctgaaataattcccagttcaatcataccaccagaacaaactgaacatacacatgaacttgtctctgaggaggatgtcagtgaagctcctcgaaggagtaagagacaaaggacggctaagtcttttggtgatgattttactgtgtacctcgtggatgacactcctaagtcaatttcagaagcatatgcatctcctgatgcagactactggaaggaggctgtccgtagtgaaatggattccattatcgctaacgggacttgggaggtgacagagcaaccctatgggtgtaaacctgtggggtgcaagtgggtgttcaagaagaagcttaggcctgacggtactattgaaaagtacaaggctcggcttgttgctaagggctatactcagaaagaaggcgaagatttctttgacacttactcacctgttgctagattgaccacaattcgtgtgctactttccctagcagcctcacatggtcttctcgttcatcaaatggacgttaagacagcttttcttaatggagagctggatgaggagatctatatggatcaacctgatgggtttgtagttgaaggctttggagtcaattatgcgtatccatgtgtgtattatcgccatggtgggggtcagggagttattttgtgcttgtatgttgacgacatactgatatttgggacaaaccttgaggtgataaatgaggttaaatcattcttgtctcaaaattttgatatgaaagatttgggagtagctgatgttatcttaaacattaagctaattagaggtgagaatgggattacactcttgcagtcccattatgtggaaaagatcttgaatcgctttggctacattgatagtaagccttttccaacaccttatgatcctagcttgttgcttcgcaagaacaagagaattgctaggaatcaactggaatactcccaaatcattggctcgttgatgtacctggctagtgcaactaggcctgatatctcctttgctgtgagcaagttgagccgatttacctctaatccgggagatgatcactggcgtgcgcttgagcgagtaatgcgctatctgaaaggtactgtggaattggggcttcactatactgggtatcctgcggtactggagggttatagtgattctaactggatctctgatgtggatgagatcaaagccactagtggatatgttttcacactgggtggtggtgctgtttcatggaggtcttgcaaacagacaattttgacgaggtcaaccatggaagcagagctaacggcactggatactgctactgttgaggcagaatggctgcgtgatctattaatggatctgcctgttgttgaaaaaccggtgccggctatccttatgaactgtgacaatcaaacgacatgtgaaaagacgattgaagtctgtcaggaaattaagaaactccggagttataacgttggattacatccaaacagcgagaaacctggcagatcccttcacgaagggactatcacgaaatgtgatagacaatgcatcgaaggagatgggtttgagacccatgtgagttatactatggtggtaacccagtctatgtga

SEQ ID NO: 15034 - DNA, 4542 bp, Oryza sativa
  Clone ID: TFbOSC900007j.C1.o16.fg
atggctggttttgccgatgcactgaggccggataaattcaccggtgtgcattttaagagatggcagatcagagtcactctgtggctgacagctatgaaatgcttctgggtgagtactggcaaacctgaaggagttcttactgctgaacagcagaagcaattcgaggaagccactactctctttgtgggatgcattcttagcgttcttggcgatcgtctggtcgaggtgtatatgcatatgaccgacgctaaggagttgtgggatgcactgaatactaaattcggtgctactgatgctagcaatgatctgtatatcatggagcagtttcatgactacaagatggctgacaaccgttctgtagtcgaacaggctcatgagatacaaaccatggctaaggaactcgaactccttaagtgtgtcttacccgacaaatttgtggctgggtgcattattgcgaaacaacctccatcttggagaagtttcggtactgcactcaaacacaagagacaagaatactccgttgaggggttgatagcgtctcttgatgttgaggagaaagctcgggaaaaagatgccgcgtctaagggcgatggtgggcagtccagcgccaatgttgtgcacaaggcccagaacaagagcaaggggaaatacaaagctcagcagaccaccaacttcaagaagcagaagaagaacaacaacaatcctaatcaggatgagaggacttgctttgtgtgtggccaagttggtcatctggctaggaagtgtccacagcgcaaggggatgaaggcacctgcagggcagacttctaaatggaagcgggtcgcacggggttccaccgtcctaatggggaatgggtcacatgcttctgttcatggtgttggcacggtagatctgaagtttacttcgggaaagatcgtgcagctgaagaacgtgcagcatgtcccttctatcgacaggaatcttgttagtggctcccgtctgactagagacggatttaagttggtttttgagtctaataaagtagtcgtgtctaaacatggatattttattggtaaaggttatgaatgcggaggcctgttccgcttttccctttctgatttctgcaataagtctgtgaaccatatttgtggcagtgtggatgatgaggctaatgtttggcattcacgtttatgtcatattaattttggcttgatgtctcggctttccagcatgtgtttaattcctaagttttccattgtcaaaggttctaagtgccatagttgtgtgcaatcgaagcaacctcgcaagcctcacaaggctgccgaggagagaaacttggcaccactagaactcctacattcagatctttgtgaaatgaatggggtgttgacgaagggtggaaaacgatatttcatgacattcattgatgatgctactagattttgctatgtgtacttgttgaaaacgaaagacgaggctctagactattttaaaatttataaggcagaagttgaaaatcaacttgacagaaagataaaaaggcttaggtctgatcgtggtggagagtttttctcgaacgagtttgacttattctgtgaggaacatggcatcatacatgagaggacgcctccctattctcccgagtctaatgggattgctgaaaggaagaaccgcacactgactgacttggtgaatgccatgttggacaccgcgggactgcctaaggcatggtggggggaggcattgttgacctcaaatcatgtgttaaacagagttcctaacagaaataaggacaaaacaccatatgagatatggattggtagaaaaccatcactttcttatttgcgcacatgggggtgcttggcgaaagtcaatgtaccaataacgaagaagcgcaaacttggacctaagactgtggactgtgtctttttgggatatgctcatcatagcattgcctatagatttttaatagttaaatccgaggtactggacatgcatgttggtacaattatggagtctcgtgatgctaccttctttgagagctttttcccaatgaaggatacacatagtggttcgaaccaaccctctgaaataattcccagttcaatcacaccaccagaacaaactgaacatacacatgaacttgtctctgaggaggatgtcagtgaagctcctcgaaggagtaagagacaaaggacggctaagtcttttggtgatgattttactgtgtacctcgtggatgacactcctaagtcaatttcagaagcatatgcatctcctgatgcagactactggaaggaggctgtgacagagcaaccctatgggtgtaaacctgtggggtgcaagtgggtgttcaagaagaagcttaggcctgacggtactattgaaaagtacaaggctcggcttgttgctaagggctatactcagaaagaaggcgaagatttctttgacacttactcacctgttgctagattgaccacaattcgtgtgctactttccctagcagcctcacatggtcttctcgttcatcaaatggacgttaagacagcttttcttaatggagagctggatgaggagatctatatggatcaacctgatgggtttgtagttgaaggtcaagaaggcaaagtgtgcaaattgttgaagtctttgtatggtctgaaacaagctcctaagcaatggcatgagaaatttgacaaaacattgacatctgcaggctttggagtcaatgaggcaaataaatgtgtgtactatcgccatggtgggggtgagggagttattttgtgcttgtatgttgacgacatactgatatttgggacaaaccttgaggtgataaatgaggttaaatcattcttgtctcaaaattttgatatgaaagatttgggagtagctgatgttatcttaaacattaaactaattagaggtgagaatgggattacactcttgcagtcccattatgtggagaagatcttgaatcgctttggctacattgatagtaagccttctccaacaccttatgatcctagcttgttgcttcgcaagaacaagagaattgctaggaatcaactggaatactcccaaatcattggctcgttgatgtacctggctagtgcaactaggcctgatatctcctttgctgtgagcaagttgagccgatttacctctaatccgggagatgatcactggcgtgcgcttgagcgagtaatgcgctatctgaaaggtactgtggaattggggcttcactatactgggtatcctgcggtactggagggttatagtgattctaactggatctctgatgtggatgagatcaaagccactagtggatatgttttcacactgggtggtggtgctgtttcatggaggtcttgcaaacagacaattttgacgaggtcaaccatggaagcagagctaacggcactggatactgctactgttgaggcagaatggctgcgtgatctattaatggatctgcctgttgttgaaaaaccggtgccggctatccttatgaactgtgacaatcaaacgacatgtgaaaagacgattgaagtctgtcaggaaattaagaaactccggagttataacgttggattacatccaaacagcgagaaacctggcagatcccttcacgaagggactatcacgaaatgtgatagacaatgcatcgaaagagatgggtttgagacccatatgcagcctccttttgcagttttgttttgctgcaaattcggattcgtttttgttttggaaacgttccgaaaaatccggatatgcgaaaatcaatctagggtttgcctcctactctgtactgcgccgtcgctcgtagactactccatcccgctcgccggcgtgcaccagcgatcgggagagcaggtctccggaacctctgcctttgacgtcctgcaccgggagaaggcggcaataaggtgttcgcggagaacccagagcactgagaacgtcgaggaagcggacgacgccaaccagctcgccgtcgtcggcgtccaccacccacacctgcgtcacgcggataaggcgacggaggcaacaccgtcgaccaccgcgagcgcgcgcccgaacgggtgcgccgccgccggcagcgaggatgacgccgacgatggctcgccttcaccgtcagactccgtgccggtagaagaatcggatgttgccgacttgtggtcgacggtgaccggcttcgcgcttccagagtcgggcggcttggtgtggtcgacagtgacttgctccaacgacgcccttgcgccgctgtcgtgcagaggctcgggcttcgcgctttcggcgtcgggcgacgacagtgaatggccagagaacgacgggccgccgccaccgctactgtcaaccataggcttcatgccaccggcgacgggcggcgaaggggaagagccagagaacgaggcctcctcctacggtgaatgcccagagaacacctacggcggccgcctcctcctctccgcggtgcttccccactacagccgccgccgacaacgccggctgccgtcggcgccccagcggcctcctccccaaccgccggacggcttgcacagataa

SEQ ID NO: 15035 - DNA, 3087 bp, Oryza sativa
  Clone ID: TFbOSC900144j.C1.o23.gm
atgggcacaaaaaccaaccctgaccggtggaatggttcactgtcacagggtctgggggagggagggttattttttgaagatgagagcggttatgacgacaaagtgggggtcggctcggccggtcagacagggcgccaggccagtcaggcctctggcactcctgcggtcagaccgacgcatgacgtgggtcagaccggcctgggtcgtcggctgagggttctgttgatgctgctcgagatggtcctccagaaattactacttcggccaatactgatacagaacgtggatcaacttcagaagttactgctcctttgcacattcaccgccgacatccgccggaacacaattattggtaatataggtgagcggactgcaagacttgtctggttgttgcctgtcacaagaccaaattgtggcaagggcgagacatcagtcaaagggaacactggtggcaagacctacatccgcgtcttgggcaaccatgttgaacacggcggtggcgtgctggagctcatcagcaagcctcatattttgaaagctcaagtatcggtgctgtactactactccatcccgctcgccggcgtgcaccagcgatcgggagagcaggtctccggaacctctgcctttgacgtcctgcaccgggagaaggcagcaataagggtcactctgtggctgacagctatgaaatgcttctgggtgagtactggcaaacctgaaggagttcttaccgctgaacagcagaagcaattcgaggaagccactactctctttgtgggatgcattcttagcgttcttggcgatcgtctggtcgaggtgtatatgcatatgaccgacgctaaggagttgtgggatgcactgaatactaaattcggtgctactgatgctagcaatgatctgtatatcatggagcagtttcatgactacaaaatggctgacaaccgttctgtagtcgaacaggctcatgagatacaaaccatggctaaggaactcgaactccttaagtgtgtcttacccgacaaatttgtggccgggtgcattattgcaaaactacctccatcttggaggagtttcggtactgcactcaaacacaagagacaggaatactccgttgaggggttgattgcgtctcttgatgttgaggagaaagctcgggaaaaagatgccgcgtctaagggcgatggtgggcagtccagtgccaatgttgtgcacaaggcccagaacaagagcaaggggaaatacaaagctcagcagaccaccaacttcaagaagcagaagaagaacaacaacaatcctaatcaggatgagaggacttgctttgtgtgtggccaagttggtcatctggctaggaagtgtccacaacgcaaggggatgaaagcacctgcagggcagacttctaagtctgctaatgtgaccattggcaacactggagatggaagctggtatggtaatttacctactgtcgcacggggttccaccgtcctaatggggaatgggtcacatgcttctgttcatggtgttggcacggtagatctgaagtttacttcgggaaagatcgtgcagctgaagaacgtgcagcatgtcccttctatcgacaggaatcttgttagtggctcccgtctgactagagacggatttaagttggtttttgagtctaataaagtagtcgtgtctaaacatggatattttattggtaaaggttatgagtacggaggcctgttccgcttttccctttctgatttctgcaataacatgtgtttaattcctaagttttccattgtcaaaggttctaagtgccatagttgtgtgcaatcgaagcaacctcgcaagcctcacaaggctgccgaggagagaaacttggcaccactagaactcctacattcagatctttgtgaaatgaatggggtgttgacgaaggaagttgaaaatcaacttgacagaaagataaaaaggcttaggtctgatcgtggtggagagtttttctcgaacgagtttgacttattctgtgaggaacatggcatcatacatgagaggacgcctccctattctcccgagtctaatgggattgctgaaaggaagaaccgcacactgactgacttggtgaatgccatgttggacaccgcgggactgcctaaggcatgtgaagctcctcgaaggagtaagagacaaaggacagctaagtcttttggtgatgatttcattgtgtacctcgtggatgacactcctaagtcaatttcagaagcatatgcatctcctgatgcagactactggaaggaggctgtccgtagtgaaatggattccattatcgctaacgggacttgggaggtgacagagcgaccctatgggtgtaaacctgtggggtgcaagtgggtgttcaagaagaagcttaggcctgacgcctcacatggtcttctcgttcatcaaatggacgttaagacagcttttcttaatggagagctggatgaggagatctatatggatcaacctgatgggtttgtagttgaaggctttgcagtcaatgaggcagataaatgtgtgtactatcgccatggtgggggtgagggagttattttgtgcttgtatgttgacgacatactgatatttgggacaaatcttgaggtgataaatgagtcccattatgtggagaagatcttgaatcgctttggctacattgatagtaagccttctccaacaccttatgatcctagcttgttgcttcgcaagaacaagagaattgctaggaatcaactggaatactcccaaatcattggctcgttgatgtacctggctagtgcaactaggcctgatatctcctttgctgtgagcaagttgagccgatttacttctaatccgggagatgatcactggcgtgcgcttgagcgagtaatgcgctatctgaaagactactccatcccgctcgccggcgtgcaccagcgatcgggagagcaggtctccggaacctctgcctttgacgtcctgcaccgggagaaggcagcaataaggtttttgggaagcgcttcgcgcgactgctccctgttcgttcgcgacggctcgccttcctcttcgctcgcgtgtttcgtgccttcgtag

SEQ ID NO: 15036 - DNA, 3744 bp, Oryza sativa
  Clone ID: TFbOSC900152j.C1.o4.fg
atggctggttttgccgatgcactgagaccggataaattcaccggtgtgcattttaagagatggcagatcagggtcactctgtggttgacagctatgaaatgcttctgggtgagtactggcaaacctgaaggagttcttactgctgaacagcagaagcaattcgaggaagccactactctctttgtgggatgcattcttagcgttcttggcgatcgtctggtcgaggtgtatatgcatatgaccgacgctaaggagttgtgggatgcactgaatactaaattcggtgctactgatgctagcaatgatctgtatatcatggagcagtttcatgactacaaaatggctgacaaccgttctgtagtcgaacaggctcatgagatacaaaccatggctaaggaactcgaactccttaagtgtgtcttacccgacaaatttgtggccgggtgcattattgcaaaactacctccatcttggaggagtttcggtactgcactcaaacacaagagacaggaatactccgttgaggggttgattgcgtctcttgatgttgaggagaaagctcgggaaaaagatgccgcgtctaagggcgatggtgggcagtccagtgccaatgttgtgcacaaggcccagaacaagagcaaggggaaatacaaagctcagcagaccaccaacttcaagaagcagaagaagaacaacaacaatcctaatcaggatgagaggacttgctttgtgtgtggccaagttggtcatctggctaggaagtgtccacagcgcaaggggatgaaggcacctgcagggcagacttctaagtctgctaatgtgaccattggcaacactggagatggaagcgggtatggtaatttacctactgttttttcagttaatcaatctactaattggtgggttgatactggggccaatgtacatgtttgtgctgacatctcattgttttcttcttatcaggtcgcacggggttccaccgtcctaatggggaatgggtcacatgcttctgttcatggtgttggcacggtagatctgaagtttacttcgggaaagatcgtgcagctgaagaacgtgcagcatgtcccttctatcgacaggaatcttgttagtggctcccgtctgactagagacggatttaagttggtttttgagtctaataaagtagtcgtgtctaaacatggatattttattggtaaaggttatgagtgcggaggcctgttccgcttttccctttctgatttctgcaataagtctgtgaaccatatttgtggcagtgtggatgatgaggctaatgtttggcattcacgtttatgtcatattaattttggcttgatgtctcggctttccagcatgtgtttaattcctaagttttccattgtcaaaggttctaagtgccatagttgtgtgcaatcgaagcaacctcgcaagcctcacaaggctgccgaggagagaaacttggcaccactagaactcctacattcagatctttgtgaaatgaatggggtgttgacgaagggtggaaaacgatatttcatgacattgattgatgatgctactagattttgctatgtgtacttgttgaaaacgaaagacgaggctctagactattttaaaatttataaggcagaagttgaaaatcaacttgacagaaagataaaaaggcttaggtctaatcgtggtggagagtttttctcgaacgagtttgacttattctgtgaggaacatggcatcatacatgagaggacgcctccctattctcccgagtctaatgggattgctgaaaggaagaaccgcacactgactgacttggtgaatgccatgttggacaccgcgggactgcctaaggcatgcattgcctatagatttttaatagttaaatccgaggtaccggacatgcatgttggtacaattatggagtctcgtgatgctaccttctttgagagctttttcccaatgaaggatacacatagtggttcgaaccaaccctctgaaataattcccagttcaatcacaccaccagaacaaactgaacatacacatgaacttgtctctgaggaggatgtcagtgaagctcctcgaaggagtaagagacaaaggacggctaagtcttttggtgatgatttcactgtgtacctcgtggatgacactcctaagtcaatttcagaagcatatgcatctcctgatgcagactactggaaggaggctgtccgtagtgaaatggattccattatcgctaacgggacttgggaggtgacagagcgaccctatgggtgtaaacctgtggggtgcaagtgggtgttcaagaagaagcttaggcctgacggtactattgaaaagtacaaggctcggcttgttgctaagggctatactcagaaagaaggcgaagatttctttgacacttactcacctgttgctagattgaccacaattcgtgtgctactttccctagcagcctcacatggtcttctcgttcatcaaatggacgttaagacagcttttcttaatggagagctggatgaggagatctatatggatcaacctgatgggtttgtagttgaaggtcaagaaggcaaagtgtgcaaattgttgaagtctttgtatggtctgaaacaagttcctaagcaatggcatgagaaatttgacaaaacattgacatctgcaggctttgcagtcaatgaggcagataaatgtgtgtactatcgccatggtgggggtgagggagttattttgtgcttgtatgttgacgacatactgatatttgggacaaaccttgaggtgataaatgaggttaaatcattcttgtctcaaaattttgatatgaaagatttgggagtagctgatgttatcttaaacattaagctaattagaggtgagaatgggattacactcttgcagtcccattatgtggagaagatcttgaatcgctttggctacattgatagtaagccttctccaacaccttatgatcctagcttgttgcttcgcaagaacaagagaattgctaggaatcaactggaatactcccaaatcattggctcgttgatgtacctggctagtgcaactaggcctgatatctcctttgctgtgagcaagttgagccgatttacctctaatccgggagatgatcactggcgtgcgcttgagcgagtaatgcgctatctgaaaggtactgtggaattggggcttcactatactgggtatcctgcggtactggagggttatagtgattctaactggatctctgatgtggatgagatcaaagccactagtggatatgttttcacactgggtggtggtgctgtttcatggaggtcttgcaaacagacaattttgacgaggtcaaccatggaagcagagctaacggcactggatactgctactgttgaggcagaatggctgcgtgatctattaatggatctgcctgttgttgaaaaaccggtgccggctatccttatgaactgtgacaatcaaacgacatgtgaaaagacgattgaagtctgtcaggaaattaagaaactccggagttataacgttggattacatccaaacagcgagaaacctggcagatcccttcacgaagggactatcacgaaatgtgatagacaatgcatcgaaggagatgggtttgagacccatagcattcttgaaagaactcacctttgtgagcttgactgttggtcgcagtctatgaagattttgggtgaatcttctaggaagcttactaaagacctaggagtatga

SEQ ID NO: 15037 - DNA, 1671 bp, Oryza sativa
  Clone ID: TFbOSC900192j.C1.o20.gm
atgctgctcttgtcggcggtgatccgtggtggccgatgcatcatcgccggtgattgtgacgccgatagggccgggagcgaaatcgacgtccacgaccctgacgccgagatctgggtgacgcgcgacgtgcaacggagttcggaagccgacgtgcagagaaggggttgcgcggtgctgcggatctcggacaggaggcagagccgcggaggaccgacagctggtggaggcgtacgacgcgccggcggatggggtggcgcgatctggatgggaaggacggagcggtggtgctcacggacggggacggggacagcgacggaggatcgcgacgaggaggcggaggcggaggcggagggggagagaaggcggcggcggccgccgatcccgtcgccgagctcctaccgctgtgggttctcccacaaaggataccctttttactgcccatgggctgaaccccattctgagcacagtgtccagcccatcgagaaggaggccagctcgcgcatcaagctcacgagcaggtcgcaccttcgccgcacctgggctctgccagcgagcacggtgcggtggcctccgctgccgtcgtggagacaagctccggggttgccaaggttcataaagtttgatttcaatattgcacaaacttatcctgaggccgactactccatctcgctcgccggcgtgcaccggcgatcgggagagcaggtctccggaacctctgccttcgacgttctgcaccgggagaaggcggcaataagggtcactctgtggctaacagctatgaaatgcttctgggtgagtactggcaaacctgaaggagttcttactgctgaacagcagaagcaattcgaggaagccactactctctttgtgggatgcattcttagcgttcttggcgatcgtctggtcgaggtgtatatgcatatgaccgacgctaaggagttgtgggatgcactgaatactaaattcggtgctactgatgctagcaatgatctgtatatcatggagcagtttcatgactacaagatggctgacaaccgttctgtagtcgaacaggctcatgagatacaaaccatggctaaggaactcgaactccttaagtgtgtcttactcgataaatttgtggccgggtgcattattgcaaaactacctccatcttggagaagtttcggtactgcactcaaacacaagagacaggaatactccgttgaggggttgatagcgtctcttgatgttgaggagaaagctcgggaaaaagatgccgcgtctaagggcgatggtgggcagtccagttccaatgttgtgcacaaggcccagaacaagagcaaggggaaatacaaagctcagcagaccaccaactttaagaagcagaagaagaacaacaacaatcctaatcaggatgagaggacttgctttgtgtgtggccaagttggtcatctggctaggaagtgtccacagcgcaaggggatgaaggcacctgcagggcagacttctaagtctgctaatgtgaccattggcaacactggagatggaagcgggtatggtaatttacctactgtcgcacggggttccaccgtcctaatggggaatgggtcacatgcttctgttcatggtgttggcacggtagatctgaagtttacttcgggaaagatcgtgcagctgaagaacgtgtag

SEQ ID NO: 15038 - DNA, 3963 bp, Oryza sativa
  Clone ID: TFbOSC900225j.C1.o25.fg
atggctggttttgccgatgcactgaggccggataaattcaccggtgtgcattttaagagatggcagatcagggtcactctgtggctgacagctatgaaatgcttctgggtgagtactggcaaacctgaaggagttcttactgctgaacagcagaagcaattcgaggaagccactactctctttgtgggatgcattcttagcgttcttggcgatcgtctggtcgaggtgtatatgcatatgaccgacgctaaggagttgtgggatgcactgaatactaaattcggtgctactgatgctagcaatgatctgtatatcatggagcagtttcatgactacaagatggctgacaaccgttctgtagtcgaacaggctcatgagatacaaaccatggctaaggaactcgaactccttaagtgtgtcttacccgacaaatttgtggccgggtgcattattgcaaaactacctccatcttggagaagtttcggtactgcactcaaacacaagagacaggaatactccgttgaggggttgatagcgtctcttgatgttgaggagaaagctcgggaaaaagatgccgcgtctaagggcgatggtgggcagtccagtgccaatgttgtgcacaaggcccagaacaagagcaaggagaaatacaaagctcagcagaccaccaacttcaagaagcagaagaagaacaacaacaatcctaatcaggatgagaggacttgctttgtgtgtggccaagttggtcatctggctaggaagtgtccacagcacaaggggatgaaggcacctgcagggcagacttctaagtctgctaatgtgaccattggcaacactggagatggaagcgggtatggtaatttacctactgttttttcagttaatcaatctactaattggtgggttgatactggggccaatgtacatgtttgtgctgacatctcattgttttcttcttatcaggtcgcacggggttccaccgtcctaatggggaatgggtcacatgcttctgttcatggtgttggcacggtagatctgaagtttacttcgggaaagatcgtgcagctgaagaacgtgcagcatgtcccttctatcgacaggaatcttgttagtggctcccgtctgactagagacggatttaagttggtttttgagtctaataaagtagtcgtgtctaaacatggatattttattggtaaaggttatgagtgcggaggcctgttccgcttttccctttctgatttctgcaataagtctgtgaaccatatttgtggcagtgtggatgatgaggctaatgtttggcattcacgtttatgtcatattaattttggcttgatgtctcggctttccagcatgtgtttaatttctaagttttccattgtcaaaggttctaagtgccatagttgtgtgcaatcgaagcaacctcgcaagcctcacaaggctgccgaggagagaaacttggcaccactagaactcctacattcagatctttgtgaaatgaatggggtgttgacgaagggtggaaaacgatatttcatgacattgattgatgatgttactagattttgctatgtgtacttgttgaaaacgaaagacgaggctctagactattttaaaatttataaggcagaagttgaaaatcaacttgacagaaagataaaaaggcttaggtctgatcgtggtggagagtttttctcgaacgagtttgacttattctgtgaggaacatggcatcatacatgagaggacgcctccctattctcccgagtctaatgggattgctgaaaggaagaatcgcacactgactgacttggtgaatgccatgttggacaccgcgggactgcctaaggcatggtggggggaggcattgttgaccttaaatcatgtgttaaacagagttcctaacagaaataagaacaaaacaccatatgagatatggattggtagaaaaccatcactttcttatttgcgcacatgggggtgcttggcgaaagtcaatgtaccaataacgaagaagcgcaaacttggacctaagactgtggactgtgtttttctgggatatgctcatcatagcattgcctatagatttttaatagttaaatccgaggtaccggacatgcatgttggtacaattatggagtctcgtgatggtaccttctttgagagcttttgcccaatgaaggatacacatagtggttcgaaccaaccctctgaaataattcccagttcaatcacaccaccagaacaaactgaacatacacatgaacttgtctctgaggaggatgtcagtgaagctcctcgaaggagtaagagacaaaggacggctaagtcttttggtgatgatttcactgtgtacctcgtggatgacactcctaagtcaatttcagaagcatatgcatctcctgatgcagactactggaaggaggctgtccgtagcgaaatggattccattatcgctaacgggacttgggaggtgacagagcggccctatgggtgtaaacctgtggggtgcaagtgggtgttcaagaagaagcttaggcctgacggtactattgaaaagtacaaggctcggcttgttgctaagggctatactcagaaagaaggcgaagatttctttgacacttactcacctgttgctagattgaccacaattcgtgtgctactttccctagtagcctcacatggtcttctcgttcatcaaatgaacgttaagacagcttttcttaatggagagctggatgaggagatctatatggatcaacctgatgggtttgtagttgaaggtcaagaaggcaaagtgtgcaaattgttgaagtctttgtatggtctgaaacaagctcctaagcaatggcatgagaaatttgacaaaacattgacatctgcaggctttgcagtcaatgaagcagataaatgtgtgtactatcgccatggtgggggtgagggagttattttgtgcttgtatgttgacgacatactgatatttgggacaaaccttgaggtgataaatgaggttaaatcattcttgtctcaaaattttgatatgaaggatttgggagtagctgatgttatcttaaacattaagttaattagaggtgagaatgggattacactcttgcagtcccattatgtggagaagatcttgaatcgctttggctacattgatagtaagccttctccaacaccttatgatcctagcttgttgcttcacaagaacaagagaattgctaggagtcaactggaatactcccaaatcattggctcgttgatgtacctggctagtgcaactaggcctgatatctcctttgctgtgagcaagttgagccgatttacctctaatccgggagatgatcactggcgtgcgcttgagcgagtaatgcgctatctgaaaggtactgtggaattggggcttcactatactgggtatcctgcggtactggagggttatagtgattctaactggatctctgatgtggatgagatcaaagccactagtggatatgttttcacactgggtggtggtgctgtttcatggaggtcttgcaaacagaccattttgacgaggtcaaccatggaagcagagctaacggcactggatactgctactgttgaggcagaatggctgcgtgatctattaatggatctgcctgttgttgaaaaaccggtgccggctatccttatgaactgtgacaatcaaacgacatgtgaaaagacgattgaagtctgtcaggaaattaagaaactccggagttataatgttggattacattcaaacagcgagaaatctggcagatcccttcacgaagggactatcacgaaatgtgatagacaatgcatcgaaggagatgggtttgagacccatagcattcttgaaagaactcacctttgtgagcttgactgttggtcgcagtctatgaagattttgggtgaatcttctaggaagcttactaaagacctaggagtatga

SEQ ID NO: 15039 - DNA, 3981 bp, Oryza sativa
  Clone ID: TFbOSC900345j.C1.o2.fg
atggctggttttgccgatgcactgaggccggataaattcaccggtgtgcattttaagagatggcagatcagggtcactctgtggctgacagctatgaaatgcttctgggtgagtactggcaaacctgaaggagttcttactgctgaacagcagaagcaattcgaggaagccactactctctttgtgggatgcattcttagcgttcttggcgatcgtctggtcgaggtgtatatgcatatgaccgacgctaaggagttgtgggatgcactgaatagtaaattcggtgctactgatgctagcaatgatctgtatatcatggagcagtttcatgactacaaaatggctgacaaccgttctgtagtcgaacaggctcatgagatacaagccatggctaaggaactcgaactccttaagtgtgtcttacccgacaaatttgtggccgggtgcattattgcaaaactacctccatcttggaggagtttcggtactgcactcaaacacaagagacaggaatactccgttgaggggttgattgcgtctcttgatgttgaggagaaagctcgggaaaaagatgccgcgtctaagggcgatggtgggcagtccagtgccaatgttgtgcacaaggcccagaacaagagcaaggggaaatacaaagctcagcagaccaccaacttcaagaagcagaagaagaacaacaacaatcctaatcaggatgagaggacttgctttgtgtgtggccaagttggtcatctggctaggaagtgtccacagcgcaaggggatgaaggcacctgcagggcagacttctaagtctgctaatgtgaccattggcaacactggagatggaagcgggtatggtaatttacctactgttttttcagttaatcaatctactaattggtgggttgatactggggccaatgtacatgtttgtgctgacatctcattgttttcttcttatcaggtcgcacggggttccaccgtcctaatggggaatgggtcacatgcttctgttcatggtgttggcacggtagatctgaagtttacttcggaaaagatcgtgcagctgaagaatgtgcagcatgtcccttctatcgacaggaatcttgttagtggctcccgtctgactagagacggatttaagttggtttttgagtctaataaagtagtcgtgtctaaacatggatattttattggtaaaggttatgagtgcgtaggtctgttccgcttttccctttctgatttctgcaataagtctgtgaaccatatttgtggcagtgtggatgatgaggctaatgtttggcattcacgtttatgtcatattaattttggcttgatgtctcggctttccagcatgtgtttaattcctaagttttccattgtcaaaggttctaagtgccatagttgtgtgcaatcaaagcaacctcgcaagcctcacaaggctgccgaggagagaaacttggcaccactagaactcctacattcagatctttgtgaaatgaatggggtgttgacgaagggtggaaaacgatatttcatgacattcattgatgatgctactagattttgctatgtgtacttgttgaaaacgaaagacgaggctctagactattttaaaatttataaggcagaagttgaaaatcaacttgacagaaagataaaaaggcttaggtctgatcgtggtggagagtttttctcgaacgagtttgacttattctgtgaggaacatggcatcatacatgagatgacgcctccctattctcccgagtctaatgggattgctgaaaggaagaatcgcacactgactgacttggtgaatgccatgttggacaccgcgggactgcctaaggcatggtggggggaggcattgttgacctcaaatcatgtgttaaacagagttcctaacagaaataaggacaaaacaccatatgagatatggattggtagaaaaccatcactttcttatttgcgcacatgggggtgcttggcgaaagtcaatgtaccaataacgaagaagcgcaaacttggacctaagactgtggactgtgtttttctgggatatgctcatcatagcattgcctatagatttttaatagttaaatccgaggtaccggacatgcatgttggtacaattatagagtctcgtgatgctatcttctttgagagctttttcccaatgaaggatacacatagtggttcgaaccaaccatctgaaataattcctagttcaatcacaccaccagaacaaactgaacatacacatgaacttgtctctgaggaggatgtcagtgaagctcctcgaaggagtaagagacaaaggacggctaagtcttttggtgatgatttcactgtgtacctcgtggatgacactcctaagtcaatttcagaagcatatgcatctcctgatgcagattactggaaggaggctgtccgtagtgaaatggattccattatcgctaacgggacttgggaggtgacagagcgaccctatgggtgtaaacctgtggggtgcaagtgggtgttcaagaagaagcttaggcctgacggtactattgaaaagtacaaggctcgacttgttgctaagggctatactcagaaagaaggcgaagatttctttgacacttactcacctgttgctagattgaccacaattcgtgtgctactttccctagcagcctcacatggtcttctcgttcatcaaatggacgttaagacagcttttcttaatggagagctggatgaggagatctatatggatcaacctgatgggtttgtagttgaaggtcaagaaggcaaagtgtgcaaattgttgaagtctttgtatggtctaaaacaagctcctaagcaatggcatgagaaatttgacaaaacattgacatctgcaggctttgcagtcaatgaggcagataaatgtgtgtactatcgccatggtgggggtgagggagttattttgtgcttgtatgttgacgacatactgatatttgggacaaaccttgaggtgataaatgaggttaaatcattcttgtctcaaaattttgatatgaaggatttgggagtagctgatgttatcttaaacattaagctaattagaggtgagaatgggattacactcttgcagtcccattatgtggagaagatcttgaatcgctttggctacattgatagtaagccttctccaacaccttatgatcctagcttgttgcttcgcaagaacaagagaattgctaggaatcaactggaatactcccaaatcattggctcgttgatgtacctggctagtgcaactaggcctgatatctcctttgctgtgagcaagttgagccgatttacctctaatccgggagatgatcactggcgtgcgcttgagcgagtaatgcgctatctgaaaggtactgtggaattggggcttcactatactgggtatcctgcggtactggagggttatagtgattctaactggatctctgatgtggatgagatcaaagccactagtggatatgttttcacactgggtggtggtgctgtttcatggaggtcttgcaaacagaccattttgacgaggtcaaccatggaagcagagctaacggcactggatactgctactgttgaggcagaatggctgcgtgatctattaatggatctgcctgttgttgaaaaaccggtgccggctatccttatgaactgtgacaatcaaacgacatgtgaaaagacgattgaagtctgtcagaaaattaagaaactctggagttataacgttggattacatccaaacagcgagaaacctggcagatcccttcacgaagggactatcacgaaatgtgatagacaatgcattgaaggagatgggtttgagacccatatgagttatactatggtgagcattcttgaaagaactcacctttgtgagcttgactgttggtcgcagtctatgaagattttgggtgaatcttctaggaagcttactaaagacctaggagtatga

SEQ ID NO: 15040 - DNA, 4194 bp, Oryza sativa
  Clone ID: TFbOSC900387j.C1.o13.fg
atggcgaaggctgctggccagccacccaacgaccaacctgcaagcagcggcagcggcagcggtgcagcagcctgcttccatctaccaccacacgattactggccaatactggtaagctggcctgcttcatgtactatgcgttactcatcggttgtattacgcacattaaatcattatatgtctataatctcaacaatccaaaaaccttattataggcactgtgattttactatggctggttttgccgatgcactgaggccggataaattcaccggtgtgcattttaagagatggcagatcagggtcactctgtggctgacagctatgaaatgcttctgggtgagtactggcaaacctgaaggagttcttactgctgaacagcagaagcaattcgaggaagccactactctctttgtgggatgcattcttagcgttcttggcgatcgtctggtcgaggtgtatatgcatatgaccgacgctaaggagttgtgggatgcactgaatactaaattcggtgctactgatgctagcaatgatctgtatatcatggagcagtttcatgactacaaaatggctgacaaccgttctgtagtcgaacatgctcatgagatacaaaccatggctaaggaactcgaactccttaagtgtgtcttacccgacaaatttgtggccgggtgcattattgcaaaactacctccatcttggaggagttttggtactgcactcaaacgcaagagacaggaatactccgttgaggggttgattgcgtctcttgatgttgaggagaaagctcgggaaaaagatgccgcgtctaagggcgatggtgggcagtccagtgccaatgttgtgcacaaggcccagaacaagagcaaggggaaatacaaagctcagcagaccaccaacttcaagaagcagaagaagaacaacaacaatcctaatcaggatgagaggacttgctttgtgtgtggccaagttggtcatctggctaggaagtgtccacagcgcaaggggatgaaggcacctgcagggcagacttttaagtctgctaatgtgaccattggcaacactggagatggaagcgggtatggtaatttacctactgttttttcagttaatcaatctactaattggtgggttgatactggggccaatgtacatgtttgtgctgacatctcattgttttcttcttatcaggtcgcacggggttccaccgtcctaatggggaatgggtcacatgcttctgttcatggtgttggcacggtagatctgaagtttacttcggaaaagatcgtgcagctgaagaacgtgcagcatgtcccttctatcgacaggaatcttgttagtggctcccgtctgactagagacggatttaagttggtttttgagtctaataaagtagtcgtgtctaaacatggatattttattggtaaaggttatgagtgcggaggcctgttccgcttttccctttctgatttctgcaataagtctgtgaaccatatttgtggcagtgtggatgatgaggctaatgtttggcattcacgtttatgtcatattaattttggcttgatgtctcggctttccagcatgtgtttaattcctaagttttccattgtcaaaggttctaagtgccatagttgtgtgcaatcgaagcaacctcgcaagcctcacaaggctgccgaggagagaaacttggcaccactagaactcctacattcagatctttgtgaaatgaatggggtgttgacgaagggtggaaaacgatatttcatgacattgattgatgatgctactagattttgctatgtgtacttgttgaaaacgaaagacgaggctctagactattttaaaatttataaggcagaagttgaaaatcaacttgacagaaagataaaaaggcttaggtctgatcgtggtggagagtttttctcgaacgagtttgacttattctgtgaggaacatggcatcatacatgagaggacgcctccctattctcccgagtctaatgggattgctgaaaggaagaaccgcacactgactgacttggtgaatgccatgttggacaccgcgggactgcctaaggcatggtggggggaggcattgttgacctcaaatcatgtgttaaacagagttcctaacagaaataaggataaaacaccatatgagatatggattggtagaaaaccatcactttcttatttgcgcacatgggggtgcttggcgaaagtcaatgtaccaataacgaagaagcgtaaacttggacctaagactgtggactgtgtttttctgggatatgctcatcatagcattgcctatagatttttaatagttaaatccgaggtaccggacatgcatgttggtacaattatggagtctcgtgatgctaccttctttgagagatttttcccaatgaaggatacacatagtggttcgaaccaaccctctgaaataattcccagttcaatcacaccaccagaacaaactgaacatacacatgaacttgtctctgaggaggatgtcagtgaagctcctcgaaggagtaagagacaaaggacggctaagtcttttggtgatgattttactgtgtacctcgtggatgacactcctaagtcaatttcagaagcatatgcatctcctgatgcagactactggaaggaggctgtccgtagtgaaatggattccattatcgctaacgggacttgggaggtgacagagcgaccctatgggtgtaaacctgtggggtgcaagtgggtgttcaagaagaagcttaggcctgacggtactattgaaaagtacaaggctcggtttgttggtaagggctatactcagaaagaaggcgaagatttctttgacacttactcacctgttgctagattgaccacaattcgtgtgctactttccctagcagcctcacatggtcttctcgttcatcaaatggacgttaagacagcttttcttaatggagagctggatgaggagatctatatggatcaacctgatgggtttgtagttgaaggtcaagaaggcaaagtgtgcaaattgttgaagtctttgtatggtctgaaacaagctcctaagcaatggcatgagaaatttgacaaaacattgacatctgcaggctttgcagtcaatgaggcagataaatgtgtatactatcgccatggtgggggtgagggagttattttgtgcttgtatgttgacgacatactgatatttgggacaaaccttgaggtgataaatgaggttaaatcattcttgtctcaaaattttgatatgaaagatttgggagtagctgatgttatcttaaacattaagctaattagaggtgagaatgggattacactcttgcagtcccattatgtggagaagatcttgaatcgctttggctacattgatagtaagccttctccaacaccttatgatcctagcttgttgcttcgcaagaacaagagaattgctaggaatcaactggaatactcccaaatcattggctcgttgatgtacctggctagtgcaactaggcctgatatctcctttgctgtgagcaagttgagccgatttacctctaatccgggagatgatcactggcgtgcgcttgagcgagtaatgcgctatctgaaaggtactgtggaattggggcttcactatactgggtatcctgcggtactggagggttatagtgattctaactggatctctgatgtggatgagatcaaagccactagtggatatgttttcacactgggtggtggtgctgtttcatggaggtcttgcaaacagaccattttgacgaggtcaaccatggaagcagagctaacggcactggatactgctactgttgaggcagaatggctgcgtgatctattaatggatctgcctgttgttgaaaaaccggtgccggctatccttatgaactgtgacaatcaaacgacatgtgaaaagacgattgaagtctgtcaggaaattaagaaactccggagttataacgttggattacatccaaacagcgagaaacctggcagatcccttcacgaagggactatcacgaaatgtgataaacaatgcatcgaaggagatgggtttgagacccatagcattcttgaaagaactcacctttgtgagcttgactgttggtcgcagtctatgaagattttgggtgaatcttctaggaagcttactaaagacctaggagtatga

SEQ ID NO: 15041 - DNA, 2106 bp, Oryza sativa
  Clone ID: TFbOSC9742j.C1.o1.fg
atggctggttttgccgatgcactgaggccggataaattcaccggtgtgcattttaagagatggcagatcagggtcactctgtggctgatagctatgaaatgcttctgggtgagtactggcaaacctgaaggagttcttactgctgaacagcagaagcaattcgaggaagccactactctctttgtgggatgcattcttagcgttcttggcgatcgtctggtccaggtgtatatgcatatgaccgacgctaaggagttgtgggatgcactgaatactaaattcggtgctactgatgctagcaatgatctgtatatcatggagcagtttcatgactacaaaatggctaacaaccgttctgtagtcgaacaggctcatgagatacaaaccatggctaaggaactcgaactccttaagtgtgtcttacccgacaaatttgtggccgggtgcattattgcaaaactagctccatcttggaggagtttcggtactgcactcaaacacaagagacaggaatactccgttgaggggttgattgcgtctcttgatgttgaggagaaagctcgggaaaaagatgccgcgtctaagggcgatggtgggcagtccagtgccaatgttgtgcacaaggcccagaacaagagcaaggggaaatacaaagctcagcagaccaccaacttcaagaagcagaagaagaacaacaacaatcctaatcaggatgagaggacttgctttgtgtgtggccaagttggtcatctggctaggaagtgtccacagcgcaaggggatgaaggcacctgcagggcagacttctaagtctgctaatgtgaccattggcaacactggagatggaagcgggtatggtaatttacctactgttttttcagttaatcaatctactaattggtgggttgatactggggccaatgtacatgtttgtgctgacatctcattgttttcttcttatcaggtcgcacggggttccaccgttctaatggggaatgggtcacatgcttctgttcatggtgttggcacggtagatctgaagtttacttcgggaaagatcgtgcagctgaagaacgtgcagcatgtcccttctatcgacaggaatcttgttagtggctcccgtctgactagagacggatttaagttggtttttgagtctaataaagtagtcgtgtctaaacatggatattttattggtaaaggttatgagtgcggaggcctgttccgcttttccctttctaatttctgcaataagtctgtgaaccatatttgtggcagtgtggatgatgaggctaatgtttggcattcacgtttatgtcatattaattttggcttgatgtctcggctttccagcatgtgtttaattcctaagttttccattgtcaaaggttttaagtgccatagttgtgtgcaatcaaagcaatctcgcaagcctcacaaggctgccgaggagagaaacttggcaccactagaactcctacattcagatctttgtgaaataaatggggtgttgacgaagggtggaaaacgatatttcatgacattgattgatgatgctactagattttgctatgtgtacttgttgaaaacgaaagacgaggctctagactattttaaaatttataaggcagaagttgaaaatcaacttgacagaaagataaaaaggcttaggtctgatcgtggtggagagtttttctcgaacgagtttgacttattctgtgaggaacatggcatcatacatgagaggacgcctccctattctcccgagtctaatgggattgctgaaaggaagaaccgcacactgactgacttggtgaatgccatgttggacaccgcgggactgcctaaggcatggtggggggaggcattgttgacctcaaatcatgtgttaaacagagttcctaacagaaataaggacaaaacaccatatgagatatggattggtagaaaaccatcactttcttatttgcgcacatgggggtgcttggcgaaagtcaatgtaccaataacgaagaagcgcaaacttggacctaagactgtggactgtgtttttctgggatatgctcatcatagcattgcctatagatttttaatagttaaatccgag

SEQ ID NO: 15042 - DNA, 4509 bp, Oryza sativa
  Clone ID: TFbOSC400737j.C1.o9.fg
atggctcagttgagtgccacattaaaggtgagaagggcgacgaacaatgcgacctcgccgcgatcgtggccggcgggctacaccttcgccgacgtgctcactgcggcggcgtgtgctccagagggcaagccacgcggcgtgctcacggcggcggcgtgtgccccagggggcaagccacgcggcggtaatagggctgagggggtcagctttgaccagatcaaggggaaggcgccattggaagcgttcggagaggtcgcctcctcctcggcgacggcgaactcgtcggctcttccggcaacgagccactgccatgagggcccttctccgcaattcccacgagagaaacttgacgcgtgttcgttcaatatccatgccgattttggcgcgattcaagagacacgtggcggttgctatggggataaactcgaggacctctttccccgagtctccagaggcttccgtgagtgggtgtgggtgagaaagggttcgctctctccgcagctagggtttccggcgagaagcgaagaaatccggcgatttggcgactccgcacgccggatctggagagttctggagagaaggtgtgatcaccgcactttcgcgcaagtggtgatgaagcgacgtccccctccaggccgtccggattggcaagcgaacaagaggaaggcgatggagtcgggagacggaggtggtgattggggtcgacaagctggaggcgactgggggaagcaagctggtggaagttgggcgcaccgtgaggaagaggaacttcgcaagcagcttctagcaaaaggaaatcaagttgtgggagatccgcgtcgtcctggtcgccctggccaagagcgtagggattggggagatcgtggagcggggggatccaagccggcgatgaaatgcttcaagtgcggccgtgaaggtcatcaccaagcctcgtgcacaaaccctccgctctgctactcctgccatagctcaggtcatatctctgcaaacttccctatgttacagtcaaagagaggtgtgaagctatgtggttttggtattccgggtcagggtttctacagtttgcaggtagatgtttctgatgttgagatggccaaacaccctgccagtgtggttgaaacaggaatgactgaagatgctattgatgaattggctgttgtttgggttaaaatctttggggttcctaaattggctagatctgaagagcatattaaagctattgtggagcttgttggtgaatttgagatgatagatttgagcactcttagaagggatggtccagtcagagaaagattagcttgtaaggatccaagggaacttcactttgctatccatgtatacattaacaaggtggggtacatgataaggtgggaaccagagggttatcctccttatgataattcacaattccccccggatgatggtgatgataaggacaagaagggtaatggtgataatgatgacatgaatgtggatgaagatcaaaatactcaaagcccagctagaggtagatcagcccatgatagaagatctttcatgggaggttccagaggtgatgttcaatcagcccctcctgcttacaaagggaaaaaggcattggaagagacatgcctgagtgagactcagcagtgtcctactaagagggctgcctgtaaaaaacaaagtctgctggtggtggaaaaggagagtatggtagatcaagagggtgactctaaagcaatgatagtgtgggagggaaacacaacacaagatgtagaatatgaatctcaggagattgatttccctgtcacacaaaaatcgactgaggaaggtgataatgaggatgtgttgactggaatcttagagtttgaaaaatgtgacattccatctttatttgacattgcaatacagagagaggaggaagagttggatgaggaagatagctttcaggaggtttcctacaaaaagaacagacctaaaaaatctgaacctgcgatcacttctagaatgagtttgagaaacagagacatggcctcagtccccattcctaagatagctgagctgcttactcaaaagaagaacctggagactggaggtaactctaacccctttgttgtttttcaaattattgatcctgttgagctgaatagtattgctatagctgctaatatctctctaggaagtaatgaggaagaaattgcaaataccattgagaccattaaggctaaagagttggttcaagctaaattagctgagatgagatggaaaaaagagaaggaaaaggagatgacagatgttgactctttattgagaaatgagaaagagctcccagacaacatgggggaagaggttgacaatttaaataccccttctcaagagatgaataatatggagatatcttctgagagtttagagctgaagaagagaggtttgggaaacattgctaggaaaaaacaattgaaagaggcttggaaatcttctagaggtgcttctggtggcatccttattggtaccaatgatgagttgattgagaagttaggtacccacgctggtgcattcttccttagtgttgagttcagatataaaaaagataatagtgtttgggaggttattgtggtttatggccctgtgttagaatccttgaaacctgattttctgaatgagcttagatgggttggttctgaccattcccctcccattcttaatattggtgaggatattgagagacccccaaagtattttagatttgaatcagcctggctaacaatggaaaattttcatgagttggtaagacaacacatgattccaagagatggttcatatattttagattactcgaataagaagcaatcctttctgagaagatttttgaaaggctgggaattgaatcttagacaggagaagaaccaacagaaagctgttattctaacccagatccaagagttggatgcccaagctgatattagagatttaagccctgatgaatggaataaaagatatgagatggaggctgaccttgaacatatctatgaaatggaggaattgttttggcacaagagatgtggggaaatgactttattacaaggtgacagaaatacagagttctttcacagaatggctaatggcagaaggaggaaatgcttgatcctctccctagaagatgagggtagagagttgacctccaaggaagatctgaaatcccacattattgagtattataagtccttgttcagagctgataatctttctacggtgcatctttctccccaaatttggcaatctgagctgtgccttaatgctgaccaaaaggaggctatcactagacctttttctatggaagaacttgataaagtcattagggaggctaagttgaatattgctcctggtcctgatggccttaatatccatttttacagagctttctggcctgaaatcaaaaatgatctgtttgaaatgttattaatgttgtatgagggtaaactagatttaaagagacttaactttggtgtgatttctttgattcctaagagctctgaccccacaaatatcagacaatttagacccatttgtgtcctcaatgattgttttaaattccttagcaaggtggtgactaacagactttcagaggttgctccctttgtgatttctcagacccaaactgcttttatcccagggagattcattttagaggggtgcataattctccatgaggtgcttcatgaattcaaattgaaaaatcagcagggcattattctgaaaattgattttgaaaaggcttacgatagagtaagctggaattttctttttgaggtcctagagagaaaaggctttcccaagatttggattgattggatcaaggcttgtgtgatgtgggataaagtttgtgtcaacattaatggtgagaggtctgacttctttagaacttataggggcttaagacagggtgaccccctttcccctctcctgtttaacctagttagtgatgctttggcagccatgctagatagtgctaagagagatagtattcttactggccttgtccctggtatcttccctgggggaatcacccatttgcaatatgctgatgatactgtcattttcattccttttgatgtcagacaaatagtggccaccaaatttttgttatattgttttgaagagatggctgggatgaaaattaactaccataagagtgaaatcttcactgtgaggttgatagatgcagaaaatgaagaggttgctaagatgcttaattgtcctagaggcaaatttcccatgaaataccttggtctgcccatcagtcctgacaagattctcaaccaagagtttaattttcttccacataaaatggagaagaggttgtctctttggaatgggggtaacctaacttatgctgggagagctgttcacataaatgcgtgtttatcttccattccttcttatgcaatgggcttttatcagcttcctgagggaattcaccataagtttgattctttaagggggaaatactattgggctggtaatagataa

SEQ ID NO: 15043 - DNA, 892 bp, Oryza sativa
  Clone ID: TFbOSC25199j.C1.o1.np
ctgacaatgagaaaggcaataaggtcagaagtcaggacattggtacctcaagctcccgagtgattgaagcaccagacaccagttgtgtgacactggtccaacacctgattaaccagaaccgattgcttatagagatactacagcagcatcagacgccaattctgaacctgagtcagatacaacctcaagtgcagttggaggcagtccaagcactcacaccacaagtcagcatgccgccagcatcccgaaggacccatggtgacgtgccacatgttgactcaaaagaagcaagtatcatttgttttatgtgtgatgagcaagggcactatgcaagggagtgtcctcagcagaaaagaaaaacaccaatgcgaaccgaagatgaagtccgtaagatgatcattaccagcacagaatggcctccaccaggaatgacaaaacgtcagagaagaaataccttccgaggtgcaccacagttgacagagcatcttttagctaatggaggtagagtgtctgatagtgaagattcagatcaagtctcctcagatgatgaagatgaaatggaacgtaaggcatgctctcgttgtggagaaatcggtcatgttgccagctcgtgtgccactacatgcgttcattgtgaggaagaccatccacccgaccggtgtccaacgagcaggatcaattgtttcttttgtgaaggaactgatcatgtaccaaaagattttcaattcagttttctgctgacgaagaagatggccaaccaacccgccagtttcaacggaaagaagcatcaaggcaacacaaatcctcgccaagattacagtttcagcctaactccagtgccaggacagaggaatcaaaatgagaaaaggaaatgccgagtccggaaagatat

SEQ ID NO: 15044 - DNA, 1467 bp, Oryza sativa
  Clone ID: TFbOSC400610j.C1.o25.fg
atggacatctctaggacaaatgaaggctacacgagctgcggcccggtagtcgagatgtcatggcacagggctggtgtcctgctgctaggggctcaatcctgcctacctgtcccggaggttccggccgtaggtggggttgggtcggtactcttgtttatggctaggatgggttgggaaatatgtcatgtcttccgtccgtataccgtggtgatgtttaacagagaaaaaggaaagaatgtcagcgggtatgcctcaagtaactcaagttttcaactcaatccaccactggcctcaagagagttaaccagggcacacccttggtccattccaagcatgctgcttagttcacagctaccattggttggaagtcaagaccaaaatcagtatgtgtttgatcgagcatttgccacccaggtcaatgagcttccaatgccagaagaggatgtccccttttgtcacgattgtagagaacgaggacactatgccctgaattgtccatgggtatatgccaaagaagccccttcctttggtttagcagggcagacatcgctaaaccagcctcctcgcaccaagtcaagcttgcagcctagtgtgcaaagtagagagcccaatggagagaatccattgaatcccgagaattgctttcctcctagcctttcgtaccacgtggggtcacgtactaagcaagccaaaggcaagaagagtaagaatcagcagagaaaagcaccgatgcgaactgaagaagaagtacgtaagatgactattaccagcaccgaatggcctccagcagggataactattcctagacatcaaagaggaaatacctttcgaggtgcacgacagttgacccagcaccttctaagccatggtggcagagtatctgatagtgaagggtcagatcaagtctcctcggatgatgaagatgagtctccccgacatgtcggcgaggaagagatggaatcaaaggcatgcacccgttgtggagaaattggacacattgctagcatgtgtctcacactctgcccttattgtgaagaagaccatccaccaggggagtgtcccacccgcaaggtcacatgttttctgtgcgaaggtacaaaccatgtgcccaaggattgccaactcagtgtgttgttgaccaagaccgcagaaatccaacgaacaaccctacgattgtctcatcagctagttagctccaacagcaacatcgacgatatcatccacagcaccaatgctcctcctgctgcacctgactctgcaataaatcatagcaataataccttcagcaccaaccattctctgcaccgacagcctcagcaaagaattgtcatcgatggaagaagttgtgtctctccccgacctactccaggccgagcaaagggcaatcaacctcaggagggcgataccaagcagaagactgtcatctgcttcaaacagcaatcagaaggaagcttctcctgtgaatga

SEQ ID NO: 15045 - DNA, 1206 bp, Oryza sativa
  Clone ID: TFbOSC401914j.C1.o17.fg
atgtccagccgcgccgccgcgccgctcctgccgtcgccgccgcttgccgccgccgccaagagcttgtcgtttccgtcgttgcgaagattcatggtgaacactcgcgccagtggaagtggaaacaataacaatgaagagaaccccacccttgctcaagtgctggctcaacagacccaattgattaacatgttagtgcaacaaatgcagaaccagcaagggaacaacaatgtcaatcctccgccgccgcagaacaagttagctgattttcttcgtgtgaggccgcctaccttctctagcactaccaacccagtggaagtaggtgattggttgcacgctgttgagaagaagttggaactgctccagtgtacggatcaggagaaagttgttttcgcttcacatcagttgcaaggatctgcttcagaatggtgggatcatttccggatgaacagagcagaaggacaaccaatcacttgggcggagttcactgaagcattcaagaagacacacatacctgcaggtgttgttgctttgaagaagcgtgagttccgggcacttaagcaaaaggatcgtactgtgacggaatatcttcatgagttcaatcgtctagctcgctatgctccagaagatgtgcgtactgacgaggaaaggcaggagaagttcttggaaggtctgaaggatgaactgtcagttatgttgatctctcatgactatgaggattttcaggagttggttgataaagcaattcgactggaagacaagaagaacaggatggacaatcgtaagagaggaaggattgttttccaggaggcacaggatagtagccagaggcagcgtatcaagccactccaaattggtgaatcttcttccgctggtcaagaacagtcacaacagttgaacatcggtggtgagatcaactcagagactaatgcaagcaatgaagacaatgatgggcaagctactcaatcagtgtcatttcagcaggatcagtctcaagaagataacagtagtggaagggagcagcaggtatgtttcagctgttacaagccaggccactttgcaagagagtgtccgaagtcacagcatcagcagccgcaaggtcagatcaacaacattgtcgtcacaggagccaatgcagtgccagttgcgtcttcaagagttgtgtcttcaagtgttacaactcagccaccagtttcaaagcggcagtag

SEQ ID NO: 15046 - DNA, 2382 bp, Oryza sativa
  Clone ID: TFbOSC900010j.C1.o11.fg
atggctaaggaactcgaactccttaagtttgtcttacccgacaaatttgtggtcgggtgcattattgcgaaactacctccatcttggagaggtttcggtactgcactcgaacacaagagacatgaatactccgttaaggggttgatagcgtctcttgatgttgaggagaaagctcgggaaaaagatgccgcgtctaagggcgatggtgggcagtccagtgccaatgttgtgcacaaggcccagaacaagagtaaggggaaatacaaagctcaacagaccaccaacttcaagaagcagaagaagaacaacaacaatcctaaccaggatgagaggacttgctttgtgtgtgggcaacctggtcatctagctaggaagtgtctacagcgcaaggggatgaaggcacctgcagggcagacttctaagtctgctaatgtgaccattggcaacactggagatggaagcgggtatggtaatttacctactgttttttcagttaatcagtctactaattggtgggttgatactagggccaatgtacatgtttgtgctgacatcttattgttttcttcttatcaggtcgcacggggtttcaccgtcctaatggggaatgggtcacatgcttctgttcatggtgttggcacggtagatctgaagtttacttcgggaaagatcgtgcagctgaagaacgtgcagcatgtcccttctattgacaggaatcttgttagtggctcccgtctgactagagacggatttaagttggtttttgagtctaataaagtagtcgtgtctaaacatggatattttattggtaaaggttatgagtgcggaggcctgttccgcttttccctttttgatttctgcaataagtctgtgaaccatatttgtggcagtgtggatgatgaggctaatgtttggcactcacgtttatgtcatattaattttggcttgatgtctcggctttccagcatgtgtttaattcctaagtttttcattgtcaaaggttctaagtgccatagttgtgtgcaatcgaagcaacctcgcaagcctcacaaggctgccgaggagagaaacttggcaccactagaactcctacattcagatctttgtgaaatgaatggggtgttgacgaagggtggaaaacgatatttcatgacgttgattgatgatgctactagattttgctatgtgtacttattgaaaacgaaagatgaggctctagactattttaaaatttataaggcagatgttgaaaatcaacttgacagaaagataaaaagacttaggtctgatcgtggtggagagtttttctcaaacaagtttgacttattctgtgaggaacatggcattatacatgagaggacgcctccctgttctcccgagtctaatgggattgctgaaaggaagaaccgcacactgactgacttggtgaatgccatgttggacaccgcgggactacctaaggcatggcggggagaggcattgttgacctcgaatcatgtgttaaacagagttcctaacataaataaggacaaaacaccatatgagatatggattggaagaaaaccatcactttcttacttgcgcacatgggggtgcttggcgaaagtcaatgtaccaataacgaaaaagcgcaaacttggacctaagactgtggactgtgtctttctgggatatgctcaccacagcattgcctatagatttttaatagttaaatctgaggtacctgacatgcatgttggtacaattatggagtctcgtgatgctaccttctttgagagctttttcccaatgaaggatacacatagtagttcgagccaaccctttgaagtaattcccagttcaattacactaccagaacaaactgaacatacacatgaacatgtcactgaggaggatgttagtgaagctcctcgaaggagtaagagacaaaggacggctaagtcctttggtgatgatttcactgtgtacctcgtggatgacactcctaagtcaatttcacaagcatatgcatctcttgatgtaaactactggaaggaggctatccgtagtgaaatggattctattatcgctaacgggacttgggaggtgacagagcgaccctatgggtgtaaatctgtggggtgcaagtgggtgttcaagaagaagcttaggcctgacggtactattgaaaagtacaaggctcggcttgttgctaaaggctatactcagaaagaaggcgaagatttctttgacacttactcacctattgctagattgaccacaattcgtgtgctactttccctagcagcctcacatggtcttctcgttcatcaaatggacgttaagacagcttttcttaatggagagctggatgaggagatctatatggatcaaagccactag

SEQ ID NO: 15047 - DNA, 2523 bp, Oryza sativa
  Clone ID: TFbOSC900327j.C1.o13.fg
atgaccgacactaaggagttgtgggatgcactgaatactaaattcggtgctactgatgctagcaatgatctgtatatcatggagcagtttcatgactacaagatggttgacaaccgttctatagtcgaacaggctcatgagatacataccatggctaaggaactcgaactccttaagtgtgtcttacccgataaatttgtggccgggtgcattattgcgaaactacctccatcttggagaggtttcggtactgcactcaaacacaagagacaggaatactccgttgaggggttgatagcgtctcttgatgttaaggagaaagctcgggaaaaagatgccgcgtctaagggcgatggtgggcagtccactgccaatgttgtgcacaaggcccagaacaagagcaaggggaaacacaaagctcaacagaccaccaacttcaagaagcagaagaagaacaacaacaatcctaatctggatgagaggacttgctttgtgtgtggccaacctggtcatctagccaggaagtgtctacaacgcaaggggatgaaggcacctgcagggcagacttctaagtctgctaatgtgagcattggcaacactggagatggaagcgggtatgtcgcacggggttccaccgtcctaatggggaacgggtcacatgcttctgttcatggtgttagcatggcagaagttgaaaatcaacttaacagaaagataaaaaggcttaggactgatcgtggtagagagtttttctcaaatgagtttgacttattccgtgaggaacatggcatcatacataagaggacacctccctattctcacgagtctaatgggattgccgaaaggaagaaccgcacactgactgacttgggactacctaaggcatggtggggggaggcattgttgacctcgaatcatgtgctaaacagagttcctaacagaaataaggacaaaacaccatatgagatatctattgggagaaaaccatcactttcttatttgcgcacatgggggtgcttggcgaaagtcaatgtaccaataacgaagaagcgcaaacttggacctaagactgtagaccgtgtctttctgggatatgctcatcacaacattgcctatagatttttaatagttaaatctgaggtacctgacatgcatgttggtacaattatggagtctcgtgatgctaccttttttgagagcttcttcccaatgaaggatacacatagtagttctagccgaccttctaaaataatttatagttcaatctcaccaccagaacaaactgaacatacacatgaacatgtcactgaggaggatgacagtgaagctcctcgaaggagtaagagacaaaggacggctaagtcttttggtgatgatttcactgtgtacctcgtggatgacactcctatgtcaattttagaagcatatgcatctcctgatgcagactactggaaggaggctgtccgtagtgaaatggatttcattatcgctaacgggacctgggaggtgacagagcgactctatgggtgtaaacttgtggggtgcaagtgggtgttcaagaagaagctcaggcctgacggtactattgaaaagtacaaggctcggcttgttgtgataaatgaggttaaatcattcttgtctcaaaattttgatatgaaggatttgggagtagctgatgttatcttaaacattaagctaattagaggtgagaatgggattacactcttgcagtcccattatgtggagaagatcttgaatcgctttggctacattgatagtaagccttctccaacaccttatgatcctagcttgttgcttcgcaagaacaagagaattgctaggaatcaactggaatactcccaaatcattggctcgctgatgtacctggctagtgcaactaggcttgatatctcctttgctatgagcaagttgagccgttttgcctctaatccgggagatgatcactggcgtgcgcttgagcgagtaatgcactatctgaaaggtactatggaattggggcttcactatactgggtatcctgcggtactggagggttatagtgattctaactggatctctgatgtggatgagatcaaagccactagtggatatgtcttcacactgggtggtggtcctgtttcgtggaggtcttgcaaacagaccattttgacgaggtcaactatggaatcagagctgacggcaccggatactactactgttgaggcagaatggctgcgtgatctattaatgaatctgcctattgttgaaaaaccagtgccgactatccttatgaaatgtgacaatcaaacggtaattgtcaaagtgaatagttctaaggataatatgaaatcgtctagacatgtgaaaagacgattgaagtctgtcaggaaattgagaaactccagagttataacgttggattacatccaaacagctagaaacctggcagatcccttcacgaagggactatcacgaaatgtgatagacaatgcatcgaaggagatgggtttgagacccatgtga

SEQ ID NO: 15048 - DNA, 756 bp, Oryza sativa
  Clone ID: TFbOSC22542j.C1.o4.gm
atggcggcgaggggcggcgcggccgccacgacggcggctgccgaggtggcggccgcggcgccgccggcagcggcgccaccggcggcggcggcctcgccgccggcgcccggggcaggcgcggtgggctccgccgcggcggccgccgcgcccccggcttcggactccgaggcgagcacggcggtggcggacgcggcgaaggcgatggcgaggacggcgaaggcgacggcgatcttcttcatctccatagtatcacagccggcgggtgcggtggcgggaggggatcgacgacgacgacgacgaccggccggcctgctctggattattggggagcgaatcgagaggcgggtggccaatctcttctgcgcgtcgttgttggaggagaagagggagcaggcgtcgctgccagcggcggagggcggagggcggcgggcggctgagacggaggcggagcgggcggccggcagcgggaggcggagctcgcccgggcagccggtggtggaggcggaggcggaaggcgctctccgacctcctcctcatcgaccggtgacgcggccgcagcgggtaggacggcgacgccaacttcctctcctcggacgctttggaggcggtgcggcgtgggtcgacggcgacgcgccgccgcccacgacgacgcgaggcgcgcgggtggaggcggtggtggcgctggcgttcaagacggcggtgaccgacgacccgtcgggggcgctgccgacgacccgtgccggtgggccggcgtga

SEQ ID NO: 15049 - DNA, 3474 bp, Oryza sativa
  Clone ID: TFbOSC33907j.C1.o1.fg
atggctaaggaactcgaacttcttaagtgtgtcttacccgacaaatttgtggccgggtgcattattgcgaaacttcctccatcttggagaagtttcggtactgcactcaaacacaagagacaggaatactctgttgaggggttgatagcgtctcttgatgttgaggagaaagctcggaaaaaagatgatgcgtctaagggcgatggtgggcagtctagtgccaatgttgtgcacaaggcccagaacaagagcaaggggaaatacaaagctcagcagaccaccaacttcaagaagcagaagaagaacaacaacaatcctaatcaggatgagatgacttgctttgtgtgtggccaacctggtcatctggctaggaagtgtccacagcgtaaggggatgaaggcacctgcagggcagacttctaagtctgctaatatgaccattggcaacattggagatggaagcgggtatggtaatttacctactgttttttcagttaatcagtctactaattggtgggttgatactggggccaatgtacatgtttgtgctgacatctcattgttttcttcttatcaggtcgcacggggttccaccgtcctaatggggaatgggtcacatgcttctgttcatggtgttggcacggtagatctgaagtttacttcgggaaagattgtgcagctgaagaacgtgcatcatgtcccttctatcgacaggaatcttgttagtggctcccgtctgactagagacggatttaagttggtttttgagtctaataaagtagtcgtgtctaaacatggatattttattggtaaaggttatgagtgcggaggcttgttccgcttttccctttctgatttctgcaataagtctgtgaaccatatttgtggcagtgtggatgatgaggctaatgtctggcactcacgtttatgtcatattaattttggcttgatgtctcggctttccagcatgtgtttaattcctaagttttccattgtcaaaggttctaagtgccatagttgtgtgcaatcaaagcaaccttgtaagcctcacaaggctgctgaggagagaaacttggcacctctagaactcctacattcagatctttgtgaaatgaatggggtgttgacgaagggtggaaaacgatatttcatgacattgattgatgatgctattagattttgctatgtgtacttgttgaaaacgaaagacgaggctctagactattttaaaatttataaggcagaagttgaaaatcaacttgacagaaagataaaaagacttaggtctgatcgtggtggagagtttttctcaaaagagtttgacttattctgtgaggaatatggcattatacatgagaggacgcctccctattctcccgagtctaatgggattgccgaaaggaagaactgcacactgactgacttggtgaatgctatgttggacaccgcaggactacctaaggcatggtggggggaggcattgttgacctcgagtcatgtgttaaacagagttcctaacagaaataaggacaaaacaccatatgagatatggattgggagaaaaccatcactttcttacttgcgcacatgggggtgcttggcgaaagtcaatgtaccaataacgaagaagcgcaaacttggacctaagactgtggactgtgtctttctgggatatgctcaccacagcattgcctatagattttcaatagttaaatccgaggtacctgacatgcatgttggtacaattatggagtctcgtgatgctaccttctttgagagctttttcccaatgaaggatacacatagtagttctagtcaaccttctgaaataattcccagttcaatcacaccaccagaacaaactgaacatacacatgaacatgtcactgaggaggatgacagtgaagctcctcgaaggagtaaaagacaaaggacggctaagtcctttggtgatgatttcactgtgtacctcgtggacgacactcctaagtcaatttcagaagcatatgcatctcctgatgcagactactggaaggaggctgtccgtagtgaaatggattccattatcgctaacggaacttgggaggtgacagagcgaccctatgggtgtaaacctgtggggtacaagtgggtgttcaaaaagaagctgaggcctgacggtaccattgaaaagtacaaggctcggcttgttgctaagggctatactcagaaagaaggcgaagatttctttgacacttactcacctgttgccagattgaccacaattcgtgtgctactttccctagcagcctcacatggtcttctcgttcatcaaatggacgttaagacagcttttcttaatagagagctggatgaggagatctatatggatcaacctgatgggtttgtagttgaaggtcaagaagacaaggtgtgcaaattgttgaagtatttgtatggtctgaaacaagctcctaagcaatggcatgagaaatttgatagaacattgacatctgcaggcttcgcagtcaatgaggcagataaatgtgtatactatcgccatggtgggggtgagggagttattctgtgcttgtatgttgatgacatactgatatttgggacaaatcttgaggtgataaatgaggttaaatcattcttgtctcaaaaatttgatatgaaggatttgggagtagctgatgttatcctcaacatcaagctaattagaggtgagaatgagattacactcttgcagtcccattatgtggagaagatcttgaatcgctttggctacattgatagtaagccttctccaacgccttatgttcctagcttgttgcttcgcaagaacaagagaattgctaggaatcaactggaatactcccaaatcattggctcgctgatgtacctggctagtgcaactaggcctgatatctcctttgctgtgagcaagttgagctggtttacctctaatccaggagatgatcactggcgtgcgcttgagcgagtaatgcgctatctgaaaggtactatggaattggggcttcactattctgggtaccctgcggtactggaaggatatagtgattctaactggatctctgatgtggatgagatcaaagccactagtggatatgtcttcacactagttggtggtgctgtttcatggaggtcttgcaaacagaccattttgacgaggtcaaccatggaagcagaattgacggcactggatactgctactgttgaggcagaatggctgcgtgatctattaatggatctgcctattgttgaaaaaccagtgccggctatccttatgaactatgacaatcaaacggtaattgtcaaagtgaatagttctaaggataatatgaaatcgtctagacatgtgaaaagacgattgaagtctgtcaggaagttgagaaactccggagttataacgttggattacatccaaacaactagaaacctagcagatcccttcacgaagggactatcatga

SEQ ID NO: 15050 - DNA, 1983 bp, Oryza sativa
  Clone ID: TFbOSC400773j.C1.o145.fg
atggatgaagtcgggggtcgatggacattctccagggcaaatgaaggctacacgagctgcggcccggtagtcgagatgtcgtggcacagggttggtgccctgctgctagggggctcagtcccgcctgcctgtcccggaggttccggccgtagggggattgggtcggtactcttgtctatggctaggatgggttggaaactatgtcacgtcttccgtctgtataccgtggtgatgtttaacagagaaaaaggaaagaatgtcagcgggtatgcctccagtaactcaagttttcaactcaatccaccactagcctcaagagagttaacaagggcacacccttggtccattccaagcatgctgcttagtccacagctaccattggttggaagtcaagaccaaaatcagtatgtgtttgatcgagcatttgccacccaggtcgatgagcttccaataccagaagaggatgtccccttttgtcacgattgtagagagcaaggacactatgccctgaattgtccatgggtatatgccaaagaagctccttcccttggtttaacagtgcagacatcgctaaaccagcctcttcgcaccaagtcaagcttgcagcctagtgtgcaaagcagagagcccaatgaagagaatccattgaatcccgggaattgctttcctcctagcccttcgtaccacgtggggtcacgtactaagcaagccaaaggcaagaagagtaagaatcagaggagaaaagcaccgatgcgaactgaagaagaagtacgtaagatgaccattaccagcacagaatggcctccaccaggaatgacaaaacgtcagagaagaaataccttccggggtgcaccacagttgacagagcatcttttagctaatggaggtagagtgtctgatagtgaagattcagatcaagtctcatcagatgatgaagatcagaagtctccccaaggtttcaaccagaacaaaatggaacgtaaggcatgctctcgttgtggagaaatcggtcatgttgccagctcgtgtgccactacatgcgttcattgtgaggaagaccatccacccgacaggtgtccaatgagcaggatcacttgtttcttttgtcaaggaactgatcatgtaccaaaagattgtcaattcagttttctgctgacgaagaggatggccagccaacccgccagttccaacggagagcagcatcaaggcaacacaaatcctcgccaagattacagtttcagcctaacttcagtgccaggacagaggaatcaaaatgaggaaagaaaatgccgagtccgagaagatatctgttgcttcaattgtcaaggaatgggtcatttcgccgacaagtggccaaaaccgagaaacatagctgccggcacgtcagtccacgcaactccctgcaatcagaagcttgctcctcagcgaattgtcatccatgcatcccgaagcagtcctatagcccccgttgcaacagctccaactccagcgagtacattaccacaaggtgtcaatgctcaatttcagccccagccaccagttgacaagacagcggcattgtacctttggatgttccagcacagcagccaaaaaaaaaatcaagtacaagatgaagaacccgagccaataataccttcagcaccaaccattctctgcgccgacagcctcagcagagaattgtcgtcgatggaagaagttgtttctctccccgacctactccaggccgagcaaagggcaatcaacctccggagggcgataccaagcagaagaccgtcctccgcttcaaacagcaatcagacggaagcttctcctgtgaatgatagcattatgcagtcctatcacatcatcacagaaccaatcaaggatgcagtcactagaacaatgccagctatatctctccagagtcaaaatgagcagccatgtttgtggttttcagttcgctacttatcattgcgtaatcgaaagtttgcagcaatcatgtaa

SEQ ID NO: 15051 - DNA, 1001 bp, Oryza sativa
  Clone ID: TFbOSC25200j.C1.o1.np
aaatggaacgtaaggcatgctctcgttgtggagaaatcggtcatgttgccagctcgtgtgccactacatgcgttcattgtgaggaagaccatccacccgacaggtgtccaacgagcaggatcacttgtttcttttgtgaaggaactgatcatgtaccaaaagattgtcaattcagttttctgctgacgaagaagatggctaaccaacccgccggtttcaacggagagaagcatcaaggcaacaccaatcctcgccaagattacagtttcagcctaactccagtgccaggacagaggaatcaaaatgagaaaagaaaatgccgagtccgggaagatatctgttgcttcaattgtcaaggaatgggtcatttcgccgacaagtgcccaaaaccgagaaacatagctgccggcacgtcagtccacgcaactccctgcaatcagaagcttgctcctcaacgaatggtcatccatgcatcccgaagcagtcctatagcccgcgttgcaacagctccaattccaatgagtgcactaccacaaggtgtcaatgctcaatttcagccccagccaccagctgacaagacagatgccagtatctgcgttgtacctttagaagctccaatacagcagctgagaaatcaagtacaagatgaagaacccgagtgtacaaccattctctgcaacgacagcctcagcaaagaattgtcgtagatggaaggagttgtgtctctccccgacctactccaggccgagccaagggcaatcaacctccggagggcgataccaagcagaagaccgtcatccgctgcaaccaacaatcagaaggaagcttctcctgtgaatgatagcattatgcagtcctatcacatcatcacagaaccaatcaaggatgcagtcactagaacaatgccagctatatctctccagaatcaaaatgagcagccatgtttgtggttttcagtccgctacttatcatggtgtaatcgaaagtttgcagcaatcatg

SEQ ID NO: 15052 - DNA, 1376 bp, Oryza sativa
  Clone ID: TFbOSC29052j.C1.o1.np
aattcgggatgaatttatcaggacgtgacaggagggtcctcagcagaaaagaaaaacaccaatgcgaaccgaagatgaagtccgtaagatgatcattaccagcacagaatggcctccaccaggaatgacaaaacgtcagagaagaaataccttccgaggtgcaccacagttgacagagcatcttttagctaatggaggtagagtgtctgatagtgaagattcagatcaagtctcctcagatgatgaagatgagaagtctccccaaggtttcaaccagaataaaatggaacgtaaggcatgctctcgttgtggagaaatcggtcatgttgccagctcgtgtgccactacatgcgttcattgtgaggaagaccatccacccgacaggtgtccaacgagcaggatcacttgtttcttttgtgaaggaactgatcatgtaccaaaagattgtcaattcagttttctgctgacgaagaagatggccaaccaacccgtcagttccaacggagagaagcatcaaggaaacacaaatcctcgccaagattacagtttcagcctaactccagtgccaggacagaggaaacaaaatgagaaaagaaaatgccgagtccgggaagatatctgttgcttcaattgtcaaggaatgggtcatttcgccgacaagtgcccaaaaccgagaaacgtagctgccagcacgtcagtccacgcaaacccccgcaatcagaagcttgctcctcaacgaattgtcatccatgcatcccgaagcagtcctatagcccgcgttgcaacagctccaattccaatgagtgcactaccacaaggtgtcaatgctcaatttcagccccagccaccagctgacaagacagaggccagtatctgcgttgtacctttggaagttccaatacagcagctgagaaatcaagtacaagatgaagaacccgagaagaagggcattactccaaaaactgtccccaaccaaggcaaaatcgacctccacattaccgccaatttacacgaagcagacattccaatcgtattgtggtcactggagcaaacgccgtaccaaagagtgaaatcttcaactcggtatcagatgctacacggagtgaaaagtgcaagcaccggttaccaggttgacgccaaagatatgaatgataagaagttctagaaccgaagccccatcctcaaccaccgcagcctagtctgggtcagttagaagttcaaccagggacaagtcgggtgaagagaagattccatctgcaacaggagatcgagccaagcgttccagagtggagaagttttgttaggcaagttggttatagaagacggagcggaagaagtcagacaagaagagaagaccgcccaacctatcttcatgc

SEQ ID NO: 15053 - DNA, 3747 bp, Oryza sativa
  Clone ID: TFbOSC401985j.C1.o4.gm
atggagctcacgtcggagcaagaacaactcatccaccgcaatgctcaagcttccaatgcaattctctctgccttgagtccggaggagttcaacaaggttgatggacttgaggaagccaaggagatatgggatactttgcaattggctcatgagggatcacccgccgttcgtgaggccaagattgaattattggaaggaaggcttggaagatttgtgatggatgacaaggagacaccacaagagatgtatgataggatgatgattcttgtcaacaagattaaaggacttgggagtgaggacatgacaaatcactttgtagtcaagagacttctccgtgcatttggtccaagaaatcccactcttgtatcaatgatacgggaaaggaaagacttcaagagactcaccccaaatgacattcttggaagaattgtgtctcatgagatgcaagaagaggaagctcgtgaagtgaggcaaatggtgaagaatgcgcccatgatcaaaaatcaagaagttgctttgaaggcaaaccaagaagaagagtcaagttgtgaagaaagtgaagatgaagaaatggcttttattgtcaagagattcaaacactttcttcgcaagagtggctatggcaaagggaggaaggatgatgacaagggaaagaggcaatcaaagagagcgtgcttcaattgtggcgaatatggccatttcattgccgattgtcccaggtcaaatgaagctaaggctaagggaggcaagaagaagccgaagcgtgctcatgtggcggaggcacacatggcggaagtgtggtactccggagatgaaaaatatcccgaagtcaagcccaagcccaagtcaaaagacaaggttgaaggaaaaggtggtgttgctactatcgccttcaagtcatcctcttcaagcaaggagcgtctcttcaacaacttgagtgatgacgacgacgactcctaccactactcttgcttcatggcccaaggccgcaaggtgatgactcaaaagccctctcacacttctcttgatgttgattctagtgatgaggaaagtgataatgaattagatgatgtgcttaagagccttagcaaacccactatgcaacatttggctaagttaatgagagctttggatagtaaagaacaatcactcgaaaggcaagaagaattgcttattcttgagaagaaaagaaaccttgacttagaggagagcttagctaaagaatgtgctaaaaatgaacaactagctaatgatcttaatttggctaatggttctttagctagccttagagatgtcaatgagactcttcaagagaaatttgcttgtttagacaaaagtcataaagatcttgaagttcaatttgacactctttggaatagtacctctcaaccaaatgtggtttctaattcttctaacccttctactagcaatggttgtgttaggtgttacaatatttatttgaactcttatgctactaatattgatgctatgcaagctcttaagaaagagaatgaaaggttgggcacattagtgaaatatggatgcatgaagacataccattcaaaagatgccctttacaagaccatcaccgctcatcctaacaaggatggacacgggcttgggttttcgggtggaagtcctgtgtctaagcgtgtgatggcatactcctccggtggttcatgttgggttgtggacaatggttgcaccaatcatatgactggagagaggagtatgtttacaagtcttgataaggagaatggaactcgtgagaatattgtgtttggagatgatggtaaagggaagttgggttacaattgcttgtttaccgatgaggatgtgaccgtctttagaagggatgactcctccgtagcattcaaaggcaagttaaagggtgatctctatcttgtcgatttcgatgtggatagagtgaatccggaagcttgtttgattgctaaatcctccatgggttggctatggcatcgtagactagcccatgttggaatgcggaatttggcaactcttctaaagggggaacacatcctcgggctcactaatgtcacatttgagaaagatcgtgtgtgcagtgcttgccaagccgggaaacaagttgggaatccacattctatcaagaacatcatgactacaacatgcccttttgagcttctacatatggatttattcaggcccgtggcttacataagtattggagataacaagtatggttttgtcattgttgatgatttttcacgcttcacttgggtgtatgttctccatgacaagagtgaggctcaagatgtcttcaagcgctttgccaagcaagcccaaaacctctatgatcttaccatcaagagggtgcgaagcgacaatggaggagaattcaagaacactcaagtggaggaattccttgatgaacaagcacaagagggcactttcatctctcaaaccaagtacgtgaaggacattctcaagaagtttgggatggaagatgccaaacccatcaagactcctatgcctactaatggccacctagacctcgacgataatggtaaatgtgtggaccaaaaggtggggaacgcgttcgtgcaccagtactacaacatcctgcaccagtcgccggatctcgtccaccgcttctaccaggacgggagccgcatcggccgccccgcctcccccgccgccgccgagatggacaccgtcaccaccatggaggcgattaacgcgaagatcgtgtccatggacatcgtgcgggcggagatcaaggcggtggacgcgcaggagtcgctgggcgggggcgtcacggtgctcgtcacgggccacctcaccgggagcgacgacgtgcgcagggagttctcgcagtccttcttcctcgcgccgcaggagaagggatacttcgtgctcaacgacatcctgcgctacgtcgggggggagggggatcaggaggtggagccggagccggagctggagctgtcgtttccgccgtcgcagcagccggattcggtgcctgctccttcggcgaatggcactagcgtgccgcgggaacaggaggccttctcgcagccggagcagcatgtggctgatcctgcacccaatgctcaggaggctgatctcaacggcgaggaggtttataacccaccgaacaacacagaggggcctgttgtggaggaaacgccgattcctgaagttatagatgaagtgccaaataacgtagctgtggctatgccgactccgcctgcccctgcccctgcccctgtaccacaagaggaggcccccaagaagtcgccggcaccaccaaaacaagagaagcaagttgctcctgcacctgttgctccggttgctgatgctccaactttcagtcctaatcctgaaagcagcaacattcaagaggctgaagagtttgaagatcccagttcagttcaaagtgcaattgcgggttctcctgtgacgattagtgaccggcaatgttatgtggaggaaaagagaactgctggttcacgtggtggtggcagaggaaggtttgctcctggtagaggtggtaacttccgaggtgaaggcatgagaggccgcgggaattacaccggagggaggggctatggaaggggtgagttcaattatcgatccgactatggaggcagaggcgctggtagaggtggttcatcacgtggtggtgatgttggctaccagcgggttgaccactctgctggtcgtgctgctcgggcgccatcgggcactagtgccgttgcaaagtga

SEQ ID NO: 15054 - DNA, 4368 bp, Oryza sativa
  Clone ID: TFbOSC101306j.C1.o6.fg
atgtctctccactccattcgttccccctctctctcgtcccatgcctcaagcacttccagtggacgaggcagcaggcggtcggcggctgacgctgagggcgacggcgatgcgactgctgctgcgcgggtcgcgcaggaggcgcaagcggctgcgcgggaagcacgcgcggcgtgtgaggaagcggaggcgcggctgcaggcagccacaagggcggcgcgtctcgcggcggcagaagctgaagcagcgcgcaccgcggaggcagccaggcaggctgcagctgctgctgctgttttgcgagctgaggaggaggaggagtggcgtgacctggagcgggcagacgcggcccgcgtgcgacgcgacgcggaccgggatcgacacgcaggtcgacgcgaccgcgacttcagcccccatcgcggaggagcagatctccaccgcggtgaggaggagcggcgcgatccatggcgcgatcctcggatagaccgcgccctggaggcccagcgactccgggagcaggcagcggcgattgaggcacaactggacttcgaccgggagcagggtggacgggacgttggcgcacggagccctcgcaggcagcgcgcctccccttccccggacaggcgccgtggtcgccgtggaccctccggctctcctcccgttgtgcagaccgtcgtcaaggatgttggcggcgcatggcccatgctcaccaagactaactacgtcgagtgggcgatggtgatgaaggtgaaattgcaggcgcgccacatgtgggacgcggtctggtacggcgacgtcgactacggggaagattggcgggcgctggaggcgctccttgcggctgttccgacggagatgcagtcctccattgtgaacaagcggatcgccaaggacgcctgggatgccatcgcttcggcacgcatcggcagcgaccgcgcccgcaggtccacgcttcagaagctgcgtcaggattgggagaacctggccttcaagccgggtgaggacatcgacgacttcgttctccgcttcaactccttgcagcagcggttggcgcagctcgtcgacaccaccatcgacaaggagagagccgtggagaagctccttcgcgtcgtccccgagaagtacacgcagctggctctgtcgatcgagacgctgctggacttcaccgagctcacgatcgaagaggtgacgggtcgcctcaaggccgtcgacaaccgcaagcagctacctccctcagagccgatcaccattggtggcaagcttttcttcaccaaggagcagtggctcgcccgccagcaggagcagaagaagggggaggccacaggctcttcggcttcaggatcgtcgagtagccgcaagcgtcgaccacgcaagtgggagaaggcgcgtagtggcactcttggcggcgccgatggcgagcgcaagggcagccgcgacaacacctgccacaactgcgggaagaccggccactgggccaaggactgccggcaggcgacgcacggcggtcaagcacacgtcgctcaagcgctggagggtgacgaggtggctctgtttttcgtacacagaagcatcgagccgcacttcactcccgcacaggacgctaccacgcccctccaactcgacgagccgcgggcccacgtcttcctcagcaacggatcctgcggcgacaagatcgacggatggtgcctcgacaccggtgccactcaccacatgaccgggcggcgggaattcttctccgagcttgactccagcgttcaaggctccgtcaagtttagggacgcctccgccgtggagatcaagggcgtcggctccatcctcttcaccgccaagaccggcgagcaccggctgctcaccggtgtctactacatccccgcgctgaggaactccaccatcagtttgggacaactggatgagaacggctcgcgcgtggagatagaggacggggtcttgcgggtttgggatcgccatcgtcgccttcttgtcaagcgctttgggcacctcaacttcgaggccctgaagcagctcggcaacaaggagatggtgcagggcatgccgcgagtcgagcacgtggagcagttttgcaacacctgcatcctcaccaagcagcggcgactcccctttccccgccaagcaagtttccgcgccaaggagaagctggagctcgtgcacggcgacctctgcggccccgtgactccggccacacctggaggccggcgcttctttctgctgctcgttgacgacgtgtcctgctacatgtgggtggtcctgctcgactccaaggcagcggctgcagacaccatcaagcgccatcaagttgctgcggagaaggaatgcggccgcaagcttcgggtgctacgcaccgacaacgggatccaacgccacttctccgtgccatacaccccgcagcagaacagcgttgtggagcgccgcaaccagacagtggtggccactgcccgcgccctcctcaagcaaagagggatgccagcaatctactggggggaggcggtgatgactgccgtccatctcctcaaccgctcgcccaccaaggcccttgacggcaagacgccgtacgaggcctggcatgggcgcaagccggtggtgagccacctccgcatctttggctgtctcgccttcgccaaggagctcaaccacatcgggaagctcgacgaccggagctcgccgggagtcttcatcggctatgcggagggcgtcaaggcctaccgcatcctcgaccctgcgacgcagcgcgtccgcatttctcgggacgtcgtgttcgacgaagggcgaggttgggcttgggacaaggcggtggacgacggctcgacttcgacgctcagagacttcgtcgtcgactacgtccactttgggggagccagaggagctagcagctcatcttcaccgagctcatccacctcggcacccggctcgccatcagctccggcgagtcctccaccacctacaccaccagcgactcctccatcaccggctacgccccgctctcctacaccggcgcccacaccaccggtggagttcgccactccgttgtccaacgacgaggatcgtgttgatgcgtaccacgacgacgagcctctgcgctaccgcaccgtggacagcatcttcagtgatcagcctgtccttggactggtgacgcgcgacttcgaggccgagctgcacctagcgcatgaggacggcgagccctgctccttcgcagaggcgaatggagatgtggcatggcgcactgcaatgcagcacgagatgaacgcggtcgagcggaaccggacgtggccgccgggattcgtcatccccggcaaggagaacaaggttctccgcctgcgcaaggccctctacggcttgcggcaggcgccccgagcttggaacgccaagctggactccactctcaagcaactggggttccagcagagctctcacgaagctattgtctaccggcggggcaaggacaacaatgccctgttggtaggcgtctacgtcaacgacttggtgatcaccggcaccaaggaggctgaggtggaggcgttcaaggaggagatgaaggcgacttttcagatgagcgatttgggccttctctctttctacctggggatcgaggttcaccaggacagctctgacatctcccttcgccagactgcctacgccaagcgcatcgtcgagttgggcgggctcaccggctgcaacccagcctacactcccatggaggaaaggttgaagctgagccgcgacaacacggctgaggaggtcgatgccacgcagtaccggcgtattgtgggcagccttcgctacctcgtccacacgcggccagacttggcatttgctgttggctatgtcagccggttcatgcagcgaccgacgacagagcaccagcaggctgtcaagaggatcctccgttacgtcgagggcaccaccgactacggcttgcactacccgaggtgtcccgctagcagtcggtcaagcaacaagtggtggcagtcagtcaagcaacaagtggtggccctgtccagttgcgaggcggagtacatcactaccacaaccgcctcaactcaagctctctggttggctcggctgctgggtgatctcttgggcagagacgctgaagcagtggagctcagggtggatagcaagtccgctttggccatggcaaagaatcccgtcttccatgagcgcagcaagcacatccgcatcaagtatcatttcattcggagctgcttggaggaggggagcatcaaggccagctacattaacacccaggatcagctcgccgatcttctcaccaagtccctcgggcgggtcaagttccaggagtttcgcgccaggattggaatggttcaaattccccaaaaggcgccacacaagacttag

SEQ ID NO: 15055 - DNA, 1608 bp, Oryza sativa
  Clone ID: TFbOSC1821j.C1.o3.fg
atggataacactggtaacaaaggctatgggaatgatggatccgatgactcaagaacccaagccaatgggaatgagaaaagcatcaacgaaacctcaccagagctaatccaaattgtggttaaccaaaccaacatgttggcaaccgcctttcaactattacagaatcggaacaacccagcaggggcaaccaacgttcaagtacctacagtccagcaacagtgcaagttatcagaatttctcaaaacggggcctccaacctttgccatggccgtcgatcctatggaagccagtgattggttgcgcacagtcgagaagaagctagggttgattcagtgcaccgaccaggagcgggttggcttcgcaactcatcagttggttggaccggcttcagagtggtgggatagctacgaagcatcacggccagaaggacataccatcacctggaacgagttttcatctgtattcaagagatcacatgttcccgcaggaatgatcacactaagaaaacgagagttccgctacctgaagcaaggagatttgaccgtcacagagtacctgcacgagttctatcgtttggctcaatatgcaccagaagatgtggaaacggatgaagacaaacaagagaagtttctccaggggttaaaagatgagcttgcagtgcaactacttctagaggattatgaagattttgagaaacttgtggacaaagccatgcaactcgaaagtgagcataatcggatgacgaactgcaagagaaggatggttaacaacccagtatttccaggtggtaaccaaagacagcgcactgagccacttcagatcaccggatcttctgttgtgtatcaagagttcctgccccaagaagatgaacgcaatgcaggcaacaacaatagcaatactaatgctgatgataccaccaacaaccatggttcttgccccattcatgaccacttagatcaagcgtgcaatgtcaacatcattcaccaagatatcgacgatagtatcaatgaaggcacccagaatgacaaccctagcaattttgactctgggaaggactccaatggtgatagcaataatggtaccactgatgccaatgttagcaaggattcccaaccaccaattccaactccaagtcaaaatgatcgtccccagatggacagctcagtaaagaagacgttgatttgttacaactgcaaaggaccaggacatttctctagagattgtccacagccgaagcgtaacctgcgccatcactccggccattatgcaagaagaagacaagtcactcgccttgtggtcactggagcaaacgccgtacctgtgaggcctcatgttaattctaacccatatggtaacttgtctgaggttgactccgaagatatgaagcatgagaagttctggaacggaagcatcactgaactaccgcaacctagtctgagtcagccaaaaggtgcaccctggtccaagtcaggtgaagagaagattccatccgcaacaggaggtcaagccaagcagttccgagtggtaaagttttgctggaagttcgtcaagacgcaacggaagaagtcagacaagaagagaagaccgcccaacctatcttcttgctag

SEQ ID NO: 15056 - DNA, 2176 bp, Oryza sativa
  Clone ID: TFbOSC23989j.C1.o1.np
ttgagaagttgtggcacgttgcaccatttcctagcgccgccgccgccgcgaatcccgccgctcccgtccgtcccgcgtgcaatcaagaggggggaaatattccccgtgattccctccctctttccccccattattctctccctctctccctcggattcgtttggaaaccctcccccaatcccgccggcgccattgatggagcccgagagcgtcacgccggtttcctttccctccggccgctctctccccctcccaaccctatataaacactccccgtgcctccctccaccgtttccgccactcgccgctctctctctccgccagaatcgagcttgcgccgtcgctctctctctccgccgtcaccgccgagctccggtccgccgccgtcgtcgccccggaccttctcccgcctcggcgccgcctccttcagcttcgccgcatcctcgccgacctcgtccacccctccatttcggtcgccgaccgccggaacgccgtcgaccccgtcgacccgagccgcgccgccgctttcctccgctccggtcgccgtttccgtcgtcgccgtcgacccggggtgagccgtggaccgccgcttcatttcccccttccctcccctctctcgggcgccgctccgccgcgccggtggtcgccggcggcgaccatcggggcgcgggcgcgccgcctcccgtcggctgtgccggcgtggccgccttcgggcgcgtcccgcggctgccatgtggggcccggccgtcagccgcccgcgcccccgggtgcggctgacgcgtgggacccacggcgccggccggcgtaagccgcgtgcacccggtccaccgtggaccgtgaggctgccgcgtgggccccactcccgtggacccggacaaatgaaggctacacgagctgcggcccgatggctgacaatgagaaaggcaataaggtcagaagtcaggacattggtacctcaagctccctagtgaatgaagcaccagacaccagttgtgtgacactggtccaacacctgattaaccagaaccgattgcttatagagatactacagcagcatcagacgccaattctgaacctgagtcagatacaagctcaagtgcagttggaggcagtccaatcactcacaccacaagtcagcatgccgccagcatcccaaaagacccatggtggcgtgccacatgttgactcaaaagaagcaagtatcatttgttttatgtgtgatgagcaagggcactatgcaaggaactgtcctcagcagaaaagaaaaacaccaatgcgaaccgaagatgaagtccgtaagatgatcattaccagcacagaatggcctccaccaggaatgaccaaacgtcagagaagaaataccttccgaggtgcaccacagttgacagagcatcttttagctaatggaggtagagtgtctgatagtgaagattcagatcaagtctccccagatgatgaagatgagatggaacgtaaggcatgctctcgttgtggagaaatcggtcatgttgccagctcgtgtgccactacatgcgttcattgtgaggaagaccatccacccgacaggtgtcaaacgagcaggatcacctgtttcttctgtgaaggaactgatcatgtaccaaaagattgtcaattcagttttctgctgacgaagaagatggccaaccaacccgccagttccaacggagagaagcatcaaggcaacacaaatcctcgccaagattacagtttcagcctaactccagtgccaggacagaggaatcaaaatgagaaaagaaaatgccgagttcgggaagatatctgttgcttcaattgtcaaggaaggggtcatttcgccgacaagtgcccaaaaccgagaaacatagctgccagcacgtcagttcaagcaactcccgacaatcagaagcttgctcctcagcgaattgtcatccatgcatcccgaagcagtcctatagtccccgttgcaacagctccaactccagcgagtgcattaccacaaggtgtcaatgctcaatttcagccccagccaccagttgacaagatagaggccagtatcggcattgtacctttggatgttccagcacagcagccaagaaatcaagtacaagatgaagaacccaagccaatgggaatgagaaaagcatcaacgaaacctcgccagagctaatccaaattg

SEQ ID NO: 15057 - DNA, 430 bp, Oryza sativa
  Clone ID: TFbOSC26838j.C1.o3.np
atgcgacaatcaaatgagacaaggaaacaagagatttttcaccgaggttcggaaactcgccggtttcctactccccgttgaggcgagcccaactccaccgctcaaccacgaagccaccgcacgcccccttcgtcaaggggtgggcaagaaaactagccgttgaagtgttgttagagggccccatcggcctggccggtcagaccggcgttgagtgggcggtcagaccggcctcggctcggttagaccgccatcggctcggtctgactgactacggctccgtcggctctgtatcggccatcccgagcagcaccatctcggcctccagggggccggtctgaccgggcatgcgccgccggtcagaccggccttatgcgccggtcagaccggcccattgttacccaggcgagggaggatggtagctctcacaatc

SEQ ID NO: 15058 - DNA, 1035 bp, Oryza sativa
  Clone ID: TFbOSC400501j.C1.o2.fg
atggtgaacactcgcgccagtggaagtggaaacaataacaatgaagggaacccaactcttgctcaagttctggctcaacagactcagttaatgaacatgatgatacagcagatgcagaaccagctcaaccaagggaacaacaatgctccaccgacgcagaacaagttagctgattttcttcgtgtgaggccgcccaccttttctagcactaccaacccagtggaagcgggtgattggctgcacgctgttgagaagaagttggaactgctccagtgcacggatcaggagaaagttgttttcgcttcacatcagttgcaaggacctgcatcagaatggtgggatcatttccggatgaacagagcagaaggtcaaccaatcaattgggaagagtttaccgaaggattcaagaagacacacatacctgtaggagttgttactttgaagaaacgtgagttcagggcattgaagcaaaaggatcgtaccgtggcagagtatcttcatgagttcaaccgtctggcacgttatgctccagaagatgtgcgtactgacgaggaaaggcaggagaagttcttggaaggcttaaaggatgaactgccagttacgttaatctcccatgactatgttgattttcagcagctggttgacaaagaggcacaaggtagtagccagagacagcgtatcaagccactccaaattagtgaacctttttccgctggtcaaggacagtcgcaacagttgaacatcggtggtgagatcaaatcagagactaatgaaagcaatgaagttaacatcgagcaagctaatcagccggtgccagttcagcaggaccagtctcaggagaataacagtagtggaagggagcagcaggtatgtttcaattgttacaaggcaggccactttgcaagagagtgtccgaagccgaagcatcagcagccgcaaggtcaggtctacaacattgtcgtcacaggagccaatgcggtgccagttgtgtcttcaagtgttacaactcagccaccagtttcaaagcggcagtag

SEQ ID NO: 15059 - DNA, 1047 bp, Oryza sativa
  Clone ID: TFbOSC400817j.C1.o15.fg
atggagtttaccacggagcaagagaaagcaatacacctcaatgcacaagccgccaatgccattctctctgccttgagtccggaagagttcaacaaagttgatggacttgaggaagccatggaaatttgggatactttgcaattggctcatgagggttcacccgccgtgcgtgagtccaagattgagttgttggagggaagagttggacggttcgtcatggatgacaaggagacccctcaagaaatgtatgataggatgatgctccttgtcaacaagattagaggacttgggagtgaagatatgacaaatcattttgttaagagactccttcgtgtctttgttccaagaaatcccatacttgtgtcaatgatccgtgagagaaaggactacaagaggctttctccaagtgatatacttggacggatcgtgtcaaatgagatgcttgaagaagaagctcgtgaattgaagcaaatggtcaagaatgccgccatgatcaagaaccaagagataggtttgaaggccaatcaagaagaagattcaagtggtggtgaagaaagtgaagatgaggagatggccctaatcgtcaatagattcaagcacttccttcgcaagagtggatatgggaaaggaagaaaggaagatgacaagggcaagaggcaatccaagcgagcatgcttcaaatgtggcgagtatggccattttatcgcggattgccccaagaccaatgaagcaaagcacaaggtggtcaagaagaagcctgatcgtgctcatgttgcggaggcacacatggcggaagtgtggtactccggagatgaaggctctcccaaggctatggagaagggagatggagatggtggcgtggctactgtcgccatcaagtcctcatcaacaaaggagcgcctcttcaacatcttgagtgacgacgacaacgactcctaccaccactcgtgcttcatggaccatgggcgcaaggtaatgcctatccaaaagccctctcttgatgatgataacactagtgatgaggatagtgacaatgaacttgattag

SEQ ID NO: 15060 - DNA, 2763 bp, Oryza sativa
  Clone ID: TFbOSC401828j.C1.o30.fg
atgtcggctccaacgccacgtgtgtcgcggtcccgtgaaccgcaccagcgacgtatctcccgttcacctccacaccgtcgtggtcgccggcggcctggcgaagaccgtgaacttattccggtccagcgtgtggtgaaggaggtgggcggctcagccaactatccactgctgacgaagactaactacggagattgggctctcatgatgaaggtcatgctgcaagcgcgcggcctgtgggatgccgttgagcatggtgacgccgatttccaggcggatcgaatggcgatggaggccatactccgggcggtgccgccggagatgttagcttcactcgccgtcaagccctcggccaaggaggcgtgggacgcgatcaagatgatgcgagttggcgtcgatcgtgtctgcaagtcgaaggcgcaaatgctgcagaagcagtatgatgcgatggagttcaaggacggggagaccgtcgaggaattctcgttgcgcctcaacggactcgtcaccaacctcgccacgcttggagtccatcttgaagaaggaaaggtggttgaaaaattccttaactctgttccagatcatctctcgcagatcgctttgtccattgagacgttgcttgacctcgatgagctcacgctcgaggaggtcaccggccggctccgaaacgctgaggagaagctgcctgccaagagctctgctgccggtgggaaactgtttctcactgaggagcagtggactgcccggtggaaggagaaacaggccgcggaaagttcctctgggaaggcgaagtccggcggtggcaaccgtcgtcggcgtggtggcaagaagaaagctgaagctgctgcgcacgatggagatcgtgccgggggcgacacgcaggaagggcgggaaccaaaccgcgacaagtgccgcaattgcggccgcacggggcactgggctaaggactgccggaagcccaagcggcctgccgaggcccaccaggccctggcggatgaggacgatgacgagtcggccctcctcatggcccatgtcgtcgacgctgctcctgtgtctgcgtcgtcttcatctgcgccacctgcttcttcgccgccatcgcagcctgacaagacgatcgagctcgtcgagccaaaggtgttcgcgcaccttctcacggagaaacaaaccaacggcggcgtctggcatctcgacaccggagccacaaaccacatgacgggcattcgcgaagttttcgctgagctcgacctgtctatgcggggctcggtgcgattcggcgacggctccgtcgtcggaattgagggtcgtggcaagatcatttttgagtgcaggaatcaggagcaccgagcgttgacgggggtgtattacatccctaaactcaacgccaacttgataagtttgggccagctcgatgaaaatgggtgcgacgtccgtatctaccacggtgtttgcacgatacgggacccagcggcccagctgctcgcacgcgttcggcggacgcggaatcgcctgtacttgatcaagctcaccatcgggcaaccggtgtgcctcgcggccaaggcgcaggagtgcgcctggctgtggcatgcgcgctacggccacctccacttcgacgctctgcgacgactggcgagccgcgacatggtgcgcggcatgcccgacatcgatcatgtcaagcagctgtgcgacagctgcgtcatatctaagcagcgacgcaccccgtttccacgccgctccatgtttcgtgctgaggatcgccttgagctggtgcatggcgatctgtgtggtcccatctcgccggcaacccctggaggcaaaactcatttcctcctgcttgttgatgatgcgagcaggtacatgtggatcactctgctgggacgcaagagcgaggcggctgatgccatcaagcgctttcaggcgcgagccgaggcggaatccaagcagaaattgcgcatcctccgcaccgacaacggtggcgagttcacctcggtggaattcgccacctactgcgccgaacagggagtctcacgccacttctccgcgccctactcgccccaacagaatggcgtggtggagcgccgcaaccaaaccatccttgggatggctcgcagcttgttgaaagccaagaacatgccggcacgctattggggggaggctgtcacgacagcagtttttctgctcaatcgcgcgccgacaaagagcttggccaacatgacaccttatgaggcgtggcatgggaagaagccggcggtgggttacctgcgcacgttcgggtgcctggcctatgtcaaggacgtgcggcctcacctccccaagctctctgaccgcagcaagccgatggttctcatcggatacgccgacggagccaaggcgtacgaggtgttcgatccggtgtctggacgagtgcaggtctcgcgcgacgtgattttcgacgagggcgctgggtgggactgggatgcggcgggcgctgcagccgtccccggcggcggaggttgctcagacttcaccgtcgagtacctgacaacggccacatcactgtcgccttcgacctcggctccatcatctgcatcttcgggcgcttccgcgtcaagggcagtcacgccgtcgtccgcctcgacacccgccaccttggcatcggcctcaacgcccgctacaccgacattcgtctcaccgccaccaggcatcgacgagaacctggacgcggagcaggatgattgtccactgcgttatcgcagtatgggtgatctactgggcgacgcacgatattag

SEQ ID NO: 15061 - DNA, 2123 bp, Oryza sativa
  Clone ID: TFbOSC401861j.C1.o3.np
atgtcgcacttagagggagataaagagttggatgaaaatggtgatggatcaactagcaagggaacgtctacacctaagggagcctctatttcttttgattacaacaaacttaccattccctctcataactttgtctccgtgccttccctgcgttctcctcaatttgatgggacatattacgccgcttggaagcacaagatgaagttgcgtacatctaatctctttgcaccctagcatttggaaagttgtgtgcacatgtgttgatgttccaaatgaagacatggagtttaccacggagcaagagaaagcaatacacctcaatgcacaagccgccaatgccattctctctgccttgagtccggaagagttcaacaaagttgatggacttgaggaagccatggaaatttgggatactttgcaattggctcatgagggttcacccgccgtgcgtgagtccaagattgagttgttggagggaagagttggacggttcgtcatggatgacaaggagacccctcaagaaatgtatgataggatgatgctccttgtcaacaagattagaggacttgggagtgaagatatgacaaatcattttgttaagagactccttcgtgtctttgttccaagaaatcccatacttgtgtcaatgatccgtgagagaaaggactacaagaggctttctccaagtgatatacttggacggatcgtgtcaaatgagatgcttgaagaagaagctcgtgaattgaagcaaatggtcaagaatgccgccatgatcaagaaccaagagataggtttgaaggccaatcaagaagaaatggccctaatcgtcaatagattcaagcacttccttcgcaagagtggatatgggaaaggaagaaaggaagatgacaagggcaagaggcaatccaagcgagcatgcttcaaatgtggcgagtatggccattttatcgcggattgccccaagaccaatgaagcaaagcacaaggtggtcaagaagaagcctgatcgtgctcatgttgcggaggcacacatggcggaagtgtggtactccggagatgaaggctctcccaaggctatggagaagggagatggagatggtggcgtggctactgtcgccatcaagtcctcatcaacaaaggagcgcctcttcaacatcttgagtgacgacgacaacgactcctaccaccactcgtgcttcatggaccatgggcgcaaggtaatgcctatccaaaagccctctcttgatgatgataacactagtgatgaggatagtgacaatgaacttgattagatgtttaagaattttagcaaaccggccatgaaacaattgtcaaaattaatgaaagctttggatagtaaagagagatttcttgagaggcaagaagacttgcttattctagaaaagaaaaaaaaaccttgccttagaagaagatctagctaaggagggtgagaggattgaattactacaatatgagatttctttgcttaatgattccatggctagtttgacgagtgtgaacgaaactcttcaagaggaacttgtggttttggataaaaaaccatataaatcttgaagtggaaattgacactcttcggaatagcgcatcctctctaaatgaaactcctatgacacctatgccttctattagtgttggttgtgctagatgctataattatgatttgagttcatatgctactaaccttgaagctatggaggcccttgaaaagaaaaatgagaggttaggtactttggtaaagtatggatgcatgaagacataccactccaaagacgctctctacaagaccattgctacaaatccaaacaaagatggacatgagcttggtttttctgatgaaagtcctgtgtccaaacgtgttgtggtgaatgggaagattttcttgatgtttgtaagagaaggaaaggctccacaagaaagtgaggtgactctaccctttgttggtcagagacccggagcttccggacaaaatgtccagaacttcctggcacctgtcaggatcatcgtcctcctcgcgccgggcttagctgggccatggccttcggccggcccagcaagggcacgggagggagaaggaaatgggccggcggcccattagggaaaaaa

SEQ ID NO: 15062 - DNA, 975 bp, Oryza sativa
  Clone ID: TFbOSC900065j.C1.o2.fg
atggtgaacactcgcgccagtggaagtggaaacaataacaatgaagggaacccaactcttgctcaagttctggctcaacagactcagttaatgaacatgatgatacagcagatgcagaaccagctcaaccaagggaacaacaatgctccaccgacgcagaacaagttagctgattttcttcgtgtgaggccgcccaccttttctagcactaccaacccagtggaagcgggtgattggctgcacgctgttgagaagaagttggaactgctccagtgcacggatcaggagaaagttgttttcgcttcacatcagttgcaaggacctgcatcagaatggtgggatcatttccggatgaacagagcagaaggagttgttactttgaagaaacgtgagttcagggcattgaagcaaaaggatcgtaccgtggcagagtatcttcatgagttcaaccgtctggcacgttatgctccagaagatgtgcgtactgacgaggaaaggcaggagaagttcttggaaggcttaaaggatgaactgccagttacgttaatctcccatgactatgttgattttcagcagctggttgacaaagaggcacaaggtagtagccagagacagcgtatcaagccactccaaattagtgaacctttttccgctggtcaaggacagtcgcaacagttgaacatcggtggtgagatcaaatcagagactaatgaaagcaatgaagttaacatcgagcaagctaatcagccggtgccagttcagcaggaccagtctcaggagaataacagtagtggaagggagcagcaggtatgtttcaattgttacaaggcaggccactttgcaagagagtgtccgaagccgaagcatcagcagccgcaaggtcaggtctacaacattgtcgtcacaggagccaatgcggtgccagttgtgtcttcaagtgttacaactcagccaccagtttcaaagcggcagtag

SEQ ID NO: 15063 - DNA, 4641 bp, Oryza sativa
  Clone ID: TFbOSC401393j.C1.o1.fg
gaacatgctagacagggtcgacgtccactacctgaacatcatgagtatgatgcggaggatgagagtctaggcttgtgttctgatgaaggtgatcatcatcgtcgtcctcgacatcctcctcgccgaggtcctgcttttatggatagggttgttgatgatattcaccgtgacaatcggaatcgtcgtgctgctcgtgttccgttggatgaagggcttgatccggaggattatttgcagtgggagatgcgttgtgatcagatctttaatagtcacaactatttagaggataagaaggcacgtcttgcatctattgaattcactggttatgctttatcttggtggaatcaattgcaactcaaacaaggtgatcttagtgtggatgcttattataaggagatggaattgttaatgagccatacaggggtaacagagaatgatgaagctactatcgctagatttcttactggtctcaacgatgatgtgaaagaacgtgttgagatatcatattattatgatatacaaaatatggtgcacattgctcaaagggtggagcagcaactaacaagtcgccacactagccgttcatgttcttttcagcgagatggtgatggaagtgccgctagtaagtcgatgtctttcaagctgactactccttctagagatgggtctaaacctgctgctagttcggtgagtaaatccaaatctaaagttgaatctactgctacatctagttctaaatcacgaagtgtacagtgttatacttgtggagggagaggacattatatgagagattgtcctaatcagaagaaggtgttgatgactaaagaaggctatgtttctgagagtatattagaaaattcagaaggtgtacaacttgatcatactcttactacgggctatcgagatattgatgattcatctatggatgatggtgctgaaaagaataatggtttatctatgcttgcatatgcagttcagcgagatggctctaatgttgatgcaaaggggcagcgctgtaatatttttcagtcagagtgcaaaattcaagagaagttgttgttggggaggccatggcagtttgatcgtaatgctacccatgagggcagatccaactgttattcttgggctaatggacaagccgagtctagtaataagacattgttaaagttagtcaaaaagaagattgaggaagacccaaataagtggcatgaagtgctttctgaagcattgtgggcacataggatatctaaacatggtaccactaaagtcactccttctgagctagtgtatggtcaagaagccgttttaccggttgaggctttggaagagatagagaaagagaagaagagggtggccaaagcatacaacaaaagagtgaaagcaaagttgtttcaagtgggagacttggttcggaagacaattttgcctttgggtactcgatccagggagttcggtgttgcgatcgtgcttgtcgacttgtcaaaaaagttaccaacagtatgcattgctgcaaactgcccaacatcatttggtatggcttcttggatcaattccgcatggcttcttgatgttgtttgcaccaaaaactttgaaagtccacttgacaagcttgggtttaaggaggatgctgctttggtcaagagatcatggcagcctgcaccatccagttttaacttgcggtctattcttgagaaagagaagttgactggaacaaacttcatggattggaccaagcaagagctgagaggtttaatacctcaaagtccttgtttgcgtgcaagcttgcagaagtcgctccctcccagctttgagccgttcataatgaatttcaacatgaacaacctgaacaagaccttggcagaattgcatgaaatgcaaaagactgccgaggaaagcattaagaaaaactccaaccatgtgatggttatgcataagcgcaagcccaacaacaagaaaagtggtcaaaaaagaaagctaaactatgatgggatcacgagtactagcaactctaagaccaaggttcaaaagacagggcccgctaaggatgcagagtgcttcttttgcaagaagacaggtcattggaagagaaactgcaagaaatacctagagcagctcaagcagaagcagcaggatggaaagagttccacctcagctttgtgtaagaacgttatctctgcttcttgtctgcaagcagagggttatggttttagatctgtggacaatggttgttcagtctattataatgacattttctatttccatgcacccatgatgagtggcttatatattgtgaatcttgatggatgttcaatctataacattaatgcaaaaaggcaaggtcctaatgatttgaatcccacttttatatggcattgtcgcttgggtcatataaatgagaaacgcatggagaagcttcatagagatggacttctacactcgttagattttgaatcatttgagacatgtgaatcttgtttacttggcaaaatgacaaaggcacctttcacgggtcaaagtgaaaggacaagtgaactattggtactagtacatactgatgtatgtggaccaatgagctcaactgccagatgtggttttgggtactttattacctttaccgatgactttagtagatatggttatgtctacttaatgaggcataagtctgagtcctttgaaaagttcaaggaatttcagaatgagctttggggttacgctctagagacagctgcgttcacactaacaagggttccatcaaaatcagtggataagacaccatatgagatatggacagggaagcgtcccagcttgtctttcctaaagatttggggctgtgaggtctatgtaaaacgtttgcaatcggacaaactcacacctaaatcaaataaatgcttctttgtggggtatcctaaggaaacgaaaggatattatttatataatcgggaagaaggcaaagtgtttgtcgcccgacacggtgttttcttgaaaaaagagtttatttcaagaaaggatagtgggagcatagtgcgacttgaagaaattcaggaaacaccggaaaatgcttcaacgtccacacaaccacaacaagctgagcaagatgttgttcaacaggttgaacaagttgttgttgaaccagttgtggaagcaccggcttcacgaaggtccgaaaggatacggcgtacacctgcgaggtatgcgttgttaactataggacaacgtgatatattgttgttagacaacgatgaacctactacctacgaggaagcaatggtgggaccagactctgagaaatggcctggagccatgaaatccgaaatagaatccatgcatgtcaatcaagtttggaacttggttgatccacctgatggtgtaaaagccattgagtgcaaatgggtctttaagaaaaagacatatgtagatggaaatgttcacatctacaaggcacgattggtggcgaaaggtttcagacaaattcaaggtgttgattatgatgaaactttttcgccagtcgccatgctaaaatctattcagattgttttagcgattgctgcctatttcgactatgagatatggcaaatggatgtcaaaacagctttcctcaacggaaatctcgatgaggataaatccatttatgggttgaagcaagcatctcggagttggaatattcgttttgacgaagtagtcaaggcgttgggctttgtcaaaaatgaagaagagccttgtgtatacaagaagattagtgggagcgcactggtgtttctaatcctatatgtagatgacatattattgattgggaacgatattcctatgcttgaatccgttaagacatcgttgaaaaatagtttttcaatgaaggacttaggagaagcagcatatattatgggcataaggatctatagagatagatcaaagaggctaattggattaagccagagtacatacattgacaaggtgttgaagaggttcaacatgcaagattctaagaaaggcttcttaccgatgtcacatggcattaatcatggcaagaatcagtgtcctcaaacgactgatgagcgaaacaagatgagtgtgattccatatgcctgggcaatcggatccattatgtatgctatgctatgtacacgtatagatgtttcatatgcacttagtgcaacaagccgataccaatcagatccaggtgagagtcactggatagctgtaaagaatatccttaagtacttgagaagaactaaggatatgttcctagtctatggaggacaggaagagctcgtggtaaatggttacattgacgcaagctttcaaaccgacaaagatgattttagattgcagtctggatttgtgttctgcctgaatggacgcgctgtgagttggaaaagtgtgatgactagtgcttctagccctatgaacctctattgcgataatagtggtgccattgtgcaagccaaggagcatagatcgcatcaaaagtccaaacacattttacggcggtatcacctcattcacgagatagtgggtagaggagatgtgaagatatgcaaaatacatacggatttgaatgttgcagatctattgacaaagccactccctcagcctaaacatgaggcacacactagggcaatgggtataagatacgttcatgattga

SEQ ID NO: 15064 - DNA, 1461 bp, Oryza sativa
  Clone ID: TFbOSC18140j.C1.o1.fg
atggctgacaatgagaaaggcaataaggtcagaagtcaggacattggtacctcaagctcccgagtgaatgaagcaccagacaccagttgtgtggcagtggtccaacacctgattaaccagaacaaattgcttatagagatactacagcagcatcggatgccaattttgaacccgagtcagatgcaacctcaagtgcagttggaggcagtccaagcactcacaccacaagtcagcgcaccgccaacatcccagaaggcccctcatgccatgccgcatgttgacccaaaagaagcaagtatcatctgttttatgtgtgatgagcaagggcactacgcaaggaactgtcctcagcagaaaagaaaagcaccaatgcgaatcgaagatgaagtccgtaagatgatcattaccagcacagaatggcctccaccaggaatgacaaaacatcagagaagaaattccttccgaggtgcacaacagttgacagagcatcttttagctaatggaggtagagtgtctgatagcgaagattccgatcaagtctcctcagatgatgaagatgagaagtctccccaaggttttaaccagaataaaatggaacgtaaggcatgctctcgttgtggagaaatcggtcatgttgccagctcgtgtgccactacctgctttcattgtgaggaagaccgtccacccggtgaatgccccatgagcaggatcacttgtttcttttgtgaaggaactgatcatgtaccaaaagattgtcaattcagttttctgctgacgaagaagatggccaaccaacccaccagttccaacggagagaagcatcaaggcaacacaaatccccgccaagattaccgtttcagcctaactccagtgccaggacagaggaatcgaaatgagaaaagaaaatgccgagtccgggaagacatctgttgcttcaattgtcaaggaatgggtcatttcgccgacaagtgcccaaaaccgagaaacatagctgccagcacgtcagtccacgcaactccctgcaatcagaagcttgctcctcagcgaattgtcatccatgcatcccaaagcagtcctatagcccgcgttgcaacagctccaactccagcgagtgcattaccacaaggtgtcaatgctcaatttcagccccagccatcagttgacaagacagaggccagtatcggcattgtacctttggatgttccagcacagcagccaagaaatcaagtacaggatgaagaacccaagcagaaacatgagataatgaatgagcttgataagtttattgagggatccatgttagggttgcaagtgctttctggaactgaagccccatcttcaagtgccgcaacccagtcgaagtcagctaaaggttcaaccagggacaagtcaggtgaagagaagattccatttgcaacaggagatcgagccaagcagttcggagtggagaagttgtcctag

SEQ ID NO: 15065 - DNA, 2146 bp, Oryza sativa
  Clone ID: TFbOSC7923j.C1.o2.np
ccctagcgccgccgccgccgcgaatcccgccgctcccgtccaccccgcgtgcaatcaagaggggggaattaatccccgcgttcccctcccccgtttccccctctttcccctctctctctccctcggattcgttcgaatcaagcccgtaatcatcgccggcgcaatcaatggcggccgaaatctccgcggccggtttccttcctccccggccgccttctctcccttccgacgctataaaaacgttgcccgagctccgctctttcgtttccgccgctcgccgctcactctcgccgtcgaaatcgtgctcgcgccgtgctcctccctctccgccatcgccgccgagctccgttccgccgccgccgccgctccggacttcctcctactcggcgacccctccgtccgcttcgccgcgacgccgtcgatcccgtccgccgctccgcttcgcccgtcgaccgccggagcaccgtcgtcatcgtcatcccgagccgcgccgccgtcttcctccgctccgtccgccgtttccaccgccttcgccgtcttggggtgagccgtggaccgctccgttcgtttcccccttccctcctctctcttgggtgccgctccgccgcgccgttggtcgccggcggcgaccatcggggcgcgggcgcgctcctcccgtcggccgcgccggcgaggccgccctcgggcgcgccctcgcggctgccaagtgggcccggccgtcagccgcccgcgcccgcgggtgcggctgacgcgcgggacccacggcgccgaccgccgccagccgcgtgcgcccggtccaccgtggaccgagcggctgacgcgtgggccccacttcccgtggacccgggcaaatgaaggctacacgagctgcggcccgatggctgacaatgagaagggcaataaggtcagaagtcaggacattggtacctcaagctcccgagtgaatgaagcaccagacaccagttgtgtagcagtggtccaacacctgattaaccagaacaaattgcttatagagatactacagcagcatcggatgccaattttgaacccgagtcggatgcaacctcaagtacagttggaggcagtccaagcactcacaccacaagtcagcgcaccgccaacatcccagaaggcccctcatgccatgccacatgttgacccaaaagaagcaagtatcatctgttttatgtgtgatgagcaagggcactacgcaaggaactgtcctcagcagaaaagaaaagcaccaatgcgaaccgaagatgaagtccgtaagatgatcattaccagcacagaatggcctccaccaggaatgaccagacgtcagagaagaaataccttccgaggtgcaccacagttgacagaacatcttttagctaatggaggtagagtgtctgatagtgaagattcagatcaagtctcctcagatgatgaagatgaaatggaacgtaaggcatgctctcgttgtggagaaatcggtcatgtcgccagctcatgtgccactatatgcgttcattgcgaggaagaccatccacccgacaggtgtccaacgagcaggatcacttgtttcttttgtgaaggaactgatcatgtaccaaaagattgtcaattcagttttctgctgacgaagaagatggctaaccaacccgccagttccaacggagagaagcatcaaggcaacaccaatcctcgccaagattacagttccagcctaactccagtgccaggacagaggaatcgaaatgagaaaagaaaatgccgagtccgggaagacatctgttgcttcaattgtcaaggaatgggtcatttcgccgacaagtgcccaaaaccgagaaacatagctgccggcacgacagtccacgcaactccctgcaatcagaagcttgctcctcaacgaattgtcatccatgcatcccgaagcagtcctatagcccgcgttgcaacagctccaattccaatgaatgcactaccacaaggtgtcaatgctcaatttcagccccagcaaagaattgtcgtagatggaagaagttgtgtctctccccgacctactccaggccgagccaagggcaatcaacctccggagggcgatacccagcagaagaccgtcatccgcttcaaccagcaatcagaaggaagcttctcctgtgaa

SEQ ID NO: 15066 - DNA, 1404 bp, Oryza sativa
  Clone ID: TFbOSC400948j.C1.o2.fg
atggctgacaatgagaaaggcaataaggtcagaagtcaggatattggtacctcaagctcccgagtgaatgaagcaccagacaccagtcgtgtgacactggtccaacacctgattaaccagaaccgattgcttatagagatactacagcagcatcagacgccaatgctgaacctgaatcaaatacaacctcaagtgcagttggaggcagtccaagcactcaccccacaagtcagcatgccgccagcatcccgaaggacccatgatgacgtgccacctgttgacccaaaagaagcaagtaacatttgctttacgtgtgatgagcaagtgcactatgcaagggagcgtcctcagcagaaaagaaaaacaccaatgcgaaccgaagatgaagtccgtaagatgatcattaccagcacagaatggcctccaccaggaatgacaagacgtcagagaagaaataccttccgaggtgcaccacagttgacagagcatcttttagctaatggaggtagagtatctgatagtgaagattcagatcaagtctcctcagatgatgaagatgaaatggaacgtaaggcatgctctcgttgtggagaaatcggtcatgtcgccagctcgtgtgccactatatgcgttcattgcgaggaagaccatccacccgacaggtgtccaacgagcaggatcacttgtttcttttgtgaaggaactgatcatgtaccaaaagattgtcaattcagttttctgctgacgaagaagatggctaaccaacccgccagttccaacggagagaagcatcaaggcaacaccaatcctcgccaagattacagtttcagcctaactccagtgccaggacagaggaatcgaaatgagaaaagaaaatgccgagtccgggaagacatctgttgcttcaattgtcaaggaatgggtcatttcgccgacaagtgcccaaaaccgagaaacatagctgccggcacgtcagtccacgcaactccctgcaatcagaagcttgctcctcaacgaattgtcatccatgcatcccgaagcagtcctatagcccgcgttgcaacagctccaattccaatgaatgcactaccacaaggtgtcaatgctcaatttcagccccagccaccagctgacaagacagaggccagtatctgcgttgtacctttggaaattccaatacagcagctgagaaatcaagtacaagatgaagaacccgagtgtaagaaagttattgtttgttacaactgcagtgaagaagggcattactccgaaaactgtccccaaccaaggcaaaatcgacctccacattaccgccaatttacacgaagcagacattccaatcgtattgtggtcactggagcaaacgccgtacccgtaaggcctcgtgataatcagaacccatag

SEQ ID NO: 15067 - DNA, 1199 bp, Oryza sativa
  Clone ID: TFbOSC1772j.C1.o2.np
tgccagcgatctagagatggcaagacaaccaaccaaacaatggcacctcagtcacctcacggctttcctctgacagatgccaagagctgtggtacaaaaggattttggacccatcaagtgacttcatcttgacatggaaccacattttccttttttcgtgcttcgttgctctatttatagaccctctgtacttctacgtgccaaaaatctcctatggcaccccaaattcgtgtattgggacagacaggcatttagccatcactgttacattcttccgatcaatctctgatttactatatttcactcacattataataaagtttagaccggcatatattaatccgagctcaaccatgagggtatttggaagaggagaccttatcacggatccaaaggaaattgcgtggcaatatttgagatctgacttcgtagtcgatgcagtggctgcattgcctttaccacagatcttaatctggtttgtgataccagctattaagtattccactgatgagcataacaacaatattctggtgctgatagttcttgctcagtattttccaagactatacctcatattccccttgacttatgaaattgtcaaaactactggagttgtcgcaaagactgcttggcaaggggctggatacaaaatgttgctttacatgatagccagtcatccattcatcttctttcaggtactaggtgctctatggtatttgctatctgtcgatcgccaaactgcctgctggaagagcaattgcaagaatgaaactggctgtgatattaaatttctagattgtgatgtgataccaaatcaaaactgggcaagcaaaactgctatcttcaatacctgtgacgcaactaacacttcaatcagttttgattatggcatgtttcagcctgcattgtttaatcaagccccagggcaacgtttcttgatgaagtatttctattccctttggtggggtttgcagaatctgagttgctatggccagactattactgtgagtacctatattggtgagactctatactgtatattcttggcagtacttggtctcgtcttgtttgcacatttgattggaaatgtacagacctacttgcaatctatcactgtgaggggtgaggaatggagattaaaacaaagagatacagaggagtggatgaggcatcgtcaactcccacatgaactacgagaa

SEQ ID NO: 15068 - DNA, 3342 bp, Oryza sativa
  Clone ID: TFbOSC19101j.C1.o1.fg
atgtcgcctttctctggagcatcgctggctaggtctctaagcccagacactcacccccgtcaccataggcttcgcccttctccaaatccaccgcttcttcccctacccccagatccaccagcttccctagcctctccaaccctcgagttcttccctcctgttggtccttcccgtcagccccctactcttcctagcctgggcgtccctgcttcagatccagctttcgtcagcagaagatatcgggttccggggacgggctgccctttccggtctgcggtatcctcgccagatctgcagaatccgatgctggattcgagttctgctccaaatcctcgcctgtcttctcgatgtcaaggttcgccgaaaggtgaactgccgggattcaagcgtctttactccgatgtagttactgctcctcctcaacctccagctgccaagtcttcagatttcattgcagtgcagcctccctcaagattttcaggggcagtagcaaaggacataaggatcctgcagagtggacgtctgctcgatttgtctacccaaaatctctctgcatcagcgcaaggtacaggagacattcaagttggagagaatccttggaaagaggtcaaaggaaaacgcaggtggagaaaccactccgcattcactacaccaaacaacctggagcaaatgcattcaagaaaagcaagatttcttcaacacatggaaggcaagtgtttccgttgtttgagtacaaagcataagatcgtcgactgcagggagccgtttcgatgttggcgctgcttaaaatttggtcatctggcttccagctgtagcaagaagtttgcctataagtccaccttgcctcctctgaagactcacactgaagcttttcctgctcttgctcctctttgttttcccccacgatcgtttccatcccctcccaagtccccgatcatggacgacctcacagctcgtcccctcctcgactcggtggtgatctcggccacaggggagatcgagaggaaccgggaacgcttctcggcccattccttggtggcatggcaagtgggtgcccaagaaggaagggtcgagctcaacacgtttgcagatgacgtcccctcagccttcaacatcagaagagctgacatccaattcaccaagttccacccagaagacttcttcatcacttgctccaaccaggcggctaaggtgataggccggaagtgctccattcactatgttgaagagtactctcgccgccgcaactacaaccggaccttcgatttgtggatttggacggatgagccgagagctatcccgcgtggaggtaccttcgctattacctctgctgatgaagaaggactggccacagacattcctctgccagaccttgaaccactccgcaacccgccgccgtctgagccgaagaaagggtggacatacaatgtcttggttcatgttgacaccttggaagatctcctctctcgcaaagctcgagcttacaagtgggattatgatgttcaagacgatggcactctctacaaagaatatccactgccctgcagggcagaacctgacccaacaagaggaccggcagatgatgatgaagacaaggacagagacaatcattccaggagtcgccacaggagccgctcgctgtgggaccggttgaggaggcgatcttcaagccgcagtagggagccggacagaagagacggccactgccaagacaatgaaaacagggggcgtccgcgcaaccgggaacgctccgagcatagaagcagaagctgtcgttctcgtgatcctagcgaggggagcgaggaggttcttaccctcctggagagccatctcgaccctatgcttcatgaggcaaccgtacagcactccatctattcgccagacacatcctctccgcgtgctgtttcccctgtttttgtgccttcttttgcagtacagggaacctcgcaagaggagttggcggcaacccaggcaagccctgtccaggagttcattgctgctctgtcaacaccagtgcagccgcctctcctgcctgctccggaaacacaagctcgccgtccgggaagagcaaaggtgacaatcccggcgctttcttcagctcagcgtcacagcgaacgcctgcttcgcaagcgacgagcaggggcaaagcttgaatcttttgctcaggaaatcctatctaaaaattttggtataatggacgaaagatcttcctttgatcataacatcaaaaagatttatttgcagcgctacaagaagcctctgtctccagcgtccctgaagacaattgcagaattggtggagaagggaggctgcaaaagcattcgcctgaaggcttccaagaaggcgacggtggcgcccctaggtttaaattccaaagcaaagcaggattctgtgagatgtattttacaacagcatggtgcaaccatcgtatgtctacaggaaactaagttgtcttctatcagtgatcgcattattctcaatactctgggccagagatttcttcggcactgtgtttctctaccggccaccggcacaaggggtggcgttctgcttgcttgtgatgagaattacttctccatttcagatgtactccttggcacctactctgtatctgcagtgttaacaatgaggggagaggggcttcaatggtctatcacggtggtttataggccacagttagagccagataaaatcaattttctttctgaacttgaagctctgcagacctctatgaaatctgcttggctcattattggagatttcaacctaatatataaagcttcagacaagaacaacgaccgacataatagaaggatgatgcaacgttttcgtggcctcattgacaaattgcaggtgaaagaactgtacctcccagggcgtaggtttagctgggcgggagagggcataaacccaactcaaacaaaaattgatcgcgcctttgttacaactgattgggacatgatgtttgactgctcgaatctttaccctctgtcatccgcatgctctgatcatgctccccttcttctggttggaaatgagaaaatgaatagatttccaagtttcagatttgaagctttttggctgaaaattcctggctttcttgacattgtgacagattcctggacaaatccaatcttgtcaaccaacagattagccatcatccgtttaaagctccggcgtctagctcaagatctcaaaagatggagtcgcaatcacgtgggtgacatcaagctgcaactcgctgttgcaacagaagtgatctttcaattagaggattggctgatggagagcgggctttattgtcaaaccttaaaaatagaattcttgctctgtcagtgttaa

SEQ ID NO: 15069 - DNA, 525 bp, Oryza sativa
  Clone ID: TFbOSC900378j.C1.o23.fg
atggcccgcttgtatgttggcaacttggatccccgagtgacttccggggaacttgaagatgagtttcgtgtgtttggagttctgcgaagtgtctgggttgcccgtaaaccacctggttttgcatttatcgattttgatgacaagagggatgctgaggatgcactccgtgatttagatggcaagaatggatggagagttgagctctcacggaactcaagtagccgcggaggtcgtgatcgacatggtgggtctgagatgaagtgctatgagtgtggtgaaactgggcactttgctcgtgaatgtcgtttgcgtattggtcctggaggtctgggtagtggaaagcgtcgtagcaggagtcgcagccgcagtcgcagccctcaataccgcaagagcccgacctatggtagaagaagctacagtcctcgtgatcgctctccaaggcgccgcagtgtttcaccagttcgtgggcgcagctacagcaggtcaccacgtggccgaggtggttctccttatgctgatgggtaa

SEQ ID NO: 15070 - DNA, 741 bp, Oryza sativa
  Clone ID: TFbOSC401508j.C1.o1.fg
atggaccaatcgacatcgaaaaacaagaattcctccaatctacaagacccccaaaatatgggaataaaccagcccatgctactctttgaagatcctccccaagcttccaggaacaaaggacgagtccaagcctcactaaagcctgaagactacaccatcaatctgaatcacctaaagcaatattcttcgaatgaaaggtgccacctgactccagcaaaacgaaggataaatgccacgtgttatagatgtggcgaggaaggacattgtgccttggattgccctaagaaaaagctaggaaatggacaagtaaggaatataccccgacacccaaaaaggaaaatgagggcaggaataccaccaaaaccgatgccacattcactctatccaaaacctatgtatcagcaatttcgtagacaaggaactacaccacattggtggaaaggaaaacgggaaagaaaagcgtcatcactaataacatatgctgaacttgatatcagtaaaatgggaatagaaatcggtgatttgcctgaagaagttgaagagctacaactatggcaacgaaagagagatggatgttgtttttcttgtggacaatttggacattatgcgataggctgtactcaagacaccaatgaagaacaagaaacactgccttcacagatcagcccggaagagcatagagttttagacccatccaaagaaattcgaagattaaggcatgtagtcgttgcggagagatag

SEQ ID NO: 15071 - DNA, 808 bp, Oryza sativa
  Clone ID: TFbOSC15242j.C1.o1.np
atgaagacatggaccaatcgacatcgaaaaaaaaacaagaattcctccaatctacaagacccccaaaatgtgggaataaaccagcccatgctaccctttgaagatcctccccaagcttccaggaacaaaggacgagttcaagcctcactaaagcctgaagactacaccatcaatctaaatcacctaaatcaataccctgcaaatggaagctgccatctgactacggcaagacggaagacaaatgtcacatctttcggttgtggtgagaaaggacattatgccaataaatgcccccaaagaaggttgagagttggaccaagaaggaatttgccttggcacccaatatgcaatataagaccaggaatattaccaacgccaatgccctgttcagggaatccaaaacttccgtatcaaccatttcctagacaaagaactacacagcattggtggaaaggagaacagaaaagaaaagcgtcatcactaataacatatgctgaacttgatctcagtaaaatgggaatagaaatcggtaatttacctgaagaagttgaagagctacaactatggcaacgaaagagagatggctgttgtttttcttgtggacaatttggacattatgcgataggctgtactcaagacaccaatgaagaacaagaaacactgccttcacagatcaacccggaagaggatagagttccagacccatccaaagaagtttcgaagattaaggcatgtagtcgttgcggagagataggacactacggtagtaattgcgttactcaatgcccctactgtgacgaagaccatc

SEQ ID NO: 15072 - DNA, 3933 bp, Oryza sativa
  Clone ID: TFbOSC402160j.C1.o18.fg
atggtcgatggcgctgagcttgaacacctcagcaccgaccgcatcagcgctgagtacgtaacggccctaagacgaggatggacggaacggcacaatgtcagcgccgaccgcattggcgctgtgtttcaggacctcagcgccatcgggtctggcgctgaggtcctacatcccttggccgagccgcgcccagcagcccggcccttctttcttcctcctcagtggctctcggctgaggcgcagcggcgccgaaccatctctctcctcccctccaaaaaatcgaaaaaatctccactaaatcgtcgcattttggaggggaaattgttggaggacatagtggcaagagatgattcttttgacctcaatcgcacactgttttatgatgaaccaaactatgaagcatttgatgatgaaggagctatgaaaagtcagtcggttaagtctttgacagttgaggaagtcatagaatctcaagggatgggggttgatgttaacatgcaaaagaagaaagcagttgatgcaaatgagggaaggaatcaggaatctgatagggtggagataaatgtggagttgcagaaggaggaagcagttgaagcgaataaggcaaggaggcttgaatctgaaggggtggaggtaaatgtggaattgcagaaggaggaagcaacagaggtgaatgaggcaaggagtcaggtagttccgatagttggaaatcatgttgatgatgataatgaagtggcagatggatcaatggggggaggtggagaagagcgtacaacggatgctcaattagcatccttggtgcggttctgttttcgagacaaaatatatactcggagggagtgtgaggagactttgttgatgaatggattgagtgttgatttgttgcaccaacattcaaaggagtatgatgacacacatgaggaggagggatatgaggttgagtatgccgtagactcagatgacgatcatctagtagccaagatgtctcaggaagaaagggaggtgtttgagaaattagttggacgcaatccagaggttgttcagttcgaggatgttagcgattatgagctagcagttgttgatggaggagtaacatacaatggcatcatcgatgcaatgggtgaggagccaaagaatggtttggaatttaaatctcttgagctattacagatatggctgcagagttactcgatcagtgtgcatcgtccattccatgtgaagcactccaacgcttctaaaaagtacacggtggcttgcatcgaagaatcatgcgaatggcaggttcgtgcaaggaagactaaggatgggaggtggagagttaccggtgtaggcaaagagcacacatgttgtagtgctgaggcttctggcaatcacttgcaactaacttctaagttcatcggtaataggttgcaaccatttgtccgagctgagccgacattgactcatgttgctatagttgaggctgtggaggccatatggcactatcgtccttcgtacggtaaagcttggcgtgcaaagcaggtggccatgaagaacatatggggagattgggatgaggcatatgttcggctcccaacgcttctaaatgctattaaggctaagaaccccacaatgcattatgttgttgagcctcacccagagaggtcgaggccagtggatggggtaatgagacgtgtatttgggcgtgccgcatggatctttcggccggcatggactctagctggcatagctacagatcccgaggatgttgaggagatgaacgagtatgacacccacactcgagcaagagcgacggtcaagtacgggcctatacgtgaccgagtgacacgtgagctgatgaggtccgtgaacgacgtgggtgttgcccttggcacacccgctgggtcagagaatgaagttgggatacttcggagcgcacttcaaaggctaaaacaacgaagtcggatgttagcggcaagacttggttgtaggtccacagacgcagttgacccacaaccaagactaatgtggacacaggccggagaaacaagtcaacaaagagctgaagaggaaggggaggaagaatatgatgaaggggaagaagaagatggacagagtgacgaagaggaagaggaacaacccgaagaaatcgggtcatctcagcttgcaggtgccccgcagccatcgcaaccttcccagggtcgcccgcaaagaaagagggcaccggtggaccggtacacaccttccactagtggccggagagctcacccggcgactcagcatccctcgggtggcaatctcagcgccaaatcggctagcactgagatggccgacctcagcgccaggttctttggcgctgagatgcggctcagaatccctcgggtggcaatctcagcgccaaatcagatggcgctgagatggccaacctcagtgccagattttccccaatgtgaactagttgaactaagcatggctaagcaatccctagtcctaactctaatcatgttagcaccccaagttgacaaagaaacaagggctgacgtcatcaaggcggggcgcggcgccggcaagcgggacccgcatggcagtgactcggggagggcggtccacggcggatcgggtccacggaccggggaggagcggcgcaccacgcggcggccacgcgacggccgaaccgatggccccgatctacccaagggtagatcggacggcggcgggagctcgcggccgatgtttaacagagaaaaaggaaagaatgtcagcgggtatgcctcaagtaactcaagttttcaactcaatccaccactggcctcaagagagttaacaagggcacacccttggtccattccgagcatgctgcttggttcacagctaccattggttggaagtcaagaccaaaatcagtatgtgtttgatcgaacatttgccacccaggtcaatgagcttccaatgccagaagaggatgtccccttttgtcatgattgtagagaacaaggacactatgccctgaattgtccatgggtatatgtcaaagaagccccttcctttggtttagcagggcagacatcgctaaaccagcctcctcacaccaagtcaagcttgcagcctagtgtgcaaagtagagagcccaatggagagaatccatggaatcccgggaaatgctttcctcctagcctttcgtatcacgtggggtcacgtactaagcaagccaaagtcaagaagagtaagaatcagaagagaaaagcaccgatgcgaactgaagaagaagtacgtaagatgactattaccagcaccgaatggcctccagcagggataactattcctagacgtcaaagaggaaatacctttcgaggtgcccgacagttgacccagcaccttctaagccatggtggcagagtatctgatagtgaagggtcagatcaagtctcctcggatgatgaagatgagtctccccgacatgtcggcgaggaagagatggaatcaaaggcatgcacccgttgcggagaaattggacacattgctagcatgtgtctcacactctgccctcattgtgaagaagaccatccaccaggggagtgtcccacccgcaaggtcacatgttttctgtgcgaaggtacaaaccatgtgcccaaggattgccaacttagtgtgttgttgaccaagaccgcagaaatccaacgaacaactctacggttgtctcatcagctagtcagctccaacagcaacatcgacgatatcatccacaacaccaatgctcctcctgctgcacctgactctgcaataaatcatagcaataataccttcagcaccaaccattctctgcaccgacagcctcagcaaagaattgtcgttgatggaagaagttgtgtctctccccgacctactctaggccgagcaaagggcaatcaacctcaggagggcgatacgaagcagaagaccattatccgcttcaactag

SEQ ID NO: 15073 - DNA, 1410 bp, Oryza sativa
  Clone ID: TFbOSC419186j.C1.o1.np
atgtcatggcacagggctggtgtcctgctgctaggggctcaatcctgcctacctgtcccggaggttccggccgtaggtggggttgggtcggtactcttgtttatggctaggatgggttgggaactatgtcacgtcttccgtccgtataccgtggtgatgtttaatagagaaaaaggaaagaatgtcagcgggtatacctcaagtaactcaagttttcaactcaatccaccactggcctccagagagttaacaagggcacacccttggtccattccgagcatgctgcttagttcacagctaccattggttcgaagtcaagaccagaatcagtatgtgtttgatcgagcatttgccccccaggtcaatgagcttccaatgccagaagaggatgtccccttttgtcatgattgtagagaacaaggacactatgccctgaattgtccatgggtatatgccaaagaagccccttcctttggtttagcagtgcagacatcgctaaaccagcctcctcacaccaagtcaagcttgcagcctagtgtgcaaagtagagagcccaatggagagaatccattgaatcccgggaaatgctttcctcctagcctttcgtaccacgtggggtcacgtactaagcaagccaaaggcaagaagagtaagaatcagaagagaaaagcaccgatgcgaactgaagaagaagtacgtaagatgactattaccagcaccgaatggcctccagcagggataactattcctagacgtcaaagaggaaataccttccgaggtgcacgacagttgacccagcacctcctaagccatggcggcagagtatctgatagtgaagggtcagatcaagtctcctcggatgatgaagatgagtctccccgacatctcgacgaggaagagatggaatcaaaggcatgcacccgttgtggagaaattggacacattgctagcatgtgtctcacactctgcccttattgtgaagaagaccatccaccaggggagtgtcccacccgcaaggtcacatgttttctgtgcgaaggtacaaaccatgtgcccaaggattgccaactcagtgtgttgttgaccaagaccgcagaaatccaacgaacaaccctacgattgtctcatcagctagttagctccaacagcaacatcgacgatatcatccacagcaccaatgctcctcctgctgcacctgactctgcaataaatcatagcaataataccttcagcaccaaccattctctgcaccgacagcctcagcaaagaattgtcgtcgatggaagaagttgtgtctctccccgacctactccaggccgagcaaagggcaatcaacctcaggagggcgataccaagcagaagaccgttattcgcttcaaccagcaatcagaaggaagcttctcctgtgaa

SEQ ID NO: 15074 - DNA, 5577 bp, Oryza sativa
  Clone ID: TFbOSC400902j.C1.o24.fg
atggctaataagactctccgcgagttcgctgctccctctgctgacaatgtggccattgggccgcaggtcaacataggggacgtggatttcgacttgaagtccagcctcatcacgattgcgcaggcaaacccgttctgtggtgagcctaatgaggggtccaatgctgatctgcaacagttcctggagatctgtagcacgtacaacatcaagggcgtcaatcccgacaccgtcaggctgcgactgtttccgttctcccttctcgggagagcgaagcagtggttctatgtgatgaggacatcaacaccaacgatacatccacacttccacaattacaacttcatgttgcttgttcatcttgttcttgctggttctcgattgcttgcaggaacaaataccctcgtagttgggctgatcgtgcatccgtcgagattcacgaccacctctggagttggggtaacgattgctaaggcgcaacatccccggatagttgtagtcggatcgccaacgtcactccatccaatcgacttatccctctcatcgaaagatcgagacaccctcgagcacatcaggtggtatcagagcccaagttgctcgtttttctttgactcattacacagcccacccatagctccaccggttcgactaacacttgacagggattcagctaccaaggcatcaatacaccttctccagaggttcgtccaagtccgacggttgccatcacctcctgtttggcatgatgagaattggttagtgagggaccgcacacaagggctcgaggaggatgtttgtatcaccaatgaaaagcttggtcatgttgaacgcacgcaaattgattccaacaccaagcttaccaccttggaagcttctgttgcgacggtgaacaccagtcttgatggtattgtgtggcgtcttgatgagatggcccgagcatcccaccatggtagtgagatggatgaccatgactacgttggtgattctgaggatgatgcggaccagcgacgacatcgcttcaatcgccgtggtgtggctcatcgtcggccacgccgtgaggtacgaaataatgatgattcatttggtaagattaaattcactattcctgcttttgatggtaagtatgaccctgatgcctatctttcatgggagttagtagtagatcaaaagtttgcttgccatgatgttcctgaggataagagggttagggctgccaccagtgaatttactgattttgcttctgtttggtggtgtgaataccgtcgtactcatataaatgctttgccacctacttgggatgatttgaaacaaattatgcgtgctagatttgtaccttcatattatgcacgtgacatgttaaataagctgcagcaattgaaacatggtggtactagtgtggaagaatattaccaagcgctgcaaatgggtagaactccatggacggctcggagtggcgctgcccccaccgatcgttcatcagtttcgacatcgacatctgcaccctccaacagcaacagcaacaaagcgtggccaacaccttctacggcccgctctcgtgcttcagaggttgcagaaaagcccaccaagagtgcctcctctgttgcttccacgggtagaacaagagatgttcagtgccaccgatgcaagggctttaggcacatgcaacgtgactgccctagcaagcatgttttggtagtcaaggctgatggtgagtactcgtctgctagtgatttcgatgaagatacacttacattgcttgtagctaacaacatagctagcgaggatgagaaacacatcggggctgatgtagcggaccaatatgagagccttattgtgcaacgtgtcttgagtgcacaaatgggcaaagcggagcagaaccagcggcataacctttttcagacgaagtgtgtcgtccacaagcgttcctgctgcacaatcatcgatggggccagttgtaggaatttggtgagtacggagatggtcacgaagctagctttgcagatgaaaccacatccccacccatactacattcagtggttcaacaacagtggccgcattaaggtaacacaattggtgagattaaattttgcaattggttcttactgtgattttgttgattgtgatgtcgtacctatgcatgcttgctctttgctgttgggtaggccttggcaatatgataaagacacattgcatcatggtagaaccaatcaatactcctttatgcataatggaaagaaaattgtgttgcatcctttgactcctgaagctgtttttgagaataatgttgctagagctgagaaagagaaaaatgttgagcatgctaaaagtgaaaatcagattgtagcaaaagaacaagtgcaccataatttgaaaggttctcaatctaaccgtcgcaaggatagtgtgattaaattgaatggtccttgtttgcttaccactaaatctgatattgtcaatttggacacaagtgatattgtttgctatgctttcatttgcaaggatgctttgttttcttttgaaaatattcctctctcttttcctcctgcggtcactaaccttttgcaggagtatgaggatgtgttccccaaggacgtgccaccggggctgccaccggtgcgtggaattgagcatcaaaacgacttgatcccaggagcatcgttacccaaccgtgcgccataccaaaccaaccctgaggaaaccaaggagattcagcgtcaggttcaggacttgcttgacaaagggaacgggattgaggttgatcaagctaaggttgaggcaattcagagttggccgattcctaaaacgatctcacaggaagcacatggaggtggtttgatggggcattttggtgccaagaagatggtggacatccttgctgaagttgttcgcttgcatggtgtgtcaaatacaattgtttctgatcgtgacactaaatttcttagccatttttggagaactttgtgggctaaattggggactaagcttttgttttctactatttgtcatccccaaactgatggacaaactgaagtggtgaatagaaccttgtctactatggttagggctgttttgaagaaaaatatcaagatgtgggaagaatgcttgcctcatattgaatttgcttataatcgttccttgcattctactacaaagatgtgcccatttcagattgtgtatggtttgttgcctcgtgctcccattgatttgatgcctttgccatcttctgaaaaaatgaattttgatgctaagcttttgttttctactacttgtcatccccaaactgatggacaaactgaactggtgaatagaaccttgtctactatggttagggctgtttcgaagaaaaatatcaagatgtgggaagaatgcttgcctcatattgaatttgcttataatcgttccttgcattctactacaaagatgtgcccatttcagattgtgtatggtttgttgcctcgtgctcccattgatttgatgcctttgccatcttctgaaaaaatgaattttgatgctaagcaacatgctgagttgatgttaaaactgcatgagacaactaaagaaaacatcgagcgcatgaatgctaagtataagtttgctggtgacaaaggtagaagggaattgaattttgaacctggagatttggtttggttgcatttgcgaaaagaacggtttcctgacttgagaaaatcaaaattgacgcctagagctgatggtcgatttaaagtgttagccaaaattaatgagaatgcatataagcttgatttgcttgcagattatggggttagtctcacaattaacgttgcagatttgaagccatatttgggcgcagaagatgaacttgagtcgaggacgattcaaatgcaagaaagggaggatgatgaggacatcaacaccaacggtacatccacgcttccacaagtacaacttcatggtcctattacccgcgatcatgcacgtcaactcaactatcaggaacaatggagattatcaaatggggagaggaatcgcacgggatggattcggactgcagcacagcacaaacttctgacggccgccacgacctcatgcgaactccgatttgggcgtgcaagaacaaataccctcgtgcttgggctgatcgtgcatccgtcgagattcacgactgcctctagagttcgtgtaacgattgttaaggcgcagcatccctggatagttgtagtcggatcgccaatgtcactccgtccaatcgacttatccctctcatcgaaagatcgggacatcctcgagcacatcactatgcaaaccgtgctgctgtcaatacctaggacaaatgctctacgacattcctctcaaaattcttcccgatgggcaaaaaccaatgcccttcgtggaaggattttaagtttccagcagacaagggatgagtctattccggaagcatgggaacgactgcaggaactcaccccgatgtcccacgatcacctggacgcggaagctggaggagctttcttctctaaaacggttcaaggagctgttgatctaatagagaagatggtctccaatatgggttggagcgaggaacgacaccagacccgtcagcgaggcatgcacaccgtcaaggagacggagttacttgctgccaagctggacctcctcatgaagcgattggacgaccacgagaaatggccacaaggtaccatcaaggccttggactctcacgtcacatgtgaggtctgtggcggcacgggtcattctgggaatgactgcccggaaacccgtgaggaggcgatatacatgggcaacaacaacaacgggtatcgtccacaaggaggtcatgggtggaaccaaccacgcccatattatcaaggaggtaacaacaacggtaatttttctaaccagccctccttgagggatctcatttttgcacaagctaaaaccaccgatgcactaagcagaaaacttgcggccaatgacaaggtcctagaaaacataaatgtcaagttagatggctttgcttctgcttttcaaaatcagctgagctttaataaaatgatagaaacccagctagctcagttggcatccttagtccctgcaaatgaaactgggaggatcccggggcaaccctactcctccattgaaaatgtcaaggcggtcatgacgaggggaggtaagtccactcgtgatccgccatatcctaaccatgcaggaactaatgggatatcaaaagaagtgccatctaatgattcggctgacaaggaagttccgctagaaaagacagtgccgcaagagtactgcgacacacggttgctgttgttccctcaacgaagtaggaaaccgtcagtggacgagcaattcgctcgttttgttgaagtaatccagaagatccacatcaacgtgccgttgttggacgccatgcaagtgccaacatacgcccattatctcaataatatactcaacaacaagagaccgctcccaacaatggaggtggtcaagccgacggaacaatgcagcaacgtaatactccacaagctcccgggaaagtatgatccacagtcagactatccgaaaatatcagatagtctaatgttggatcagactgtctga

SEQ ID NO: 15075 - DNA, 1665 bp, Oryza sativa
  Clone ID: TFbOSC2463j.C1.o1.fg
atggctgacaatgagaaaggcaataaggtcagaagtcaggacattggtatctcaagctcccgagtgaatgaagcaccagacaccagttgtgtgacactggtccaacacctgattaaccagaaccaattgcttatagagatactacagcagcatcagacgccaattctgaacctaagtcagatacaacctcaagcgcagttggaggcagtccaagcactcacaccacaagtcagcatgccgccagcatcccgaaggacccatggtgaagtgccacatgttgactcaaaagaagcaagtatcatttgttttatgtgtgatgagcaagggctctatgcaagggagtgtcctcagcagaaaagaaaaacaccaatgcgaaccgaagatgaagtccgtaagatgagcattaccagcacagaatggcctccaccaggaatgacaaaacgtcagagaagaaataccttccgaggtgcgccacagttgacagagcatcttttagctaatggaggtagagtgtctgatagtgaagattcagatcaagtctcctcagatgatgaagatgagaagtctccccaaggtttcaaccagaataaaatggaacgtaaggcatgctctcgttgtggagaaatcggtcatgttgccagctcgtgtgccactacatgcgttcattgtgaggaagaccatccacccgacaggtgtccaacgagcaggatcacttgtttcttttgtgaaggaactgatcatgtcccaaaagattgtcaattcagttttctgctgacgaagaagacggccaaccaacccgccagttccaatggagagaagtatcaaggcaacacaaatcctcaccaagattacagttttagcctaactccagtgccaggacagaggaatcaaaatgagaaaagaaaatgccgagtccggaaagatatctgttgcttcaattgtcaaggaatgggtcatttcgccgacaagtgcccaaaaccgagaaacatagctgccagcacgtcagtccacgcaactccctgcaatcagaagcttgctcctcagcgaactgtcatccatgcatcccgaagcagtcctacagcccgcgttgcaacagctccaactccagcgagtgcattaccacaagatgtcactgcccaatttcagccccagccatcagttgacgagaccgaggccagtatcggcattgtacctttggatgttccagcacagcagccaagaaatcaagtacaagatgaagaacccgagcataagaaagttattaggcatgcacccgttgtggagaaactggacacgttgctggcatgtgtctcacactctgctctcactatgaagaagaccatccaccaggggagtgtcccactcgcaagcctcagcaaagaattgtcatcgatggaagaagttgtgtccctccccgacctactccaggccgagcaaagggcaatcaacctccggagggcgataccaagcagaagaccgtcatccgcttcaaacagcaatcagaaggaagcttctcctatgaatgatagcaatatgcagtcctatcacatcatcacagaaccaatcaaggatgatgcagtcactagaacaatgccagctatatctctccagaaacaaaatgagcagctacgcttgtggttttcagttcgctacttatcactgtaa

SEQ ID NO: 15076 - DNA, 1362 bp, Oryza sativa
  Clone ID: TFbOSC404799j.C1.o20.fg
atggctgacaatgagaaaggcaataaggtcagaagtcaggacattggtacctcaagctcccgagtgaatgaagcaccagacaccagttgtgcggcagtggtccaacacctgattaaccagaacaaattgcttatagaaatactacagcagcatcggatgccaactttgaacccgagtcagatgcaacctcaagtgcagttggaggcagtccaagcactcacaccacaagtcagcgcaccgccaacatcccagaaggcccctcatgccatgccacatgttgactcaaaagaagcaagtatcatctgttttaggtgtgatgagcaagggcactatgcaaggaactgtcctcagcagaaaagaaaagcaccaatgcgaaccgaagatgaagtccgtaagatgatcattaccagcacagaatggcctccaccaggaatgacaaaacatcagagaagaaattccttccgaggtgcacaacagttgacagagcatcttttagctaatggaggtagagtgtctgatagtgaagattcagatcaagtctcctcagatgatgaaggtgcgaagcctccccaaggttttaaccagaataaaatagaacttaaggcatgctctcgttgtggagaaatcggtcatgttgccagctcgtgtgcctctacatgcgttcattgtgaggaagaccatccacccgacagttttctgctaacgaagaagatggccaaccaacccgccagttccaacggagagaagcatcaaggaaacacaaatcctcgccaagattccagtttcagcctaactccagtgccaggacagaggaatcgaaatgagaaaagaaaatgccgagtccgggaagacatctgttgcttcaattgtcaaggaatgggtcatttcgccgacaagtgcccaaaaccgagaaacatagctgccggcacgtcagtccacgcaactccctgcaatcagaagcttgctcctcaacgaattgtcatccatgcatcccgaagcagtcctatagcccgcgttgcaacagctccaactccaatgagtgcactaccacaaggtgtcaatgctcaatttcagccccagccaccagctgacaagacagaggccagtatctgcgttgtacctttagaagttccaatacagcagctgagaaatcaagtacaagatgaagaacccgagtgtaagaaagttattgtttgttacaactgcagtgaagaagggcattactccaaaaactgtccccaaccaaggcaaaatcgacctccacattaccgccaatttacacgaagcagacattccaatcgtattgtggtcactggagcaaacgccgtacccgtaaggcctcgtgttaatcagaacccatag

SEQ ID NO: 15077 - DNA, 1809 bp, Oryza sativa
  Clone ID: TFbOSC401368j.C1.o29.gm
atgtcgataaccggcgacaacaacaacactggagacaaggagaaggagcctcccgtcaacagcaacagaggcaatactacctcaaactccagcaaatggccattctcgggtgtgctccccgatagtattgtggatgtgtatatgcacatgcctttagggaaggacatgtgggatgctcttgaggccaagttcggggtttccgacgccggcagcgatctgtatgtcatggagctgttctatgactacaagatggtcgatggccgttctgtattggaacaggatcatgagattcagatgttggcaaaggaacttgagaacaacaactgtgagttgtcggacaagtttgtggcaggtggcattattgccaaattgccaccttcttggacggactttgctacttctctaaaacacaagaggcaagagttcagtgttactgatcttattggctctttgggtgttgaggagaaggcgagggcaaaggacaaccggggcaaaaagatcgagggaggttctagcgccaatttggtgcagaagaagaaccctcacgcatctcacaacaacaacaagaaagtcaagcctgatgtcaaaccaaaggcaactaccaattttaagaagaaaggcaagcgaaaggccaaaggcgtctgctttgtgtgcggtaagcctgggcattgggccaagaattgtccttatcgcaaggacaagaagtctgccaacatggtcattagcgagggcggaggaacattggggttcttaatagtaaattctggagtacccgacatgagtgttggtacaattactgagtccagagatgccacattttttgagaatgaattttctatgaaaaatgcacctagcacttctagtcaagaacctattttatcccctgagcactttgcgctgatagaacacattgatcaaacacttgaggaaaatcctgaggaggataacattttagcaactcgaaagagtaagagacaaaggactgcaaagtcttttggagatgactacattgtatatcttgtggatgatactccaagaaccattgaagaggcatattcatcttctgacgctgactattggaaggaagcgatacgcagtgagatggactcaattatgtctaatggtacttgggaagtcgtcgagcgtccatatgggtgcaagcctgtaggatgcaaatgggttttcaagaaaaagcttaggcttgatggtacaattgaaaagtacaaggcaaggcttgtggccaaggggacaatgagctatggaattcactacgccgggtacccaaaagtgctggagggctatagtgattcaaactggatatctgatgctgatgagataaaggctacaagtggcgggcgactccattccacaggcatccttgacggcagcgacgaaaccaacctcttcgagacatcttcaactgagaaggacttcaactctggcaacgggcagcccccctttcgtgccgcggtgaatccggaagctgatcaaccggacaccccggccgacccaactccatcacgcccaccctcgcctggggctgacgtcatcaaggcggggcgcggcgccgacatgcgggccccaccggtccacggaccggggaggagcggcgcgccacgcggcggccgaaccgatggccccgatctacccaagggtagatcggacggcggcgggagctcgcggccggtgcgcgtgggcacggcgcaaaccggcccggcgaccatggcgcgcgacggcgcggcgcacatgcggcagcggcgcaagacggcggccgacgacgaccgaccggcgacggagagcggcggctag

SEQ ID NO: 15078 - DNA, 4125 bp, Oryza sativa
  Clone ID: TFbOSC101037j.C1.o2.np
atgagggcacaagtgagtacaaggatgccaagcttcatttcgtcaagatccaatatgagacattctccatgttgcctcatgagagtgtgaatgacatgtatgggaggctcaatgttattgtgaatgatctcaaggggcttggggcaaactacaccgatcttgaggttgcccaaaagatgcttagggctctaccagagaagtatgagacccttgtcaccatgctcatcaactccgacaagtcaaggatgacaccggcaagcctcttggggaagatcaacaccaatgacatgtacaagttgaagaagaaggagatggaggaagcctcaccttccaagaagtgcattgctctccaagctgaagttgaggacaagggcaagggcaaggtgaatgaagccaatgaggacttggaggaagagattgcccttcttgctagaaggttcaatgatctcttgggaaggagaaaggagagaggaaggggctcaaactcaaataggagaagaaatagaagacccaacaagactctctccaacttgaggtgctttgagtgtggtgagaagggacactttgcttccaagtgcccttccaaagatgatgatggagacaagtcatccaagaagaagagtggaggatacaagctcatgaagaagctcaagaactccgcctcatccgggtccgaggaagaaggtggtgatgatgcaagctccaagaagaagaagatggccgttgttgccatcaaggaggctctatcactcttcgctccactttgtctcatggcaaagggttcctctaaggtaacatctcttagtgatagtgagagtaatgataattgtaatgatgtttcctatgatgagcttgtgagtatgtttgaggagctccatgcttatagtgagaaaaagattgtcaagttcatggccctaaagaaggatcatgcttctttggaggtcttgtatgaggagctaaagacttctcatgagagactcaccatttctcctgagaagcttaaggaagctcatgacaacctcctttccactactcaacatgaagctctcattgatgttggcatatcttgtgatttgcttgatgatagtgctacttgccatattgctcatgttgcatcatctagcatttctacctcttgtgatgatcttgtggatatgtctagctctagatctagctcttgtgtttctatttgtgatgtctcacttgttgttgagaacaatgagcttaaggagcaagtggctaagctcaacaagagcttggagaggtgcttcaagggtaagaacactcttgacaagattttgagtgagcaatggtgcatccttaacaaggagggacttggattcattccaaagaagggtaagaaaccttctcactgtgccactcgttttgtcaagagcaatggaaggctcatgatggtagcattgttgctagatatgtgggttcccctatactcggtggtgaactaccgcaccggtgggagccattgggtgcttgacagtggatgcactcaacacatgatagggctatgttcaccacatttgaggtaggaggaaatgaacaagagaaagtgacatttggagacaatagcaaaggaaaggtaattgggttaggtaaaattgctatctccaatgatttgtcaattgataatgtctctcttgttaaatctctaaattttaatttgctttcggttgctcaaatttgtgatcttggcttgtcatgtgctttcttcccgcaagaagttattgtttctagccttcttgacaagtcttgtgtattcaaaggttttagatatggaaatctttatttggttgatttcaattctagtgaagcaaatttgaaaacttgtttagttgcaaaaacttcattgggttggctttagcataggaggctagcccatgttggcatgaatcaattgagcaaactttcaaaacgtgatctagttgtgggcttgaaagatgtgaagtttgagaaatataagctttgtagtgcttgtcaagccggcaagcaaattgcatgttctcatcctactaagagtatcatgtctacatcgagactattggagctcttgcatatggatttgtttggcccaacaacctataagagcattggtggtaatagtcattgtcttgtgattgttgatgattattctcgctatacttgggtgttctttttgcatgtcaagtctatcgttgccgagcttttcaaaaagtttgcaaaagggcccaaaataaatttaattgcactcttgtgaaaataagaagtgacaatggttccgagtttaagaataccaatatcgaggactattgtgatgatcttggttatgcctcaaatagcaaggtataccgggtctacaacaagaacaaaggtattgtggaagaaaccgccgatgttcaatttgatgagactaatggctcccaagagggacatgagaatttggatgatgtaggtgatgaaggcttgatgagagctatgaagaacatgtccattggagatgtcaagcctattgaagtggaagacaagccatccacctccactcaagatgagccgtctacttccgctatgccaagtcaagcttaagttgaagtggaggaggagaaggcacaagatccacctatgcctctaaggatacacaccgctctttccaaggatcacccaattgaccaagtgttgggtgacattagtaagggtgttcaaactcgatctcgtgtcgcttcgatttgtgaactttactcatttgtttcttgtcttgagccaaaacatgtagatgaagctccttgtgatccggattggatgaatgctatgcatgaagaactcaacaactttgcaagaaacaaggtgtggactttggttgaaagacctagagaccacaatgtcatagggacaaagtgggtctttaggaacaaacaagacgagaacgggttggtggtgagaaacaaggtaaggttagtggcacaaggtttcacacaagttgaaggtttggacttcggtgaaacttttgcccccgtggcaagacttgaggatattcgcatccttcttacatttgcatcatgctttgatataaaactatttcaaatagatgtgaaaagtgcttttctaaatgatttcaaaattggaaaagttgacaccaccattttcacaaaaatcattggtgatgatttctttgtgtgtcaaatttatgttgatgacatcatattcggttctactaatgaggtattttgcaaggaatttggtgatatgatgtctagggaatttgagatgtccatgattagagagttgagcttcttccttggacttcaaatcaagcaactcaaggatgggacgttcgtgagccaaaccaagtacatcaaggatctactcaagaggtttagcttggaggatgcgaagcccatcaagacacctatggcaaccaacgggcatttcgaccttgatgagggaggtaaaccggtagatttaaagctttatcgttctatgattggtagcttgctttaccttaccgcatctaggccggatatcatgtttagtgtttgcatgtgtgcacggtttcaagccgctcctaaggagtgtcacttagtggccgtgaaaaggattctaagatatttaaagcattcctgtactattggcttgtggtacccaaaaggtgctaagtttaagcttgttggctattccgattcggattatgccggttgcaaagtggatagaaagagcacatccggtagttgccaaatgcttggtagatcccttgtgtcatggtcatccaagaaacaaaactccgtagacctctctaccgccgaggcagaatatgtttcggcgggtagttattgtgcccaattgctttggatgaaacaaacattgttggactatggcatatccttcaccaaaaccacactcctatgtgacaatgatagtgccataaagatagccaataacccggtccaacattctagaaccaagcatattgacatacgccatcacttcctaagacaccatgttgccaagtgtgacatagtcattagccacataagaaccgaggatcaactagccgacatctttaccaagcctcttgatgaaacccacttttgcaagttgaggaatgagttaaatgtcatagacttctctaatgtggct

SEQ ID NO: 15079 - DNA, 4125 bp, Oryza sativa; identical to SEQ ID NO: 15078
  Clone ID: TFbOSC13136j.C1.o2.np

SEQ ID NO: 15080 - DNA, 4278 bp, Oryza sativa
  Clone ID: TFbOSC400450j.C1.o1.gm
atgggccgctcccgccttgcccaccccttgacgaaaggggcgtgcggtggtttcgtggttgagcggtggagttgggctcgcctcaacgggggcttggtctctcttgattgggcttcaccgcctagagagaagatgtcgaacgaggtgaaccatgtagggaaggctcccatgtttaatggcacaaactattccacttggaaaattaaaatgtctactcacctcaaagctatgagcttccatatttggagtattgtggatgtaggctttgctatcaacggcacacccttgacggagattgatcaccgcaacctccaactcaatgcccaagccatgaatgctttgttcaactctttgagccaagaggagtttgatagagtgagcaaccttgagaccgcatatgagatttggaacaagttggcggagatccatgagggcacaagtgagtacaaggatgccaagcttcatttcgtcaagatccaatatgagacattctccatgttgcctcatgagagtgtgaatgacatgtatgggaggctcaatgttattgtgaatgatctcaaggggcttggggcaaactacaccgatcttgaggttgcccaaaagatgcttagggctctaccagagaagtatgagacccttgtcaccatgctcatcaactccgacaagtcaaggatgacaccggcaagcctcttggggaagatcaacaccaatgacatgtacaagttgaagaagaaggagatggaggaagcctcaccttccaagaagtgcattgctctccaagctgaagttgaggacaagggcaagggcaaggtgaatgaagccaatgaggacttggaggaagagattgcccttcttgctagaaggttcaatgatctcttgggaaggagaaaggagagaggaaggggctcaaactcaaataggagaagaaatagaagacccaacaagactctctccaacttgaggtgctttgagtgtggtgagaagggacactttgcttccaagtgcccttccaaagatgatgatggagacaagtcatccaagaagaagagtggaggatacaagctcatgaagaagctcaagaaggaaggcaagaagattgaagccttcatcggggaatgggactcaaatgaggagagctccgcctcatccgggtccgaggaagaaggtggtgatgatgcaagctccaagaagaagaagatggccgttgttgccatcaaggaggctctatcactcttcgctccactttgtctcatggcaaagggttcctctaaggtaacatctcttagtgatagtgagagtaatgataattgtaatgatgtttcctatgatgagcttgtgagtatgtttgaggagctccatgcttatagtgagaaaaagattgtcaagttcatggccctaaagaaggatcatgcttctttggaggtcttgtatgaggagctaaagacttctcatgagagactcaccatgtggatattatggctttccggtcgatcggccgcgagtccactctgccggcttgtcttcgccaccgccattgctgataacaacaacgacttcaccgaccggcccgcctccgtcgccgccgagtggtgcctccgcctacacggctggcctattatgccgccgctgttgggcgtctacgacttcaccgccggcctgcctccgtcgccgccgagtggcgtctacgacttcaccgccggcctgcctcgtccgccgccgactggtgcctccgcctacacggctggcctattatgccgccgctgttgggcgtctacgacttcaccgaccggccgcctcgtccgccgccgactggtgtcctcgccggcacggctggcctattatgccgccgctgttgggcgtctacgacttcaccgccggcgtgcctccgtcgccgccgagtggtgcctccgcctacacggctggcctattatgccgccgctgttgggcgtctacgacttcaccgccggcctgcctccgtcgccgccgattggtgcctccgcctacacggctggcctattatgccgccgctgttgggcgtctacgacttcaccgccggcctgcctccgtcgccgccgagtggtgcctccgcctacacggctggcctattatgccgccgctgttgggcgtctacgacttcaccgccggcctgcctccgtcgccgccgagtggtgcctccgcctacacggctggcctattatgccgccgctgttaggcgtctacgacttcaccgccggcctgcctccgtcgccgccgattggtgcctccgcctacacggctggcctattatgccgccgctgttgggcgtctacgacttcaccgccggcctgcctccgtcgccgccgattggtgcctccgcctacacggctggcctattatgccgccgctgttgggcgtctacgacttcaccgccggcctgcctccgtcgccgccgattggtgcctccgcctacacggctggcctattatgccgccgctgttgggcgtctacgacttcaccgccggcctgcctccgtcgccgccgagtggtgtccccgcctatacggaatggatcagtcagaacatcaccaccggccgcctcgtccgccgccgactagtgttttcgcctgcacggttggcctattatgccgccgttgttgggcgtctacgtcttcaccgaccggcttgccttcgccgccgccgactggtgtttccgcctgcacggctggcctttatgccgccgttgttgggcgtctacgtcttcaccgaccggccgcctcgtccgccgccgactggtgcttccgcctgcacggctggcctttatgccgccgttgttgggcgtctacgtcttcaccgaccggccgcctcgtccgccgccgactggtgcttccgcctgcacggctggcctttatgccgccgttgttgggcgtctacgtcttcaccgactggcttgccttcgccgctgccgactggtgtttccgcctgcacggctggcctttatgccgccgttgttgggcgtctaagtcttcaccgaccggccgcctcgtccgccgccgactggtgcttccgcctgcacggctggcctattatgccgccgttgttgggcgtctacgtcttcaccgaccggcttgccttcgccgccgccgactggtgtttccgcctgcacggctggcctttatgccgccgttgttgggcgtctgcgtcttcaccgaccggcttgccttcgccgccgccgactggtgtttccgcctgcacggctggcctttatgccgacgttgttgggcgtctacgtcttcaccgaccggccgcctcgtccgccgccgactggtgcttccgcctgcacggctggcctattatgccgccgttgttgggcgtctacgtcttcaccgaccggcttgccttcgccgccgccgactggtgtttccgcctgcacggctggcctttatgccgccgttgttgggcgtctacgtcttcaccgaccggcttgccttcgccgccgccgactggtgtttccgcctgcacggctggcctttatgccgccgttgttgggcgtctacgtcttcaccgaccggccgcctcgtccgccgccgactggtgcttccgcctgcacggctggcctattatgccgccgttgttgggcgtctacgtcgtcaccgaccggccacctcgaccgccgccgactgtcaaggtgctgtttgggtttatcaagcaattgattggatacaatatcattgctttttgccacccctccacagtcttcagatttggtaaaagtactcgggagaccatgacaaagatgattgaagcactcggctttggagtaatctgctcttgtgtttctatttgtgatgtctcacttgttgttgagaacaatgagcttaaggagcaagtggctaagctcaacaagagcttggagaggtgcttcaagggtaagaacactcttgacaagattttgagtgagcaatggtgcatccttaacaaggagggacttggattcattccaaagaagggtaagaaaccttctcactgtgccactcgttttgtcaagagcaatggtaagtattgctccaagtgtcgtgaggttgggcatttggtgaatgattgccctggtggttatgcctcaaatagcaaggtataccgggtctacaacaagaacaaaggtattgtggaagaaaccgccgatgttcaatttgatgagactaatggctcccaagagggacatgagaatttggatgatgtaggtgatgaaggcttgatgagagctatgaagaacatgtccattggagatgtcaagcctattgaa

SEQ ID NO: 15081 - DNA, 4713 bp, Oryza sativa
  Clone ID: TFbOSC408405j.C1.o11.fg
atgagcttccatatttggagtattgtggatgtaggctttgctatcaccggcacgtccttgacggagattgataaccgcaacctccaactcaatgcccaagccatgaatgctttgttcaactctttgagccaagaggagtttgatagagtgagcaaccttgagaccgcatatgagatttggaacaagttggcggagatccatgaggacacaagtgagtacaaggatgccaagcttcatttcctcaagatccaatatgagacattctccatgttgcctcatgagagtgtgaatgacatgtatgggaggctcaatgtcattgtgaatgatctcaaggggcttggggtaaactacaccgatcttgaggttgcccaaaagatgcttagggctctaccagagaagtatgagacccttgtcaccatgctcatcaattccgatatgtcaaggatgacacccgcaagcctcttggggaagatcaacaccaatgacatgtacaagttgaagaagaaggagatggaggaagcctcaccttccaagaagtgtattgctctccaagccgaagttgaagacaagggcaagggtaaggtgaatgaagccaatgaggacttggaggaagagattgcccttcttgctagaaggttcaatgatctcttgggaaggagaaaggagagaggaaggggctccaactccaataggagaagaaatagaagacccaacaagactctctccaacttgaggtgctttgagtgtggtgagaagggacactttgcttccaagtgcccttccaaggatgatgatggggacaagtcatccaagaagaagagtggaggctacaagctcatgaagaagctcaagaaggaaggcaagaagattgaggccttcatcggggaatgggactcaaatgaggagagctccgcctcatccgggtccgaggaagaaggtggtgatgatgcaagctccaagaagaagaagatggccgttgttgccatcaaggtaacatctcttagtgatagtgagagtgatgatgattgtgatgatgtttcctatgatgagcttgtcttgtatgaggagctaaagacttctcatgagagactcaccatttctcatgagaagcttaaggaagctcatgacaacctcatttccactactcaacttggagctctcattgatgttggcatatcttgtgatttgcttgatgatagtgctactcgccatattgctcatgttgcatcatctagcatttctacctcttgtgatgatcttgtggatatgtctagctctagctctagctcttgtgtttctatttgtgatgcctcacttgttgttgagaagaatgagcttaaggagcaaatggctaagctcaacaagagcttggagaggtgcttcaagggtaagaacactcttgacaagattttgagtgagcaacggtgcatccttaacaaggagggacttggattcattccaaagaagggtaagaaaccttctcaccgtgccactcgttttgttaagagcaatggtaagtattgctccaagtgtcgtgaggttggacatttggtgaatgattgccccggtggtaagcctcctaagacttgcatgtttgattctcattatatgcttaggaaggcttatgatgcaagcattgttgctagatatgtggattaccctatactcggtggaaaaaagaatgccatttgggtgcccaaagctttggtctctaacctccaagtgaactaccacaccggtgggagccattgggtgcttgatagtggatgcactcaacacatgaccggtgatagggctatgttcaccacatttgaagtaggagggaatgaacaagagaaagtgacatttggagacaatagcaaaggaaaggtaattgggttaggtaaaattgctatctccaatgatttgtcaattgataatgtctctcttgttaaatccctaaatttcaatttgctttcggtcgctcaaatttgtgatcttggcttgtcatgtgctttcttcccgcaagaagttattgtttctagccttcttgacaagtcttgtgtgttcaaaggttttagatatggaaatctttatttggttgattttaattctagtgaagcaaatttgaaaacttgtttagttgcaaaaacttcgttgggttggctttggcataggaggctagcccatgttggcatgaatcaattgagtaaactttcaaaacgtgatctagttgtgggcttaaaaaatgtgaagtttgagaaagataagctttgtagtgcttgtcaagccggcaagcaagttgcatgttctcatcctactaaaagtatcatgtccacatctagaccattggagctcttgcatatggatttgtttggcccaacaacctataagagcattggtggtaatagtcattgtcttgtgattgttgatgattattctcgctatacttgggtgttctttttgcatgacaagtctattgttgccgagcttttcaaaaagtttgcaaaaagggtccaaaatgaatttaattgcactattgtgaaaattataagtgacaatggttccgagtttaagaataccaatatcgaggactattgtgatgatcttggtatcaaacacgaactttccgctacctactcaccccaacaaaatggtgtaatggagaggaaaaatcgtacattgattgagatggcatggactatgcttgatgaatatggtgtttccgatttcttttgggtggaagccataaacaccgcttgccatgcaaccaataggctttatttgcatcgtctcttgaaaaagacttcctatgagctaattgttgggaggaagccaaatgttgcctattttcgagtttttggttgcaaatgttatatttaccgaaagggtgttagactaaccaaatttgaaagtcggtgtgatgaagggtttcttctaggttatgcctcaaaaagcaaggcataccgggtctacaacaagaacaaaggtattgtggaagaaaccgccgatgttcaatttgatgagactaatggctcccaagaagggtacgagaatttggatgatgtatgtgatgaaggcttgatgagagctatgaagaacatgtctattggagatgtcaagcctattgaagtggaagacaagccatccacctccactcaagatgagccatctacttccgctacgccaagtcaagctcaagttgaagtggaggaggagaaggcacaagatccacctatgcctccaaggatacacaccgctctttccaaggatcacccaattgaccaagtgttgggtgacattagtaagggtgttcaaactcgatctcgtgtcgcttcgatttgtgaacattactcgtttgtttcttgtcttgagccaaaacatgtagatgaagctctttgtgatccggattggatgaatgctatgcatgaagagctcaacaactttgcaagaaacaaggtgtggactttggttgaaagacctagagaccacaatgtcatagggacaaagtgggtctttaggaacaaacacgatgagaacgggttggtggtgagaaacaaggcaaggttggtggcacaaggtttcacacaagttgaagatcctaaaaatcctaaacatgtttacaaactctcaaaagctctttatggtttaaaacaagctcctagggcttggtatgaaagattgagagattttcttttgtcaaaggatttcaaaattggaaaagttgacaccacccttttcacaaaaatcattggtgatgatttctttgtgtgtcaaatttatgttgatgacatcatattcggttctactaatgaggtattttgcaaggaatttggtgatatgatgtctagggaatttgagatgtccatgattggagagttgagcttcttccttggacttcaaattaagcaactcaaggatgggacgttcgtgagcaaaaccaagtacatcaaggatctactcaagaggtttggcttggaggatgcgaagcccatcaagacacctatggcaaccaacgggtatcttgaccttgatgagggaggtaaaccggtagatttaaagctttatcgttctatgattggtagcttgctttaccttaccgcatctaggccggatatcatgtttagtgtttgcatgtgtgcacgatttcaagccgctcctaaggagtgtcacttagtggccatgaaaaggattctaagatatttaaagcattcctctactattggcttgtggtacccaaaaggtgctaagtttaagcttgttggctattccgattcggattatgccggttgcaaagtggatagaaagagcacatctggtagttgccaaatgcttggtagatcccttgtgtcatggtcatccaagaaacaaaactccgtagccctctctaccgccgaggcggaatatgtttcggtgtgtagttgttgtgcccaattgctttggatgaaacaaacattgttggactatggcatatccttcaccaaaaccccactcctatgtgacaatgatagtgccataaagatagccaataacccggtccaacattctagaaccaagcatattgacatacgccatcacttcctaagagaccatgttgccaagtgtgacatagtcattagccacataagaaccgaggatcaactagccgacatctttaccaagcctcttgatgaaacccgcttttgcaagttgaggaatgagttaaatgtcatagacttctctaatgtggcttga

SEQ ID NO: 15082 - DNA, 4931 bp, Oryza sativa
  Clone ID: TFbOSC900301j.C1.o6.np
attatgtgtgcgcatggatgtctacctatggattaaaaattgacggcacaaagctaaaggaagagaagacggtaaacttgtgttttcatttgaaattgattgaggctttgttcaactctttgagccaagaggaattcgatagagtgagcaaccttgagaccgcatatgagatttagaacaagttggcggagatccatgagggcacaagcgagtacaaggatgccaagcttcatttcctcaagatccaatatgagacattctccatgttgcctcattagagtgtgaatgacatgtatgggaggctcaatgtcattgtgaatgatcttaaggggcttggggcaaactacaccgattttgaggttgcccaaaagatgcttagggctctaccggagaagtatgagacccttgtcaccatgctcatcaactccgacatgtcaaggatgacacccgcaagcctcttggggaagatcaacaccaatgacatgtacaagttgaagaaggagatggaggaagcctcaccttccaagaagtgcattgctctccaagccgaagttgaagacaagggcaagggcaaggtgaataaagccaatgaggacttggaggaagagattgccctttttgctagaaggttcaatgatcacttgggaaggagaaaggagagaggaaggggctccaactccaataggagaagaaatagaagacccaacaagactctctccaacttgaggtgctttgagtgtggtgagaagggacactttgcttccaagtgcccttccaaggatgatgatggagacaagtcatccaagaagaagagtggaggctacgagctcatgaagaagctcaagaaggaaaggaagaagattgaggccttcatcggggaatgggactcaaatgaggagagcttagcctcatccaggtctgaggaagaaggtggtgatgatgcaagctccaagaagaagaagatggccgttgttaccatcaaggaggctccatcactcttcgctccactttgtctcatggcaaagggctcctctaaggtaacatctcttagtgatagtgagagtgatgataattgtgatgatgtttcctatgatgagcttgtgagtatgtttgaggagctccatgcttatagtgagaaggagattgcaagttcaaagccctaaagaaggatcatgcttctttggagatcttgtatgaggagctaaagacctctcatgagagactcatcatttctcatgagaagcttaaggaagctcatgacaacctcctttccactactcaacatggagctcgcattgatgttggcatatcttgtgatttgcttgatgatagtgctacttgctatattgctcatgttgcatcatctagcatttctacctcttgtgatgatcttgtggatatgcctagctctagctcttgtgtttcgatttgtgatgtctcacttgttgttgagaacaatgagcttaaggagcaagtggccaagctcaacaagagtttggagaggtgcttcaagggtaagaacactcttgacaagattttgagtgagcaacgatgcatccttagcaaggagggacttggattcattctaaagaagggtaagaaaccttctcaccgtgccactcgttttgtcaagagcaatggtaagtattgctccaagtgtcgtgaggttgggcatttggtgaatgattgccccggtggtaagctttctaagacatgcatgtttgattctcattatatgcttaggaaggctcatgatggtagtattgttgctagatatgtgggttcccctatacttggtggtaaaaagaataccatttgggtgtccaaagctttgatctctaacctccaaggacccaaatatgtttggattattctcgctatacttgggtgtttttttgcatgacaagtctattgttgccgagcttttcaaaaagtttgcaaaaagggcccaaaatgaatttaattgcactcttttgaaaattagaagtgacgatggttccgagtttaagaataccaatatcgaggactattgtgatgatcttggtattaaacacgaactttccgctacctactcacctcaacaaaatggtgtagtggagaggaaaaatcgtacattgattgagatggcaaggactatgcttaatgaatatggtgtttccgattccttttgggtggaagccataaacactgcttgccatgcaaccaataggctttatttgcatcgtcttttgaaaaagacttcctatgagctaattgttgggaggaagccaaatgttgcctattttcgagtttttggttgcaagtgttatatttactaaaaggatgttagactaaccaaatttgaaagtcggtgtgatgaagggtttcttctaggttatgcctcaaatacccgggtctacaacaagaacaaaggtgatgaaggcttgatgagagctatgaagaacatgtctattggagatgtcaagcctattgaagtggaagacaagccatccacctccactcaagatgagccatctacttccgcttcgccaagtcaagctcaagttgaagtggaggaggagaaggcacaagatccacctatgtcaccaaggatacacaccgctctttccaaggatcacccaattgatcaagcgtcgggtgacattagtaagggtgttcaaactcgatctcgtgttgcttcgatttgtgaacattactcgtttgtttcttgtcttgagccaaaacatgtagatgagctctttgtgatccggattggatgaattctatgcatgaagagctcaacaactttgcaagaaacaaggtgtggactttggttgaaagacctaaagaccacaatgtcatagggacaaagtgggtctttaggaacaaacaagatgagaacgggttggtggtgagaaacaaggcaagattggtggcgcaaggtttcacacaagttgaaggtttggactttggggaaactgttgcccccgtggcaagactagaggttattcgcatccttcttgcatttgcattatgctttgatataaaactatttcaaatggatgtgaaaagtgtttttctaaatggtgaaattgccgaacttgtctttgttgaacaacctcccggttttaaagatcctaaaaatcctaaccatgtttataaactatcaaaagctctttatggtttaaaacaagctcctagggcttggtatgaaagattgagagattttcttttgtcccgatacaccaaaagcacactttgtcgggttcatcttcaggccatatttcccggttctctcaaaaacctttctcaaatcggctatgtggtcttctatttctttagacttaacaaccacatcatcaatatagacttcaaccaaccagccgatcaaatcatgatatatatataattcatagctctttggtacgtgagccaaaccaagtatatcaaatcgtaagccaaaccaagtacatcaaggatctactcaagatgtttggcttggaggatgcgaagcccatcaagacacctatggcaaccaacgcacatctcgttccatgataggtagcttgctttaccttaccgcatctaggccggatatcatgtttagtgtttgcatttgtgcacggtttcaagccgctcctaaggagtgtcacttagtggcctacccaaaaggtgctaagtttaagcttgttggctattccgattcggattatgccggttgcaaagtggatagaaagaacacatccggtagttgccaaatgcttgctatgcctccccacactcgccatggtcgtcgtgagcccacgcccaatcccatcagtgagaatgaggaatcaagcggagatgatatgttcaaagtgaggatgaaaatatggaaaatgttgagggggatgaggtggaagtaagtggtgatgacaatggcagtgatggtggtgatgtcaatggcagtggcgatggtgaggatgatgaggcaagtgatgatgggagtcctctcgatcccaccatccattttgtgctcaatttgaggaatgcccagcaatacactatccttcgtcatctgatcaattccggaggcctaatgattgcaatgatccaagattccatacacggttccaaaaatccgtatatgagcaagtatatgccaacaaagccttcaccgaacacaagtggatttcttggaggcacattggtgagacaccggagtttgtggatttgcaagagatgttctgggccgttgggattgataggattgtcaccatgaagcaaccctttgatgaagatctcattcggcaattttatgccaccgtgtgggtgtccggcgattgtgatgctatgaagtggatgtcggggacccttcggtgctctatcaaccgccgtgaattcaaggagctcttgcacatttgcttcaacaacggggatgacctccatgatgagcacaaccacaaccccttcatgattgattacttttctcagttctatgaagaagggggaaggcacacatatggaaaggtggggggtttgagggctatcccaagtgtaatcaaccgcatagtgagggccaccattctcccaagatgtggtaacaatgatgacatacgcggcgttgcatggcatgtcattgatgccatcatggatgatcgtcggtttgatgtcatcaaccttatgatgaaggagatagccatttccaaggggactattggacaaggagtttactatgccctctacataatgaggttgccgcctcctagacggcttgtggaggagttgcccggtgacctctccgagaagattatggaggaggcccggtgccggtttgtgagtggtttggagttcaccaccttcggagtgaaggaagaactaccctagtgatcgaggcttgggtagtcctcttcgtgggccggctcccgccttgcccaccccttgacgaagggggcgtgcggtggcttcgtggt

SEQ ID NO: 15083 - DNA, 2071 bp, Oryza sativa
  Clone ID: TFbOSC405422j.C1.o3.np
ttccgcattcatttggaccacactcaaggagagatacgacgagtccaaatgtgatgatgtactctttttggaagaaccacttgaggagcgttcaacttcatcaccaaattgcgaagaacctcaagtgactaccttcgatgatcaagataatcatcccacatccaccttatcatcaacacataactacgttgaaggtaacgaattggtgagtaaggttgacgatcgtccaattctcccattggattccaacaacaccgataatgaaattgtcatatggcattgtgttgttgactcatacatctcacctagcaccaagtatgtgtgtgaggataatatggataaatgctctacttcctatagtacttgtggaactaaccttttaaaggaaaaagtaaataagcaccaatggacaagtgaagaatccacctcaccaagatgctcatcttctatttccgaagattatgcttgctttatgagtgaagatggtgactccgagtttgatcacttgagcaagaaggatataacaatggtgatcaagctcatggaagccattgagaagcaacaagcatgcactatcaagaagaatgaagaaatcatgagtctaaccgaagaacacaagaaacttaaggattttcattcttcattgactatgaggtatgaaaaattggaaaatgaatttgcttgtgccactaattctattgcttgtgtagcatctttggagaagcaaaatcaagagctcaaatctcaacttgatgagatcactaacaagtatgtggatttacaagaaagacatgatgaacttttgtgttctcatgagaatcttgtggattctcatgcaatgctagaggtatctcatgaggtgataattgcaacggtaaaatcctacgagcctcatgttcaagttgatcttacttgtactaacccttgttgcgcccaagcaaatatttccccgagcactatatatgacttggattgtgtaggcaaaagggagaagcaaatagatcatggacttgtgtgcattgctcaaccttctcaagataactgtgaaggcatggtgaagaatcttgaggagggatcaaccgtggcttgcaccaggatccatcaaagggatagcaagtccatcaatgcttataccaagggacgaaatcaaaagatgatcaagagttccattacttgcttcaagtgcaagaaagtgggacatcatgctagagattgcccttggaagaaaggaaataagttgagcaagaagaaagacattcctcacatcaagtgcttcaagtgcaccgaagtgggacactttgcctcaaggtctccttgtacattggatgaacaatgcaaaacatcaagtgagaggcaaaccggcaacaagcaaaccgaaaagcaatatagaagcaaaagtcgactttgctataattgccgggcaaagggacatattggtaaaaattttcccatgggtaacattcctaagacaagtctctcatttgatcataatttgcttaggaatgccaaaaatgatatttgtgctactagggtgatttgttcgccacacactagcataaaggccatttgggtgtctaagtctcttgtgactaacctttatggacccaatgttgttggggaccaaaatgtgctaaaattttatagtggaaccaaaggcttcggtaagaccgctcgatttgcaatgaagctcatctatcaccatgcattggagcccggaggctctggaaagataccccggagactccgggaagattccttggtcacccgaaggatctaggccagaggctccaagttcacaagaacatgcatacttaaatgttatccatccgtgtaagaatcacgggtgtgaccacaagaagtccatgatgaccaaggtggactacttgatcaacctcaatcaactcaagtcaacctaccacaattgtctatgaagaacatgaagacatgcttttggaaggaagatggtgcaaatgctaaaccggatcgggtcatggcattacaagaagagcacaagcactatcaggacgtagactgtgatcaaagagtcaaacatgttcgtgatgggaaagct

SEQ ID NO: 15084 - DNA, 1404 bp, Oryza sativa
  Clone ID: TFbOSC403976j.C1.o1.fg
atggctgacaatgagaaaggcaataaggtcagaagtcaggacgttggtacctcaagctcccgagtgaatgaagcaccagacaccagttgtgtgacactggtccaacacctgattaaccagaaccgattgcttatagagatactacagcagcatcagacgccaattctgaacctgagtcaaatacaacctcaagtgcagttggaggcagtccaagcactcacaccacaagtcagcatgccgccagcatcccgaaggacccatggtgacgtgccacatgttgacccaaaagaagcaagtaacatttgctttatgtgtgatgagcaagggcactatgcaagggagcgtcctcagcagaaaagaaaaacaccaatgcgaactgaagatgaagtccgtaagatgatcattactagcacagaatggcctccaccaggaatgaccagacgtcagagaagaaataccttccgaggtgcaccacagttgacagagcatcttttagctaatggaggtagagtgtctgatagtgaagattcagatcaagtctcctcagatgatgaagatgaaatggaatgtaaggcatgctctcgttgtggagaaatcggtcatgtcgccagctcgtgtgccactatatgcgttcattgtgaggaagaccatccgcccgacaggtgtccaacgagcaggatcacttgtttcttttgtgaaggaactgatcatgtaccaaaagattgtcaattcagtcttctgctgacgaagaagatggccaaccaacccgccagttccaacggagagaagcatcaaggcaacacaaatccccgccaagatcaccgtttcagcctaactccagtgccaggacagaggaatcaaaatgagaaaagaaaatgccgagtccgggaagatatctgttgcttcaattgtcaaggaatgggtcatttcgccgacaagtgcccaaaaccaagaaacacagctgccagcacgtcagtccacgcaactccctgcaatcagaagcttgctcctcagcgaattgtcatccatgcatcccgaagcagtcctatagcccgcgttgcaacagctccaactccaatgagtgcactaccacaaggtgtcaatgctcaatttcagccccagccaccagctgacaagacagaggccagtatctgcgttgtacctttggaagtcccaatacagcagctgagagatcaagtacaagatgaagaacccgagtgtaagaaagttattgtttgttacaactgcagtgaagaagggcattactccaaaaactgtccccaaccaaggcaaaatcgacctccacattaccgccaatttacacgaagcagacattccaatcgtattgtggtcactggagcaaacgccgtacccgtgaggcctcgtgttaatcagaacccatag

SEQ ID NO: 15085 - DNA, 4599 bp, Oryza sativa
  Clone ID: TFbOSC100049j.C1.o2.fg
atggtgcgctgcggtggattgtgttatgcaaggggtattgtcacagctcctttccgagctcctggtttggaatggtatattcctggtttggagatagatctgtacagccggatgccgcgctacaagcctgagtacttgtttggtgttgagggatttgtccaggagttgcgtacgatgtccattgccataggatttgggactgcccctttttatgcccagattcctcatgatcgtcatgaagagaagtgccgggtcaaagtcaccttaaacagtaatagcgaagatatcccctcagtgatgttcgaagctggaggaaaaaactacatccatgcatgtcagaaggtggcaaggatcgccataggagagctgcgcgatcgctacagtgatcagttggccgacaccgagtatcgctaccatcctcgccaaccacagggaaagactgtgttagcagctcaagatcgtgaagatcggaatcgtggtaagatttgcaagctagaggacaaagtggatcatttggagaaggaactagccgccttgaagggagaagcaccaccgcagaaggccaggattcgtcttaccgcaaggaagagagctctatttgtccctcgctatcaattggcgccaaaggttcgtgtggtggaaaaagaagttaccccagccctagcagatcctccggtcgtcaacatggtgctcactcgcagcaacgggaatggccccaacaacaacaacaataacaataacaacaacaatggagagaatcccacacttgcccaagtcctggctcaacaggcacagcttatgaacatgatgatgcagcaactccagaaccagcagaaccagggaaataaccatgcacctccccagaacaagttagccgaatttcttcgtgtgaggccgcccattttctccagtaccactaatcctgttgaagctggtgattggctgcatgtcatagagaagaagttggatttgcttcagtgcactgatcaggagaaggtctcatttgcatcacaccagttgcatggccctgcctctgaatggtgggatcacttccgcctgcatcggactactgctgaacctatcacttggcttgaattcaccgctgctttccggaagacgcatataccatcgggagtggtgtctctcaaaaagagggaattcaggtcgctcactcaggggtctcgctctgttacggagtatctgcacgagttcaatcgtctggctcattatgctccggaagagaagttagtggataaggctattcgccaggaggacaagtacaaccgcatggagcaaaagaaacgccggattgctcaattcaagacacaacaggggaataatcaaaagccgcgtcttactttaggaccccagtccatgccacagggaggttcttcgtctgttgttcgtccgcagcgtcagttcttcaacaacaatgccggcaacaacatccgtaatcaagctccatgccctgttgcagcctcgacacagcaacaacctgccaagagggagcaaggcagcaagcccgtggtgtgtttcaactgtggagacccaggacattacgctgacaagtgtccgaagccccgacgtgtgaaggttgtccctacccagggcaactctaccgcaccagcatcaaaggcccgtgtcaatcatgttgctgctgcagaagctcaagatgctccagatgtgattttgggtacgtttcttgttaacttagttcctgcaacagtgcttttcgattctggtgctacacattcattcttatctatgagttttgcgggaaatcatgggatggaagtagaagatcttagacgtcctatgatggttagtaccccaagtaatcaggcactctctttgcaacgtagcccctctgtcagaatagaaattcaaggcgtaccatttctggccaatcttatcctattagaatccaaagaccttgatgtcatcctagggatggactggttagccagatataaaggtgtgatagactgtgctaacagaaaagtaactctcaccagcaatgatggtcgagttgtaactgtttatgcattgtcttctgagtctttaaggtcaagactaaaccaaataactttggaagagattcctatagtccgggagtatcctgatgtgttcccagatgatttacctggtatgcctcctaaaagggatatagagttcagaatagatttggtaccaggaacaactccaatccataagagaccttatagaatggcagccaatgagttggcagaagtcaagaggcaagtggacgatttgcttcggaaagggtacatcagaccgagttcatctccatggggagctccagttatctttgtggaaaagaaagatcatacccaaaggatgtgtgtggactatcgtgcactaaatgatgtgactatcaagaataagtacccgctacccagaattgatgatttgtttgatcagcttaaagaagagcatgaacaacatcttcgccttgcactggagaagctgcgagaacatcaactgtatgctaagtttagcaagtgtgaattttggttgtccgaagtgaagttccttggtcacgtcatctcagcaggaggagttgccgtcgatcctagtaatgtggaatccgtaaccaattggaaacaaccaaagacagtttcagagattcgcaattttctaggcctcgcaggatattatcggaggtttataaagaatttttccaagattgctaagcccatgacacgattacttcagaaagatgtaaagtacaagtggtcagaagaatgtgagcagagttttcaagagttgaagaatcgcttaatatcagctcctattttgattttacctgatccaaagaagggattccaagtgtattgcgatgcatccaaatttgggttaggttgtgttctgatgcaagatgagaaggtggttgcctatgcatctcgtcagttacgtccgcatgagaagaactaccctactcatgatcttgagttagctgcagtagttcatgcgttgaaaatttggcgtcattatcttttcggtactcgtacagaggtgtataccgatcacaagagtttaaaatatatctttactcagccggatctgaacatgagacaacggagatggttggaattaattaaggattatgacatgggaattcattatcacccgggaaaggctaatgttgtagcagatgctcttagcaggaaaggctattgcaatgctacggaaggacgacagttgccattggaattatgcaaggaatttgaaagattgaatttgggaattgtcagtagaggtttcgttgcagctttagaagcgaagcccactctaattgatcaagttagagaagcccaaattaatgatcctgatattcaagagatcaagaagaatatgaggagagggaaagctatcggtttcttgaaagatgagcaaggaactgtatggttgggcgagagaatctgtgtccccgacaacaaagatttaaaagatgcaattctaaaggaagcccatgataccttatactccattcaccctggtagtactaagatgtaccaggatctcaatgaaggattttggtgggcaagtatgaagcgtgaaatcgcagagtacgtagcagtatgtgatgtttgtcagcgagtcaaggcagaacatcagaaacccgccggtttgttgcagcctttgaagattcctgaatggaaatgggaggaaattggtatggatttcatcactggtctacccagaacgtcatcaggccatgactctatttgggtgatagtcgacagacttaccaaagtggctcatttcattccgacagacggacaaaccgaaagggtgaatcagattttggaagacatgttgagagcttgtgctttagacttcggtggaagttgggataagaatctaccttatgcagaattttcgtacaacaacagttatcaagctagtcttcagatggctccgtacgaagcactgtatggtcggaagtgccgcactccgcttttgtgggatcaaacgggagaacgtcaggttttcgggacggatatcctgagggaagcagaagaaaaggtgaaaatcattcaagaaaggttgcgtgtggcccagtctcgtcataagagttatgccgacaatcgtcgtagagatctaagttttggcgaaggagattatgtgtatcttcgtatcacgccttttcgaggagttcatcgttttcacaccaaagaaaaattggcaccgcgttttgtgggaccttataagattgtcaatagaagaggagaggttgcttatcagttggagttacctcaatctttggcaggagtccataatgtgttccatgtttcgcaattgaaaaagtgtttaagggtacctaccgaggaaactaatcttgaacagatagaagtccaagaggatctgacctatattgagaaaccaatcggtattttggaaatagatgagagaagaaccagaaatcgagttatccgtttttgcaatgttcaatggagtaatcactcggaagaagaatcaacttgggaacgagaagatgaattgaagtcagctcatccgcatctgttcgccagttcttcagaatctcgaggacgagattctgttaaaggggggtag

SEQ ID NO: 15086 - DNA, 4587 bp, Oryza sativa
  Clone ID: TFbOSC100172j.C1.o1.fg
atggatgaagtcgggcgtcgatggacattctccagggcaaatgaaggctacacgagctgcggcccgggaagtgatcgtggcagttaccttgagactgaaggaattgagaatgatgctaccacaagatatttggttgagatgctgtgggctatggatgaaagtcgtgcagagagtgtgctagcagctcaagatcgggaagatcggaatcgtggtaagatttgcaagctcgaagataaggtggatcgtttggagaaggaactagccgcattgaagggagaagcaccaccgcagaaggccaggattcgtctcaccgcaaggaagagagctctatttgtccctcgctatcaattggcgccaaagatggtgaatactcgcagcaacgggaatggtcccaacaaccccaataacaataacaatggagagaatcccactcttgctcaagttcttgctcaacagacacagctaatgaacatgatgatgcaacaatttcagaatcagcagaaccaaggaaataaccatgcacctcctcagaataagttagcagaatttcttcgtgtaaggccgcctgttttctctagtaccactaatcctgttgaagctggtgactggctgcatgccatagagaagaagttggatttgcttcagtgcactgatcaggagaaggtctcatttgcatcataccagttacatggccctgcctctgaatggtgggatcacttccgcctgaataggactactgctgaacctatcacttggcttgaattcactgctgctttccgaaagacgcatataccatcgggagtggtgtctctcaagaagaaggagttcaggtcgcttactcagggatctcgctctgttacggagtatctgcacgagttcaatcgtcttgctcgttatgctccggaagatgtgcgcactgatgaagaacgtcaagagaagttcttggaaggacttaatgatgagctttcttacccactcatgactggagattattctgatttccagaaattggtggataaggctattcgtcaggaggacaagtataatcgcatggagcagaagaaacgccggattgctcacttcaaggcacaacaggggagtaatcagaagccgcgtcttgctttaggaccccagcctatgccacagggaggttcttcgtctgttgttcgtccgcagcgtcagttcttcaacaacaatgctggcaataacatccgcaatcaagctccacgccctgttgcagctccagcacagcaacaacctgccaagagggagcaaggtagcaagcccgtggtgtgtttcaactgtggagacccaggacattatgctgacaagtgtccgaagcctcgacgcgtgaaggttgtccctgctcagagcaactctactgtaccagcatcaaaggcccgtgtcaatcatgttgctgctgcagaagctcaagatgctccagatatgattttgggtacgttccctgttaactcagttcctgcaacagtacttttcgattctggtgctacacattcattcttatctatgagttttgcgggaaatcatgggatggaagtagaagatcttagacgtcctttgatggttagtaccccaggtaatcaagcactttctttgcaacgtagcccctcggtcagaatagaaattaaaggagtaccatttctggccaatcttatcttgttagaatccaaagaccttgatgtcattctagggatggactggttagccagacataaaggtgtgatagactgtgccaacagaaaagtaactctcaccagcaatgatggtcgagttgtaactgttaatgcattgtcttctgagtctttaaggtcaagactgaaccagataactttggaagagattcctatagttcgggagtattccgatgtgttcccagatgatttacctggaatgccgcccaaaagggatatagagttcagaatagatttggtacctggaacaactccgatccataagagaccttatagaatggcagccaatgagttggctgaagtcaagaggcaagtagatgatttgctacagaaaggatacatcagaccgagttcgtcactatggggagctccagttattttttgggaaaagaaagaccatacccagagaatgtgtgtggattatcgtgcattaaatgatgtgactatcaagaataagtacccgctacccagaattgatgatttgtttgatcagcttaaaggtgccactgttttctccaagatagatcttcgatcagggtatcaccagttaagaatcaaagaggaagatatacctaagacagcttttaccactaggtatgggttgttcgaatgtactgttatgtcttttggacttaccaatgcccctgctttcttcatgaacttgatgaataaggtgtttatggaatacctagacaagtttgtggtggtctttattgatgatattcttatctactctcgaaccaaagaagagcatgaagaacatcttcgccttgcattggagaagctacgagagcatcaattgtatgccaagtttagcaagtgtgaattttggttgtctgaagtgaaattccttggtcacgtcatctcagccggaggagttgccgttgatcctagtaatgtggaatccgtaaccaattggaagcaaccgaagacagtttcagagatccgcagtttcctaggcctcgcaggatattaccggaggtttatagagaatttttctaagattgctaagcccatgacacgactgcttcagaaagatgtgaagtacaagtggtcggaagaatgtgaacagagttttcaagagttgaaaagtcgcttaatatcagctcctattttgattttgcctgatccaaagaagggtttccaagtgtattgcgatgcatccaaacttgggttaggttgtgttctgatgcaagatgggaaggtggttgcctatgcatctcgtcagttacgtccgcatgagaagaactaccctactcatgatcttgagttagctgcagtagttcatgcgttgaaaatttggcgtcattatcttttcggtactcgtacagaggtgtacaccgatcacaagagtttaaagtatatctttactcagccggatctgaacatgagacaacggagatggttggaattaagtaaggattatgacatgggaattcattatcacccaggaaaggctaatgttgtagccgacgctcttagcaggaaaggctattgcaatgctacagaaggacgacagttgccattggaattatgcaaggaatttgaaagattaaatttgggaattgtcagtagaggttttgttgcagccttagaagcgaagcccactctaattgatcaagttagagaagcccaaattaatgatcctgatattcaagaaatcaagaagaatatgagaagaggaaaagctatcggtttcttggaggatgagcacggaactcgagtcaaggcagaacatcagaaacctgccggtttgttgcagcctttgaagattcctgaatggaaatgggaagaaattggtatggattttatcactggtttgcccagaacgtcatcaggccatgactctatttgggtaatagtcgacagacttaccaaagtggctcattttattccggtaaaaacaacctattccggaagtcgcttagcaaaattgtatatggcaaggattgtgtgtttgcatggcgtccctaagaaaatagtgtctgatcgaggcagtcagtttacttcaaatttttggaagaaacttcaggaagagatgggttctaagttgaactttagcactgcttatcatccgcagacagacggacagaccgaaagagtgaatcagattttggaagacatgttgagagcttgtgctttagacttcggtggaagttgggataagaatctaccctatgcagaattctcgtacaacaacagttatcaagctagtctgcagatggctccttacgaagcactgtatggtcggaagtgccgcactccgcttttgtgggatcaaacgggagaacgtcaggttttcgggacggatatcctaagggaagcagaagaaaaggtgaaaatcattcaagaaagattgcgagtggctcagtctcgacataagagttatgccgacaatcgccgcagagatttgagttttgaagaaggagattatgtgtatcttcgtgtcacgcctcttcgaggtgttcatcgttttcacaccaaaggaaaattggcaccgcgttttgtgggaccttataagattgtcagtagaagaggagaggttgcttatcagttggagttacctcaatccttggcaggagtccataatgtgttccatgtgtcgcaattgaaaaagtgtttaagggtacctaccgaagaagctaatcttgaacagatagaagtccaagaggatctgacctatgttgagaaaccaatccgtatcttggaaacaaatgagagaaaaaccaggaatcgagttatccgtttttgtaaagtccagtggagtaatcactcggaagaagaatcaacttgggaacgagaagatgaattgaagtcagctcatccgcatctgttcgccagttcttccgaatctcgaggacgagattctgtttaa

SEQ ID NO: 15087 - DNA, 5128 bp, Oryza sativa
  Clone ID: TFbOSC101716j.C1.o1.np
ctcctggtttggaatggtatattcctggtttggagatagaactgtgcagccgggatggttgttcagaatggttgggcctatgcaacaggatgccgcgctacaagcctgagtacttgtttggtgttgagggttttgtccaggagttgcgtacgatgtcctttgtcattggatttgggactgcccctttttatgcccagattcctcatgatcgtcatgaagagaagtgccgagtcaaagtcaccttgaacagtaatagtgaagatatcccctcagtgatgtttgaagctggaggaagaaactacatccatgcatgtcaggaggtggcaaggatcgccataggagagctccgtgatcgctacagtgatcagttggccgacactgagtatcgctaccatcctcgccaaccccagggaagtgaccgtggcagttaccttgagactgaaggaattgagaatgatgctaccacaaggcatttggttgagatgctgtgggctatggatgaaagccgcgcggagactgtgttagcagctcaagatcgtgaagattggaatcgtggtaagatttgcaagttagaagacaaggtggatcgtttggagaaggaactagccgcattgaagggagaagcaccacctcaaaaggccaggattcgtcttaccgcaaggaagagagctctatttgtccctcgctatcaattggcgccaaagatggtgaacactcgcagcaacgggaatggccccaacaacaacaacaacaataacaacaacaatgaagggaacccaacccttgctcaagttcttgctcaacagactcagttaatgaacatgatgatgcagcaacttcagaatcagcaaaaccagggaaataaccatgcacctccccagaacaagttagcagaatttcttcgtgtgaggccgcctattttctctagtaccactaatcctgttgaagctggtgattggttgcatgccatagagaagaagttggatttgcttcagtgcactgatcaggagaaggtctcatttgcatcacaccagttgcatggccctgcctctgaatggtgggatcacttccgcctgaataggactactgctgaacctatcacttggcttgaattcaccgctgctttccggaagacgcatataccatcgggagtggtgtctctcaagaagaaggagttcaggtcgctcacccagggatctcgctctgttacggagtatttgcacgagttcaatcgtctggctcgttatgctccggaagatgttcgcaatgatgaagagcgccaggagaagttcttggaaggacttaatgatgagctttcttacccactcatgactggagattattctgatttccagaagttggtggataaggctattcgtcaggaggacaaatacaatcgcatggagcagaagaaacgccggattgctcaattcaagacacaacaggggaataatcagaagccgcgtcttactttaggaccccagtctgtgccacaggggggttcttcgtctgttgttcgtccgcagcgtcagttcttcaacaacaatgctggcaacaacatccgcaatcaagctccacgtcctgttgcagctccaacacagcaacagcctgccaagagggagcaaggcaacaagcccgtggtgtgtttcaactgtggagacccaggacattatgctgacaagtgtccgaagccccgacgtgtgaaggttgtccctgtccagagcagctctaccgcactagcattaaaggcccgtgtcaatcatgttgctgctgcagaagctcaagatgctccagatgtgattttgggtacgtttcctgttaacttagttcctgcaacagtgcttttcgattctggtgctacacattcattcttatctatgagttttgcgggaaatcatgggatggaagtagaagatcttagacgtcctttgatggttagtaccccaagtaatcaagcactctccttgcaacgtagcccctctgtcagaatagaaattcaaggagtaccatttctggccaatcttatactgttagaatccaaagaccttgatgtcatcctagggatggactggttagccagacataaaggtgtgatagactgtgccaacagaaaagtaactctcaccagcaatgatggtcgagttgtaactgttcatgtattgtcttctgagtctttaaggtcaagactgaaccaaataactttggaagagattcctatagtccgggagtatcccgatgtgttcccagatgatttacctggtatgccgccgaaaagggatatagagttcagaatagatttggtacctggaacaactccgatccataagagaccttatagaatggcagccaatgagttggcagaagttaagaggcaagtagacgatttgcttcagaaaggatacatcagaccgagttcatctccatggggagctccagttatttttgtggaaaagaaagaccatacccagaggatgtgtgtggactatcgtgccctaaatgatgtgactatcaagaataagtacccgctacccagaattgatgatttgtttgatcagcttaaaggtgccaccgttttctccaagatcgatcttcgatcagggtatcaccagttgagaatcaaagaggaagatatacctaagacagcttttaccactaggtatggattgttcgaatgtactgttatgtcttttggacttaccaatgcccctgctttcttcatgaacttgatgaataaggtgtttatggaatacctagacaagttcgtggtggtatttattgatgacattcttatctactctcgaaccaaagaagagcatgaagaacatcttcgccttgcattggagaagctacgagaacatcaactgtatgctaagtttagcaagtgtgaattttggttgtctgaagtgaagttccttggtcacgtcatctcagcaggaggagttgccgttgacctagtaatgtggaatccgtaaccaactggaaacaaccgaagacagtttcagagatccgcagtttcttaggcctcgcaggttattatcggaggtttatagagaatttttccaagattgctaagcccatgacacgactgcttcagaaagatgtgaagtacaagtggtcggaataatgtgagcagagttttcaagagttgaagaatcgcttgatatcagctcctatcttgattttacctgatccaaagaagggttttcaagagtattgcgatgcatccaaacttgggttaggttgtgttctgatgcaagatgggaaggtggttgcctatgcatctcgtcagttacgtccgcatgagaagaactaccctactcatgatcttgagttagctgcagtagttcatgcgttgaagatttggcgtcattatcttttcggtactcgtacagaggtgtataccgatcacaagagtttaaagtatatctttactcagccggatctgaacatgagacagaggagatggttggaattaattaaggattatgacatgggaattcattatcacccgggaaaggctaatgttgtagcagatgctcttagcaggaaaggctattgcaatgctacggaaggacgacagttgccattggaattatgcaaggaatttgaaagattaaatttgggaattgtcagtagaggtttcgttgcagccttagaagcgaagcccactctaattgatcaagttagagaagcccaaattaatgatcctgatattcaagagatcaagaagaatatgagaagaggaaaagctatcggtttcatggaggatgagcaaggaactgtatggttgggcgagagaatctgtgtccccgacaacaaagatttaaaagatgcaattctgaaagaagctcatgatactttatattccattcaccctggtagtactaagatgtaccaggatctcaaggaaagattttggtgggcaagtatgaagcgtgaaatcgcagaatacgtagcagtatgtgatgtctgtcagcgagtcaaggcagaacatcaaaaacctgccggtttgttgcagcctttgaagattcctgaatggaaatgggaagaaatcggtatggattttatcactggtctacccagaacgtcatcaggccatgactctatttgggtgatagtcgacagacttaccaaagtggctcatttcatcccagtgaagacaacatattccggaagtcggttggcggaattgtatatggcaaggattgtgtgtttgcatggcgttcctaagaagatagtgtctgatcgaggcagtcagtttacttcaaatttttggaagaagcttcaggaagagatgggttctaagctgaactttagtactgcttatcatccgcaaacagatggacaaactgaaagggtgaatcagattttggaagacatgttgagagcttgtgctttagatttcggtggaagttgggataagaatctaccttatgcagaatttccgtataacaacagttatcaagctagtcttcagatggctccttacgaagcactgtatggtcggaagtgccgcactccgcttttgtgggatcaaacgggagaacgtcaggttttcgggacggatatcctaagggaagcagaagaaaaggtgaaaatcattcaagaaagattgcgagtggcccagtctcgacataagagttatgccgacaatcgccgcagagatttgagttttgaagaaggagattatgtgtatcttcgtgtcacgcctcttcgaggagttcatcgtttccacaccaaaggaaaattggcaccgcgttttgtgggaccttataagattgtcagtagaagaggagaggttgcttatcagttagagttacctcaatctttggcaggagtccataatgtgttccatgtgtcgcaattgaaaaagtgtttaagggtacctaccgaagaagctaatcttgaacagatagaagtccaagaggatctgacctatgttgagaaaccaatccgtattttggaaatagatgagagaaggaccaggaatcgagttatccgcttttgcaaagtccagtggagtaatcactcggaagaagaatcaacttgggaacgagaagatgaattgaagtcagctcatccgcatctgttcgccagttcttctgaatctcgaggacgagattctgtt

SEQ ID NO: 15088 - DNA, 309 bp, Oryza sativa
  Clone ID: TFbOSC101716j.C1.o2.gm
atgggccgccggcccatctcctcctttcctccccctcctccctgctgggccggccgcaggccgaggcccagccggccgcccgcctccctccctcccggggtcgccgacaggtggggcccacctgtcggacccgtctcccacctcccgcctctcccgctcgcgccgtcccgccgaaaccgctgccgccgcacccacttcctccgctttccccgcgcccacgccacgtcgccgcgcccacgccacgtcgccgccctctccccgcgtctcccggccgcgccagcgcacgagaggggcgggattcgattttga

SEQ ID NO: 15089 - DNA, 3288 bp, Oryza sativa
  Clone ID: TFbOSC102284j.C1.o1.fg
atgtggggctgtgtcttgtgggtacagtggtacacctctgatcagagtaaaactattcgaatagccgtgcccgcggttatggctcctggtttggaatggtatattcctggtttgaagatagaactgtgcagccgggatggttgttcagaatggttgggcctatgcaacaggattcctcatgatcgtcatgaagagaagtgccgagtcaaagtcactttgaacagtaatagtgaagatatcccctcagtgatgttcgaagctggaggaagaaactacatccatgcatgtcaggaggtagcaaggatcgccataggcgagctccgcgatcgctacagtgatcagttggccgacactgagtatcgctaccattctcgtcaaccccagggaagtgaccgtggcagctaccttgagactgagggaattgagaatgatgctaccacaaggcatttggttgagatgctgtgggctatggatgaaacccgtgcagagactgtgttagcagctcaagatcgtgaagatcggaatcgaggtaagatttgcaagctagaggacaaagtggatcgattggagaaggaactagccgcgttgaagggagaagcaccaccgcagaaggccaggatttgtcttaccgcaaggaagagagctctatttgtccctcgctatcaattggcaccaaaggtccgtgtggtggaaaaagaagttaccccagccctagcggatcctccggtcgtcaacatggtggtcactcgcagcaacgggaatggccccaacaacaacaataacaacaacaacaatggagagaatcccacacttgcccaagtcctggctcaacaggcacagcttatgaacatgatgatgcagcaactccagaaccagcagaaccagggaaataaccatgcacctccccagaacaagttagcagaatttcttcgtgtgaggccgcctactttctctagtaccactaatcctgttgaagctggcgattggctgcatgccatagagaagaagttggatttgcttcagtgcactgatcaggagaaggtctcatttgcatcacaccagttgcatggccctgcctctgaatggtgggatcacttccgcctgaataggactactgctgaacctatcacttggcttgagttcaccgctgctttccggaagatgcatataccatcgggagtggtgtctctcaagaagaaggaatttaggtcgctcacccagggatcccgctctgttacggagtatctacacgagttcaatcgtctggctcgttatgctccggaagatgtgcgcactgatgaagagcaccaggagaagttcttggaaggacttaatgatgagctttcttacccactcatgactggggattatcatgatttccagaagttagtggataaggctattcgtcaggaggacaagtacaatcgcatggagcagaagaaacgccggattgctcaattcaagacacaacaggggaataatcagaggccgcatcttactttaggaccccagtccatgccacagggaggttattcgtctgttgttcgtccgcagcgtcagttcttcaacaacaatgctggcaacaacatccgcaatcaagttccacgtcctgttgcagcctcgacacagcaacaacctgccaagagggagcaaggcagcaagcccgtggtgtgtttcaactgtggagacccaggacattacgctgacaagtgtccgaagccccgatgcgtgaaggttgtccctgcccagagcaactctaccgtatcagcatcaaaggcccgtgtcaatcatgttgctgctgcagaagctcaaggtgctccagatgtgattttgggtacgtttcttgttaactcagttcctgcaacagtgcttttcgattctggtgctacacattcattcttatctatgagttttgcgggaaatcatgggatggaagtagaagatcttagatgtcctttgatggttagtaccccaagtaatcaagcactctctttgcaacgtagcccctctgtcagaatagaaattcaaggagtaccatttctggccaatcttatcttgttagagtccaaagaccttgatgttatcctagggatggactggttagccaggcataagggtgtgatagactgtgctaacagaaaagtaactctcaccagcaatgatggtcgagttgtaactgttcatgcattgtcttctgagtctttaaggtcaatactgaaccaaataactttggaagagattcctatagtccgggagtatcccgatgtgttctcagatgatttacctggtatgccgcctaaaagggatatagagttcagaatagatttggtaccaggaacaactccgatccataagagaccttatcgaatggcagccaacgagttggcagaagtcaagaggcaagtggacgatttgcttcagaaaggaattgatgatttgtttgatcagcttaaaggtgccactgttttctccaagatagatcttcgatcagggtatcatcagttgagaatcaaagaggaagatatacctaagacagcttttaccactaggtatgggttgttcgaatgtactgttatgtcttttggacttaccaatgcccctgctttcttcatgaacttgatgaataaggtgtttatggaatacctagacaagttcgtggtagtctttattgatgatattcttatctactcccgaaccaaagaagagcatgaagaacaccttcgccttgcattggagaagctacgagagcatcaactgtatgctaagtttagcaagtgtgaattttggttgtctgaagtgaagttccttggtcacgtcatctcagcaggaggagttgccgtcgatcctagtaatgtagaatccgtaaccaactggaaacaaccaaagaccgtttcagagattcgcagtttcctaggcctcgcaggatattatcggaggtttatagagaatttttccaagattgctaagcccatgacacggctgcttcagaaagatgtgaagtacaagtggtcagaagaatgtgagcagagttttcaagagttgaagaatcgcttaatatcagctcctattttgatcttacctgatccaaagaagggattccaagtgtattgcgatgcatccaaacttgggttaggttgtgttctgatgcaagatgggaaggtggttgcctatgcatctcgtcagttacgtccgcatgagaagaactaccctactcatgatcttgaattagctgcagtagttcgtgcgttgaagatttggcgtcattatcttttcggtactcgtacagag

SEQ ID NO: 15090 - DNA, 4611 bp, Oryza sativa
  Clone ID: TFbOSC10947j.C1.o2.fg
atgtctttcgtgattagtctcacccttctcaccatagtaaatgatgctataactggtaataatttgattagctcctggtttggaatgatgccgcgctacaagcctgagtacttgtttggtgtggagggttttgtccaggagttgcgtacaatgtcctttgtcattggatttgggactgcccctttttatgcccagattcctcatgatcgtcatgaagagaagtgccgagtcaaagtcaccttgaacagtaatagtgaagatattccctcagtgatgttcgaagctggaggaagaaactacatccatgcgtgtcaggaggtggcaaggatcgccataggagagcttcgcgatcgctacagtgatcagttggccgatacggagtatcgctaccatcctcgtcaaccacagggaagtgaccgtggcaattaccttgagactgaaggaattgagaatgatgctaccacaaggcatttggttgagatgctgtgggctatggatgaaagtcgtgcggagactgtattagcggctcaagatcgtgaagaccggaatcgtggtaagatttgcaagctagaagacaaggtggatcgtttggagaaggaattagccgcattgaagggagaagcaccgccgcagaaggccaggattcgtctcactgcaatgaagagagctctatttgtccctcgctatcaattggcgccaaagatggtgaacactcgcagcaatgggaatggccccaacaacaacaacaataacaacaacaacagtggagagaatcccacacttgcccaagtcctggctcaacagacacagcttatgaacatgatgatgcagcaactccagaaccagcaaaaccaaggaaataaccatgcacctccccagaacaagttagcagaatttctgcgtttgcatggccctgcctctgaatggtgggatcactttcgcctgaacaggattactgctgaacctatcacttggcttgaattcaccgctgctttccggaagacgcatataccatcgggagtggtgtctctcaagaagaaggagttcaggtcgctcactcagggatctcgctctgttacggagtatttgcacgagttcaatcgtttggctcgttatgctcctgaagatgtgcgcaatgatgaagagcgtcaggagaagttcttggaaggacttaatgatgagctttcttacccactcatgactggagattatcctgatttccagaagttagtggataaggctattcgtcaggaggacaaatacaaccgcatggagcagaagaagcgccggattgctcaattcaagacacaacaggggaataatcagaggccgcgtcttactttaggaccccagtccgtgccacagggaggttcttcgtctattgttcgtccgcagcgtcagttcttcaacaacaatgctggcaacaacatccgtaatcaagttccacgtcctgttgcagctccaacacagcaacaacctgccaagagggagcaaggcagcaaacccgtggtgtgtttcaactgtggagacccaggacattacgctgacaagtgtccgaagccccgacgcgtgaaggttgtccctactcagagcaactctaccgcaccagcatcaaaggcccgtgtcaatcatgtcgctgctgcagaagctcaagatgctccagatgtgattttgggtacgttccttgttaacttagttcctgccacagtgcttttcgattctggtgctacacattcattcttatctatgagttttgcgggaaatcatgggatggaagtagaagatcttagacatcctttgatggttagtaccccaagtaatcaagcactctctttgcaacgtagcccctctgtcagaatagaaattaaaggagtaccatttctggccaatcttatcttgttagaatccaaagaccttgatgtcatcctagggatggactggttagccagacataaaggtgtgatagactgtgctaacagaaaagtaactctcaccagcaatgatggtcgagttgtaactgttcatgcattgtcttctgagtctttaaggtcaagactgaaccaaataactttggaagagattcctatagtccaggagtatcccgatgtgttcccagatgatttacctggtatgccgcctaaaagggatatagagttcagaatagatttggtaccaggaacaactccgatccataagagaccttatagaatggcagccaatgagttggcagaagttaagaggcaagtagacgatttgcttcagaaaggatacatcagaccgagttcatcaccatggggagctccggttatttttgtggaaaagaaagaccatacccagaggatgtgtgtggactatcgtgcactaaatgatgtgactatcaagaataagtatccactacccagaattgatgatttgtttgatcagcttaaaggtgctactgttttctccaagatagatcttcgatcagggtatcaccagttgagaatcaaagaggaagatatacctaagacagcttttaccactaggtatgggttgttcgaatgtactgttatgtcttttggacttaccaatgcccctgctttcttcatgaacttgatgaataaggtgtgtatggaatacctagacaagttcgtggtggtctttattgatgatattcttatctactctcgaaccaaagaagagcataaagaacatcttcgccttgcactagagaagctacgagaacatcaactgtatgctaagtttagcaagtgtgaattttggttgtctgaagtgaagttccttggtcacgtcatctcagcaggaggagttgccgtcgatcctagtaatgtggaatccgtaaccaactggaaacaaccaaagacagtttcagaaattcgcagttttctaggcctcgcaggatattaccggaggtttatagagaatttttccaagattgctaagcccatgacacgactgctacagaaagatgtgaagtacaagtggtcagaagaatgtgagcagagttttcaagagttgaagaatcgcttgatatcagctcctattttgattttacccgatccaaagaagggtttccaagatgggaaggtggttgcctatgcatctcgtcagttacgtccgcatgagaagaactaccctactcatgatcttgagttagctgcagtagttcatgcgttgaaaatttggcgtcattatcttttcggtactcgtacagaggcaaatgttgtagccgacgctcttagcaggaaaggctattgcaatgctaccgaaggacgacagttgccattggagttatgccaggaatttgaaagattaaatttgggaattgtcagtagaggtttcgttgcagctttagaagcgaagcccactctaattgatcaagttagagaagcccaaattaatgatcctgatattcaagagatcaagaagaatatgagaagaggaaaagctatcggtttcttggaggatgagcaaggaactgtttggttgggcgagagaatctgtgtccctgacaacaaagatttgaaagatgtaattctgaaagaagctcatgatactttatactccattcaccctggaagtactaagatgtaccaggatctcaaagaaagattttggtgggcaagtatgaagcgtgaaatcgcagaatacgtagcagtatgtgatgtttgtcagcgtgtcaaggcagaacatcagaaacctgccggtttgctgcagcctttgaagattcctgaatggaaatgggaagaaatcggtatggattttatcactggtttacccagaacgtcatcaggccatgactctatttgggtaatagtcgatagacttaccaaagtggctcattttattccggtaaagacaacttattccggaagtcggttggcagaattgtatatggcaaggattgtgtgttcgcatggcgtccctaagaaaatagtgtctgatcgaggcagtcagtttacctcaaatttctggaagaaacttcaggaagagatgggttctaagctgaactttagcactgcttatcatccgcagacagacggacaaaccgaaagggtgaatcagattttggaagacatgttgagagcttgtgctttagatttcggtggaagttgggataagaatctaccttatgcagaattttcgtacaacaacagttatcaagctagtatacagatggctccttacgaagcactgtatggtcgtaagtgccgcactccgcttttgtgggatcaaacgggagaacgtcaggttttcgggacggatattctaagagaagcagaagaaaaggtgaaaatcattcaagaaagattgcgagtggctcagtctcgtcataagagttatgccgacaatcgccgtagagatttgagttttgaagaaggagattatgtgtatcttcgtgtcacgccttttcgaggagttcatcgttttcataccaaaggaaaattagcaccgcgttttgtgggaccttataagattgtcagtagaagaggagaggttgcttatcagttagagttacctcaatccttggcaggagtccataatgtgttccatgtgtcgcaattgaagaagtgtttaagggtacctaccgaagaagctaatcttgaatag

SEQ ID NO: 15091 - DNA, 5037 bp, Oryza sativa
  Clone ID: TFbOSC11372j.C1.o1.fg
atgccgcgttacaagcctgagtacctgtttggtgttgagggttttgtccaggagttgcgcacgatgtcctttgtcattggatttgggactgcccctttttatgcccagattcctcatgatcgtcatgaagagaagtgccgagtcagagtcaccttgaacagcaatagtgaagaggtcccctcagtgatgtttgaagctggaggaagaaactacatccatgcatgtcaggaggtggcaaggatcgccataggagagctccgtgatcgctacagtgatcaattggccgacactgagtatcgctaccatcctcgccaacctcagggaagtgaccgtggcagttaccttgagactgaaggaattgagaatgatgttaccacgaaacatttggttgagatgttgtgggctatggatgaaagtcgtgcggagactgtgttagcagctcaagatcgtgaagatcggaatcgtggtaagatttgcaagttagaagacaaggtggatcgtttggagaaggaattagccgcattgaagggagaagcaccgccgcagaaggccaggattcgtcttaccgcaaggaagagagctctatttgtccctcgctatcaactggcgccaaagatggtgaacactcgtagcaatgggaatggtcccaacaaccccaataacaacaacaatggagagaatcccactctggcccaagttcttgctcaacagacacagcttatgaacatgatgatgcagcaatttcagaatcagcaaaaccaagggaataatcatgcacctccccaaaacaagttagcagaatttcttcgtgtgaggccgcctgttttctctagtaccactaatcctgttgaagctagtgattggctgcatgccatagagaagaagttggatttacttcagtgtactgatcaggagaaggtctcatttgcatcacatcagttgcatggccctgcctctgaatggtgggatcacttccgccttaacaggactactgctgaacctatcacttggcttgaattcaccgctgctttccggaagacgcatataccatcgggagtagtgtctctcaagaagaaggagttcaggtcgctttcccagggatctcgctctgttacggagtatctgcacgagttcaatcgtcttgctcgttatgctccggaagatgtgcgcaatgatgaagagcgccaggagaagtttttgggaggacttaatgatgagctttcttacccactcatggttggagattatcctgatttccagaaattagtggataaggctattcgtcaggaggacaagtacaatcgcatggagcagaagaaacgtcggattgctcaattcaagacacaacagggaaataatcagaagccgcgtcttactttaggaccccagcccatgccacagggaggttcttcgtctgttgttcgtccgcaacgtcagttcttcaacaacaatgctggcaacaacatccgtaatcaagctccacgtcctgttgcagctccagcacagcaacaacctgccaagagggagcaaggcaacaagcccgtggtgtgtttcaactgtggagatccaggacattatgctgacaagtgtccgaagccccgacgtgtgaaggttgtccctgcccagaataactctgctgtaccagcatccaaggctcgtgtaaatcatgtcgctgctgcagaagctcaagatgctccagatgtgattttgggtacgttccttgttaactcagttcctgcaacagtacttttcgattctggtgctacacattcattcttatctacgagttttgcgggaaatcatgggatggaagtagaagatcttagacgtcctttgatggttagtaccccaagtaatcaagcactctctttgcaacgtagcccctctgtcagaatagaaattcaaggagtaccatttctggccaatcttatcttgttaaaatccaaagaccttgatgtcatcctagggatggactggttagccagacataaaggtgtgatagactgtgccaacagaaaagtaactctcaacagctatgatggtcgagttgtaactgttcatgcattgtcatctgagtctttaaggtcaagactgaaccagataactttggaagagattcctatagtccgggagtatcctgatgtgttcccagatgatttacctggtatgccgcctaaaagggatatagagttcagaatagatttggtacctggaacaactccgatccataagagaccttatcgaatggcagccaatgagttggcagaagttaagaggcaagtagatgatttgctacagaaaggatacatcagaccgagttcatcaccatggggagctccggttatttttgtggaaaagaaagaccatactcagagaatgtgtgtggactatcgtgcactaaacgatgtgactattaagaataagtatccactacccaggattgatgatttgtttgatcaacttaaaggtgccactgttttctccaagatagatcttcgatcagggtatcatcagttgagaatcaaagaggaggatatacctaagacaacttttaccactaggtatgggttgtttgaatgtactgttatgtcttttggacttaccaatgcccctgctttcttcatgaacttgatgaataaggtgtttatggaatacctagacaagttcgtggtggtctttattgatgatattcttatctactctcgaaccaaagaagagcatgaagaacatcttcgccttgcattggagaagctacgagaacatcaactgtatgctaagtttagcaagtgtgaattttggttgtctgaagtgaaattccttggtcacgtcatctcagccggaggagttgccgtcgatcctagtaacgtggaatccgtaaccaattggaagcaaccaaagacagtttcagagattcgcagtttcctaggccttgcaggatattatcggaggtttatagagaatttttccaagattgctaagcccatgacacgactgcttcagaaagatgtgaagtacaagtggtcggaagaatgtgaacagagttttcaagaattgaaaagtcgcttaatatcagctcctattttgattttgcctgatccaaagaagggttttcaagtgcattgtgatgcatccaaacttgggttaggttgtgttctgatgcaagatgggaaggtggttgcctatgcctctcgacagttacgtccgcatgagaagaactaccctactcatgatattgagttagctgcagtcgttcatgcattgaagatttggcatcattatcttttcggtactcgtacagaagtgtacaccgatcacaagagtttaaagtatatctttactcagccggatctgaacatgagacaacggagatggttggaattaattaaggattatgacatgggaattcattatcatccgggaaaggctaatgttgtagcagacgctcttagcagaaaaggctattgcaatgctacagaaggacgacagttgccattggaattatgcaaggaatttgaaagattaaatttgggaattgtcgatagaggtttcgttgcagccttagaagcgaagcccactctaattgatcaagttagagaagcccaaattaatgatcctgatattcaagagatcaagaagaatatgagaagaggaaaagctattggtttcttggaggatgagcacggaactgtatggttgggtgagagaatctgtgtccccgacaacaaagatttaaaggatgcaattctgaaagaagctcatgatactttatactccattcaccctggtagtactaagatgtaccaggatcttaaggaaagattttggtgggcaagtatgaagcgtgaaatcgcagaatacgtagcagtatgtgatgtttgtcagcgagtcaaggcagaacatcaaaaacccgccggtttgttgcaacctttgaagattcctgaatggaaatgggaagaaattggtatggattttattactggtttacccagaacgtcatcaggccatgactctatttgggtgatagtcgacagacttaccaaagtggctcatttcattccggtaaagacaacttattccggaagtcgcttagcggaattgtatatggcaaggattgtgtgtttgcatggcgtccctaagaagatagtgtctgatcgaggcagtcagtttacttcaaatttttggaagaaacttcaggaagagatgggttctaagctgaactttagtactgcttatcatccgcagacagacggacaaaccgaaagggtgaatcaaattttggaagacatgttgagagcttgtgctctagatttcggtggaagttgggataagaatctaccctatgcagaattttcgtacaacaacagttatcaagctagtcttcagatggctccttacgaagcactgtatggtcggaagtgtcgcactccgcttttgtgggatcaaacgggagaacgtcaggttttcggaacggatatcctaagggaagcagaagaaaaggtaaagatcattcaagaaagattgcgtgtggctcagtctcgtcataagagttatgccgacaatcgccgcagagatttgagttttgaagagggagattatgtgtatcttcgtgtcacgcctctacgaggagttcatcgttttcataccaagggaaaattggcaccgcgttttgtgggaccttataagattgtcagtagaagaggagaggttgcttatcagttggagttacctcaatctttggcaggagtacataatgtgttccatgtgtcgcaattgaaaaagtgtttaagggtacctaccgaagaagctaatattgagcagatagaagtccaagaggatttgacttatgttgagaaaccaatccgtatcctggaaacaagtgagagaagaaccaggaatcgagttatccgtttttgcaaagtccagtggagtaatcactcggaagaagaatcaacttgggaacgagaagatgaattgaagtcagctcatccgcacctgttcgccagttcttccgaatctcgaggacgagattctgtttaa

SEQ ID NO: 15092 - DNA, 4940 bp, Oryza sativa
  Clone ID: TFbOSC13115j.C1.o5.np
gtgacaagttggtatcagagccaccttgaccttaggataagccaaatgatgccgccccattcaccgagaaatttgatcgaggtgttaggattcgtcagggagctaagattgatggtttttgaggtaggttatgaagttgctcccgagtatcgccaaatttcccatgaccccgacgaggagaagtgtcatgttcgtgtgacgttggctagtgatcgtgaagaccttccgtctattaagttcgaagctggaggaagatcgtacagccatgcttgtcaagaagcagctttggtggccattggagagttgcgtcaacgctttgaagaagagttggattcatcagctttctagtatcatcctcacaagcctcatggtcaagactatggaacctatatctgtcctgatggtgaagagagtgccactctgatgcatgtggtgcatatgcttagtgctatggatgcagtaagtgtggagcgagacaaagcagctcatgacagggaaaactggaatcgaggcaagatttgcaagttggagagcaaggtgtaccgtctacagaaggaattagctgaacttaaaggagaaacgccgccgccaacacccaagcttcgcctcgtcgcaagaaagagaacctgtccgccacctcgtctccagttagcctcgaagattcgtgtgatgggcgaagctgtgcccgatcgtgctgaacctgtcatcgacatcataagtgatgaggaagaagaggaagaccctgaagaaagagagccagctactccagaggaagaagatccatcgcttcgttccgacacaaggcggaccaccaatccagtagaagcaggagactggctgcatgcggtggaaaagaagttggatttgatccagtgtactgagcaggagaaagtttcttttgcttcgcatcaactgcatggacctgctgccgaatggtgggatcattttcgccaaggcagggctgaaggagagcctattacgtggcaggaattcacggctgctttcaagaagacacacataccagcgggtgttgtagctctaaagaagagagaatttagagcactcaaccagggatctcgttcggtcactgagtacctccatgatttcaaccgtttagctcgctatgctccagaggatgttcgcactgatgaagaacgtcaggagaagtttttagagggactgaatgatgagttgtcttatgccttgatgtctacggatttccgggatttccagcaattggtggacaaggcgattcgtcaggaagacaagtataaccggatggagcagaagaagcgcagggctgcccaattcaaggcacaacagggcagtaaccagaggccacgtctcgttattggacctcaagctccatcgtaccctcaaggaggatcttcatcagttatccgcccccaacgccagttctacaacaacaatactggtaatcgtggcaatgacaaccgcaacgtggttgctcgtcctgcagcaactccagctcagaaccagcctgtcaggaaggaacagggaagcaaaccagtggtgtgcttcaattgtggtgatccaggacattatgctgataagtgtcctaagcctcggcgcgtgaagaacgctccagctccgaacaactccaatgttccagtaccaaaggcacgtgtcaatcatgtggtagcagcagaagctcagaatgcaccatatgtggttttgggtacgtttcctgttaactctatacccgcaactgtgctttttgattccggtgctacacattcctttttgtctaaaagttttgcgagcaatcatgggatggaagttgttagtcttgggagacctttactagttaacaccccaggcaatcaagtattttcgacacagtattgtccttccgctactatagaaatagaagaagttcctttcccatcctcacttatcttgctagaatccaaggatctagatgttatcttagggatggactggttatctcgtcacagaggagttatagattgtgtcaaccgtaaggtgactttaactagtagcaatggggaaaccgtttctttctttgtgtcctctcctaaatctcatggtgtgaacttaaaccaagttgctctacaagagattcccatagtacaagactacccagacgtgtttcccgaggatttgccaggtctgccacctaagagagacatagagtttcggatagacttggtacctggaaccaaccctatccataagagaccatacagaatggcagctaatgagttagctgaagtgaagagacaggtggatgatttgcttcagaaaggatacattagacccagtacttcgccatggggagcaccagtcatctttgtggagaagaaagatcatactcagagaatgtgcgtggattatcgagcgttgaatgaggtcactatcaagaataagtatcctctacccagaattgatgacctctttgatcaattgaaaggtgctacagttttctccaagatagatctccgttctggatatcatcaacttcgaatccgtgaggaagatataccaaagaccgccttcacaactcggtatggtttgttcgaatgtaccgttatgtcatttggactcactaatgccccagcctttttcatgaatctgatgaacaaggtgtttatggaatatctggataagtttgtcgtggtgtttattgatgacattctcatttactccaagacgaaggaagaacatgaggagcatcttcgtctagctttagagaaactacgtgagcatcagctttatgccaagttcagtaaatgtgaattttggttgtccgaagtgaagtttcttggacatgtcatctcgtctggaggagtggcagtagatccaagcaatgtggagtcagtgttaagttggaagcaacccaagacggtttcagaaattcgtagtttccttggacttgcaaggtattaccgcaggtttattgagaacttttcaaagatcgccagaccaatgactcgtctgcttcagaaggaagtgaagtacaagtggacagaggattgtgaacgaagtttccaagaactgaagaaaaggctagtgactgcacctgtattaattttgcctaattcgaggaaaggtttccaagtgtattgtgatgcatcccgacacggtttgggttgtgtgttgatgcaagaaggaaaggtggttgcctatgcatctaggcagttacgtcctcatgagaataactacccaacgcatgacctagaattggcagctgtggtgcatgcattgaagatttggcgtcattatcttttcggtaaccgtacagagatgtatacggatcataaaagtttgaagtacattttcactcaacctgatttgaacatgcgtcagcgaagatggttagagttgattaaagattatgatatggaaatccactatcacccggggaaagcaaatgttgtagccgatgctcttagcaggaaaagctactgtaatatgtcagaaggtcgacgtttaccttggaagttatgccaagaatttgaaaagttgaacttgggaatagtcagcaaaggttttgtggctactttggaagctcaacctactctgtttgatcaagttagagaagctcaagtgaatgatcctgacatacaagaaattaaaaagaacatgagaagaggtaaagccatcggttatgtagaagatgagcaaggaactgtgtggttgggagaaagaatttgcgtcccagaaaataaggagttgaaggatactatcatgaaagaagctcatgaaactttgtattccattcaccctggaagcaccaagatgtaccaagacttaaagcaacaattctggtgggccagtatgcgacgtgagatagcagaatatgtggctctatgtgatgtatgtcagcgggtcaaggcagaacatcagaagccagccggtctgttacaaccgttgaagattccagagtggaagtgggaagaaataggaatggattttataaccggtctacccagaacgtcagcaggacatgattctatttgggtagtggttgataggttgacaaaagtcgctcacttcatacctgtcaaaacaacctatacggggaataagcttgcagagttatacatggccagagtggtatgtttgcatggcgttcctaagaagatagtgtcagatagaggtagccagtttacttcgaagttttggcagaaattacaagtagagatgggtacccgtttgaatttcagtaccgcctatcaccctcaaacagatggtcagacggaaagagtaaaccaaattttagaagatatgttgagagcctgtgttctagattttggtggaagttgggataagaatttgccgtacgcggaattctcatataacaatagttatcaagctagtttgcaaatggctccgtatgaagcattatatggtcgaaaatgtcgtacgccgattctttgggatcaaaccggtgaacgtcaagtttttgggacagacatattgcgagaggcagaagaaaaagtaaagattatccaagaaaggttgcgcgttgctcagtcacgtcagaagagctatgccgataatcgtcgcagagatttggctttcgaagaaggagattatgtataccttcgggttacgccattacgaggtgttcatcgtttccaaaccaaagggaaattggcaccgcgttttgtgggaccttttaagattgtgagtcgaagaggtgaagtagcttatcagttagagttgcctccgtcaatggcgggaatacacgacgtgttccatgtgtctcagctgaagaaatgtttacgtgtacctacggaggaagcagatcctgatcgtatagagcttcaggaagatttaacttatgttgagaagccagtcagaattttggaatttccgacgttccggaggagagcgtttccgttgaggaagtactttgacctccttgtgcttcggtccgttcttgatctacc

SEQ ID NO: 15093 - DNA, 2232 bp, Oryza sativa
  Clone ID: TFbOSC13206j.C1.o1.fg
ggaagtgaccgtggcagttaccttgagactgaaggaattgagaatgatgctaccacaaggcatttggttgagatgctgtgggctatggatgaaagtcgtgcggagactgtgttagcagctcaagatcgtgaagaccggaatcggggtaagatttgcaagctagaagacaaggtggatcgtttggaaaaggaactagctgcattaaagggagaagcaccgccacagaaggccaggattcgtctcaccgcaaggaagagagctctatttgtccctcgctaccaattggcgccaaagtttcccccggtttctcttcttgtgccctgtccatgccagatggtgatcactcgcagcaatgggaatggccctaacaaccccaataacaacaatgaagggaacccaacacttgctcaagttcttgctcaacagactcagttaatgaacatgatgatgcagcaacttcagaaccagcagaaccagggaaataaccatgcacctccccagaacaagttagcagaatttcttcgtgtgaggctgcctattttctctagtaccactaatcctgttgaagctggtgattggctgcatgccatagagaagaagttggatttgcttcaatgcactgatcaggaaaaggtctcatttgcatcacatcagttgcatggccctgcctctgaatggtgggatcacttccgccttaataggactactgctgaacctatcacttggcttgaattcaccgctgctttccggaatacgcatataccatcgggagtggtgtctctcaagaagaaggaattcaggtcgctcacccagggatctcgctctgtcacggagtatctgcatgagttcaattgtctggctcgttatgctccagaagatgaggacaaatacaatcgcatggaacagaagaaacgccggattgctcaattcaagacacaaccgggaaataatcaaaggccgcgtcttactttaggaccccagtccatgccacatggaggttcttcgtctgttgttcgtccgcggcgtcagttcttcaacaacaatgctggcaacaacatccgcaatctagctccacgccctgttgcagtttcgacacagcaacagcctgccaagagggagcaaggcagcaagcccgtagtgtgcttcaactgtggagacccaggacattatgctgacaagtgtccgaagccccgacgcgtgaaggttgtccctgcccagagcaactctaccgcaccagcatcaaaggcccgtatcaatcatgttgctgctgcagaagctcaagacgctccagatgtgattttgggtacgttccttgttaactcagttcctgcaacagtgcttttcgattctggtgctacacattcatttttatctatgagttttgcgggaaatcatgggatggaagtagaagatcttagacgtcctttgatggttagtaccccaagtaatcaagcactctctttgcaacgtagcccctctgtcagaatagaaattaaaggagtaccatttctggccaatcttatcttgttagaacccaaagaccttgatgtcatcctagggatggactggttagccagacataaaggtgtgatagactgtgctaacagaaaagtaactctcaccagcaatgatggtcgagttgtaactgttcatgcattgtcttctgagtctttaaggtcaagactgaaccagataactttggaagagattcctatagtccgggagtatcccgatgtgttcccagatgatttacctggtatgccgcctaaaagggatatagagttcagaatagatttggtacctggaacaactccgatccataagagaccttatagaatggcagccaacgagttggcagaagtcaaaaggcaagtagatgatttgcttcagaaaggatacatcagaccgagttcatcaccatggggagctccggttatttttgtgggaaagaaagatcatacccagaggatgtgtgtggactatcgtgcactaaacgatgtgactatcaagaataggtatccactacccagaattgatgatttgtttgatcagcttaaaggtgccactgttttctccaagatagatcttcgatcagggtatcaccagttaagaatcaaagaggaagatatacctaagacagcttttaccgctaggtatggattgttcgaatgtactgttatgtcttttggacttaccaatgcccctgcttttttcatgaactttatgaataag

SEQ ID NO: 15094 - DNA, 3804 bp, Oryza sativa
  Clone ID: TFbOSC13283j.C1.o1.fg
atgccgtgttacaagcctgagtacctgtttggcgttgagggttttgtccaggagttgcgtacgatgtcctttgtcattggatttgggaatgctcctttttatgcccagattcgtcatgatcgtcatgaagaaaagtgccgagtcaaagtcaccttgaacagcaatagtgaagatatcccctcagtaatgtttgaagctggaggaagaaactacatccatgcatgtcaggaggtggcaaggatcgccataggagagctccgtgatcgctacagtgatcagttggtcgacactgagtatcgctatcatcctcgccaaccccagggaagtgaccgtggcagttaccttgagactgaaggaattgagaatgatgttaccacaagacatttggttgagatgttgtgggctatggatgaaagtcgtgcggagactgtgttagcagctcaagatcgtgaagatcggaatcgtggtaagatttgcaagctagaagacaaggtggatcgtttggagaaggaattagccgcattgaagggagaagcaccgccgcagaaggccaggattcgtcttaccgcaaggaagagagctttatttgtccctcgctatcaactggcgccaaaggttcgtgtggtggagaaagaagttgccccagctcaagcggatcctccggtcatcatcataagtagtgatgaagaagaagaatccaagcgcatcaattccaagattgagtgggtagcaactcaagatgatgaagatgagccttcaatcgacctcctatgctcggaagaactagagaagttggagagtttagtggtgtgggagtcttcagtttgtaataatgaaactcagttaagatcaataaaagttaaaatggtgaacactcgtagcaatgggaatggtcccaacaaccccaataataacatcaatggagagaatcccactctggcccaagttcttgctcagcagacacagcttatgaacatgatgatgcaacaatttcagaatcagcaaaaccaagggaataatcatgcacctccacagaacaagttagcagaatttcttcgtgtgaggccgcctgttttctctagtaccactaatcctgttgaagctagtgattggctacatgccatagagaagaagttggatttacttcagtgtactgatcaggagaaggtctcatttgcatcacatcagttgcatggccctgcctctgaatggtgggatcacttccgtcttaacaggactactgctgaacctatcacttggcttgaattcaccgctgctttccggaagacgcatataccatcgggggtagtgtctctcaagaagaaggagttcaggtcgcttacccagggatctcgctctgttacggagtatctgcacgagttcaatcgtcttgctcgttatgctccggaagatgtgcgcaatgatgaagagcgccaggagaagtttttgggaggacttaatgatgagctttcttacccacttatggttggagattaccctgatttccagaaattagtggataaggctattcgtcaggaagacaagtacaatcgcatggagcagaagaaacgtcggattgctcaattcaagacacaacagggaaataatcagaagccgcgtcttactttaggaccccagtccatgccacagggaggttcttcgtctgttgttcgtccgcaacgtcagttcttcaacaacaatgctggcaacaacatccgtaatcaagctccacgtcctgttgcagctccagcacagcaacaacctgccaagagggagcaaggcagcaagcccgtggtgtgtttcaactgtggagatccaggacattatgctgacaagtgtccgaagccccaacgcgtgaaggttgtccctgcccagagtaactctgctgtaccagcatcaaaggcccgtgtcaatcatattgctgctgcagaagctcaaggtgctccagatgtgattttgggtacgttccttgttaactcagttcctgcaacagtacttttcgattctggtgctacacattcattcttatctatgagttttgcgggaaatcatgggatggaagtagaagatcttagacgtcctttgatggttagtaccccaagtaatcaagcactctttttgcaacgtagcccctctgtcagaatagaaattcaaggagtaccatttctggccaatcttatcttgttagaatccaaagaccttgatgtcatcctagggatggactggttagccagacataaaggtgtgatagactgtgccaacagaaaagtaactctcaacagctatgatggtcgagttgtaaccgttcatgcattgtcttctgagtctttaaggtcaagactgaatcaaataactttggaagagattcctatagtccgggagtatcctgatgtgttcccagatgatttaccgggtatgccgcctaaaagggatatagagttcagaatagatttggtacctggaacaactccgatccataagagaccttatcgaatggcagccaatgagttggcagaagttaagaggcaagtagatgatttgctacagaaaggatacatcagaccgagttcatcaccatggggagctccggtaatttttgtggaaaagaaagaccatactcagagaatgtgtgtggactatcgtgcactaaacgatgtgactatcaagaataagtatccactacccaggattgatgatttgtttgatcagcttaaagacaagttcgtggtggtctttattgatgatattcttatctactctcgaaccaaagaagagcatgaggaacatcttcgccttgcattggagaagctacgagaacatcaactgtatgctaagtttagcaagtgtgaattttggttgtccgaagtgaaattccttggtcacgtcatctcagccggaggagttgccgttgatcctagtaacgtggaatccgtaaccaattggaagcaaccaaagacagtttcagagattcgcagtttcctaggccttgcaggatattatcggaggtttatagagaatttttctaagattgctaagcccatgacacgactgcttcagaaagatgtgaagtacaaatggtcggaagaatgtgagcggagttttcaagagttgaaaagtcgcttaatatcagctcctattttgattttgcctgatccaaagaagggtttccaagtatattgcgatgcatccaaacttgggttaggttgtgttctgatgcaagatgggaaggtggttgcctatgcatctcgtcagttacgtccgcatgagaagaactaccctactcatgatattgagttagctgcagtcgttcatgcattaaagatttggcgtcattatcttttcggtactcgtacagaagtgtacaccgatcacaagagtttaaagtatatctttactcagccggatctgaatatgagacaacggagatggttggaattaattaaggattatgacatgggaattcattatcatccgggaaaggctaatgttgtagcagacgctcttagcagaaaaggttattgcaatgctacagaaggacgacagttgccattggaattatgcaaggaatttgaaagattaaatttgggaattgtcggtagaggtttcgttgcagctttagaagcgaagcccactctaattgatcaagttagagaagcccaaattaatgatcctgatattcaagagatcaagaagaatatgagaagaggaaaagctattggtttcttggaagatgagcacggaactgtatggttgggtgaaagaatctgtgtctgtcacgtcctgataaattcatcccaaaattaa

SEQ ID NO: 15095 - DNA, 1425 bp, Oryza sativa
  Clone ID: TFbOSC14137j.C1.o1.fg
atgccacagggaggttcttcgtctgttgttcgtccgcagcgtcagttcttcaacaacaatgttggcaacaacatccgcaatcaagctctacgccctgttgcagctccaacacagcaacaacctgccaagagggagcaaggcagcaagcccgtggtgtgtttcaactgtggagacccaggacattatgctgacaagtgtccgaagccccgacgcatgaaggttgtccctacccagagcaactctaccgtaccagcatcaaaggcccgtgttaatcatgtcgctgctgcagaagctcaagatgctccagatgtgattttggaatccaaagacctagatgtcatcctagggatggactggttagccagacataaaggtgtgatagactgtgccaacagaaaagtaactctcaccagcaatgatggtcgagttgtaactgttcatgcattgtcttctgagtctttaaggtcaagactgaaccagataactttggaagagattcctatagtccgggagtatcccgatgtgttcccagatgatttacctggtatgccgcctaaaagggatatagagttcagaatagatctggtaccaggaacaactccgatccataagagaccttatagaatggcagccaatgagttggcagaagtcaagaggcacgtagatgatttgcttcagaagggatacatcagaccgagttcatctccatggggagctccagttatttttgtggaaaagaaagaccatacccagagaatgtgtgtggattatcgtgcattaaacgatgtgactatcaagaataagtatccgctacccagaattgatgatttgtttgatcagcttaaaggtgccactgttttctccaagatcgatcttcgatcaggatatcaccagttgagaatcaaagaggaagatatacctaagacagcttttaccactaggtatgggttgttcgaatgtactgttatgtcttttggacttaccaatgcccctgctttcttcatgaacttgatgaataaggtgtttatggaatacctagacaagttcgtggtggtctttattgatgatattcttatctactcccgaaccaaagaagagcatgaagaacatcttcgccttgcattggagaagctacgagaacatcaactgtatgctaagtttagcaagtgtgaattttggttgtctgaagtgaagttccttggtcacgtcatctcagcaggaggagttgccgttgatcctagtaatgtggaatccgtaactaattggaagcaaccaaagacagtttcagagattcgcagttttctaggcctcgcaggatattatcgaaggtttatagagaatttttctaagattgctaagcccatgacacgactgcttgtcacgaccggaaataacccaacgggcgttcttacgtgcgtgcattaa

SEQ ID NO: 15096 - DNA, 677 bp, Oryza sativa
  Clone ID: TFbOSC15745j.C1.o1.fg
aagacgcatataccatcgggagtggtgtctctgaagaagaaggagttcaggtcgcttacccagggatctcgctctgttacggagtatctgcacgagttcaatcgtctggctcgttatgctccggaagatgtgcgcaatggtgaagagcgtcaggagaagtttttggaaggacttaatgatgagctttcttacccactcatgactggagattatcatgatttccagaagctagtggataaggctattcgtcaggaggacaaatacaatcgcatggagcagaagaaacgtcggattgctcaattcaagacacaacaggggaataatcagaagccgcgtcttactttaagaccccagtccatgccacatggaggttcttcgtttgttgttcgtccgcagcgtcagttcttcaacaacaatgctggcaacaacatccgcaatcaagctccacgtcctgttgcagctccaacacagcaacaacctgccaagagggagcaaggcagcaagcccgtggtgtgtttcaactgtggagacccaggacattatgctgacaagtgtccgaagccccgacgcgtgaaggttgtccctacccagagcaactctacggtaccagcatcaaaggcccgtgtcaatcatgttgctgctgcaagaggttcaagatgctccagatgtgattttgg

SEQ ID NO: 15097 - DNA, 1425 bp, Oryza sativa
  Clone ID: TFbOSC15754j.C1.o1.fg
atgccacagggaggttcttcgtctgttgttcgtccgcagcgtcagttcttcaacaacaatgttggcaacaacatccgcaatcaagctctacgccctgttgcagctccaacacagcaacaacctgccaagagggagcaaggcagcaagcccgtggtgtgtttcaactgtggagacccaggacattatgctgacaagtgtccgaagccccgacgcatgaaggttgtccctacccagagcaactctaccgtaccagcatcaaaggcccgtgttaatcatgtcgctgctgcagaagctcaagatgctccagatgtgattttggaatccaaagaccttgatgtcatcctagggatggactggttagccagacataaaggtgtgatagactgtgccaacagaaaagtaactctcaccagcaatgatggtcgagttgtaactgttcatgcattgtcttctgagtctttaaggtcaagattaaaccaaataactttggaagagattcctatagtccgggagtatcccgatgtgttcccagatgatttacctggtatgccgcctaaaagggatatagagttcagaatagatttggtaccaggaacaactccgatccataagagaccttatagaatggcagccaatgagttggcagaagtcaagaggcaagtagatgatttgcttcagaaaggatacatcagaccgagttcatctccatggggagctccggttatttttgtggaaaagaaagaccatacccagagaatgtgtgtggactatcatgcattaaatgatgtgactatcaagaataagtatccgctacccagaattgatgatttgtttgatcagcttaaaggtgccaccgttttctccaagatagatcttcgatcagggtatcaccagttgagaatcaaagaggaagatatacctaagacagcttttaccactaggtatgggttgttcgaatgtacggttatgtcttttggacttaccaatgcccctgctttcttcatgaacttgatgaataaggtgtttatggaatacctagacaagttcgtggtggtctttatagatgatattcttatctactctcgaaccaaagaagagcatgaagaacatcttcgccttgcattagagaagctacgagaacatcaactgtatgctaagtttagcaagtgtgaattttggttgtctgaagtgaagttccttggtcacgtcatctcagcaggaggagttgccgttgatcctagtaatgtggaatccgtaactaattggaagcaaccaaagacagtttcagagattcgcagttttctaggcctcgcaggatattatcgaaggtttatagagaatttttctaagattgctaagcccatgacacgactgcttgtcacgaccggaaataacccaacgggcgttcttacgtgcgtgcattaa

SEQ ID NO: 15098 - DNA, 5349 bp, Oryza sativa
  Clone ID: TFbOSC15782j.C1.o1.np
gccgtcgctcgggaagaccgccgtcgtcatcgccaagtcgccgccgtcctcgtccgccccttcgcagccgtcggaacccgccggagcttcgtcgccgtcgacaacccgaaggtagccgccgcttccttctcgtcgccgtcgtcgtccaagattccgtcgtttccggagagtccgttttcgcagaagaagagtttgaagagttccaaggccagcaaggcaactcctggtttggaatggtacattcctggtttggagatagaactgtgcagccggggtggttgttcagaatggttgggcctatacaacaggatgccgcgctacaagcctgagtacctgtttggtgttgaagggtttgtccaggagttgcgtactatgtcctttgtcattggatttggaactgcccctttttatgcccagattcgtcatgatcgtcatgaagagaggtgccgtgtcaaagtcaccttaaacagtaatagtgaagatattccatcagtgatgttcgaagctggaggaagaaattatatccatgcatgtcaggaagtggcaaggatcgccataggagagctccgtgaccgctacagtgatcagttggccgatactgagtatcgctaccatcctcgccaaccacagggaagtgaccgtggcagttaccttgagactgaaggaattgagaatgatgctaccacaaggcatttggttgagatgctgtgggctatggatgaaagtcgtgcggagactgtgttagcggctcaagatcgtgaagaccggaatcgtggtaagatttgcaagctagaagacaaggtggatcgcttggagaaggaattagccgcattgaagggagaagcaccgccgcagaaggccaggattcgtctcaccgcaaggaagagaactttgtttgtccctcgttatcaattggcgccaaagatggtgaacactcgcagcaacgggaatggtcctaacctcaacaaccccaataacaacaacaatggagagaatcccactcttgctcaagttcttgctcaacagacacagcttatgaacatgatgatgcagcaatttcagaatcagcagaaccaaggaaataaccatgtacctcctcagaataagttagcagaatttcttcgtgtgaggccgcctgttttctctagtaccactaatcctgttgaagctagtgattggctgcatgccatagagaagaagttggatttacttcagtgtactgatcaggagaaggtctcatttgcatcacatcagttgcatggccctgcctctgaatggtgggatcacttccgccttaacaggactactgctgaacctatcacttggcttgaattcaccgctgctttccgaaagacgcatataccatcgggagtagtgtctctcaagaagaaggagttcaggtcgctttcccagggatctcgctctgttacggagtatctgcacgagttcaatcgtcttgctcgttatgctccggaagatgtgcgcaatgatgaagagcgccaggagaagtttttgggaggacttaatgatgagctttcttacccactcatggttggagattatcctgatttccagaaattagtggataaggctattcgtcaggaggacaagtacaatcgcatggagcagaagaaacgtcggattgctcaattcaagacacaacagggaaataatcagaagccgcgtcttactttaggaccccagcccatgccacagggaggttcttcgtctgttgttcgtccgcaacgtcagttcttcaacaacaatgctggcaacaacatccgtaatctagctccacgtcctgttgcagttccagcacagcaacaacctgccaagagggagcaaggcaacaagcccgtggtgtgtttcaactgtggagatccaggacattatgctgacaaatgtccgaagccccgacgcgtgaaggttgtccctgcccagaataactctgctgtaccaacatccaaggctcgtgtaaatcatgtcgctgctgcagaagctcaagatgctccagatgtgattttgggtatgttccttgttaactcagttcctgcaacagtgcttttcgattctggtgctacacattcattcttatctatgagttttgcgggaaatcatgggatggaagtagaagaccttagatgtcctttgatggttagtaccccaagtaatcaagcactctctttgcaacgtagcccctctgtcagaatagaaattcaaggagtaccatttctggccaatcttatcttgttagaatccaaagaccttgatgtcatcctagggatggactggttagccagacataaaggtgtgatagactgtgccaacagaaaagtaactctcaacagctatgatggtcgagttgtaactgttcatgcattgtcatctgagtctttaaggtcaagactgaaccagataactttggaagagattcctatagtccgggagtatcctgatgtgttcccagatgatttacctggtatgccgcctaaaagggatatagagttcagaatagatttggtacctggaacaactccgatccataagagaccttatcgaatggcagccaatgagttggcagaagttaagaggcaagtagatgatttgctacagaaaggatacatcagaccgagttcatcaccatggggagctccggttatttttgtggaaaagaaagaccatactcagagaatgtgtgtggactatcgtgcactaaacgatgtgactattaagaataagtatccactacccaggattgatgatttgtttgatcaacttaaaggtgccactgttttctccaagatagatcttcgatcagggtatcatcagttgagaatcaaagaggaagatatacctaagacagcttttaccactaggtatgggttgttcgaatgtactgttatgtcttttggacttaccaatgcccctgctttcttcatgaacttgatgaataaggtgtttatggaatacttagacaagttcgtggtggtctttatagatgatattcttatctactctcgaaccaaagaagagcatgaagaacatcttcgccttgcattggagaagctacgagaacatcaactgtatgctaagtttagcaagtgtgaattttggttgtccgaagtgaaattccttggtcacatcatctcagccggaggagttgccgtcgatcctagtaacgtggaatccgtaaccaattggaagcaaccaaagacagtttcagagattcgcagtttcctaggccttgcaggatattatcggaggtttatagagaatttttccaagattgctaagcccatgacacgactgcttcagaaagatgtgaagtacaagtggtcggaagaatgtgagcagagttttcaagagttgaaaagtcgcttaatatcagctcctattttgattttgcctgatccaaagaagggttttcaagtgtattgtgatgcatccaaacttgggttaggttgtgttctgatgcaagatgggaaggtggttgcctatgcctctcgacagttacgtccgcatgagaagaactaccctactcatgatattgagttagctgcagtcgttcatgcattgaagatttggcgtcattatcttttcggtactcgtacagaagtgtacaccgatcacaagagtttaaagtatatctttactcagtcggatctgaacatgagacaacggagatggttggaattaattaaggattatgacatgggaattcattatcatccgggaaaggctaatgttgtagcagacgctcttagcagaaaaggctattgcaatgctacagaaggacgacagttgccattggaattatgcaaggaatttgaaagattaaatttgggaattgtcggtagaggtttcgttgcagccttagaagcgaagcccactctaattgatcaagttagagaagcccaaattaatgatcctgatattcaagagatcaagaagaatatgagaagaggaaaagctattggtttcttggaggatgagcacggaactgtatggttgggtgagagaatctgtgtccccgacaacaaagatttaaaggatgcaattctgaaagaagctcatgatactttatactccattcaccctggtagtactaagatgtaccaggatctcaaggaaagattttggtgggcaagtatgaagcgtgaaatcgcagaatatgtagcagtatgtgatgtttgtcagcgagtcaaggcagaacatcagaaacccgccggtttgttgcagcctttgaagattcctgaatggaaatgggaagaaataggtatggattttattactggtttacccagaacgtcatcaggccatgactctatttgggtgatagtcgacagacttaccaaagtggctcatttcattccggtaaagacaacttattccggaagtcgcttagcggaattgtatatggcaaggattgtgtgtttgcatggcgtccctaagaagatagtgtctgatcgaggcagtcagtttacttcaaatttttggaagaaacttcaggaagagatgggttctaagctgaactttagtactgcttatcatccgcagacagacggacaaaccgaaagggtgaatcaaattttggaagacatgttgagagcttgtgctctagatttcggtggaagttgggataagaatctaccctatgcagaattttcgtacaacaacagttatcaagctagtctacagatggctccgtatgaagcactgtatggtcggaagtgccgcactccgcttttgtgggatcaaacgggagaacgtcaggttttcggaacggatatcctaagggaagcagaagaaaaggtaaagatcattcaagaaagattgcgtgtggctcagtctcgtcataagagttatgccgacaatcgccgtagggatttgagttttgaagaaggagattatgtgtatcttcgtgtcacgcctctacgaggagttcatcgttttcataccaagggaaaattggcaccgcgttttgtgggaccttataagattgtcagtagaagaggagaggttgcttatcagttggagttacctcaatctttggcaggagtacataatgtgttccatgtgtcgcaattgaaaaagtgtttaagggtacctactgaagaagctaatattgagcagatagaagtccaagaggatttgacttatgttgagaaaccaatccgtatcctggaaacaaatgagagaagaaccaggaatcgagttatccgtttttgtaaagtccagtggagtaatcactcggaagaagaatcaacttgggaacgagaagatgaattgaagtcagctcatccgcacctgttcgccagttcttccgaatctcgaggacgagattctgtt

SEQ ID NO: 15099 - DNA, 5232 bp, Oryza sativa
  Clone ID: TFbOSC15871j.C1.o1.np
cgaaagtcggcccaaaacctcctctctctttcccccggcccaattccgacgtttccggagagtccgttttcgcaggagaagaatttgaagagttccaaggccagcaaggcaactcctggtttggaatggtatattcctggtttggagatagaactgtacagccgggatggttgttcagaatggttgggcctatacaacaggatgccgtgctacaagcctgagtacttgtttggtgttgagggatttgtccaggagttgcgtacgatgtcctttgccataggatttgggactacccctttttatgcccagattcctcatgatcgtcacgaagagaagtgccgagtcaaagtcaccttgaacagtaatagtgaagatatcccctcagtgatgttcgaagctggaggaagaaactacatccatgcatgtcaggaggtggcaaggatcgccataggagagctccgcgatcgctacagtgatcagttggccgacactgagtatctctaccatcctcgcaaccacagggaagtgaccgtggcagctaccttgagactgaaggaattgagaatgatgctaccacaaagcatttggttgagatgctgtgggctatggatgaaacccgtgcagagactgtgttagcagctcaagatcgtgaagaccggaatcatggtaagatttgcaagctataggacaaagtggatcgtttagagaaggaactagccgcattgaagggagaagcaccaccgcagaaggccaggattcgtcttaccgcaaggaagagagctctatttgtccctcgctaccaattggcgccaaagatggtgctcactcgcagcaacgggaatggccccaacaacaacaataacaacaacaatggagagaatcccacacttgcccaagtcctggctcaacaggtacagcttatgaacataatgatgcagcaacttcagaaccagcagaaccagggaaataatcatgcacctcctcagaacaagttagcagaatttcttcatgtgaggccgcctactttctctagtaccactaatcctgttgaagctggcgattggctgcatgccatagaaaagaagttggatttgcttcagtgcaccgatcaggagaaggtctcatttgcatcacatcagttgcatggccttgcctctgaatggtgggatcacttccgcctgaacaggactactactgaacctatcacttggcttgaattcaccgctgctttccggaagacgcatataccatcgggagtggtgtctctcaagaagaaggaattcaggtcgctcactcaggggtctcgctctgttactgagtatctgcacgaattcaatcgtctggctcgttatgctccggaagatgtgcgcactgatgaagagcgacatgagaggttcttggaaggacttaatgatgagctttcttacccactcatgactggggattatcatgatttccagaagttagtggataaggctattcgccaggagggcaagtacaaccgcatggagcagaagaaacgccggattgctcaattcaaggcacaacaagggaatagtcagaggccgcgtcttactttaggaccccagtccatgcgacagggaggttcttcgtctgttgttcgtccgcagcgtcagttcttcaacaacaatgcgggcaacaacatccgcaatcaagctccacgccctgttgcagcttcgacacagcaacagcctgccaagaaggagcaaggcagcaagcccgtggtgtgcttcaactgtggagacccaggacattacgctgacaagtgtccgaagccccgacgcgtgaaggttgtccctgcccagagcaactctactgtaccagcatcaaaggcccgtgtcaatcatgttgctgctgcagaagcccaaggtgctccggatgtgattttgggtacgttccttgttaacttagttcctgcaacagtgcttttcgattctggtgctacacattcattcttatctatgagttttgcgggaaatcatgggatggaagtagaagatcttagacgtcctttgatggttagtaccccaagtaatcaagcactctctttgcaacgtagcccctctgtcagaatagaaattcaaggagtaccatttctggccaatcttatcctgttagaatccaaagaccttgatgtcatcttagggatggactggttagccagatataaaggtgtgatagactgtgccaacagaaaagtaactatcaccagtaatgatggtcgagttgtaactgttcatgcattgtcttctgagcctttaaggtcaagactgaaccaaataactttggaagagattcctatagtccgggagtatcccgatgtgttcccagacgatttacctggtatgccgcctaaaagggatatagagttcagaatagatttggtaccaggaacgactccgatccataagagaccttatagaatggcagccaatgagttggcagaagtcaagaggcaagtagacgatttgcttcagaaaggatacatcagaccgagttcatctccatggggagctccggttatttttgtggaaaagaaagatcatacccagaggatgtgtgtagactatcgtgcactaaatgatgtgactatcaagaataagtatccgctgcccagaattgatgatttgtttgatcagcttaaaggtgccatcgttttctccaagatagatcttcgatcagggtatcaccagttgaggatcaaagaggaagatatacctaagacagcttttaccactaggtatggattgttcgaatgtactgttatgtcttttggacttaccaatgcccccgctttcttcataaacttgatgaataaggtgtttatggaatacctagacaagttcgtggtggtctttattgatgacattcttatctactcccgaaccaaagaagagcatgaagaacatcttcgccttgcactagagaagctacgagaacatcaactgtatgctaagtttagcaagtgtgaattttggttgtctgaagtgaagttccttggtcacgtcatctcagcaggaggagttgccgtcgatcctagtaatgtggaatccataaccaattggaaccaaccaaagacagtttcaaagattcgcagtttcttaggcctgcaggaatataatggaggtttatagagaatttttccaagattgctaagcccatgacacgattgcttcaaaaggatgtgaagtacaagtggtcagaaaatgtaagcagagttttcaagagttgaagaatcgcttaatatcagctcctattttgattttacctgatccaaagaagggtttccaagtgtattgtgatgcatcccaacttgggttaggttgtgttctgatgcaagatgggaaggtggttgcatatgcatctcgtcagttacgtccgcatgagaagaactaccctactcatgatcttgagttagctgcagtaattcatgcgttgaagatttggcgccattatcttttcggtacttgtatagaggtgtataccgatcacaagagtttaaagtatatttttactcagccggatctgaacatgagacaacggagatggttggaattaattaaggattatgacatgggaattcagtatcacccgggaaaggctaatgttgtagcagatgctcttagcaggaaaggctattgcaatgctacggaaggacgacagttgccattggaattatgcaaggaatttgaaagattaaatttgggaattgtcagaagaggtttcgttgcagccttagaagcaaagcccactctaattgatcaagttagagaagcccaaattaatgatcctgatattcaagaaatcaagaagaatatgagaagagggaaagctatcggtttcttggaggatgagcaaggaactgtatggttgggtgagagaatctgcgtccccgacaacaaagatttaaaagatgcaattctgaaagaagctcatgatactttatactccattcaccctggtagtaccaaaatgtaccaggatctcgaggaaagattttggtgggcaagtatgaagcgtgaaatcgcagaatacgtagcagtatgtgatgtttgtcagcgagtcaaggcagaacatcagaaacccgccggtttgctgcagcctttgaagattcctgaatggaaatgggaggaaatcggtatggatttcatcactggtctacccagaacgtcatcaggccatgactctatttgggtggtagtcgacagacttaccaaagtggctcatttcatcccagtaaagacaacctattccggaagttggttggcggaattgtatatggcaaggattgtgtgtttgcatggcgtccctaagaaaatagtgtctgatcgaggcagtcagtttacttcaaatttttggaagaagcttcaggaagagatgggttctaagctgaactttagtactgcttatcatccgtagacagacggacaaaccgaaagggtgaatcagattttggaagatatgttgagagcttgtgctttagacttcggtggaagttgggataggaatctaccttatgcagaattttcgtacaacaacagttatcaagctagtcttcagatggctccttacgaagcactgtatggtcggaagtgccgcactccgcttttgtgggatcaaacaggagaacgtcaggttttcgggacggacatcctaagggaagcagaagagaaggtgaaaatcattcaagaaaggttgcgtgtggcccagtctcgtcataagagttatgccgacaatcgtcgtagagatctaagttttgacgaaggagattatgtgtatcttcgtgtcacgcctcttcgaggagttcatcgttttcacaccaaaggaaaattggtaccgcattttgtgggaccttataagattgtcaatagaagaggagaggttgcttatcagttggagttacctcaatctttggcaggagttcataatgtgttccatgtgtcgcaattgaaaaagtgtttaagggtacctaccgaagaagctaatcttgaacagatagaagtccaagaggatctgacctatgttcagaaaccaatccgtatcttggaaatagaagagagaagaaccagaaatcgagttatccgtttttacaaagtccaatggagtaatcactcggaagaagaatcaacttgggaacgagaagatgaattgaagtcagctcatccgcatctgttcgccagttcttccgaatctcgaggacgagattctgtt

SEQ ID NO: 15100 - DNA, 4357 bp, Oryza sativa
  Clone ID: TFbOSC1652j.C1.o1.fg
atgacacgactgcttcagaaagatgtgaagtacaagtggtcggaagaatgtgaacagagttttcaagaattgaaaagtcgcttaatatcagctcctattttgattttgcctgatccaaagaagggttttcaagtgtattgcgatgcatccaaacttgggttaggttgtgttttgatgcaagatgggaaggtggttgcctatgcctctcgacagttacgtccgcatgagaagaactaccctactcatgatattgagttagctgcagtcgttcatgcattgaagatttggcgtcattatcttttcggtactcgtacagaagtgtacaccgatcacaagagtttaaagtatatctttactcagccggatctgaacatgagacaacggagatggttggaattaattaaggattatgacatgggaattcattatcatccgggaaaggctaatgttgtagcagacgctcttagcagaaaaggctattgcaatgctacagaaggacgacagttgccattggaattatgcaaggaatttgaaagattaaatttgggaattgtcggtagaggtttcgttgcagctttagaagcgaagcccactctaattgatcaagttagagaagcccaaaataatgatcctgatattcaagagatcaagaagaatatgagaagaggaaaagctattggtttcttggaggatgagcacggaacggtatggttgggtgagagaatctgtgtccccgacaacaaagatttaaaggatgcaattctgaaagaagctcacgatactttatactccattcaccctggtagtactaagatgtaccaggatctcaaggaaagattttggtgggcaagtatgaagcgtgaaatcgcagaatacgtagcagtatgtgatgtttgtcagcgagtcaaggcagaacatcagaaacccgccggtttgttgcaacctttgaagattcctgaatggaaatgggaagaaattggtatggattttattactggtttacccagaacgtcatcaggccatgactctatttgggtaatagttgacagacttaccaaagtggctcatttcattccgacagacggacaaaccgaaagggtgaatcaaattttggaagacatgttgagagcttgtgctctagatttcggtggaagttgggataagaatctaccttatgcagaattttcatacaacaacagttatcaagctagtttacagatggctccttacgaagcactgtatggtcggaagtgccgcactccgcttttgtgggatcaaacgggagaacgtcaggttttcggaacggatatcctaagggaagcagaagaaaaggtaaagatcattcaagaaagattgcgtgtggctcagtctcgtcataagagttatgccgacaatcgccgcagagatttgagttttgaagagggagattatgtgtatcttcgtgtcacgcctcttcgaggagttcatcgttttcataccaaaggaaaattggcaccgcgttttgtgggaccttataagattgtcagtagaagaggagaggttgcttatcagttggagttacctcaatctttggcaggagtacataatgtgttccatgtgtcgcaattgaaaaagtgtttaagggtacctaccgaagaagctaatattgagcagatagaagtccaagaggatttgacttatgttgagaaaccaatccgtatcctggaaacaactcctggtttggaatggtacattcctggtttggagatagaactgtgcagccggggtggttgttcagaatggttgggcctatacaacaggatgccgcgttacaagcctgagtacctgtttggtgttgagggttttgtccaggagttgcgtacgatgtcctttgtcattggatttgggactgcccctttttatacccagattcctcatgatcgtcatgaagagaagtgccgagtcaaagtcaccttgaacagcaatagtgaagatattccctcagtgatgttcgaagctggaggaagaaactacatccatgcatgtcaggaggtggcaaggatcgccataggagagctccgtgatcgctacagtgatcaattggccgacactgagtatcgttaccatcctcgccaaccccagggaagtgaccgtggcagttatcttgagactgaaggaattgagaattatgttaccacaagacatttggttgagatgttgtgggctatggatgaaagtcgtgcggagactgtgttagcagctcaagatcgtgaagaccggaatcatggtaagatttgcaagttagaagacaaggtggatcgtttggagaaggaattagccgcattgaagggagaagcaccgccgcagaaggccaggattcgtcttaccgcaaggaagagagctctatttgtccctcgctatcaactggcgccaaagatggtgaacactcgtagcaatgggaatggtcccaacaaccccaataacaacaatggagagaatcccactcttgctcaagttcttgctcaacaaacacagcttatgaacatgatgatgcagcaatttcagaatcagcaaaaccaagggaataatcatgcacctccccagaacaagttagcagaatttcttcgtgtgaggccgcctgttttctctagtaccactaatcctgttgaagctagtgattggctgcatgccatagagaagaagttggatttacttcagtgcactgatcaggagaaggtatcttttgcatcacatcagttgcatggccctgcctctgaatggtgggatcacttccgccttaacaggactactgctgaacctatcacttggcttgaattcaccgctgctttccgaaagacgcatataccatcgggagtagtgtctctcaagaagaaggagttcaggtcgcttactcagggatctcgctctgttacggagtatctgcacgagttcaatcgtcttgctcgttatgctccggaagatgtgcgcaatgatgaagagcgccaggagaagtttttgggaggacttaatgatgagctttcttacccactcatggttggagattatcctgatttccagaaattagtggataaggctattcgtcaggaggacaagtataatcgcatggagcagaagaaacgtcggattgctcaattcaagacacaacagggaaataatcagaagccgcgtcttactttaggaccccagtctatgccacagggaggttcttcgtctgttgttcgtccgcaacgtcagttcttcaacaacaatgctggcaacaacatccgtaataaagctccacgtcctgttgcagctccagtacagcaacaacctgccaagagggagcaaggcagcaagcccgtggtgtgtttcaactgtggagacccaggacattatgctgacaagtgtccgaagccccgtcgcgtgaaggttgtccctgcccagagtaactctgctgtaccagtatccaaggctcgtgtaaatcatgtcgctgctgcagaagctcaagatgctccagatgtaattttgggtacgttccttgttaactcagttcctgcaacagtacttttcgattctggtgctacacattcattcttatctatgagttttgcgggaaatcatgggatggaagtagaagatcttagacgtcctttgatggttagtaccccaagtaatcaagcactctctttgcaacgtagcccctcggtcagaatagaaattaaaggagtaccatttctggccaatcttatcttgttagaatccaaagaccttgatgtcatcctagggatggactggttagccagacataaaggtgtgatagactgtgccaacagaaaagtaactctcaacagctatgatggtcgagttgtaactgttcatgcattgtcatctgagtctttaaggtcaagactgaaccagataactttggaagagattcctatagtccgggagtattctgatgtgttcccagatgatttacctggtatgccgcctaaaagggatatagagttcagaatagatttggtacctggaacaactccgatccataagagaccttatcgaatggcagctaatgagttggcagaagttaagaggcaagtagatgatttgctacagaaaggatacatcagaccgagttcatcaccatggggagctccggttatttttgtggaaaagaaagaccatactcagagaatgtgtgtggactatcgtgcactaaacgatgtgactatcaagaataagtatccactacccaggattgatgatttgtttgatcagcttaaaggtgccactgttttctccaagatagatcttcgatcagggtatcatcagttagaatcaaagaggaagatatacctaagacagcttttaccactag

SEQ ID NO: 15101 - DNA, 3117 bp, Oryza sativa
  Clone ID: TFbOSC1666j.C1.o2.fg
atgtcgaacgaaaaggttccatcgaatgcaccaatagcgcctcaagaaggtaacgctcctcaaaattccggtagcaataagcagccagacgcttctagtgaagaaacgtggcgcacaccaagtgacccgtttccaatggaaataacacaagtcgccccccgcgatgatgatccggactacatacctatcgaacaggccatggtagtccgacgccgctcgaaacgtaaagccgagaggaacaggacagagcaagaagttgagatggacaccgctacgtctgcacctgaacgtacggagacatctacaagtgcaggcgggagtgggaaaaaaagatgtggtgagagaagcaagaataaattacccaaggaaacttacaacgtgattgctctcgatcaggatgggaagcccgtcgagccaccgatagtgcggtccaagttcagcaacgcatgtggcactctagtcaggacacgttgtcccattaatgtcaagttgtgggaaacagtggacgacaacatcaagacacttctctggaatgagttgcagaagtattttgtgttccctcctggatcagaggtcagggggagagattacgcacttaaaaagatgggagatcgatggcgacagtggaagtccgatctaaatcgggattatgttcagaagaatctcccaccgtttacggattatggacatatatcgcaggctgactgggacacgtttgttgcggatcatacaacagctgaagcattggctttgaggaaaaaaatgtcatacgctggtcacgtcgatcaatggcgggagatcgagcaaagatttgccgcggccgctgaaaacccgacagcctttccaaggttattccctgatagccaacaacccacacaatccgcacagcaaacaactaatgtacccagcagtgtaggctcagtgcagacaactaccttccctgtggatagtataactggaccacctccgtgcagtctcatcgtaccaatcggtcgcgctggaaagactaaggaggttgcaatgggttttgcaatacccggacgtcaattccacaacacggcaatccctgaggattacgcaaggatacaggtcgccaagactgagccacaaactaagccttacccactagacatgtggaagtacggtagtgctttgcaacagaggcccgaagaccggtccttatatggccgagctcctggtttggaatggtacattcctggtttggagatagaactgtgcagccggggtggttgttcagaatggttgggcctatacaacaggatgccgcgttacaagcctgagtacctgtttggtgttgagggttttgtccaggagttgcgtacgatgtcctttgtcattggatttgggactgcccctttttatacccagattcctcatgatcgtcatgaagagaagtgccgagtcaaagtcaccttgaacagcaatagtgaagatattccctcagtgatgttcgaagctggaggaagaaactacatccatgcatgtcaggaggtggcaaggatcgccataggagagctccgtgatcgctacagtgatcaattggccgacactgagtatcgttaccatcctcgccaaccccagggaagtgaccgtggcagttatcttgagactgaaggaattgagaattatgttaccacaagacatttggttgagatgttgtgggctatggatgaaagtcgtgcggagactgtgttagcagctcaagatcgtgaagaccggaatcatggtaagatttgcaagttagaagacaaggtggatcgtttggagaaggaattagccgcattgaagggagaagcaccgccgcagaaggccaggattcgtcttaccgcaaggaagagagctctatttgtccctcgctatcaactggcgccaaagatggtgaacactcgtagcaatgggaatggtcccaacaaccccaataacaacaatggagagaatcccactcttgctcaagttcttgctcaacaaacacagcttatgaacatgatgatgcagcaatttcagaatcagcaaaaccaagggaataatcatgcacctccccagaacaagttagcagaatttcttcgtgtgaggccgcctgttttctctagtaccactaatcctgttgaagctagtgattggctgcatgccatagagaagaagttggatttacttcagtgcactgatcaggagaaggtatcttatgcatcacatcagttgcatggccctgcctctgaatggtgggatcacttccgccttaacaggactactgctgaacctatcacttggcttgaattcaccgctgctttccgaaagacgcatataccatcgggagtagtgtctctcaagaagaaggagttcaggtcgcttactcagggatctcgctctgttacggagtatctgcacgagttcaatcgtcttgctcgttatgctccggaagatgtgcgcaatgatgaagagcgccaggagaagtttttgggaggacttaatgatgagctttcttacccactcatggttggagattatcctgatttccagaaattagtggataaggctattcgtcaggaggacaagtataatcgcatggagcagaagaaacgtcggattgctcaattcaagacacaacagggaaataatcagaagccgcgtcttactttaggaccccagtctatgccacagggaggttcttcgtctgttgttcgtccgcaacgtcagttcttcaacaacaatgctggcaacaacatccgtaataaagctccacgtcctgttgcagctccagtacagcaacaacctgccaagagggagcaaggcagcaagcccgtggtgtgtttcaactgtggagacccaggacattatgctgacaagtgtccgaagccccgtcgcgtgaaggttgtccctgcccagagtaactctgctgtaccagtatccaaggctcgtgtaaatcatgtcgctgctgcagaagctcaagatgctccagatgtaattttgggtacgttccttgttaactcagttcctgcaacagtacttttcgattctggtgctacacattcattcttatctatgagttttgcgggaaatcatgggatggaagtagaagatcttagacgtcctttgatg

SEQ ID NO: 15102 - DNA, 2928 bp, Oryza sativa
  Clone ID: TFbOSC17324j.C1.o1.fg
ggaggttcttcgtctattgttcgtccgcagcgtcagttcttcaacaacaatgctggcaacaacatccgtaatcaagttccacgtcctgttgcagctccaacacagcaacaacctgccaagagggagcaaggcagcaaacccgtggtgtgtttcaactgtggagacccaggacattacgctgacaagtgtccgaagccccgacgcgtgaaggttgtccctactcagagcaactctaccgcaccagcatcaaaggcccgtgtcaatcatgtcgctgctgcagaagctcaagatgctccagatgtgattttgggtacgttccttgttaacttagttcctgccacagtgcttttcgattctggtgctacacattcattcttatctatgagttttgcgggaaatcatgggatggaagtagaagatcttagacatcctttgatggttagtaccccaagtaatcaagcactctctttgcaacgtagcccctctgtcagaatagaaattaaaggagtaccatttctggccaatcttatcttgttagaatccaaagaccttgatgtcatcctagggatggactggttagccagacataaaggtgtgatagactgtgctaacagaaaagtaactctcatcagcaatgatggtcgagttgtaactgttcatgcattgtcatctgagtctttaaggtcaagactgaaccagataactttggaagagattcctatagtccgggagtatcccgatgtgttcccagatgatttacctggtatgccgcccaaaagggatatagagttcagaatagatttggtaccaggaacaactccgatccataagagaccttatagaatggcagccaatgagttggcagaagtcaaaaggcaagtagacgatttgcttcagaaagggtacatcagaccgagttcatctccatggggtgctccggttatttttgtggaaaagaaagaccatactcagcggatgtgtgtggactatcgtgcattaaacgatgtgactatcaagaataagtatccgctgcccagaattgatgatttgtttgatcagcttaaaggtgctactgtattctccaagatagatcttcgatcaggatatcaccagttgagaatcaaagaggaagatatacctaagacagcttttaccactaggtatgggttgttcgaatgtactgttatgtcttttggacttaccaatgcccctgctttcttcatgaacttgatgaataaggtgtttatggaatacctagacaagtttgtggtggtctttattgatgacattcttatctactcccgaaccaaagaagagcatgaagaacatcttcgccttgcattggagaagctacgagaacatcaactgtatgctaagtttagcaagtgtgaattttggttgtctgaagtgaagttccttggtcacgtcatctcagcaggaggagttgccgtcgatcccagtaatgtggaatccgtaaccaactggaaacaaccaaagacagtttcagagattcgcagttttctaggcctcgcaggatattaccggaggtttatagagaatttttccaagattgctaagcccatgacacgactgctacagaaagatgtgaagtacaagtggtcagaagaatgtgagcagagttttcaagagttgaagaatcgcttgatatcagctcctattttgattttacccgatccaaagaagggtttccaagtctattgcgatgcatccaaacttgggttaggttgtgttctgatgcaagatgggaaggtggttgcctatgcatctcgtcagttacgtccgcatgagaagaactaccctactcatgatcttgagttagctgcagtagttcatgcgttgaaaatttggcgtcattatcttttcggtactcgtacagaggattatgacatgggaattcattatcacccaggaaaggcaaatgttgtagccgacgctcttagcaggaaaggctattgcaatgctaccgaaggacgacagttgccattggagttatgccaggaatttgaaagattaaatttgggaattgtcagtagagagatcaagaagaatatgagaagaggaaaagctatcggtttcttggaggatgagcaaggaactgtttggttgggcgagagaatctgtgtccctgacaacaaagatttaaaagatgtaattctgaaagaagctcatgatactttatactctattcaccctggtagtactaagatgtaccaggatctcaaggaaagattttggtgggcaagtatgaaacgtgaaatagcagaatatgtagcagtatgtgatgtttgtcagcgagtcaaggcagaacatcagaaacctgccagtttgctgcagcctttaaagattcctgaatggaagtgggaagaaatcggtatggattttatcactggtttacccagaacgtcatcgggtcatgactctatttgggtgatagtcgacagacttaccaaagtagctcatttcattccggtaaagacaacctattctggaagtcggttggcggaattgtacatggcaaggatcgtgtgtttgcatggcgtccctaagaaaatagtgtctgatcgaggcagtcagtttacttcaaatttttggaagaaacttcaggaagagatgggttctaagctgaactttagtactgcttatcatccgcagacagacggacaaaccgaaagggtgaatcaaattttggaagacatgttgagagcttgtgctttagacttcggtggaagttgggataagagtctaccttatgcagaattttcgtacaacaacagttatcaagctagtcttcagatggctccttacgaagcactgtatggtcggaagtgccgcactccacttttgtgggatcaaacgggagaacgtcaggttttcgggacggatatcctaagagaagcagaagaaaag

SEQ ID NO: 15103 - DNA, 2233 bp, Oryza sativa
  Clone ID: TFbOSC17993j.C1.o1.gm
atggagcccgagaactccgcggccggtttcctttctctccggccgccctctctctctcccgtcgctataaaatcaatccccgagctccgctcctccgtttccgccactcgccgctcactctccccgtcggaatcgagcccgcaccgtcgcactttctctccgccgtcgccgccgtgctccggttcgccgccgtcgtcgctccggacttcctcccgactcggcgtcacctccatcggcttcgccgcgttgccgtcgaccccgtccgcgcctccgtttcgcccgccgaccgccggagcaccgtcgtcctcgtcatcccgaaccgcgccgccgcctctcgccgcttcggtcgtcgtttccgccgccctcgtcgtcccggggtgggacccggccgtcagccgcccgcgcccgcgggtgcggctgacgcgtgggacccacggcgccgaccgccgccagccgcgtgctcccgacgctgcagcttcggaagatccgctcttcgtggaagttgaagccgcacctcggccatataaggaccggtcttcgggcctctgttgcaacgcactaccgtacttccacatgtctagtggggcaaatgaaggctacacgagctgcggcccggagaaggtctcatttgcatcacatcagttgcatggccctgcctctgaatggtgggatcacttccgccttaacaggactactgctgaacctatcacttggcttgaattcaccgctgctttccgaaagacgcatataccatcgggagtagtgtctctcaagaagaaggagttcaggtcgcttacccagggatctcgctctgttacggagtatctgcacgagttcaatcgtcttgctcgttatgctccggaagatgtgcgcaatgatgaagagcgccaggagaagtttttgggaggacttaatgatgagctttcttacccacttatggttggagattaccctgatttccagaaattagtggataaggctattcgtcaggaggacaagtacaatcgcatggagcagaagaaacgtcggattgctcaattcaagacacaacagggaaataatcaaaagccgcgtcttaccttaggaccccagtccatgccacagggaggttcttcgtctgttgttcgtccgcaacgtcagttcttcaacaacaatgctggcaacaacatccgtaatcaagctccacgtcctgttgcagctccagcacagcaacaacctgccaagagggagcaaggcagcaagcccgtggtgtgtttcaactgtggagatccaggacattatgctgacaagtgtccgaagccccgacgcgtgaaggttgtccctgtccagaataactctgctgtaccagcatcaaaggcccgtgtcaatcatgttgctgctgcagaagctcaagatgctccagatgtggttttggtccgggagtatcctgatgtgttcccagatgatttaccggccaatgagttggcagaagttaagaggcaagtagatgatttgctacagaaaggatacatcagaccgagttcatcaccatggggagctccggttatttttgtggaaaagaaagaccatactcagagaatgtgtgtggactatcgtgcactaaacgatgtgactatcaagaataagtatccactacccaggattgatgatttgtttgatcagcttaaaggtgccactgttttctccaagatagatcttcgatcagggtattatcagttgagaatcaaagaggaagatatacctaagacagcttttaccactaggtatgggttgttcgaatgtactgttatgtcttttggacttaccaatgcccctgctttcttcatgaacttgatgaataaggtgtttatggaatacctagacaagttcggggtggtctttattgatgatattcttatctactctcgaaccaaagaagagcatgaggaacatcttcgtcttgcattggagaagctacgagaacatcaactgtatgctaagtttagcaagtgtgaattttggttgtccgaagtgaaattccttggtcacgtcatctcagccggaggagttgccgtcgatcctagtaacgtggaatccgtaaccaattggaagcaaccaaagacagtttcagagattcgcagtttcctaggcctcgcaggatattaccggaggtttatagagaatttttccaagattgctaagcccatgacacgactgcttcagaaagatgtgaagtacaagtggtcggaagaat

SEQ ID NO: 15104 - DNA, 4779 bp, Oryza sativa
  Clone ID: TFbOSC18197j.C1.o1.np
ggggagcacctctatatagaaaatttggagatagaactgtgcagccggggtggttgttcagaatggttgggcctatacaacaggatgccgcgttacaagcctgagtacctgtttggtgttgagggttttgtccaggagttgcgtacgatgtcctttgtcattggatttgggactgcccctttttatgcccagattcctcatgatcgtcatgaagagaagtgccgagtcaaagtcaccttgaacagcaatagtgaagaggtcccctcagtgatgtttgaagctggaggaagaaactacatccatgcatgtcaggaggtggcaaggattgccataggagagctccgtgatcgctacagtgatcaattggccgacactgagtatcgctaccatcctcgccaacctcagggaagtgaccgtggtagttaccttgagactgaaggaattgagaatgatgttaccacgaaacatttggttgagatgttgtgggctatggatgaaagtcgtgcagagactgtgttagcagctcaagatcgtgaagatcggaatcgtggtaagatttgcaagctagaagacaaggtggatcgtttggagaaggaattagccgcattgaagggagaagcaccgccgcagaaggccaggattcgtcttaccgcaaggaagagagctctatttgtccctcgctatcaactggcgccaaagatggtgaacactcgtagcaatgggaatggtcccaacaaccccaataacaacacaatggagagaatcccactctggcccaagttcttgctcaacagacacagcttatgaacatgatgatgcagcaatttcagaatcagcaaaaccaagggaataatcatgcacctccacagaacaagttagcagaatttcttcgtgtgaggccgcctgttttctctagtaccactaatcctgttgaagctagtgattggctgcatgccatagagaagaagttggatttacttcagtgtactgatcaggagaaggtctcatttgcatcacatcagttgcatggccctgcctctgaatggtgggatcatttccgccttaacaggactactgctgaacctatcacttggcttgaattcaccgctgctttccggaagaaacatataccatcgggagtagtgtctctcaagaagaaggagttcaggtcgctttcccagggatctcgctctgttacggagtatctgcacgagttcaatcgtcttgctcgttatgctcggaaagatgtgcgcaatgatgaagagcgccagaagaagtttttgagagaacttaatgatgagctttcttacccactcatggttggagattatcctgatttccagaaattagtggataaggctattcgtcaggaggacaagtacaatcgcatggagcagaagaaacgtcggattgctcaattcaagacacaacagggaaataatcagaagccgcgtcttactttaggaccccagcccatgccacagggaggttcttcgtctgttgttcgtccgcaacgtcagttcttcaacaacaatgctggcaacaacatccgtaatcaagctccacgtcctgttgcagctccagcacagcaacaacctgccaagagggagcaaggcaacaagcccgtggtgtgtttcaactgtggagatccaggacattatgctgacaagtgtccgaagccccgacgcgtgaaggttgtctctgctcaaagtaactctgctgtaccagcatcaaaggcccgtgtcaatcatgttgctgctgcagaagctcaagatgctccagatgtgattttgggtacgttccttgttaactcagttcctgcaacagtacttttcgattctggtgctacacattcattcttatctatgagttttgcgggaaatcatgggatggaagtagaagatcttagacgtcctttgatggttagtactccaagtaatcaagcactctctttgcaacgtagcccctctgtcagaatagaaattcaaggagtaccatttctggccaatcttatcttgttagaatccaaagaccttgatgtcatcctagggatggactggttagccagacataaaggtgtgatagactgtgccaacagaaaagtaactctcaacagctatgatggtcgagttgtaactgttcatgcattgtcatctgagtctttaaggtcaagactgaaccagataactttggaagagattcctatagtccgggagtatcctgatgtgttcccagatgatttacctggtatgccgcctaaaagggatatagagttcagaatagatttggtacctggaacaactccgatccataagagaccttatcgaatggcagccaatgagttggcagaagttaagaggcaagtagatgatttgctacagaaaggatacatcagaccgagttcatcaccatggggagctccggttatttttgtggaaaagaaagaccatacccagagaatgtgtgtggactatcgtgcactaaacgatgtgactatcaagaataagtatccactacccaggattgatgatttgtttgatcagcttaaaggtgccactgttttctccaagatagatcttcgatcagggtatcatcagttgagaatcaaagaggaagatatacctaagacagcttttaccactaggtatgggttgttcgaatgtactgttatgtcttttggacttaccaatgcccctgctttcttcatgaacttgatgaataaggtgtttatggaatacttagacaagttcgtggtggtctttattgatgatattcttatctactctcgaaccaaagaagagcatgaggaacttcttcgccttgcattggagaagctacgagaacatcaactgtatgctaagtttagcaagtgtgaattttggttgtccgaagtgaaattccttggtcacgtcatctcagccggaggagttgccgtcgatcctagtaacgtggaatccgtaaccaattggaagcaaccaaagacagtttcagagattcgcagtttcctaggcctcgcatgatattaccggaggtttatagagaatttttccaagattgctaagcccatgacacgactgcttcagaaagatgtgaagtacaagtggtcggaagaatgtgaacagagttttcaagaattgaaaagtcgcttaatatcagctcctattttgattttgcctgatccaaagaagggttttcaagtgtattgtgatgcatccaaacttgggttaggttgtgttctgatgcaagatgggaaggtggttgcctatgcctctcgacagttacgtccgcatgagaagaactaccctactcatgatattgagttagctgcagtcgttcatgcattgaagatttggcgtcattatcttttcggtactcatacagaagtgtacaccgatcacaagagtttaaagtatatctttactcagccggatctgaacataaaacaacggagatggttggaattaattaaggattatgacatgggaattcattatcatccgggtaaaggctaatgttgtagcagacgctcttagcagaaaaggccattgcaatgctacagaaggacgacagttgccattggaattatgtaaggaatttgaaagattaaatttgggaattgtcggtagaggtttcgttgcagccttagaagcgaagcccactctaattgatcaagttagagaagcccaaattaatgatcctgatattcaagagatcaagaagaatatgagaagaggaaaagctattggtttcttggaggatgagcaaggaactgtatggttgggtgagagaatctgtgtccccgacaacaaagatctaaaagatgcaattctgaaagaagctcatgatactttatactccattcaccctggtagtactaagatgtaccaggatcttaaggaaagattttggtgggcaagtatgaagcgtgaaatcgcagaatacgtagcagtatgtgatgtttgtcagcgagtcaaggcagaacatcagaaacccgccggtttgttgcaacctttgaagattcctgaatggaaatgggaagaaattggtatggattttattactggtttacccagaacgtcatcaggccatgactctatttgggtgatagtcgacagacttaccaaagtggctcatttcattccggtaaagacaacttattccggaagtcgcttagcggaattgtatatggcaaggattgtgtgtttgcatggcgtccctaagaagatagtgtctgatcgaggcagtcagtttacttcaaatttttggaagaaacttcaggaagagatgggttctaagctgaactttagtactgcttatcatccgcagacagacggacaaaccgaaagggtgaatcaaattttggaagacatgttgagagcttgtgctctagatttcagtggaagttgggataagaatctaccctatgcagaattttcatacaacaacagttatcaagctagtctacagatggctccgtacgaagcactgtatggtcgaaagtgccgcactccgcttttgtgggatcaaacgggagaacgtcaggttttcggaacggatatcctaagggaagcagaagaaaaggtaaagatcattcaagaaagattgcgagtggctcagtctcgacataagagttatgccgacaatcgccgtaaagatttgagttttgaagaaggagactatgtgtatcttcgagccacaccctttttgggggtttttaacagcaattttatataatctccaaaactttcttaaacacgaaaatccctctgtaaaaggaac

SEQ ID NO: 15105 - DNA, 1207 bp, Oryza sativa
  Clone ID: TFbOSC18999j.C1.o1.gm
gtcgctcactcagggatctcgctctgttacggagtatctgcacgagttcaatcgtcttgctcgttatgctccggaagatgtacgcactgatgaagagcgccaggagaagttcttggaaggacttaatgatgagctttcttatccactcatgactggggattatcctgatttccagaagttggtggataaggctattcgtcaggaggacaagtacaatcgtatggagcagaagaaacgccggattgctcaattcaagacacaacagggaagtaatcagaagccgcgtcttactttaggacaccagtccatgccacagggaggttcttcgtctgttgttcgtccgcagcgtcagttcttcaacaacaatgctggcaacaacatccgcaatcaagctccacgtcctgttgcagctccaacacagcaacaacctgccaagagggagcaaggcagcaagcccgtggtatgtttcaactgtggagacccaggacattatgctgacaagtgtccgaagccccgacgtgtgaaggttgtccctacccagagcaactctaccgtaccagcatcaaaggctcgtgtcaatcatgttgctgctgcagaagctcaagatgctccagatgtgattttggaaaggatacatcagaccgagttcatcaccatggggagctccggttatttttgtggaaaagaaagaccatacccagagaatcttaaaggtgccactgttttctccaagatagatcttcgatcggggtatcaccagttaagaatcaaagaggaagatatacctaagacagcttttaccactagcaccttagcgccgagtagcatcgagccgccgtcgccgccgttgctccagccgtgcgccgccgccgttccggtcatcgtcgtcgctcgggaagactgccgtcgtggtcgccaagtcgccgccgtcctcgtccgcctcttcgtcgccgccgaagaccgccggagcaccgtcgccgccgtcgacccgatcttctccgccgtttcaacctcgtcgccgtcgccgtccgttggtcttccgccgctcctttggtcaccgcgccaccaccaccgcgccgccgccgctgccttcctctccttcctatgcctagtgagcggtggggacggggtaaagggaggaggagtacgaatacgtgttcatcagacgcagcggcatggcgaagttgaacctgctggcacgggatga

SEQ ID NO: 15106 - DNA, 5064 bp, Oryza sativa
  Clone ID: TFbOSC19032j.C1.o3.fg
atgccgcgctacaagcctgagtacttgtttggtgtcgatggttttgtccaggagttgcgtacgatgtcctttgtcattggatttgagactgcccctttttatgctcagattcgtcatgatcgtcatgaagagaagtgccgagtcaaagtcaccttgaacagtaatagtgaagatattccctcagtgatgttcgaagctggaggaagaaactacatccatgcatgtcaggaggtggcaaggatcgccataggagagctccgtgatcgctacagtgatcagttggccgacactgagtatcgctaccatcctcgccaaccccagggaagtgaccgtggcagctaccttgagactgaaggaattgagaatgatgctaccacaaggcatttggttgagatgctgtgggctatggatgaaagtcgtgcggagactgtgttagcggctcaagatcgtgaagaccggaatcgtggtaagatttgcaagttagaagacaaggtggatcgtttggagaaggaattagctgagttgaagggagaagcaccgccgcagaaggccaggattcgtcttaccgcaaggaagagagctttatttgtccctcgctatcaattggcgccaaagattcgtgtggtggagaaagaagttgccccaactttagcagatcctccggttatcatcataagtgatgatgaagaagaagaatccaagcgcaacaattccaagattgagtggttttccccggtttctcttcttgtgccctgcccatgcctgatggtgaacactcgcagcaacgggaatggccccagtaacaataacaatggagagaatcccactcttgctcaagttcttgctcaacagactcagcttatgaatatgatgatgcagcaacttcagaatcaaggaaataaccatgcatctcctcagaataagttagcagaatttcttcgtgtgaggccgcctattttctctagcaccactaatcctgttgaagctggtgattggttgcatgccatagataagaagttggatttgcttcaatgcactgatcaggagaaggtctcatttgcatcacatcagttgcatggccctgcctctgaatggtgggatcacttccgccttaacaggactactgctgaacctatcacttggcttgaattcaccgctgctttccggaagacgcatataccatcgggagtggtgtctctcaagaagaaggaattcaggtcgctcacccagggatctcgctctgttacggagtatttgcacgagttcaatcgtctggctcgttatgctccagaagatgtgcgcaatgatgaagagcgccaggagaagttcttggaaggacttaatgatgagctttcttacccactcatgactggagattatgctgatttccagaagttggtggataaggctattcgtcaggaggacaaatacaatcgcatggagcagaagaaacgccggattgctcaattcaagacacaacaggggaataatcagaggccgcgtcttactttaggaccccagtctatgccacagggaggttcttcgtctgttgttcgtccgcagcgtcagttcttcaacaacaatgctggcaacaatatccgtaatcaagctccacgccctgttgcagctccaacacagcaacaacctgccaagagggagcaaggcagcaagtccgtggtgtgtttcaactgtggagacccaggacattatgctgataagtgtccgaagccccgacgcgtgaaggcccgtgtcaatcatgttgctgctgcagaagctcaagatgctccagatgtgattttgggtacgttccttgttaactcagttcatgcaacagtgcttttcgattctggtgctacacattcattcttatctatgagttttgcgggaaatcatgggatggaagtagaagatcttagacgtcctttgatggttagtaccccaagtaatcaagcactctctttgcaacgtagcccctctgtcagaatagaaattcaaggaataccatttctggccaatcttatcttgttagaatccaaagaccttgatgtcatcttagggatggactggttagccagatataaaggtgtgatagactgtgctaacagaaaagtaactctcaccagcaatgatggtcgagttgtgactgttcatgcattgtcttctgagactttaaggtcaagactgaaccaaataactttggaagagattcctgtagtccgggagtattccgatgtgttcccagatgatttacctggtatgccgcctaaaagggatatagagttcagaatagatttggtaccaggaacaactccgatccataagagaccttatagaatggcagccaatgagttggcagaagtcaagaggcaagtagacgatttgcttcagaaaggatacatcagaccaagttcatctccatggggagctccggttatttttgtggaaaagaaagatcatacccagaggatgtgtgtggactatcgagccctaaacgatgtgactatcaagaataagtatccgctacctagaattgatgatttgtttgatcagcttaaaggtgctactgttttctccaagatagatcttcgatcagggtatcaccagttgagaatcaaagaggaagatatacctaagacagcatttaccactaggtatgggttgttcgatgtgtttatggaatacttagacaagttcgtggtggtctttattgatgatattcttatctattctcgaaccaaagaagagcatgaagaacatctttgccttgcactagagaagctacgagaacatcaactgtatgctaagtttagcaagtgtgaattttggttgtctgaagtgaagttccttggtcacgtcatctcagcaggaggagttgccatcgatcctagtaatgtggaatccgtaaccaactggaagcaaccaaagacagtttcagagattcgcagtttcttaggccttgcaggatattatcgaaggtttatagagaatttttccaagattgctaagcccatgacacgattacttcgaaaggatgtgaagtacaagtggtcagaagaatgtgagcggagttttcaagagttgaagaatcgcttaatatcagctcctattttgattttacctgatccaaagaagggtttccaagtgtattgcgatgcatccaaacttgggttaggttgtgttctgatgcaaaatgggaaggtggttgcctatgcatctcgtcagttacgtccgcatgagaagaactaccctactcatgatattgagttagccgtagtagttcatgcgttgaaaatttggcgtcattatcttttcggtactcgtacagaggtatataccgatcacaagagtttgaagtatatctttactcagccggatctgaacatgagacaaaggagatggttggaattaattaaggattatgacatgggaattcattatcacccggggaaggctaatgttgtagcagacgctcttagcagaaaaggctattgcaatgctacggaaggacgacagttgccgttggaattatgcaaggaatttgaaagattaaatttgggaattgtcagtagaggttgcgttgcagccctagaagcgaagcccactctaattgatcaagttagagaagcccaaattaatgatcctgatattcaagaaatcaagaagaatatgagaagaggaaaagctattggtttcttggaagatgagcaaggaactgtatggttgggtgagagaatctgtgtccccgacaacaaagatttaaaagatgcaattctgcaagaagctcatgatactttatactccattcaccctggtagtaccaagatgtaccaggatctcaaggaaagattttggtgggcaagtatgaagcgtgaaatcgcagaatacgtagtagtatgtgatgtttgtcagcgagtcaaggcagaacatcagaaacccgccggtttgttgcagcctttgaagattcctgaatggaaatgggaagaaatcggtatggattttatcactggtttgcccagaacgtcatcaggccatgactctatttgggtaatagtcgacagacttaccaaagtggcacatttcattccggtaaagacaacttattctagaagtcgattggcggaattgtatatggcaaggattgtgtgtttgcatggtgtccctaagaagatagtgtctgatcgaggcagtcagtttacttcaaatttttggaagaaacttcaggaagagatgggttctaagctgaactttagtactgcttatcatccgcagacagacggacaaaccgaaagggtgaatcagattttggaagacatgttgagagcttgtgctttagatttcggtggaagttgggataagaatctaccttatgcagaattttcgtacaacaacagttatcaagctagtctacagatggctccttacgaagcactgtatggtcggaagtgccgcactccgcttttgtgggatcaaacgggagaacgtcaggttttcgggacggatatcctaagggaagcagaagaaaaggtgaaaatcattcaagaaagattgcgagtggctcagtctcgacataagagttatgccgacaatcgctgcagagatttgagttttgaagaaggagattatgtgtatcttcgtgtcacgcctcttcgaggtgttcatcgttttcacaccaaaggaaaattggcaccgcgttttgtgggaccttataagattgtcagtagaagaggagaggttgcttatcaattggaattacctcaatccttggcaggagtccataatgtgttccatgtgtcgcaattgaagaagtgtttaagggtacctaccgaagaagctaatcttgaacagatagaagtccaagaggatctgacctatgttgagaaaccaatccgtatcttggaaacgaatgagagaagaaccaggaatcgagttatccgtttttgcaaagtccaatggagtaatcactcggaagaggagtcaacttgggaacgagaagatgaattgaagtcagctcatccacatctgttcgccagttcttccgaatctcgaggacgagattctgtttaa

SEQ ID NO: 15107 - DNA, 3810 bp, Oryza sativa
  Clone ID: TFbOSC19140j.C1.o2.fg
atgatgatgcagcaactccagaaccagcagaaccagggaaataaccatgcacctccccagaacaagttagcagaatttcttcgtgtgaggccgcctattttctctagtaccactaatcctgttgaagctggtgattggttgcacgccatagaaaagaagttggatttgcttcagtgcactgatcaggagaaggtctcatttgcatcacaccagctgcatggccctgcctctgaatggtgggatcactcccgccttaataggattactgctgaacctatcacttggcttgagttcaccgctgctttccggaagacgcatataccatcgggagtggtgtctctcaagaagaaggaattcaggtcgctcacccagggatctcgctctgttaccgagtatctgcacgagttcaatcgtctggctcgttatgctctggaagatgtacgcactgatgaagagcgccaggagaagttcttggaaggacttaatgatgagctttcttatccactcatgactggggattatcctgatttccagaagttagtagataaggctattcgccaggaggacaagtacaatcgcatggaacagaagaaacgccggattgctcaattcaagacacaacaggggaataatcagaggccgcgtcttactttaggaccccagtccatgccacagggaggttcttcgtctgttgttcgtccgcagcgtcagttcttcaacaacaatgctggcaacaacatccgcaatcaagctccacgccctgttgcagctccaacacagcaacagcctgccaagagggagcaaggcagcaagcccgtagtgtgtttcaactgtggagacccaggacattatgctgacaagtgtccgaagccccgacgcgtgaaggctgtccctgcccagagcaactctaccgcaccagcgccaaaggcccgtgtcaatcatgttgctgctacagaagctcaaggtgctccagatgtgattttgggtacgttccttgttaacttagtccctgcaacagtgctttttgattctggtgctacacattcattcttatctatgagttttgcgggaaatcatgtgatggaagtagaagatcttagacgtcctttgatggttaataccccaagtaatcaagcactctctttgcaacgtagcccctctgtcagaatagaaattctcagatcattatttctggccaatcttatcctgttagaatccaaagaccttgatgtcatcctagggatggactggttagccagatataagggtgtgatagactgtgctaacaggaaagtaactctcaccagtgatgatggtcgagttgtaacaattcatgcattgtcttctgagtctttaaggtcaagactgaaccaaataactttggaagagattcctatagtccgggagtatcctgatgtgttcccagacgatttacctggtatgcctcctaaaagagatatagagttcagaatagatttggtaccaggaacaactccgatccataagagaccttatagaatggcagccaatgagttggcagaagtcaaaaggcaagtagacgatttgcttcagaaaggatacatcagaccgagttcatctccatggggagctccagtaatttttgtggaaaagaaagaccatacccagaggatgtgtgtggactatcgtgcactaaatgatatgactatcaagaataagtatccgctgcccagaattgatgatttattcgatcagcttaaaggtgccaccgttttctccaagatagatcttcgatcagggtatcatcagttgagaatcaaagaggaagatatacctaagacagcttttaccactaggtatggattgtttgaatgtactgttatgtcttttggacttaccaatgcccccgctttcttcatgaacttgatgaataaggtgtttatggaatacctagacaagttcgtggtggtctttattgatgacattcttatctactcccgaaccaaagaagagcatatagaacatcttcgccttgcactagaaaagctacgagaacatcaactgtatgctaagtttagtaagtgtgaattttggttgtctgaagtgaagttccttggtcacgtcatctcagcaggaggagttgccgtcgatcctagtaatgtggaatccgtaaccaactggaaacaaccaaagacagtttcagagattcgcagtttcctaggcctcgcgggatattatcggaggtttatagaaaatttttccaagattgctaagcccatgacacgattgcttcagaaagatgtgaagtacaagtggtcagaagaatgtgagcagagttttcaagagttgaagaatcgcttaatatcagctcctattttgattttacctgatccaaagaagggtttccaagtgtattgcgatgcatccaaactggggttaggttgtgttctgatgcaagatgggaaggtggttgcctatgcatctcgtcagttacgtccgcatgagaagaactaccctactcatgatcttgaattagctgcagtagttcatgcgttgaaaatttggcatcattatcttttcggtactcgtacagaggtgtataccgatcacaagagtttaaatagaggtttcgttgcagccttagaagcgaagcccactctaattgatcaagttagagaagcccaaattaatgatcctgatattcaagaaattaagaagaatatgagaagaggaaaagctatcggtttcttggaagatgagcaaggaactgtatggttgggtgagagaatctgcgtccccgacaacaaagatttaaaagatgcaattctgaaagaagcccatgatactttatactccattcaccctggtagtaccaaaatataccaggatctcaaggaaagattttggtgggcaagtatgaagcgtgaaattgcagaatacgtagcagtatgtgatgtttgtcagcgaatcaaggcagaacatcagaaacccgccggtttgttgcagcctttgaagattcctgaatggaaatgggaggaaatcggtatggatttcatcactggtttacccagaacgtcatcaggtcatgactctatttgggtgatagtcgacagacttaccaaagtggctcatttcatcccagtaaagacaacatattctggaagtcggttggcggaattgtatatggcaaggattgtgtgtttgcatggcgtccctaagaaaatagtgtctgatcaaggcagtcagtttacttcaaaattttggaagaagcttcaggaagagatgggttctaagctgaactttagtactgcttatcatccgcagacagacggacaaaccgaaagggtgaatcagattttggaagatatgttgagagcttgtgctttagacttcggtggaagttgggataagaatctaccttatgcggaattttcgtacaacaacagttatcaagctagtcttcagatggctccttacgaagcactgtatggtcggaagtgccgcactccgcttttgtgggatcaaacgggagaacgtcaggttttcgggacggatatcttgagggaagcagaagaaaaggtgaaaatcattcaagaaagattgcgtgtggcccagtctcgccataagagttatgccgacaatcgtcggagagatctaagttttgacgcaggagattatgtgtaccttcatgtcacgcctcttcgaggggttcatcgttttcataccaaaggaaaattggcaccgcgttttgtgggaccttataagattgtcagtagaagaggagaggttgcttatcagttggaattacctcaatttggcaggcgtccataa

SEQ ID NO: 15108 - DNA, 1620 bp, Oryza sativa
  Clone ID: TFbOSC19159j.C1.o1.gm
atgatgatgcagcaactccagaaccagcagaaccagggaaataaccatgcacctccccagaacaagttagcagaatttcttcgtgtgaggccgcctattttctctagtaccactaatcctgttgaagctggtgattggttgcacgccatagaaaagaagttggatttgcttcagtgcactgatcaggagaaggtctcatttgcatcacaccagctgcatggccctgcctctgaatggtgggatcactcccgccttaataggattactgctgaacctatcacttggcttgagttcaccgctgctttccggaagacgcatataccatcgggagtggtgtctctcaagaagaaggaattcaggtcgctcacccagggatctcgctctgttaccgagtatctgcacgagttcaatcgtctggctcgttatgctctggaagatgtacgcactgatgaagagcgccaggagaagttcttggaaggacttaatgatgagctttcttatccactcatgactggggattatcctgatttccagaagttagtagataaggctattcgccaggaggacaagtacaatcgcatggaacagaagaaacgccggattgctcaattcaagacacaacaggggaataatcagaggccgcgtcttactttaggaccccagtccatgccacagggaggttcttcgtctgttgttcgtccgcagcgtcagttcttcaacaacaatgctggcaacaacatccgcaatcaagctccacgccctgttgcagctccaacacagcaacagcctgccaagagggagcaaggcagcaagcccgtagtgtgtttcaactgtggagacccaggacattatgctgacaagtgtccgaagccccgacgcgtgaaggctgtccctgcccagagcaactctaccgcaccagcgccaaaggcccgtgtcaatcatgttgctgctacagaagctcaagtccgggagtatcctgatgtgttcccagacgatttacctgaaaggatacatcagaccgagttcatctccatggggagctccagtaatttttgtggaaaagaaagaccatacccagaggatcttaaaggtgccaccgttttctccaagatagatcttcgatcagggtatcatcagttgagaatcaaagaggaagatatacctaagacagcttttaccactagcctcgcgccgccgttgtcgccgccgctccagccgtgctccgccgtcgctccagtcgtcgccgtcgctcggggaggtcgccatcgtggtcgccgtcgcgtcgccgtcctcgtccgccccttcgccgtcgctgaagaccgccggagcatcgtcgccgtcgtcaagccgaaggtcgacgccgcttcttcctcgacgccgtcgccgtccgttgatcttccgccgccgttttggtcgctggtgagttcgccgcgtcgccctctacgtcctggtgccctccgttcgcgccgccgcgccatcgttcgccggcgagcttgtgctcccgagccgccgcaggtggtgacgtcaccgctgacgtcatcgtcgtcgtctctcgtggtccggccgtggatcggagaagagtttgaagagttccaagggggtgattatgatccaggaaag

SEQ ID NO: 15109 - DNA, 3881 bp, Oryza sativa
  Clone ID: TFbOSC20818j.C1.o1.np
atggtgcactgtggtgagttgtgttgtgcgaagggtattgtcacgatttccccctttgcagctcctggtttggaatggtatattcctggtttggagatagaactgtacagccggatgtcgcgctacaagcctgagtacttgtttggtgttgagggatttgttcagaagttgcgtacgatgtcctttgtcataggatttgggactgcccctttttatgcccagattcctcatgatcgtcacgaagagaagtgccgagtcaaagtcaccttgaacagtaatagtgaagatatcccctcagtgatgttcgaggctggaggaagaaactacatccatgcatgtcaggaggtggcaaggatcgccataggagagctccgcgatcgctacagtgatcagttggccgacagtgagtatcgctaccatcctcgccaaccacagggaagtgaccgtggcagctacctagagaccgagggaattgagaatgatgctaccacaaagcatttggttgagatgctgtgggctatggatgaaacccgtgcggagactgtgttagcggctcaagatcgtgaagaccggaatcgtggtaagatttgcaagctagaggacaaagtggatcgtttggagaaggaactagccgcattaaagggagaagcaccgccgcagaaggccaggattcgtcttaccgcaaggaagagagctctatttgtccctcgctaccaattggcgccaaaggtccgtgtggtggagaaagaagttaccccagccctagcggatcctccggtcatcaacatggtgctcactcgcagcaacgggaatggccccaacaacaccaataataacaacaacaatggagagaatcccacacttgcccaagtcctggctcaacagacacagcttatgaacatgatgatgcagcaactccagaaccagcagaaccagggaaataaccatgcacctccccagaacaagttagcagaatttcttcgtgtgaggccgcctattttctctagtaccactaatcctgttgaagctggtgattggctgcatgccatagagaagaagttggatatgcttcaatgcacggatcaggagaaggtctcatttgcatcacaccagttgcatggccctgcctctgaatggtgggatcacttccgcctgaataggactactgctgaacctatcacttggcttgaattcaccgctgctttccggaagacgcatataccatcgggagtggtgtctctcaagaagaaggaattcaggtcgctcactcaggggtctcgctctgttacggagtatctgcacgagttcaatcgtctggctcgttatgctccagaagatgtgcacactgatgaagagcgccaagagaagttcttggaaggacttaatgatgagctttcttacccactcatgactggggattatcctgatttccagaagttggtggataaggctattcgtcaggaggacaagtacaatcgcatggagcagaagaaacgccggattgctcaattcaagacacaacaggggaataatcagaagccgcgtcttactttaggaccccagtctatgccacagggaggtttttcgtctgttgttcgtccgcagcgtcagttcttcaacaataacgcgggcaacaacatccgtaatcaagctccacgccctgttgcagctccaacacaacaacaacctgccaagaaggagcaaggcagcaagctcgtagtgtgtttcaactgtggagacccaggacattatgctgacaagtgtccgaagccccgacgcgtgaaggttgtccctgcccagagcaactctaccgcaccagcatcaaaggctcgtgtcaatcatgtcgctgctgcagaagctcaagatgctccagatgtgattttgggtacatttcttgttaacttagttcctgcaacagtgcttttcgattctggtgctacacattcattcttatctatgagttttgcgggaaatgatgggatggaagtagaagatcttagacgtcatttgatggttagtaccccaagtaatcaagcactctctttgcagcatagtccctctgtcagaatagaaattcaaggagtaccctttctggccaatcttatcctattagaatccaaagaccttgatgtcatcctagggatggactggttagccagacataaaggtgtgatagactgtgctaacagaaaagtaactctcaccagcaatgatggacgagttgtaactattcatgcattgtcatctgagtctttaaggccaagtctgaaccaaataactttggaagagattcctacagtccgggagtatcccgatgtgttcccagacgatttacctggtatgccgactaaaagggatatagagttcagaatagatttggtaccaggaacaactccgatccataagagaccttatagaatggcagccaatgaattagcagaagtcaagaggcaagtagacgatttgcttcagaaagggtacatcagaccgagttcatttccatggggagctccggttatttttgtggaaaagaaagatcatacccagaggatgtgtgtggattatcgtgcactaaatgatgtgactatcaagaataagtatccgctacccagaattgatgatttgtttgatcagcttaaaggtgccaccgttttctccaagatagatcttcgatcaaggtatcaccagttgagaattaaagaggaagatatacctaagacagcttttaccactaggtatggattgttcgaatgtactgttatgtcttttggacttaccattgcccccgctttcttcatgaacttgatgaataaggtgtttatggaatacctagacaagtttgtgttggtctttattgatgacattcttatctactctcgaacaaaagaagagcatgaagaacatcttcgccttgtactagagaagctacgagaacatcaactgtatgctaagtttagcaagtgtgaattttggttgtctgaagtgaagttccttggtcacgtcatctcagccggaggagttgccgttgatcctagtaatgtggaatccgtaaccaactggaaacaaccaaagacagtttcagagattcgtagtttcctaggcctcgcaggttattatcggaggtttatagagaatttttccaagattgctaagcccaggacacgattgcttcagaaagatgtgaagtacaagtggtcagaagaatgtgagcagagttttcaagagttgaagaatcgcttaatatcagctcctattttgattttgcctgatccaaagaagggtttccaagtgtattgcgatgcatccaaacatgggttaggttgtgttctgatgcaagatgggaaggtggttgcctatgcatctcgtcagttacgtccgcatgagaagaactaccctactcatgatcttgaattagctgcagtagttcatgcgttgaaaatttggcgtcattatcttttcggtactcgtacagaggtatataccgatcacaagagtttaaagtatatctttactcagccggatctgaacatgagacaacggagatggttggaattaattaaggattatgacatgggaattcattatcacccgggaaaggctaatgttgtagcagacgctcttagcaggaaaggctattgcaatgctacggaaggacgacagttgccattggaattatgcaaggaatttgaaagattaaatttgggaattgtccgaagaggtttcgttgcagccttagaagcgaagcccactctaattgatcaagttagagaagcccaaattaatgatcttgatattcaagaaatcaagaagaatatgagaagaggaaaagctatcggtttcatggaggatgagcaaggaactgtatggttgggtgagagaat

SEQ ID NO: 15110 - DNA, 3978 bp, Oryza sativa
  Clone ID: TFbOSC20854j.C1.o2.fg
atggtgatcactcgcagcaatgggaatggccccaacaaccccaataacaacaatgaagggaacccaacacttgctcaagttcttgctcaacagactcagttaatgaacatgatgatgcagcaacttcagaaccagcagaaccagggaaataaccatgcacctccccagaacaagttagcagaatttcttcgtgtgaggccgcctattttctctagtaccactaatcctgttgaagctggtgattggctgcatgccatagagaagaagttggatttgcttcaatgcactgatcaggaaaaggtctcatttgcatcacatcagttgcatggccctgcctctgaatggtgggatcacttccgccttaataggactactgctgaacctattacttggcttgaattcaccgctgctttccggaagacgcatataccatcgggagtggtgtctctcaagaagaaggaattcaggtcgctcactcaggggtctcgctctgtcacggagtatctgcacgagttcaatcgtctggctcgttatgctccggaagatgtgcgcaatgatgaagagcgccaggagaagttcttggaaggacttaatgatgagctttcttatccactcatggctggagattatcctgatttccagaagttagtggataaggctattcgtcaggaggacaaatacaatcgcatggaacagaagaaacgccggattgctcaattcaagacacaaccgggaaataatcaaaggccgcgtcttactttaggaccccagtccatgccacatggaggttcttcgtctgttgttcgtccgcggcgtcagttcttcaacaacaatgctggcaacaacatccgcaatcaagctccacgccctgttgcagtttcgacacagcaacagcctgccaagagggagcaaggcagcaagcccgtagtgtgcttcaactgtggagacccaggacattatgctgacaagtgtccgaagccccgacgcgtgaaggttgtccctgcccagagcaactctaccgcatcagcatcaaaggcccgtgtcaatcatgttgctgctgcagaagctcaagatgctccagatgtgattttggaatccaaagaccttgatgtcatcctagggatggactggttagccagacataaaggtgtgatagactgtgctaacagaaaagtaactctcactagcaatgatggtcgagttgtaactgttcatgcattgtcttctgagtctttaaggtcaagactgaaccagataactttggaagagattcctatagtccgggagtatcccgatgtgttcccagatgatttacctggtatgccgcctaaaagggatatagagttcagaatagatttggtacctggaacaactccgatccataagagaccttatagaatggcagccaacgagttggcagaagtcaaaaggcaagtagatgatttgcttcagaaaggatacatcagaccgagttcatcaccatggggagctccggttatttttgtgaaaaagaaagatcatacccagaggatgtgtgtggactatcgtgcactaaacgatgtgactatcaagaataagtatccactacccagaattgatgatttgtttgatcagcttaaaggtgccactgttttctccaagatagatcttcgatcagggtatcaccagttaagaatcaaagaggaagatatacctaagacagcttttaccactaggtatggattgtttgaatgtactgttatgtcttttggacttaccaatgcccctgctttcttcatgaacttgatgaataaggtatttatggaatacctagacaagttcgtggtggtctttattgatgacattcttatctgctcccgaaccaaagaagagcatgaagaacatcttcgccttgtactagagaagctacgagaacatcaactgtatgctaagtttagcaagtgtgaattttggttgtctgaagtgaagttccttggtcacgtcatctcagcaggaggagttgccgttgatcctagcaatgtggaatccgtaaccaactggaaacaaccaaagacagtttcagagattcgcagtttcctaggcctcgcaggatattaccggaggtttatagagaatttttccaagattgctaagcccatgacacgactgcttcagaaagatgtgaagtacaagtggtcggaagaatgtgagcagagttttcaagagttgaagaatcgcttgatatcagctcctattttgattttacctgatccaaagaagggtttccaagtgtattgcgatgcatccaaacttgggttaggttgcgttctgatgcaagatgggaaggtggttgcctatgcatctcgtcagttacgtccgcatgagaagaactaccctactcatgatattgagttagctgcagtggttcatgcgttgaagatttggcgtcattatctttttggtactcgtacagaggctaatgttgtagcagacgctcttagcaggaaaggctattgcaatgctacagaaggacgacagttgccattggaattatgcaaggaatttgaaagattaaatttgggaattgtcagtagaggttttgttgcagccttagaagcgaagcccacactaattgatcaagttagagaagcccaaattaatgatcctgatattcaagagatcaagaagaatatgagaagaggaaaagctatcggtttcttggaagatgagcaaggaactgtatggttaggtgagagaatttgcgtccccgacaacaaagatttaaaagatgcaattctgaaagaagctcatgatactttatactccattcatcctggtagtaccaaaatgtaccaggatctcaaggaacgattttggtgggcaagtatgaagcgtgaaatcgcagaatacgtagcagtatgtgatgtttgtcagcgcgtcaaggcagaacatcagaaacccgccggtttattgcagcctttgaagattcctgaatggaaatgggaagaaataggtatggattttatcactagtttacccagaacgtcatcaggccatgactctatttgggtgatagtcgacagacttaccaaagtggctcatttcattccggtaaagacaacttattctggaagtcggttggcggaattgtatatggccaggattgtgtgtttgcatggcgtccctaagaagatagtgtctgatcgaggcagtcagtttacttcaaatttttggaagaagcttcaggaagagatgggttctaagctgaactttagtactgcttatcatccgcagacagacggacaaaccgaaagggtgaatcagattttggaagatatgttgagagcttgtgctttagatttcggtggaagttgggataagaatctaccttatgcagaattttcgtacaacaacagttatcaagctagtcttcagatggccccttacgaagcactgtatggtcagaagtgccgcactccacttttgtgggatcaaacgggagaacgtcaggttttcgggactgatatcctgagggaagcagaagaaaaggtaaaaatcattcaagaaagattgcgtgtggcccagtcccgacataagagttatgccgacaatcgccgcagagatttgagttttgaagaaggagattatgtgtatcttcgtgtcacgcctcttcgaggggttcattgttttcacaccaaaggaaaattgtcaccgcgttttgtgggaccttataagatcgtcagtagaagaggagaggttgcttatcagttggagttacctcaatctttggcaggagtccataatgtgttccatgtgtcgcaattgaaaaagtgtttaagggtacctaccgaagaagctaatcttgaacagatagaagtccaagaggatctgacctatgttgagaaaccaatccgtatcttggaaacagatgagagaagaaccaggaatcaagttatccgtttttgtaaagttcaatggagtaatcactcggaagaataa

SEQ ID NO: 15111 - DNA, 5265 bp, Oryza sativa
  Clone ID: TFbOSC22342j.C1.o3.fg
atgaagataacatcgagcaagctaatcaggccggtgccagttcagcaggatcagtctcaagagaataacagtagtggaaggaagcagcagagcaccaggttgagaagtggcggagataagcccacgggggtcgctggggagtccatacctctggtttttgaggggatgactatgatccgggaatggtgcactgtgcatggttcattgcggggcaccagactgagaagtggcggagataagcccacgggggtcgctggggagtccatgcctctggtttttgagggggtgattatgatccaggaagctcctggtttggaatggttaattcctggtttggaggtagaactgtgcagccgggatggttgttcagaatggttgggcctatacaacaggatgccgcgctacaagcatgagtacctgtttggtgttgagggttttgttcaggagttgcgtacgatgtcctttgtcattggatttgggactgcccctttttatgctcagattcctcatgatcgtcatgaagaaaagtgccgagtcaaagtcaccttgaacagcaatagtgaagatgtcccctcagtgatgtttgaagctggaggaaggaactacatccatgcatgtcaggaggtggcaaggatagccataggagagctccgtgatcgctacagtgatcagttggccgacaccgagtatcgctaccatcctcgtcaaccccagggaagtgaccgtggcagctacctagagattgaaggaattgagaatgatgctaccacaaggcatttggttgagatgttgtgggctatggatgaaagtcgtgcggagactgtgttagcagcccaagatcgtgaagatcggaatcgtggtaagatttgcaagctagaagacaaggtggatcgtttggaaaaggaattagccgcattgaagggagaagcaccaccgcagaaggccaggattcgtctcaccgcaaggaagagagctctatttgtccctcgctatcaattggcgccaaagatggtgaatactcgcagcaatgggaatggccccaaccaccccaataacaataacaatggagagaacccaactctggcccaagttcttgctcaacagactcagctaatgaacatgatgatgcagcaatttcagaatcagcagaaccaaggaaataaccatgtacctccccagaacaagttagcagaatttcttcgtgtgaggccgcctgttttctctagcaccactaatcctgttgaagctggtgattggctgcatgccatagagaagaagttggatttgcttcaatgcactgatcaggagaaggtctcatttgcatcacatcagttgcatggccctgcatctgaatggtgggatcacttccgcttgaataggattaatgctgaacctatcacttggcttgaattcgccgctgctttccggaagacgcatataccatcgggagtggtgtctcttaagaagaaggagttcaggtcgcttactcagggatctcgctctgtcacggagtatttacatgagttcaatcgtcttgctcgttatgctccggaagatgtgcgcaatgatgaagagcgccaggagaagtttttgggaggactcaatgatgagctttcttatccactcatgggaggttcttcatctgttgttcgtccgcaacgtcagttcttcaacaacaatgctggcaacaacatccgcaatcaagctccacgccccgttgcagctccaacccagcaacagcctaccaagagggagcaaggcagcaagcccgtggtgtgtttcaactgtggagacccaggacattatgctgacaagtgtccgaagccccgacgcgtgaaggttgtccctgcccaaaataactctgctgtaccagcatcaaaagcccgtgtcaatcacgtcgctgctgcagaagctcaagatgctccagatgtgattttgggtacgtttcctgttaactcagttcctgcaacagtgcttttcgattctggtgctacacattcatttttatcaatgagttttgcgggaaataatgggatggaagtagaagatcttagacgtcctttgatggttagtaccccgagtaatcaagcactctctttgcaatgtagcccctctgtcagaatagaaattcaaggaataccctttctagccaatcttatcttgttagaatccaaagaccttgatgtcatcctagggatggactggttagccagacatagaggagtgatagactgtgctaacagaaaagtaactctcaccagtaatgatggtcgagttgtaactgttcatgcattgtcttcggagtctttaaggtcaagactgaaccagataactttggaagagattcctatagttcgggaatatcccgatgtgttcccagatgatttacctggtatgccgccaaaaagggatatagagttcagaatagatcttgtacctggaacaactccgatccataagagaccttatagaatggcagccaatgagttggcagaagtcaaaaggcaagtagatgatttgcttcagaaaggatacatcagaccaagttcatcaccatggggagctccagttatttttgtggaaaagaaagaccatacccagaggatgtgtgtggactatcgtgcattaaacgatgtgactatcaagaataagtatccgctaccccgaattgatgatttgtttgatcagcttaaaggtgccactgttttctccaaaatagatcttcgatcagggtatcaccagttgagaatcaaagaggaagatatacccaagaccgcttttaccactaggtatgggttgttcgaatgtactgttatgtcttttggacttaccaatgcccccgctttcttcatgaacttgatgaataaagtatttatggaatacctagacaagttcgtggtggtctttattgatgatattcttatctactcccgaaccaaagaagagcatgaagaacatcttcgccttgctttggagaagctacgagaacatcaactgtatgctaagtttagcaagtgtgaattttggttgtctgaagtgaagttccttggtcacgtcatctcagcaggaggagttgccgtcgatcctagtaacgtggaatctgtaaccaactggaaacaaccaaagacagtttcagagattcgcagtttccttggcctcgcaggatattatcggaggtttatagagaatttttccaagattgctaagcccatgactcgattgcttcagaaagatgtgaagtacaagtggtcagaagaatgtgagcaaagttttcaagagttgaaaagccgcttaatatcagctcctattttgattttgcctgatccaaagaagggttttcaagtgtattgcgatgcatccaaatttgggttaggttgtgtcctgatgcaagatgggaaggtggttgcctatgcatctcgtcagttacgtccgcatgagaagaactaccctactcatgatcttgagttagctgcagtagtacatgcgtttaagatttggcgtcattatcttttcggtactcgtacagaggtgtacaccgatcataagagtttaaagtatatctttactcagccggatctgaacatgagacaaaggagatggttggaattaattaaggattatgacatgggaattcattatcacccgggaaaggctaatgttgtagcagacgctcttagtaggaaaagctattgcaatgctacggaagggcgacagttaccattggaattatgcaaggaatttgaaagattaaatttgggaattgtcagtagaggtttcgttacagccttagaagcgaagcccactctaattgatcaagttagagaagcccaaattaatgatcctgatattcaagagatcaagaagaatatgagaagaggaaaagctatcggtttcttggaggatgagcaaggaactatatggttgggcgagagaatctgtgtccctgacaacaaagatttaaaggatgcaattctgaaagaagctcatgatactttatactccattcaccctggtagtactaagatgtaccaggatctcaaggaaagattttggtgggcaagtatgaagcgtgaaatcgcagagtacgtagcagtatgtgatgtttgtcagcgagtcaaggcagaacatcagaaacctgccggtttgctgcagcctttgaagattcctgaatggaaatgggaagaaatcggtatggattttatcactggtttacccagaacgtcatcaggccatgattctatttgggtaatagtcgatagacttaccaaagtggctcattttattccggtaaagacaacttattccgaaagtcggttggcagaattgtatatggcaaggattgtgtgttcgcatggcgtccctaagaaaatagtgtctgatcgaggcagtcagtttacttcaaatttttggaagaaacttcaggaagagatgggttctaagctgaactttagcactgcttatcatccacagacagacggacaaaccgaaagggtgaatcagattttggaagacatgttgagagcttgtgctttagatttcggtggaaattgggataagaatctaccttatgcagaattttcgtacaacaacagttatcaagctagtatacagatggctccttacgaagcactgtatggtcggaagtgccgcactccgcttttgtgggatcaaacgggagaacgtcaggttttcgggactgatatcctgagggaagcagaagaaaaggtaaagatcattcaagaaagattgcgagtggctcagtctcgtcataagagttatgccgacaatcgccgtagagatttgagttttgaagaaggagattatgtgtatcttcgtgtcacgccttttcgaggagttcatcgttttcacaccaaaggaaaattagcaccgcgttttgtgggaccttataagaacgttagtagaagaggagaggttgcttatcagttagagttacctcaatctttggcaggagtccataatgtgttccatgtgtcgcaattaaagaagtgtttaagagtacctaccgaagaagctaatcttgaacagatcgaagtccaagaggatctgacctatgttgagaaaccaatccgtatcttggaaacaaatgagagaagaaccaggaatcgagttatccgtttttgcaaagttcaatggagtaatcattcggaagaagaatcaacttgggaacgagaagatgaattgaagtcagctcatccgcatctattcgccagttcttccgaatctcgaggacgagattctgtttaa

SEQ ID NO: 15112 - DNA, 5131 bp, Oryza sativa
  Clone ID: TFbOSC23002j.C1.o1.np
aacctctcttctctctctcttcggcccagattccgtcgtttccggagagtccgttttcgcagaagaagagtttgaagagttccaaggccagcaaggcaactcctggtttggaatggtacattcctggtttggagatagaactgtgcagccggggtggttgttcagaatggttgggcctatacaacaggatgccgcgttacaagcctgagtacctgtttggtgttgagggttttgtccaggagttgcgtacgatgtcctttgtcattcgatttgggactgcccctttttatgcccagattcctcatgatcgtcatgaagagaagtgccgagtcaaagtcaccttgaacagtaatagtgaagatatcccctcagtgatgtttgaagctggaggaagaaactacatccatgcatgtcaggaggtggcaaggatcgccataggagagctccgtgatcgctacagtgatcaattggccgacactgagtatcgctaccatcctcgccaaccccagggaagtgaccgtggcagttaccttgagactgaaggaattgagaatgatgctaccacgaagcatttggttgagatgctgtgggctatggatgaaagtcgtgcggagactgtgttagcagctcaagatcgtgaagaccggaatcgtggtaagatttgcaagttagaagacaaggtggatcgtttagagaaggaattagccgcattgaagggagaagcaccgccgcagaaggccaggattcgtcttaccgcaaggaagagagctctatttgtccctcgctatcaactggcgccaaagatggtgaacactcgcagcaatgggaatggtcccaacaaccccaataacaacaacaatggagagaatcccactcttgctcaagttcttgctcaacagacacagcttatgaacatgatgatgcagcaatttcagaatcagcaaaaccaaggaaataatcatgcacctccacagaacaagttagcagaatttcttcgtgtgaggccgcctgttttctctagtaccactaatcctgttgaagctagtgattggctgcatgccatagagaagaagttggatttgcttcagtgtactgatcaggagaaggtctcatttgcatcacatcagttgcatggccctgcctctgaatggtgggatcacttccgcctgaataggattactgctgaacctatcacttggcttgaattcaccgctgctttccggaagacgcatataccatcaggagtagtgtctctcaagaagaaggagttcaggtcgcttacccagggatctcgctctgttacggagtatctgcacgagttcaatcgtcttgctcgttatgctccggaagatgtgcgcaatgatgaagagcgccaggagaagtttttgggaggacttaatgatgagctttcttacccactcatggttggagattatcctgatttccagaaattagtggataaggctattcgtcaggaggacaagtacaatcgcatggagcagaagaaacgtcggattgctcaattcaagacacaacagggaaataatcagaagccgcgtcttactttaggaccccagcccatgccacagggaggttcttcgtctgttgttcgtccgcagcgtcagttcttcaacaacaatgctggcaacaacatccgtaatcaagctccacgtcctgttgcagctccagcacagcaacaacctgccaagagggagcaaggcaacaagcccgtggtgtgtttcaactgtggagacccaggacattatgctgacaagtgtccgaagccccgtcgcgtgaaggttgtccctgtccagaataactctgctgtaccagcatccaaggctcgtgtaaatcatgtcgctgctgcagaagctcaagatgctccagatgtgattttgggtacgttccttgttaactcagttcctgcaacagtacttttcgattctggtgctacacattcattcctatctatgagttttgcgggaaatcatgggatggaagtagaagatcttagacgtcctttgatggttagtaccccaagtaatcaagcactctctttgcaacgtagcccctctgtcagaatagaaattcaaggagtaccatttctggccaatcttatcttgttagaatccaaagacctagatgtcatcctagggatggactggttagccagacataaaggtgtgatagactgtgccaacaaaaaagtaactctcaccagctatgatggtcgagttgtaactgttcatgcattgtcatctgagtctttaaggtcaagactgaaccagataactttggaagagattcctatagtccgggagtatcccgatgtgttcccagatgatttacctggtatgccgcctaaaagggatatagagttcagaatagatttggtacctggaacaactccgatccataagagaccttatcgaatggcagccaatgagttggcagaagttaagaggcaagtagatgatttgctacagaaaggatacatcagaccgagttcatcaccttggggagctccagttatttttgtggaaaagaaagaccatacccaaaggatgtgtgtggactatcgtgcactaaatgatgtgactatcaagaataagtatccgctacccagaattgatgatttgtttgatcagcttaaaggtgccactgtattctccaagatagatcttcgatcagggtatcaccagttgagaatcaaagaggaagatatacctaagacagcttttaccactaggtatgggttgttcgaatgtactgttatgtcttttggacttaccaatgcccctgctttcttcatgaacttgatgaataaggtgtttatggaatacttagacaagtttgtggtggtctttattgatgacattcttatctattctcgaaccaaagaagagcatgaggaacatcttcgccttgcactagagaagctacgagaacatcaattgtatgctaagtttagcaagtgtgaattttggttgactgaagtgaagttccttggtcacgttatctcagcaggaggagttgccgtcgatcctagtaatgtggaatccgtaaccaactggaaacaaccaaagacagtttcagagattcgcagtttcctaggtctcgcaggatattaccggaggtttatagagaatttttccaagattgctaagcccatgacacgactgcttcagaaagatgtaaagtacaagtggtcggaagaatgtgagcggagttttcaagagttgaaaagtcgcttaatatcagctcctattttgattttgcctgatccaaagaagggttttcaagtgtattgcgatgcgtccaaacttgggttaggttgtgttctgatgcaagatgggaaggtggttgcctatgcctctcgacagttacgtccgcatgagaagaactaccctactcatgatattgagttagctgccgtcgttcatgcattgaagatttggcgtcattaccttttcggtactcgtacagaagtgtacaccgatcacaagagtttaaagtatatctttactcagccggatctgaacatgagacaacggagatggttggaattaattaaggattatgacatgggaattcattatcatccgggaaaggctaatgttgtagcagacgctcttagcagcaaaggctattgcaatgctacagaaggtcgacagttgccattggaattatgcaaggaatttgaaagattaaatttggaaattgtcagtagaggtttcgttgcagccttagaagcgaagcccactctaattgatcaagttagagaagcccaaattaatgatcctgatattcaagagatcaagaagaatatgagaagaggaaaagctattggtttcttggaggatgagcaaggaactgtatggttgggtgagagaatctgtgtccccgacaacaaagatctaaaagatgcagttctgaaagaagctcatgatactttatactccattcaccctggtagtactaagatgtaccaggatctcaaggaaagattttggtgggcaagtatgaagcgtgaaatcgcagaatatgtagcagtatgtgatgtttgtcagcgagtcaaggcagaacatcagaaacccgccggtttgttgcagcctttgaagattcctgaatggaaatgggaagaaataggtatggattttattactggtttacccagaacgtcatcaggccatgattcttttgggtgatagtcgacagacttacaaaagtagctcatttcattccggtaaagacaacctattccggaagtcgcttggcggaattgtatatggcaaggattgtgtgtttgcatggcgtccctaagaagatagtgtctgatcgaggcagttagtttacttcaaatttttggaagaaacttcaggaagagatgggttctaagctgaactttagcactgcttatcatccgcagacagacggacaaaccgaaagggtgaatcagattttggaagacatgttgagagcttgtgctttagatttcggtggaagttgggataagaatctaccttatgcagaattttcatacaacaacagttatcaagctagtttacagatggctccttacgaagcactgtatggtcggaagtgccgcactccgcttttgtgggatcaaacgggagaacgtcaggtttttgggacggatatcctaagggaagcagaagaaaaggtgaaaatcattcaagaaagattgcgtgtggctcagtctcgtcataagagttatgccgacaatcgccgcagagatttgagttttgaggaaggagattatgtgtatcttcgtgtcacgcctcttcgaggggttcatcgttttcacaccaaaggaaaattggcaccgcgttttgtgggaccttataagattgtcagtagaagaggagaagttgcttatcagttggagttacctcaatctttggcaggattccataatgtgttccatgtgtcgcaattaaaaaaatgtttaaggatacctaccgaagaagctaatattgagcagatagaagtccaagaggatttgacttatgttgagaaaccaatccgtatcttggaaacaaatgagagaagaaccaggaatcgagttatccgtttctgcaaagttcaatggagtaatcactcggaagaa

SEQ ID NO: 15113 - DNA, 2301 bp, Oryza sativa
  Clone ID: TFbOSC23131j.C1.o2.fg
atggtgaacactcgcagcaacgggaatggccccagtaacaataacaatggagagaatcccactcttgctcaagttcttgctcaacagacacagctaatgaacatgatgatgcaacaactccagaaccagcagaaccaaggaaataatcatgtacctcctcagaataagttagcagaatttcttcgtgtgaggccgcctgttttctctagtaccactaatcctgttgaagctggtgattggctgcatgccatagagaagaagttggatttacttcagtgcactgatcaggagaaggtctcatttgcatcacatcagttgcaaggccctgcctctgaatggtgggatcacttccgcctgaataggattactgctgaacctatcacttggcttgaattcaccgctgctttccagaagacgcatataccatcgggagtggtgtctctgaagaagaaggagttcaggtcgcttacccagggatctcgctctgttacggagtatctgcacgagttcaatcgtctggctcgttatgctccggaagatgtgcgcaatggtgaagagcgtcaggagaagtttttggaaggacttaatgatgagctttcttacccactcatgactggagattatcatgatttccagaagctagtggataaggctattcgtcaggaggacaaatacaatcgcatggagcagaagaaacgtcggattgctcaattcaagacacaacaggggaataatcagaagccgcgtcttactttaagaccccagtccatgccacatggaggttcttcgtttgttgttcgtccgcagcgtcagttcttcaacaacaatgctggcaacaacatccgcaatcaagctccacgtcctgttgcagctccaacacagcaacaacctgccaagagggagcaaggcagcaagcccgtggtgtgtttcaactgtggagacccaggacattatgctgacaagtgtccgaagccccgacgcgtgaaggttgtccctacccagagcaactctacggtaccagcatcaaaggcccgtgtcaatcatgttgctgctgcagaagctcaagatgctccagatgtgattttgggtacgttccttgttaactcagttcctgcaacagtacttttcgattctggtgctacacattcattcttatctatgagttttgcgggaaatcatgggatggaagtagaagatcttagacgtcctttgatggttagtaccccaagtaatcaagcactctctttgcatcgtagcccctctgtcagaatagaaattcaaggagtaccatttctggccaatcttatcctgttagaatccaaagacctagatgtcatcctagggatggactggttagccagacataaaggtgtgatagactgtgctaacagaaaagtaactctcaccagcaatgatggtcgagttgtgactgtttatgcattgtcttctgagtctttaaggtcaagattaaaccaaataactttggaagagattcctatagtccgggagtatcccgatgtgttcccagatgatttacctggtatgccgcctaaaagggatatagagttcagaatagatctggtaccaggaacaactccgatccataagagaccttatagaatggcagccaatgagttggcagaagtcaagaggcacgtagatgatttgcttcagaagggatacatcagaccgagttcatcaccatggggagctccagttatttttgtggaaaagaaagaccatacccagagaatgtgtgtggattatcgtgcattaaacgatgtgactatcaagaataagtatccgctacccagaattgatgatttgtttgatcagcttaaaggtgccactgttttctccaagatcgatcttcgatcaggatatcaccagttgagaatcaaagaggaagatatacctaagacagcttttaccactaggtatgggttgttcgaatgtactgttatgtcttttggacttaccaatgcccctgctttcttcatgaacttgatgaataaggtgtttatggaatacctagacaagttcgtggtggtctttattgatgatattcttatctactcccgaaccaaagaagagcatgaagaacatcttcgccttgcattggagaagctacgagaacatcaactgtatgctaagtttagcaagtgtgaattttggttgtctgaagtgaagttccttggtcacgtcatctcagcaggaggagttgccgttgatcctagtaatgtggaatccgtaactaattggaagcaaccaaagacagtttcagagattccagttttctag

SEQ ID NO: 15114 - DNA, 2323 bp, Oryza sativa
  Clone ID: TFbOSC24830j.C1.o1.np
atgccgcgttacaagcctgagtacctgtttggtgttgagggttttgtccaggagttgcgttcgatgtcctttgtcattggatttgggactgcccctttttatgcccagattcctcatgatcgtcatgaagagaagtgccgagtcaaagtcaccttgaacagtaatagtgaagatatccccttagtgatgtttgaagctggaggaagaaactacatccatgcatgtcaggaggtggcaaggatcgccataggagagctccgtgatcgctacagtgatcaattggccgacactgagtatcgctaccatcctcgtcaaccccagggaagtgaccgtggcagctatcttgagactgaaggaattgagaatgatgctaccacgaagcatttggttgagatgttgtgggctatggatgaaagtcgtgcggagactgtgttagccgctcaagatcgtgaagaccggaatcgtggtaagatttgtaagttagaagacaaggtggatcgtttggagaaggaattagccgcattgaagggagaagcaccgccgcagaaggccaggattcgtcttaccgcaaggaagagagctctatttgtccctcgctatcaactggcgccaaaggttcgtgtggtggagaaagaagttgccccagctcaagcggatcctccggtcatcatcataagtagtgatgaagaagaagaatccaagcgcaacaattccaagattgagtgggtagcaactcaagatgataaagacgagccttcaatcgacctccgatgcttggaagaactagagtgactttttccccggtttctcttcttgtgccctgtccatgccaatggtgaacactcgcagcaacgggaatggtcccaacaaccccaataacaacaatggagagaatcccattctggcccaagttcttgctcaacagacacagcttatgaacatgatgatgcagcaatttcagaatcaggaaaaccaaggaaataaccatgcacctccccagaacaagttagcagaatttcttcgtgtgaggccacctgttttctctagtaccactaatcctgttgaagctagtgattggctgcatgccatagagaagaagttggatttacttcagtgcactgatcaggagaaggtctcatttgcatcacatcagttgcatggccctgcctctgaatggtgggatcacttccgccttaacaggactactgctgaacctatcatttggcttgaattcaccgctgctttccggaagacgcatataccatcaggagtagtgtctctcaagaagaaggagttcaggtcgcttacccagggatctcgctctgttacggagtatctgcacgagttcaatcgtcttgctcgttatctccggaagatgtgcgcaatgatgaagagcgccaggagagtttttgggaggacttaatgatgagctttcttacccactcatggttggagattatcctgatttccagaaattagtggataaggctattcgtcaggaggacaagtacaatcgcatggagcagaagaaacgtcggattgctcaattcaagacacgacagggaaataatcagaagccgcatcttactttaggaccccagcccatgccacagggaggttcttcgtctgttgttcgtccgcagcgtcagttcttcaacaacaatgctggcaacaacatccgtaatcaaggtccacgtcctgttgcagctccagcacagcaacaacctgtcaagagggagcaaggcagcaagcccgtggtgtgtttcaactgtggagatccaggacattatgctgacaagtgtccgaagccccgacgcgtgaaggttgtccctgcccagaataactctgctgtaccagcatccaaggctcgtgtaaatcatgtcgctgctgcagaagctcaagatgctccagatgtgattttgggtacgttccttgttaactcagttcctgcaacagtacttttcgattctggtgctacacattcattcttatctatgagttttgtgggaaatcatgggatggaagtagaagatcttagacgtcctttgatggttagtaccccaagtaatcaagcactctctttgcaacgtagcccctctgtcagaatagaaattcaaggagtaccatttctggccaatcttatcttgttagaatccaaagaccttgatgtcatcctagggatggactggttagccagacataaaggtgtgatagactgtgccaacaaaaaagtaactctcaccagctatgatggtcgagttgtaactgttcatgcattgtcatctgagtctttaaggtcaagactgaaccagataactttgga

SEQ ID NO: 15115 - DNA, 3898 bp, Oryza sativa
  Clone ID: TFbOSC25097j.C1.o1.fg
taccactaatcctgttgaagctggtgattggttgcatgccatagagaagaagttggatttgcttcagtgcactgatcaggagaaggcctcatttgcatcacatcagttgcatggccctgcctctgaatggtgggatcacttccgtctgaacaggactactgctgaacctatcacttggcttgaattcaccgctgctttccggaagacgcatataccatcgggagtggtgtccctcaagaagaaggaattcaggtcgctcacccagggatctcgctctgttacggagtatttgcacgagttcaatcgtctggctcgttatgctccggaggatgtgcgcaatgatgaagagcgccaggagaagttcttagaaggacttaatgatgagctttcttacccactcatgactggggattattctgatttccagaagttggtggataaggctattcgtcaagaggacaaatacaaccgcatggagcagaagaaacgccggattgctcaattcaagacacaacaggggaataatcagaggccgcgtcttactttaggaccccagtccatgccacatggaggttcttcgtctgttgttcgtccgcagcgtcagttcttcaacaacaatgctggcaacaacatccgcaatcaagctctacgccctgttgcagctccaacacagcaacagcctgccaagagggagcatggcagcaagcccgtggtgtgtttcaactgtggagacccaggacattacgctgacaagtgtccgaagccccgacgcatgaaggttgtccctgtccagagcaactctaccgcaccagcatcaaaggctcgtgtcaatcatgtcgctgcggcagaagctcaagatgctccagatgtgattttgggtacgttccttgttaacttagttcctgcaacagtgcttttcgattctggtgctacacattcattcttatctatgagttttgcgggaaatcatgggatgaaagtagaagatcttagacgtcctttgatggttagtaccccaagtaatcaagcactctctttgcaaggtagcccctctgtcagaatagaaattaaaggagtaccatttctggccaatcttatcctgttagaatccaaagacctagatgtcatcttagggatggactggttagccagacataaaggtgtgatagactgtgctaacagaaaagtaactctcaccagcaatgatggtcgagtggtaactgttcatgcattgtcttctgaatctttaaggtcaagactgaaccagataactttggaagagattcctatagtccgggagtatcccgatgtgttcccagatgatttgcctggtatgccgcctaaaagggatatagagttcagaatagatttggtaccaggaacaactccgatccataagagaccttatagaatggcagccaatgagttggcagaagtcaagaggcaaaaagatcatacccagaggatgtgtgtagactatcgtgcactaaatgatgtgactatcaagaataagtatccactacctagaattgatgatttgtttgatcagcttaaaggtgctactgttttctccaagatagatcttcgatcaggatatcaccagttgagaatcaaagaggaagatatacctaagacagcttttaccactaggtatgggttgttcgaatgtactgttatgtcttttggacttaccaatgcccctgctttcttcatgaacttgatgaatcaggtgtttatggaatacctagacaagttcgtggtggtctttattgatgatattcttatctactctcgaaccaaagaagagcatgaagaacatcttcgccttgcactagagaagctacgagaacatcaactgtatgctaagtttagcaagtgtgaattttggttgtctgaagtgaagttccttggtcacgtcatctcagccggaggagttgccgttgatcctagtaatgtggaatccgtaaccaactggaaacaaccgaagacagtttcagagatccgcagtttcttaggcctcgcaggatattaccggaggtttatagagaatttttccaagattgctaagcccttgacacgactgcttcagaaagatgtgaagtacaagtggtcggaagaatgtgagcagagttttcaagagttgaaaagtagcttaatatcagctcctattttgattttacctgatccaaagaagggtttccaggtgtattgtgatgcatccaaacttgggttaggttgtgtactgatgcaagatgggaaggtggttgcctatgcatctcgtcagttgggtccgcatgagaagaactaccctactcatgatattgagttggccgcagtagttcatgcgttgaaaatttggcgtcattatcttttcggtactcgtacagaggtatataccgatcacaagagtttaaagtatatctttactcagccggatctgaacatgagacaaaggagatggttggaattaattaaggattatgacatgggaattcattatcacccgggaaaggctaatgttgtagcagacgctcttagcaggaaaggctattgcaatgctacggaaggacgacatttgccattggaattatgcaaggaatttgaaagattaaatttgggaattgtcagtataggttttgttgcagccttagaagcgaagcccactctaattgatcaagttagagaagcccaaattaatgatcctgatattcaagatatcaagaagaataggagaagaggaaaagctatcggtttcttggaggatgagcacggaactgtatggttgggtgagagaatctgtgtccccgacaacaaagatttaaaagatgcaattctgaaagaagctcatgatactttatactccattcaccctggtagtactaagatgtaccaggatctcaaggaaagattttggtgggcaagtatgaggcgtgaaatcgcagaatacgtagcagtatgtgatgtttgtcagcgagtcaaggcagaacatcagaaacctgccggtttgctgcagcctttgaagattcctgaatggaagtgggaagaaatcggtatggattttatcactggtttacccagaacgtcatcaggccatgactctatttgggtgatagtcgacagacttaccaaagtggctcatttcattccagtaaagacaacctattccggaagtcgcttagcggaattgtatatggcaaggattacagacggacaaaccgaaagggtgaatcagattttggaagacatgttgagagcttgtgctttagacttcggtggaagttgggataagaatctaccctatgcggaattttcgtacaacaacagttatcaagctagtctacagatggctccttacgaagcactatatggtcagaagtgccgcactccgcttttgtgggatcaaacgggagaacgtcaagttttcgggacggatatcctaagagaagcagaagaaaagtctcgtcataagagttatgccgacaatcgccgcagagatttgagttttgaagaaggagattatgtgtatcttcatgtcacgccttttcgaggagttcatcgttttcataccaaaggaaaattggcaccgcgttttgtgggaccttataagatcgtcagtagaagaggagaggttgcttatcaattggaattacctcaatctttggcaggaatccataatgtgttccatgtttcgcaattgaaaaagtgtttaagggtacctaccgaagaagctaatcttgaacggatagaagtccaagaggatctgacctatgttgagaaaccaatccgtatcttggaaatagatgagagaagaaccaggaatcgggttatccgtttttgcaaagtccaatggagtaatcactcgcagaagagtcaacttgggaacgagaagatgaattga

SEQ ID NO: 15116 - DNA, 2420 bp, Oryza sativa
  Clone ID: TFbOSC26717j.C1.o1.fg
ctcctggtttggaatggtacattcctggtttggagatagaactgtgcagccgggatggttgttcagaatggttgggcctatacaacaggatgccgcgttacaagcctgagtacctgtttggtgttgagggttttgtccaggagttgcgtacgatgtcctttgtcattggattcgggactgcccctttttatgcccagattcctcatgatcgtcatgaagaaaagtgccgagtcaaagtcactttgaacagtaatagtgaagatatcccctcagtgatgtttgaagctggaggaagaaattacatccatgcatgtcaggaggtggcaaggatcgccataggagagctccgtgatcgctacagtgatcaattggccgacactgagtatcgttaccatcctcgtcaaccacagggaagtgaccgtggcagttatcttgagactgaaggaattgagaatgatgctaccacaaggcatttggttgagatgctgtgggctatggatgaaagtcgtgcggagactgtactagcagctcaagatcgtgaagaccggaatcgtggtaagatttgcaagttagaagacaaggtggatcgtttggagaaggaattagccgcattgaagggagaagcaccgccgcagaaggccaggattcgtcttaccgcaaggaagagagctttatttgtccctcgctatcaactggcgccaaagatggtgaacactcgcagcaatgggaatggtcccaacaaccccaataacaacaacaatggagagaatcccactctggcccaagttcttgctcaacagacacagcttatgaacatgatgatgcagcaatttcagaatcagcaaaaccaaggaaataatcatgcacctccccagaacaagttagcagaatttcttcgtgtgaggccgcctgttttctctagtaccactaatcctgttgaagctagtgattggctgcatgccatagagaagaagttggatttgcttcagtgtactgatcaggagaaggtctcatttgcatcacatcagttgcatggccctgcctctgaatggtgggatcacttccgcctgaataggattactgctgaacctatcacttggcttgaattcaccgctgctttccggaagacgcatataccatcaggagtagtgtctctcgagaagaaggagttcagcgccaggagaagttttttgggaggacttaatgatgagctttcttacccactcatggttggagattatcctgatttccagaaattagtggataaggctatacgtcaggaggacaagtacaattgcatggagcagaggaaacgtcggattgctcacttcaaggcacaacaggggagtaatcagaagccgcgtcttactttaggaccccagcccatgtcacagggaggttcttcgtctgttgttcgtccgcagcgtcagttcttcaacaacaatgctggcaacaacatccgtaatcaagctccacgtcctgttgcagctccagtacagcaacaacctgccaagagggagcaaggcagcaagcccgtggtgtgtttcaactgtggagacccaggacattatgctgacaagtgtccgaagccccgtcgcgtgaaggttgtccctgcccagagtaactctgctgtaccagcatcaaaggcccgtgtcaatcatgtcgctgctgcagaagctcaagatgctccagatgtgattttgggtacgttccttgttaactcagttcctgcaacagtgcttttcgattctggtgctacacattcattcttatctatgagttttgcgggaaatcatgggatggaagtggaagatcttagacgtcctttgatggttagtaccccaagtaatcaagcactctctttgcaacgtagcccctctgtcagaatagaaattaaaggagtaccatttctggccaatcttatcttgttagaatccaaagaccttgatgtcatcctagggatggactggttagccagacataaagatgatttacctggtatgccgcctaaaagggatatagagttcagaatagatttggtacctggaacaactccgatccataagagaccttatcgaatggcagccaatgagttggcagaagttaagaggcaagtagatgatttgctacagaaaggatacatcagaccgagttcatcaccatggggagctccggttatttttgtggaaaagaaagaccatactcagagaatgtgtgtggactatcgtgcactaaacgatgtgactattaagaataagtatccactacccaggattgatgatttgtttgatcaactgaaaggtgccactgttttctccaagatagatcttcgatcagggtatcatcagttgagaatcaaagaggaggatatacctaagacagcttttaccactaggtatgggttgttcgaaggtttatag

SEQ ID NO: 15117 - DNA, 3921 bp, Oryza sativa
  Clone ID: TFbOSC27739j.C1.o1.fg
atgtaccgtggtggtattgaggcacatgctcctggtttggaatggtacattcctggtttggagatagaactgtgcagccggggtggttgttcagaatggttgggcctatacaacaggatgccgtgttacaagcctgagtacctgtttggcgttgagggttttgtccaggagttgcgtacgatgtcctttgtcattggatttgggaatgctcctttttatgcccagattcgtcatgatcgtcatgaagaaaagtgccgagtcaaagtcaccttgaacagcaatagtgaagatatcccctcagtaatgtttgaagctggaggaagaaactacatccatgcatgtcaggaggtggcaaggatcgccataggagagctccgtgatcgctacagtgatcagttggtcgacactgagtatcgctatcatcctcgccaaccccagggaagtgaccgtggcagttaccttgagactgaaggaattgagaatgatgttaccacaagacatttggttgagatgttgtgggctatggatgaaagtcgtgcggagactgtgttagcagctcaagatcgtgaagatcggaatcgtggtaagatttgcaagctagaagacaaggtggatcgtttggagaaggaattagccgcattgaagggagaagcaccgccgcagaaggccaggattcgtcttaccgcaaggaagagagctttatttgtccctcgctatcaactggcgccaaaggttcgtgtggtggagaaagaagttgccccagctcaagcggatcctccggtcatcatcataagtagtgatgaagaagaagaatccaagcgcatcaattccaagattgagtgggtagcaactcaagatgatgaagatgagccttcaatcgacctcctatgctcggaagaactagagaagttggagagtttagtggtgtgggagtcttcagtttgtaataatgaaactcagttaagatcaataaaagttaaaatggtgaacactcgtagcaatgggaatggtcccaacaaccccaataataacatcaatggagagaatcccactctggcccaagttcttgctcagcagacacagcttatgaacatgatgatgcaacaatttcagaatcagcaaaaccaagggaataatcatgcacctccacagaacaagttagcagaatttcttcgtgtgaggccgcctgttttctctagtaccactaatcctgttgaagctagtgattggctacatgccatagagaagaagttggatttacttcagtgtactgatcaggagaaggtctcatttgcatcacatcagttgcatggccctgcctctgaatggtgggatcacttccgtcttaacaggactactgctgaacctatcacttggcttgaattcaccgctgctttccggaagacgcatataccatcgggggtagtgtctctcaagaagaaggagttcaggtcgcttacccagggatctcgctctgttacggagtatctgcacgagttcaatcgtcttgctcgttatgctccggaagatgtgcgcaatgatgaagagcgccaggagaagtttttgggaggacttaatgatgagctttcttacccacttatggttggagattaccctgatttccagaaattagtggataaggctattcgtcaggaagacaagtacaatcgcatggagcagaagaaacgtcggattgctcaattcaagacacaacagggaaataatcagaagccgcgtcttactttaggaccccagtccatgccacagggaggttcttcgtctgttgttcgtccgcaacgtcagttcttcaacaacaatgctggcaacaacatccgtaatcaagctccacgtcctgttgcagctccagcacagcaacaacctgccaagagggagcaaggcagcaagcccgtggtgtgtttcaactgtggagatccaggacattatgctgacaagtgtccgaagccccaacgcgtgaaggttgtccctgcccagagtaactctgctgtaccagcatcaaaggcccgtgtcaatcatattgctgctgcagaagctcaaggtgctccagatgtgattttgggtacgttccttgttaactcagttcctgcaacagtacttttcgattctggtgctacacattcattcttatctatgagttttgcgggaaatcatgggatggaagtagaagatcttagacgtcctttgatggttagtaccccaagtaatcaagcactctctttgcaacgtagcccctctgtcagaatagaaattcaaggagtaccatttctggccaatcttatcttgttagaatccaaagaccttgatgtcatcctagggatggactggttagccagacataaaggtgtgatagactgtgccaacagaaaagtaactctcaacagctatgatggtcgagttgtaaccgttcatgcattgtcttctgagtctttaaggtcaagactgaatcaaataactttggaagagattcatatagtccgggagtatcctgatgtgttcccagatgatttaccgggtatgccgcctaaaagggatatagagttcagaatagatttggtacctggaacaactccgatccataagagaccttatcgaatggcagccaatgagttggcagaagttaagaggcaagtagatgatttgctacagaaaggatacatcagaccgagttcatcaccatggggagctccggtaatttttgtggaaaagaaagaccatactcagagaatgtgtgtggactatcgtgcactaaacgatgtgactatcaagaataagtatccactacccaggattgatgatttgtttgatcagcttaaagacaagttcgtggtggtctttattgatgatattcttatctactctcgaaccaaagaagagcatgaggaacatcttcgccttgcattggagaagctacgagaacatcaactgtatgctaagtttagcaagtgtgaattttggttgtccgaagtgaaattccttggtcacgtcatctcagccggaggagttgccgttgatcctagtaacgtggaatccgtaaccaattggaagcaaccaaagacagtttcagagattcgcagtttcctaggccttgcaggatattatcggaggtttatagagaatttttctaagattgctaagcccatgacacgactgcttcagaaagatgtgaagtacaaatggtcggaagaatgtgagcggagttttcaagagttgaaaagtcgcttaatatcagctcctattttgattttgcctgatccaaagaagggtttccaagtatattgcgatgcatccaaacttgggttaggttgtgttctgatgcaagatgggaaggtggttgcctatgcatctcgtcagttacgtccgcatgagaagaactaccctactcatgatattgagttagctgcagtcgttcatgcattaaagatttggcgtcattatcttttcggtactcgtacagaagtgtacaccgatcacaagagtttaaagtatatctttactcagccggatctgaatatgagacaacggagatggttggaattaattaaggattatgacatgggaattcattatcatccgggaaaggctaatgttgtagcagacgctcttagcagaaaaggttattgcaatgctacagaaggacgacagttgccattggaattatgcaaggaatttgaaagattaaatttgggaattgtcggtagaggtttcgttgcagctttagaagcgaagcccactctaattgatcaagttagagaagcccaaattaatgatcctgatattcaagagatcaagaagaatatgagaagaggaaaagctattggtttcttggaagatgagcacggaactgtatggttgggtgaaagaatctgtgtctgtcacgtcctgataaattcatcccaaaattaa

SEQ ID NO: 15118 - DNA, 5082 bp, Oryza sativa
  Clone ID: TFbOSC27749j.C1.o1.fg
atgccgcgcttcaagcctgagtacctgtttggtgttgaaggatttgtccaggagttgcgtactatgtcctttgtcattggatttgggactgctcctttttatgcacagattcgtcatgatcgtcatgaagagaagtgccgagtcaaagtcaccttgaacagtaatagtgaagatatcccatcggtgatgttcgaagctggaggaagaaactacatccatgcgtgtcaggaggtggcaaggatcgccataggagagctccgtgatcgttacagtgatcagttggccgacactgagtatcgttaccatcctcgccaaccacagggaagtgaccgtggcagctaccttgagactgaaggaattgagaatgatgctactacaaggcatttggttgagatgctatgggctatggatgaaagttgtgcggagactgtgttagcggctcaagatcgggaagattggaatcgtggtaagatatgcaagctagaagacaaggtggatcgtttggagaaggagctagccgcgttgaagggagaagcaccgccgcagaaggccaggattcgtcttaccgcaaggaagagagctttatttgttcctcgttatcaattggcgccaaagatccgcgtggtggagaaagaagttgccccagctcaagcagatcctccggtcatcatcataagtagtgatgaagaagaagaatccaagcgcaacaattccaagattgagtgggcagctatcaaagatgaggaagatgagccgaacgagccttcaatcgacctcctatgctcggaagaactagagtttgcttgtgtgtgtgttggtcttgcatgtgatttacatcagtggtgggatatggtgaatactcgcagcaacgggaatggtcccaacctcaacaacctcaataacaacaacaatggagagaatccaacccttgctcaagttcttactcaacagactcagctaatgaacatgatgatgcaacaacttcagaatcagcagaaccaaggaaataaccatgcacctcctcagaacaagttagcagagtttcttcgtgtgaggccgcctattttctctagtaccactaatcctgtagaagctggtgattggctgcatgccatagagaagaagttggatttgcttcagtgcactgatcaggagaaggtctcttttgcatcacaccagttgcatggtcctgcttctgaatggtgggatcacttccgcttgaataggactactgctgaacctatcacttggcttgaattcaccgctgctttccggaagacgcatataccatcaggagtagtgtctctcaagaagaaggagttcaggtcgcttacgcagggatctcgctctgttacagagtatttgcacgagttcaatcgtctagcccgttatgctccggaagatgtgcgcaatgatgaagagcgtcaggagaagtttttggaaggacttaatgatgagctttcttacccactcatgactggagattattctgatttccagaaattagtggataaggctattcgtcaggaggacaagtacaatcgcatggagcagaagaaacaccggattgctcactttaaggcacaacaggggaataatcaaaggccacgtcttactttaggaccccagtctatgccacatggaggttcttcgtctgttgttcgtccgcagcgtcagatcttcaacaacaatgttggcaacaacatccgcaatcaagttccacgccctgttgcagctccaacacaacaacagcctgctaagagggagcaaggcagcaagcctgtggtatgtttcaactgtggagatccaggacattatgctgacaagtgtccgaagccccgtcgcgtgaaggttgttcctgctcagagcaactctactgtaccagcatcgaaggcccgtgtcaatcatgttgcagctgcagaagctcaagatgctccagatgtgattttgggtacgttccctgttaactcagttcctgcaacagtacttttcgattctggtgctacacattcattcttatctatgagttttgcgggaaatcatgggatggaagtagaagatcttagacgtcctttgatggttagtaccccaagtaatcaagcactttctttgcatcgtagcccctctgtcagaatagaaattcaaggagtaccatttctggccaatcttatcttgttagaatccaaagaccttgatgtcatcctagggatggactggttagccagacataatggtgtgatagactgtgccaacagaaaagtaactctcaccagccatgatggtcaagttgtaaccgttcatgcattgtctactgagtctttaaggtcaagactgaaccagataactttgggagagattcctatagtccgggagtatcctgatgtgttcccagatgatttacctggtatgccgcctaaaagggatatagagttcagaatagatttggtacctggaacaactccgatccataagagaccatatagaatggcagcaaatgagttggcagaagttaagaggcaagtcgacgatttacttcagaaaggatacatcagaccgagttcgtcaccatggggagctccagttatttttgtggaaaagaaagatcatacccaaaggatgtgtgtggactatcgtgctctaaacgatgtgactatcaagaataagtatccgctacccagaattgatgatttgtttgatcagcttaaaggtgccactgttttctccaagatagatcttcgatcagggtatcatcagttgagaatcaaagaagaagatatacctaagacagcttttaccactaggtatgggttgttcgaatgtactgttatgtcttttggacttacgaatgcccccgctttcttcatgaacttgatgaataaggtgtttatggaatacctagacaagttcgtggtggtctttattgatgacattcttatctactctcgaaccaaagaagagcatgaagaacatcttcgccttgcattagagaagctacgagaacatcaactgtatgctaagtttagcaagtgtgaattttggttgtctgaagtgaagttccttggtcacgtcatctcagcaggaggagttgccgtcgatcctagcaatgtggaatccgtaaccaactggaaacaaccaaagacagtttcagagattcgcagtttcttaggcctcgcaggatattatcggagttttatagagaatttttccaagattgttaagcccatgacacgactgcttcagaaagatgtgaagtacaagtggtcagaagattgtgagcagagttttcaagagttgaagaatcgcttagtatcagctcctattttgattctacctgatccaaagaagggtttccaagtgtattgcgatgcatccaaacttgggttaggttgtgttctgatgcaagatgggaaggtggttgcctatgcatctcgtcagttacgtccgcatgagaagaactaccctactcatgatcttgagttagctgcagtagttcatgcgttgaagatttggcgtcattatcttttcggaactcgtacagagatgtataccgatcacaagagtttaaagtatatctttactcagccggatctgaacatgagacaaaggagatggttggaattaattaaggattatgacatgggaattcattaccacccaggaaaggctaatgttgtagcagacgctcttagcaggaaaggctattgcaatgttacggaaggacgacagttgccattggaattatgcaaggaatttgaaagattaaatttgggaattgtcagtagaggtttcgttgcagccctagaagtgaagcccactctaattgatcaagttagaaaagcccaaattaatgattctgatattcaagaaatcaagaagaatatgagaagaggaaaagctatcggtttcttggaggatgagcaaggaactcgagtcaaggcagaacatcagaaacccgccggtttgttgcagcctttgaagattcctgaatggaaatgggaagaaatcgatatggactttatcactggtttacccagaacatcatcaagtcatgactctatttgggtgatagtcgatagacttaccaaagtggctcatttcattccggtaaagacaacttattccggaagtcgcttggcggaattgtatatggcaaggatcgtgtgtttgcatggcgttcctaagaagatagtgtctgatcgaggcagtcagtttacttcaaatttttggaagaaacttcaggaagagatgggttctaagctgaactttagtactgcttatcatccgcagacagacggacaaactgaaagggtgaatcagattttggaagacatgttgagagcttgtgctttagatttcggtggaagttgggataagaatctaccttatgcagaattttcgtacaacaacagttatcaagctagtcttcagatggctccgtacgaagcactgtatggtcggaagtgccgcactccgcttttgtgggatcaaacgggagaacgtcaggttttcgggacggatatcctaagggaagcagaagaaaaggtgaaaatcattcaagaaagattgcgagtggctcagtctcgtcataagagttatgccgacaatcgccgcagagatttgagttttgaagaaggagattatgtgtatcttcgtgtcacgcctctacgaggagttcatcgttttcagaccaaaggcaaattggcaccgcgttttgtgggaccttataagattgtcagtagaagaggagaagttgcttatcagttggagttacctcaatctttggcaggagtccataatgtgttccatgtgtcgcaattgaagaaatgtttaagggtacctactgaagaagctaatcttgaacagatagaagtccaagaggatctgacctatgtggagaaaccaatccgtatcttggaaacaagtgagagaaggaccaggaatcgagttatccgcttttgcaaagtccagtggagtaatcactcggaagaagagtcaacttgggaacgagaagatgaattgaagtcagctcatccgtatctgtttgccagttcttccgaatctcgaggacgagattctgtttaa

SEQ ID NO: 15119 - DNA, 870 bp, Oryza sativa
  unsure (1)..(870): unsure at all n locations
  Clone ID: TFbOSC27749j.C1.o2.np
atgacgtcaccgacgacggcggcgactcggcgaagaagacggctcgggcggcggacactcgccggcgaacggcggcaccacggcaccaacggagggcaccagcacgtagaggacaacgcggcgaacacaccggtgaccaaaacggcggcggaaaaggaacggacggcgacggcgacgagaaggaagcggcggctaccttcgggttgacgacggcgacgatgctccggcgggttccgacggctgcgaaggggcggacgaggacggcggcgacttggcgagcacgacgacggtcttcccgagcggcgccgacagctggagcgacggcggagcacggctgaagcggcggcggcgacggcgaagctagggcacacggcgctagagctcttccgacgacgagaggcgaaggcgagggtggcggcggaaagagaagggcatggggatccttttaaaggggctcggaggcgacggcgaaggcccacggcgacggcaacggcgaaggaaactcgcggcttggaaagagggaaaaccgatccgaatcgaactcgattccaacgctttccaaagcgatttagccgaagattccaaaggagaaaaggtagaggagatcccggagatcatttcccctctattgattcggccggagaaggaaagaggcggccggatttggaaggaaacagcggcggcggctcggcggcggcacgctagggtttcggcccgaggaagacgacgggcctgacaggtgggacccacctgtcagcggctgcaagggcgcgcgcgcgcgcggccgncttcggactgggccggctgggccgagaagagagagaaggcggttttgggccgactttcggcccaaagccaaaagaagacttt

SEQ ID NO: 15120 - DNA, 4860 bp, Oryza sativa
  Clone ID: TFbOSC29666j.C1.o1.gm
gccccaagcaacctggtaacgacatcgacgtgtacctaagaccactggtcgaagatcttaaacaattgtggaagaaagaaggtgtccccgtgtgggacgaggacaaacaggaggagtttaacctacgagcgctgctgttcgtaaccatcaacgattggcctgcacttagcaacctatccggacagtccaacaaggggtacaaggcttgcactcactgtatggatgaaacagaaagtacgtatcttaagcactgtaggaaggttgtatacatgggtcatcgtcgattccttgcagcaaaccacccggtacggaagaaaggcaagcacttcgaacataaggccgaccaccgtacgaagcctaaacatcgcagcgggaaaacaatgtttgctatggttaaagatcttaaagtagtgttcggaaaggggcctggaagccagcatatagagagcgaagatggtcacgcggcgatgtggaaaaagaactctatattttgggagttaccatattgggaattcttggacgtacgccacgcaatcgacgtgatgcacctcactaagaacctttgcgtaaaccttcttggcttcctaggtgtatacggaaagtcgaaagatacactggaagcacgtaatgatctgaagcatatggaacaacgcggcgaccttcacccggaaccaaaggagaaaggaagccattacttgagtccagccagctacactcttagcaaggcagagaaggaaagtatgtttgaatgcttggagagcataaaggtaccgtctggatactccacgaatatcaagcgaataataagcacgaaggagaagaagttcacaaacctaaagtctcatgactgtcacgtgttgatgacacaactgctaccagttataataaggggtatccttccagacaatgtccgggcaacaataacaaagctatgtgcattcatgaacgcaatttcgcagaaggtcatcgatccggatagattagaagcccttcagaatgaagtggtgcaatgtctcgtcagttttgagttgatatttccaccttcatttttcaatataatgacgcatctgctttgtcaccttgtgaaagagatccgtattctcgggcctatgtacctacacaacatgtttcctttcaagaggtacatgggcgttctgaagaagtatgttcgtaaccgtgctcgtccagaggcaagcatcgccaagggttatggaacagaggaggtcatcgaattttgtgtagaatttatcgaagaccttcgcccaatcggggtacttgaatcacgccatgaagggagactacggggaaagggaactctcggaaggaaagcaataatgacggtagacaacaatttattctgtaaagcccatttcactgttctgcaacactcttcattggtagctccttacatcgaggagcacttggctctagttcgcgccaggaacatcggtaagtccgatgcatggattacacggcatcacattgatactttccccgcgtggctacgacaacatctcatgggtaacgagtcgatcaaccaacaacttgccttcctggcgaggggaccgtctgggtcgatcgcgacattccagggatatgacatcaatgggtacacattctacacgagagcccaagacatgaagagcacgaaccaaaacagctttgttcgtgtcgatgccatgggacacgatggaacaactgccacgtattacggtgccatcgaggacatatgggaacttgactatggtcctctcaaggttcctctgttccggtgccaatgggttaggttgactggtggaggcgtaatgattgatgacagtgggatgacaactgttgaccttaacaaggttggatactcggacgaaccttttgtccttgccaatgatgtaacgcaagtctttttcgtgaaggacatgtctagcaaaggaaagaagggcagagggcctgatgagcctaagcgtcaagtggttctcccaggcaaaagaaaaatcgtcggagttgaggacaagactgacgaggattacgatcagttggatggcgatcacaaggagggaacaatagtgaggagaaagtacgtgcggtcaaccgtcaccgccgatccgtgcgccgccgtcgtttcagccgtcgccgtcgctcgagaagaccaccgtcgtgctcgccaagtcgtcgccgtcctcgtccaccacttcgccgtcgccggagatcaccagagcagcatcgccgtcatcgacccgaaggtttccgccgcttcctcctcgtcgccgtcgccgcccgttggtcttccgccgccgttttggtcaccggtgagttcgccgcgttgtcctctccgtcttggtgccctccgtttgcgtcctagcgccgccgttcgccggcgagcgtgcgccgttcgagccgtctcctccgccgagccgccgccgctgtcggtgacgtcaccgctgacgtcatcggggtcgtccgccatgccacgcttcaagcctgagtacctgtttggtgttgagggttttgtccaggagttgcgtacgatgtcctttgccattggatttgggactgcccctttttatgcccagattcttcatgatcgtcatgaagagaagtgccgagtcaaagtcaccttgaacagcaatagtgaagaggtcccctcagtaatgtttgaagctggaggaagaaactacatccatgcatgtcaggaggtggcaaggatcgccataggagagctccgcgatcgctacagtaatcagttggccgacactgagtatcgctaccatcctcgccaaccccagggaagtgaccgtggcagttaccttgagactgaaggaattgagaataacgctaccacaaggcatttggtcgagatgctgtgggctatggatgaaagtcgtgcggagactgtgttagcagctcaagatcgtgaagatcggaatcgtggtaagatttgcaagctagaagacaagatggatcgtttggagaaggaactagccgcattgaagggagaagcaccaccgcagaaggccaggattcgtctcaccgcaaggaagagagctctatttgtccctcgctaccaattggcgccaaaagttcgtgtggtggagaaagaagttgccccaaccttagcagatcctccggttatcatcataagtgatgatgaagaagaagaatccaagcgcaaccattccaagattgagtgggtagcaactcaagatgatgaagacgagccgaacgagccttcaatcgacctccgatgctcggaagaactagacaccactaatcctgttgaagctggtgattggctgcatgccatagagaagaagttggatttgcttcagtgtactgatcaggagaaggtctcatttgcatcacaccagttgcatggccctgcctctgaatggtgggatcacttccgcctgaataggattactgctgaacctatcacttggcttgaattcaccgctgctttccgaaagacgcatataccatcaggagtagtgtctctcaagaagaaggagttcaggtcgcttacccagggatctcgctctgttacggagtatttgcacgagttcaatcgtctggctcgttatgctccagaagatgtgcgcaatgatgaagagcgccaagagaagttcttggaaggacttaatgatgagctttcttacccactcatgactggagattattctgatttccagaagttagtggataaggctattcgtcaggaggacaagtataatcgcatggagcagaagaaacgccggatggctcacttcaaggcacaacaggggagtaatcagaagccgcgtcttactttaggaccccagtctgtgccacaaggaggttcttcgtctgttgttcgtccgcagcgtcagttcttcaacaacaatgctggcaataacatccgtaatcaagtcccacgtcctgttgcagcctcgacacagcaacaacctgccaagagggagcaaggcagcaagcccgtggtgtgtttcaactgtggagacccaggacattatgctgacaagtgtccgaagccccgtcgcgtgaaggttgtccctgcccagagcaactctacagtacctgtgccaaaggcccgtgtcaatcatgttgctgctgcagaagctcaagatgctccagatgtgattttggtccgggagtatcccgatgtgttcccagatgatttacctgccaatgagttggcagaagtcaagaggacagtggacgatttgcttctgaaaggatacatcagaccgagttcgtcaccatggggagctccggttatttttgtggaaaagaaagatcatacccagaggatgtgtgtggattatcgtgcactaaatgatgtgactatcaagaataagtatccactacccagaattgatgatttgtttgatcagcttaaaggtgccactgttttctccaagatagatcttcgatctgggtatcaccagttgagaatcaaagaggaagatatacctaagaccgcttttaccactaggtatggcatccacaacgtgttccacgtctctcagttgaagaaatgtttgagagttcctgaggaacaggcaagtccggatcacatcgaaattcaggaagatctgacgtatgtggagaagccgactcgtatcctcgaaaccagcgagagaaggaccagaaacaaagtaataagattctgcaaggttcagtggagccaccactcagaggaagaggccacttgggaaagagaagatgagttgaaggccacccacccgcacctcttcgccagctcttccgaatctcgggtcgccgccgtcgcgctcaccgagcccgcccgcacctcggccaccattcggttgccgccaatcgtcgccgaagcgccgtttccctcgcacgccg

SEQ ID NO: 15121 - DNA, 3875 bp, Oryza sativa
  Clone ID: TFbOSC29996j.C1.o1.fg
atgtgcgcaatgatgaagagcgccaggagaagttcttggaaggacttaatgatgagctttcttacccactcatgactggagattattatgatttccagaagttagtggataaggctattcgccaggaggacaagtacaatcgcatggagcaaaagaaacgccggattgctcaattcaagacacaacaggggaataatcagaagccacgtcttactttaggaccccagtctatgccacagggaggttcttcgtctgttgttcgtccgcagcgtcagttcttcaacaacaatgctggcaacaacatccgcaatcaagctctacgtcctgttgcagtttcgacacagcaacaacctgccaagaaggagcaaggcagcaagcccgtggtgtgtttcaattgtggagacccaggacattacgctgacaagtgtccgaagccccgacgcgtgaaggttgtccctgcccagagcaactctaccgcaccagcatcaaaggcccgtgtcaatcatgttgctgctgcagaagctcaagatgctccagatgtgattttgggtacgttccttgttaactcagttcctgcaacagtgcttttcgattctggtgctacacattcattattatctatgagttttgcgggaaatcatgggatggaagtagaagatcttagacgtcctttgatggttagtaccccaagtaatcaagcactctctttgcaacgtagcccctctgtcagaatagaaattcaaggagtatcatttctggccaatcttatcctgttagaatccaaagaccttgatgtcatcctagggatggactggttagctagacataaaggtgtgatagactgtgccaatagaaaagtaactctcaccagcaatgatggtcgagttgtgactgttcatgcattgtcttctgagtctttaaggtcaagactgaaccagataactttggaagagattcctatagtccgggagtatcctgatgtgttcccagatgatttacctggtatgccgcctaaaagggatatagagttcagaatagatttggtaccaggaacaactctgatccataagagaccttatcgaatggcagccaatgagttggcagaagtcaaaaggcaagtagacgatttgcttcagaaaggatacatcagaccgagttcatctccatggggagctccggttatttttgtggaaaagaaagaccatacccagagaatgtgtgtggactatcgtgcactaaatgatgtgactatcaagaataagtatccactacccagaattgatgatttgtttgatcagcttaaaggtgccaccattttttccaagatagatcttcgatcagggtatcaccagttgagaatcaaagaggaagatatacctaagacaacttttaccactaggtatgggttgttcgaatgtactgtgatgtcttttggacttaccaatgcccctgctttctttatgaacttgatgaataaggtgtttatggaatacctagacaagtttgtggtggtctttattgatgacattcttatctactcccgaaccaaagaagagcatgaagaacatcttcgccttgcactagagaagttacgagaacatcaactgtatgctaagtttagcaagtgtgaattttggttgtccgaagtgaagttccttggtcacgtcatctcagcgggaggagttgccgttgatcctagtaatgtggaatccgtaaccaactggaaacaaccgaagacagtttcagagattcgcagtttcctaggcctcgcaggatattaccggaggtttatagagaatttttccaagattgctaagcccatgacacgactgcttcagaaagatgtgaagtacaagtggtcagaagaatgtgagcaaagttttcaagagttgaagaatcgcttgatatcagctcctattttgattttaccttatccaaagaagggtttccaagtgtattgcgatgcatccaaacttgggttaggttgtgttctgatgcaagatgggaaggtggttgcctatgcatctcgtcagttgcgtccgcatgagaagaactaccctactcatgatcttgagttagctgcagtagttcatgcgttgaagatttggcgtcattatcttttcggtactcgtacagaggtatataccgatcacaagagtttaaagtatatctttactcagtcggatctaaacatgagacaacggagatggttggaattaattaaggattatgacatgggaattcattatcacccgggaaaggctaatgttgtagcagacgctcttagcaggaaaggctattgcaatgctacggaaggacggcagttgccattggaattatgcaaggaatttgaaagattaaatttgggaattgtcagtagaggtttcattgcagccttagaagcgaagcccactctaattgatcaagttagagaagcccaaattaatgatcctgatattcaagagatcaagaagaatatgagaagaggaaaagctatcagtttcttggaagatgagcaaggaactgtatggttgggtgaaagaatctgcgtccccgacaacaaagatttaaaagatgcaattctgaaagaagctcatgataccttatactccattcaccctggtagtaccaagatgtaccaggatctcaaggaaagattttggtgggcaagtatgaagcgtgaaatcgcagaatacgtagcagtatgtgatgtttgtcagcgagtcaaggcagaacatcagaaacccgccgggttgttgcagcctttgaagattcctgaatggaaatgggaagaaatcggtatggattttatcactggtttacccagaacgtcatcaggccatgactctatttggataatagtcgacagacttaccaaagtggctcatttcatcccggtaaagacaacctattccggaagccggttagcggaattgtatatggccaggattgtgtgtttgcatggcgttcctaagaaaatagtgtctgatcgaggcagccagtttacttcaaatttttggaagaaacttcaggaagagatgggttctaagctgaactttagtactgcttatcatccgcaaacagacggacaaaccgaaagggtgaatcagattttggaagacatgttgcgagcttgtgctttagacttcggtggaagttgggataagaatctaccttatgcagaatttttgtataacaacagttatcaagctagtcttcagatggctccttacgaagcactgtatggtcggaagtgccgcactccgcttttgtgggatcaaacgggagaacgtcaggttttcgggacggatatcctaagggaagcagaagaaaaggtgaaaatcattcaagaaagattgcgtgtggctcagtctcgtcataagagttatgccgacaatcgccgcagagatttgagttttgaagaaggagattatgtgtatcttcgtgtcacgcctcttcgaggagttcatcgttttcacaccaaaggaaaattggcaccgcgttttgtgggaccttataagattatcagtagaagaggagaggttgcttatcagttggagttacctcaatctttggcaggagtccataatgtgttccatgtgtcgcaattgaaaaagtgtttaagggtacctaccgaagaagctaatcttgaacagatagaagtccaagagcatctgacctatgttgagaaaccaatccgtattttggaaatagatgagagaagaaccaggaatcgagttatccatttttgcaaagtccagtggagtaatcactcggaagaagaatcaacttgggaacgagaagatgaattgaagtcagctcatccgcatctattcgccagttcttccgaatctcgaggacgagattctgtttaa

SEQ ID NO: 15122 - DNA, 427 bp, Oryza sativa
  Clone ID: TFbOSC29996j.C1.o2.np
acacggggggtccttttaaaggggttagaaggcgccgccgaaggcccacgccgcctggcgacgagatgaaaagctcgagctcgcagagagaaaagctgatccgattcgaactcgaatccatcgatttccaaaccgatttagccgatgtttccaaaggagaaaaggtagaggagatctcggggatcatttcccctctttcaattcggccggagaaggaaatgagcggccggatttggaaaggaacggcggcggcgcgaaactacggtttcgggcggcggcggcgcgacgaagacgacgaccctgacaggtggggcccacctgtcagcgggagagagagaagagcggcggctcggactgggccgtctgggccgaggagagagagagcggttttgggccgactttcggcccaaagccaaaagaagacttt

SEQ ID NO: 15123 - DNA, 1207 bp, Oryza sativa
  Clone ID: TFbOSC30786j.C1.o1.fg
aataagttagcagaatttcttcgtgtgaggccgcctattttctctagtaccactaatcctgttgaagctgctgattggctgcatgccatagagaagaagttggatttgcttcagtgcactgatcaggaaaaggtctcatttgcatcgcatcagttgcatggccctgcctctgaatggtgggatcacttccgtctgaataggactactgctgaacctatcacttggcttgaattcaccgctgcttttcggaagacgcatataccatcgggagtggtgtctctcaagaagaaggagttcaggtcgcttacccagggatctcgcactgttacggagtatctacacgagttcaatcgtctagcccgttatgctccggaaaatgtacgcaatgatgaagagcgtcaggagaagttcttggaaggacttaatgatgagctttcttacccactcatgactggagattattctgatttccagaaattagtggataaggctattcgtcaggaggacaagtataatcgcatggagcagaagaaacgccagattgctcaattcaagacgcaacaggggaataatcagaggccgcgtcttactttaggaccccagtctatgccacatggaggttcttcgtctgtcgttcgtccgcagcgtcagttcttcaacaacaatgttggcaacaacatccgcaatcaagttccacgtcctgttgcagctccaacacaacaacagcctgccaagagggagcaaggtagcaagcccgtggtgtgtttcaactgtggagacccgggacattacgctgacaagtgtccgaagccccgacgcgtgaaggttgtccctgtccagagcaactctaccgcaccagcatcagaggctcgtgtcaatcatgttgcagctgcagaggctcaagatgctccagatgtgattttgggtacgttccttgttaactcagttcctgcaacagtgcttttcgattctggtgctacacattcatttctatctatgagttttgcgggaaatcatgggatggaagtagaagatcttagacgtcctttgatggttagtaccccaagtaatcaagcactctctttgcaacgtagcccctctgtcagaatagaaattaagggagtaccatttctagccaatcttatcttgttagaatccaaagaccttgatgtcatcctagggatggattggttagctagacataaag

SEQ ID NO: 15124 - DNA, 1890 bp, Oryza sativa
  Clone ID: TFbOSC31037j.C1.o5.gm
atggtgaatactcgcagcaacgggaatggtcccaacaaccccaataataacaacaatggagagaatcccactctggcccaagttcttgctcaacagacacagcttatgaacatgatgatgcagcaatttcagaatcagcaaaaccaaggaaataaccatgcacctcctcagaataagttagcagaatttcttcgtgtgaggccgcctgttttctctagtaccactaatcctgttgaagctagtgattggctgcatgccatagagaagaagttggatttacttcagtgtactgatcaggagaaggtctcatttgcatcacatcagttgcatggccctgcctctgaatggtgggatcacttccgccttaacaggactactgctgaacctatcacttggcttgaattcaccgctgctttccggaagacgcatataccatcgggagtagtgtctctcaagaagaaggagttcaggtcgctttcccagggatctcgctctgttacggagtatctgcacgagttcaatcgtcttgctcgttatgctccggaagatgtgcgcaatgatgaagagcgccaggagaagtttttgggaggacttaatgatgagctttcttacccactcatggttggagattaccctgatttccagaaattagtggataaggctattcgtcaggaggacaagtacaattgcatggagcagaggaaacgtcggattgctcacttcaaggcacaacaggggagtaatcagaagccgcgtcttactttaggaccccagtctatgccacagggaggttcttcgtctgttgttcgtccgcaacgtcagttcttcaacaacaatgttggcaacaacatccgtaatcaagctccacgtcctgttgcagctccagcacagcaacaacctgccaagagggagcaaggcaacaagcccgtggtgtgtttcaactgtggagacccaggacattatgctgacaagtgtccgaagccccgacgcgtgaaggttgtccctgcccagaataactctgctgtatcagcatccaaggctcgtgtaaatcatgttgctgctgcagaagctcaagatgctccagatgtgattttggtccgggagtatcctgatgtgttcccagatgatttacctgaaaggatacatcagaccgagttcatcaccatggggagctccggatattatcggaggtttatagagaatttttccaagattgctaagcccatgacacgactgcttcagaaagatgtgaagtacaagtggtcggaagaatccttagaagcgaagcccactctaattgatcaagttagagaagcccaaattaatgatcctgatattcaagagatcaagaagaatatgagaagaggaaaagctattggtttcttggaggatgagcacggaactccgtgctccgccgtcgctccagctgtcgccgtcgctcgggaagaccgccgtcatgctcgccaagtcgccgccgtcctcgtccgccccttcgcagccgtcggaacccgccggagctttgtcgccgtcgacaacccgaagcgccgccgttcgccggtgagtgtccgccgcccgagccgtcttcttcgccgagccgccgccgtcgtcggtgatgtcattgttgacgtcatcgggatcctctcccgtgagccgcatgggtcactgccgggcaccagactgagaagtggcggagataagcccacgggggtcgctggggagtccatcccttgttttataaggggaaattccgggcgtgacattgactcccagtccgacgtagtaatcttggaaatcggcgctgatgaactgggagccgttatccgttatgatgcggatgtccagaaaggtgctgggttcgagtggctctcgtctggacgcacgccgtgctag

SEQ ID NO: 15125 - DNA, 6953 bp, Oryza sativa
  Clone ID: TFbOSC31039j.C1.o1.fg
acaagttcgtggtggtctttattgatgatattcttatctactctcgaaccaaagaagagcatgaggaacatcttcgccttgcattggagaagctacgagaacatcaactgtatgctaagtttagcaagtgtgaattttggttgtctgaagtgaaattccttggtcacgtcatctcagccggaggagttgccgtcgatcctagtaacgtggaatccgtaaccaattggaagcaaccaaagacagtttcagagattcgcagtttcctaggcctcgcaggatattatcggaggtttatagagaatttttccaagattgctaagcccatgacacgactgcttcagaaagatgtgaagtacaagtggtcggaagaatgtgaacagagttttcaagaattgaaaagtcgcttaatatcagctcctattttgattttgcctgatccaaagaagggttttcaagtgtattgtgatgcatccaaacttgggttaggttgtgttctgatgcaagatggaaaggtggttgcctatgcctctcgacagttacgtccgcatgagaagaactaccctactcatgatattgagttagctgcagtcgttcatgcattgaagatttggcgtcattatcttttcggtactcgtacagaagtgtacaccgatcacaagagtttaaagtatatctttactcagccggatctgaacatgagacaacggagatggttggaattaattaaggattatgacatgggaattcattatcatccgggaaaggctaatgttgtagcagacgctcttagcagaaaaggctattgcaatgctacagaaggacgacagttgccattggaattatgcaaggaatttgaaagattaaatttgggaattgtcggtagaggtttcgttgcagccttagaagcgaagcccactctaattgatcaagttagagaagcccaaattaatgatcctgatattcaagagatcaagaagaatatgagaagaggaaaagctattggtttcttggaggatgagcacggaactcgagtcaaggcagaacatcagaaacccgccggtttgttgcaacctttgaagattcctgaatggaaatgggaagaaattggtatggattttattactggtttacccagaacgtcatcaggccatgactctatttgggtgatagtcgacagacttaccaaagtggctcatttcattccggtaaagacaacttattccggaagtcgcttagcggaattgtatatggcaaggattgtgtgtttgcatggcgtccctaagaagatagtgtctgatcgaggcagtcagtttacttcaaatttttggaagaaacttcaggaagagatgggttctaagctgaactttagtactgcttatcatccgcagacagacggacaaaccgaaagggtgaatcaaattttggaagacatgttgagagcttgtgctctagatttcggtggaagttgggataagaatctaccctatgcagaattttcgtacaacaacagttatcaagctagtctacagatggctccgtacgaagcactgtatggtcggaagtgccgcactccgcttttgtgggatcaaacgggagaacgtcaggttttcagaacggatatcctaagggaagcagaagaaaaggtaaagatcattcaagaaagattgcgtgtggctcagtctcgtcataagagttatgccgacaatcgccgcagagatttaagttttgaagagggagattatgtgtatcttcgtgtcacgcctctacgaggagttcatcgttttcataccaagggaaaattggcaccgcgttttgtgggaccttataagattgtcagtagaagaggagaggttgcttatcagttggagttacctcaatctttggcaggagttcataatgtgttccatgtttcgcaattgaaaaagtgtttaagggtacctaccgaacaagctaatcttgaccagatagaagtccaagaggatttgacttatgttgagaaaccaatccgtatcctggaaacaactcctggtttggaatggtacattcctggtttggagatagaactgtgcagccggggtggttgttcagaatggttgggcctatacaacaggatgccgcgttacaagcctgagtacctgtttggtgttgagggttttgtccaggagttgcgtacaatgtcctttgtcattggatttgggactgcccctttttatgcccagattcctcatgatagtcatgaagagaagtgccgagtcaaagtcaccttgaacagtaatagtgaagatatcccctcagtgatgtttgaagctggaggaagaaactacatccatgcatgtcaggaggtggcaaggatcgccataggagagctccgtgatcgctacagtgatcaattggccgacactgagtatcgctaccatcctcgccaaccccagggaagtgaccgtggcagttaccttgagactgaaggaattgagaatgatgttaccacgaaacatttggttgagatgttgtgggctatggatgaaagtcgtgcggagactgtgttagcagctcaagatcgtgaagatcggaatcgtggtaagatttgcaagctagaagacaaggtggatcgtttggagaaggaattagccgcattgaagggagaagcaccgccgcagaaggccaggattcgtcttaccgcaaggaagagagctctatttgtccctcgctatcaactggcgccaaagatggtgaatactcgcagcaacgggaatggtcccaacaaccccaataataacaacaatggagagaatcccactctggcccaagttcttgctcaacagacacagcttatgaacatgatgatgcagcaatttcagaatcagcaaaaccaaggaaataaccatgcacctcctcagaataagttagcagaatttcttcgtgtgaggccgcctgttttctctagtaccactaatcctgttgaagctagtgattggctgcatgccatagagaagaagttggatttacttcagtgtactgatcaggagaaggtctcatttgcatcacatcagttgcatggccctgcctctgaatggtgggatcacttccgccttaacaggactactgctgaacctatcacttggcttgaattcaccgctgctttccggaagacgcatataccatcgggagtagtgtctctcaagaagaaggagttcaggtcgctttcccagggatctcgctctgttacggagtatctgcacgagttcaatcgtcttgctcgttatgctccggaagatgtgcgcaatgatgaagagcgccaggagaagtttttgggaggacttaatgatgagctttcttacccactcatggttggagattaccctgatttccagaaattagtggataaggctattcgtcaggaggacaagtacaattgcatggagcagaggaaacgtcggattgctcacttcaaggcacaacaggggagtaatcagaagccgcgtcttactttaggaccccagtctatgccacagggaggttcttcgtctgttgttcgtccgcaacgtcagttcttcaacaacaatgttggcaacaacatccgtaatcaagctccacgtcctgttgcagctccagcacagcaacaacctgccaagagggagcaaggcaacaagcccgtggtgtgtttcaactgtggagacccaggacattatgctgacaagtgtccgaagccccgacgcgtgaaggttgtccctgcccagaataactctgctgtatcagcatccaaggctcgtgtaaatcatgttgctgctgcagaagctcaagatgctccagatgtgattttgggtacgttccttgttaactcagttcctgcaacagtacttttcgattctggtgctacacattcattcttatctatgagttttgcgggaaatcatgggatggaagtagaagatcttagacgtcctttgatggtcagtaccccaagtaatcaagcactctctttgcaacgtagcccctctgtcagaatagaaattcaaggagtaccatttctggccaatcttatcttgttagaatccaaagaccttgatgtcatcctagggatggactggttagccagacataaaggtgtgatagactgtgccaacagaaaagtaactctcaacagctatgatggtcgagttgtaactgttcatgcattgtcatctgagtctttaaggtcaagactgaaccagataactttggaagagattcctatagtccgggagtatcctgatgtgttcccagatgatttacctggtatgccgcctaaaagggatatagagttcagaatagatttggtaccaggaacaactccgatccataagagaccttatcgaatggcagccaatgagttggcagaagttaagaggcaagtagatgatttgctacagaaaggatacatcagaccgagttcatcaccatggggagctccggttatttttgtggaaaagaaagaccatactcagagaatgtgtgtggactatcgtgcactaaacgatgtgactattaagaataagtatccactacccaggattgatgatttgtttgatcagcttaaaggtgccactgttttctccaagatagatcttcgatcagggtatcatcagttgagaatcaaagaggaagatatacctaagacagcttttaccactaggtatgggttgttcgaatgtactgttatgtcttttggacttaccaatgcccctgctttcttcatgaacttgatgaataaggtgtttatggaatacttagacaagttcgtggtggtctttattgatgatattcttatctactctcgaaccaaagaagagcatgaggaacatcttcgccttgcattggagaagctacgagaacatcaactgtatgctaagtttagcaagtgtgaattttggttgtctgaagtgaaattccttggtcacgtcatctcagccggaggagttgccgtcgatcctagtaacgtggaatccgtaaccaattggaagcaaccaaagacagtttcagagattcgcagtttcctaggcctcgcaggatattatcggaggtttatagagaatttttccaagattgctaagcccatgacacgactgcttcagaaagatgtgaagtacaagtggtcggaagaatgtgaacagagttttcaagaattgaaaagtcgcttaatatcagctcctattttgattttgcctgatccaaagaagggttttcaagtgtattgtgatgcatccaaacttgggttaggttgtgttctgatgcaagatggaaaggtggttgcctatgcctctcgacagttacgtccgcatgagaagaactaccctactcatgatattgagttagctgcagtcgttcatgcattgaagatttggcgtcattatcttttcggtactcgtacagaagtgtacaccgatcacaagagtttaaagtatatctttactcagccggatctgaacatgagacaacggagatggttggaattaattaaggattatgacatgggaattcattatcatccgggaaaggctaatgttgtagcagacgctcttagcagaaaaggctattgcaatgctacagaaggacgacagttgccattggaattatgcaaggaatttgaaagattaaatttgggaattgtcggtagaggtttcgttgcagccttagaagcgaagcccactctaattgatcaagttagagaagcccaaattaatgatcctgatattcaagagatcaagaagaatatgagaagaggaaaagctattggtttcttggaggatgagcacggaactcgagtcaaggcagaacatcagaaacccgccggtttgttgcaacctttgaagattcctgaatggaaatgggaagaaattggtatggattttattactggtttacccagaacgtcatcaggccatgactctatttgggtgatagtcgacagacttaccaaagtggctcatttcattccggtaaagacaacttattccggaagtcgcttagcggaattgtatatggcaaggattgtgtgtttgcatggcgtccctaagaagatagtgtctgatcgaggcagtcagtttacttcaaatttttggaagaaacttcaggaagagatgggttctaagctgaactttagtactgcttatcatccgcagacagacggacaaaccgaaagggtgaatcaaattttggaagacatgttgagagcttgtgctctagatttcggtggaagttgggataagaatctaccctatgcagaattttcgtacaacaacagttatcaagctagtctacagatggctccgtacgaagcactgtatggtcggaagtgccgcactccgcttttgtgggatcaaacgggagaacgtcaggttttcagaacggatatcctaagggaagcagaagaaaaggtaaagatcattcaagaaagattgcgtgtggctcagtctcgtcataagagttatgccgacaatcgccgcagagatttaagttttgaagagggagattatgtgtatcttcgtgtcacgcctctacgaggagttcatcgttttcataccaagggaaaattggcaccgcgttttgtgggaccttataagattgtcagtagaagaggagaggttgcttatcagttggagttacctcaatctttggcaggagttcataatgtgttccatgtttcgcaattgaaaaagtgtttaagggtacctaccgaacaagctaatcttgaccagatagaagtccaagaggatttgacttatgttgagaaaccaatccgtatcctggaaacaagtgagagaagaaccaggaatcgagttatccgtttttgcaaagtccagtggagtaatcactcggaagaagaatcaacttgggaacgagaagatgaattgaagtcagctcatccgcacctgttcgccagttcttccgaatctcgaggacgagattctgtttaa

SEQ ID NO: 15126 - DNA, 323 bp, Oryza sativa
  Clone ID: TFbOSC31560j.C1.o1.hg
gaccccagcccatgccacagggaggttcttcgtctgttgttcgtccgcaacgtcagttcttcaacaacaatgctggcaacaacatccgtaatcaagctccacgtcctgttgcagctccagcacagcaacaacctgccaagagggagcaaggcagcaagcccgtggtgtgtttcaactgtggagacccaggacattatgctgacaagtgtccgaagccccgtcgcgtgaaggttgtccctgcccagaataactctgctgtaccagcatccaaggctcgtgtaaatcatgtcgctgctgcagaagctcagatgctccagatgtga

SEQ ID NO: 15127 - DNA, 4638 bp, Oryza sativa
  Clone ID: TFbOSC31871j.C1.o1.fg
atgggctcctacgaaagcactgtatggtcggaagtgcagcactcgccttttgtgggatcatacggaagacgtcaggttttcgaaccgcatatcgtaagggaagcagaagtaaaggtaaagctcattcaagaaagattgcgtgtggctcagtctcgtcataagagttatgccaacaatcgccgcagagatttgagttttgaaaagggagattatgtgtatcttcgtgtcacgcctcttcgaggagttcatcgttttcataccaaagcaaaattggcaccgcgttttgtgggaccttataagattgtcagtagaacaggagaggttgcttatcagttggagttacctcaatctttggcaggagtacataatgtgttccatgtgtcgcaattgaaaaagtgtttaagggtacctaccgaagaagctaatattgagcagatagaagtccaagaggatttgacttatgttgagaaaccaatccgtatcctggaaacaactcctggtttggaatggtacattcctggtttggagatagaactgtgcagccggggtggttgttcagaatggttgggcctatacaacaggatgccgcgttacaagcctgagtacctgtttggtgttgagggttttgtccaggagttgcgtacgatgtcctttgtcattggatttgggactgcccctttttatacccagattcctcatgatcgtcatgaagagaagtgccgagtcaaagtcaccttgaacagcaatagtgaagatattccctcagtgatgttcgaagctggaggaagaaactacatccatgcatgtcaggaggtggcaaggatcgccataggagagctccgtgatcgctacagtgatcaattggccgacactgagtatcgttaccatcctcgccaaccccagggaagtgaccgtggcagttatcttgagactgaaggaattgagaattatgttaccacaagacatttggttgagatgttgtgggctatggatgaaagtcgtgcggagactgtgttagcagctcaagatcgtgaagaccggaatcatggtaagatttgcaagttagaagacaaggtggatcgtttggagaaggaattagccgcattgaagggagaagcaccgccgcagaaggccaggattcgtcttaccgcaaggaagagagctctatttgtccctcgctatcaactggcgccaaagatggtgaacactcgtagcaatgggaatggtcccaacaaccccaataacaacaatggagagaatcccactcttgctcaagttcttgctcaacaaacacagcttatgaacatgatgatgcagcaatttcagaatcagcaaaaccaagggaataatcatgcacctccccagaacaagttagcagaatttcttcgtgtgaggccgcctgttttctctagtaccactaatcctgttgaagctagtgattggctgcatgccatagagaagaagttggatttacttcagtgcactgatcaggagaaggtatcttttgcatcacatcagttgcatggccctgcctctgaatggtgggatcacttccgccttaacaggactactgctgaacctatcacttggcttgaattcaccgctgctttccgaaagacgcatataccatcgggagtagtgtctctcaagaagaaggagttcaggtcgcttactcagggatctcgctctgttacggagtatctgcacgagttcaatcgtcttgctcgttatgctccggaagatgtgcgcaatgatgaagagcgccaggagaagtttttgggaggacttaatgatgagctttcttacccactcatggttggagattatcctgatttccagaaattagtggataaggctattcgtcaggaggacaagtataatcgcatggagcagaagaaacgtcggattggtcaattcaagacacaccagggaaatattcagaagccgcgtcttactttaggaccccagtctatgccacaggtaggttcttcgtctgttgttcgtccgcaacgtcagtttttcatcaacaatgctgccaacaacatccgtaataaagctccacgtcctgttgcagctccagtacagcaacaacctgccaagagggagcaaggcagcaagcccgtggtgtgtttcaactgtggagacccaggacattatgctgacaagtgtccgaagccccgtcgcgtgaaggttgtccctgcccagagtaactctgctgtaccagtatccaaggctcgtgtaaatcatgtcgctgctgcagaagctcaagatgctccagatgtaattttgggtacgttccttgttaactcagttcctgcaacagtacttttcgattctggtgctacacattcattcttatctatgagttttgcgggaaatcatgggatggaagtagaagatcttagacgtcctttgatggttagtaccccaagtaatcaagcactctctttgcaacgtagcccctcggtcagaatagaaattaaaggagtaccatttctggccaatcttatcttgttagaatccaaagaccttgatgtcatcctagggatggactggttagccagacataaaggtgtgatagactgtgccaacagaaaagtaactctcaacagctatgatggtcgagttgtaactgttcatgcattgtcatctgagtctttaaggtcaagactgaaccagataactttggaagagattcctatagtccgggagtattctgatgtgttcccagatgatttacctggtatgccgcctaaaagggatatagagttcagaatagatttggtacctggaacaactccgatccataagagaccttatcgaatggcagctaatgagttggcagaagttaagaggcaagtagatgatttgctacagaaaggatacatcagaccgagttcatcaccatggggagctccggttatttttgtggaaaagaaagaccatactcagagaatgtgtgtggactatcgtgcactaaacgatgtgactatcaagaataagtatccactacccaggattgatgatttgtttgatcagcttaaaggtgccactgttttctccaagatagatcttcgatcagggtatcatcagttgagaatcaaagaggaagatatacctaagacagcttttaccactaggtatgggttgttcgaatgtactgttatgtcttttggacttaccaatgcccctgctttcttcatgaacttgatgaataaggtgtttatggaatacttagacaagttcgtggtggtctttattgatgatattcttatctactctcgaaccaaagaagagcatgaggaacatcttcgccttgcattggagaagctacgagaacatcaactgtatgctaagtttagcaagtgtgaattttggttgtccgaagtgaaattccttggtcacgtcatctcagccggaggagttgccgtcgatcctagtaacgtggaatccgtaaccaattggaagcaaccaaagacagtttcagagattcgcagtttcctaggcctcgcaggatattatcggaggtttatagagaatttttccaagattgctaagcccatgacacgactgcttcagaaagatgtgaagtacaagtggtcggaagaatgtgaacagagttttcaagaattgaaaagtcgcttaatatcagctcctattttgattttgcctgatccaaagaagggttttcaagtgtattgcgatgcatccaaacttgggttaggttgtgttttgatgcaagatgggaaggtggttgcctatgcctctcgacagttacgtccgcatgagaagaactaccctactcatgatattgagttagctgcagtcgttcatgcattgaagatttggcgtcattatcttttcggtactcgtacagaagtgtacaccgatcacaagagtttaaagtatatctttactcagccggatctgaacatgagacaacggagatggttggaattaattaaggattatgacatgggaattcattatcatccgggaaaggctaatgttgtagcagacgctcttagcagaaaaggctattgcaatgctacagaaggacgacagttgccattggaattatgcaaggaatttgaaagattaaatttgggaattgtcggtagaggtttcgttgcagctttagaagcgaagcccactctaattgatcaagttagagaagcccaaaataatgatcctgatattcaagagatcaagaagaatatgagaagaggaaaagctattggtttcttggaggatgagcacggaacggtatggttgggtgagagaatctgtgtccccgacaacaaagatttaaaggatgcaattctgaaagaagctcacgatactttatactccattcaccctggtagtactaagatgtaccaggatctcaaggaaagattttggtgggcaagtatgaagcgtgaaatcgcagaatacgtagcagtatgtgatgtttgtcagcgagtcaaggcagaacatcagaaacccgccggtttgttgcaacctttgaagattcctgaatggaaatgggaagaaattggtatggattttattactggtttacccagaacgtcatcaggccatgactctatttgggtaatagttgacagacttaccaaagtggctcatttcattccg

SEQ ID NO: 15128 - DNA, 5164 bp, Oryza sativa
  Clone ID: TFbOSC400036j.C1.o50.np
acctctcttctctctcctcggcccaaattccgtcgtttccggagagtccgttttcgcagaagaagagtttgaagagttccaaggccagcaaggcaactcctggtttggaatggtacattcctggtttggagatagaactgtgcagccggggtggttgttcagaatggttggcctatacaacaggatgccgcgttacaagcctgagtacctgtttggtgttgagggttttgtccaggagttgcgtacaatgtcctttgtcattggatttgggactgcccctttttatgcccagattcctcatgatcgtcatgaagagaagtgccgagtcaaagtcactttgaacagtaatagtgaagatatcccctcagtgatgtttgaagctggaggaagaaactacatccatgcatgtcaggaggtggcaaggatcgccataggagagctccgtgatcgctacagtgatcaattggccgacactgagtatcgttcccatcctcgtcaaccccagggaagtgaccgtggtagttaccttgagactgaaggaattgagaatgatgctaccacgaagcatttggttgagatgttgtgggctatggatgaaagtcgtgcggagattgtgttagcagctcaagatcgtgaagaccggaatcgtggtaagatttgcaagttagaagacaaggtggatcgtttggaaaaggaattagccgcattgaagggagaagcaccgccgcagaaggccaggattcgtctcaccgcaaggaagagagctctatttgtccctcgctatcaactggcgccaaagatggtgaatactcgcagcaacgggattggtcccaacaaccccaataacaacaacaatggagagaatcccactctagctcaagttcttgctcaacagacacaacttatgaacatgatgatgcaacaacttcagaatcagcaaaaccaaggaaataatcatgcacctccccagaacaagttagcagaatttcttcgtgtgaggccgcctgttttctctagtaccactaatcctgttgaagctagtgattggctgcatgccatagagaagaagttggatttacttcagtgcactgatcaggagaaggtatcatttgcatcacatcagttgcatggccctgcctctgaatggtgggatcatttccgccttaacaggactactgctgaacctatcacttggcttgaattcaccgctgctttccggaagacgcatataccatcaggagtagtgtctctcaagaagaaggagttcaggtcgcttactcagggatctcgctctgttacggagtatctgcacgagttcaatcgtcttgctcgttatgctccggaagatgtgcgcaatgatgaagagcgccaggagaagtttttgggaggacttaatgatgagctttcttacccactcatggttggagattatcctgatttccagaaattagtggataaggctatacgtcaggaggacaagtacaattgcatggagcagaggaaacgtcggattgctcacttcaaggcacaacagggaaataatcagaagccgcgtcttactttaggaccccagtccatgccacatggaggttcttcgtctgttgttcgtccgcagcgtcagttcttcaacaacaatgctggcaacaacatccgtaatcaagctccacgtcctgttgcagctccagcacagcaacaacctgccaagagggagcaaggcaacaagcccgtggtgtgtttcaactgtggagacccaggacattatgctgacaagtgtccgaagccccgtcgcgtgaaggttgtccctgcccagaataactctgctgtaccagcatcaaaggcccgtgtcaatcatgttgcggctgcagaagctcaagatgctccagatgtgattttgggtatgttccctgttaactcagttcctgcaacagtgcttttcgattctggtgctacacattcattcctatctatgagttttgcgggaaatcatgggatggaagtagaagaccttagacgtcctttgatggttagtaccctaagtgatcaagcactttctttgcaacgtagcccctctgtcagaatagaaattcaaggagtaccatttctggccaatcttatcttgttagaatccaaagaccttgatgtcatcctagggatggactggttaaccagacataaaggtgtgatagactgtgccaacaaaaaagtaactctcaccagcaatgttggtcgagttgtaactgttcatgcattgtcatctgagtctttaaggtcaagactgaaccagataactttggaagagattcctatagtccgggagtatcctgatgtgttcccagatgatttacctggtatgccgcctaaaagggatatagagttcagaatagatttggtacctggaacaactccgatccataagagaccttatcgaatggcagccaatgagttggcagaagttaagaggaaagtagatgatttgctacagaaaggatacatcagaccgagttcatcaccatggggagctccggttatttttgtggaaaagaaagaccatactcagagaatgtgtgtggactatcgtgcactaaacgatgtgactatcaagaataagtatccactacccaggattgatgatttgtttgatcaacttaaaggtgccactgttttttccaagatagatcttcgatcagggtatcatcagttgagaatcaaagaggaagatatacctaagacagcttttaccactaggtatgggttgttcgaatgtactgttatgtcttttggacttaccaatgcccctgctttcttcatgaacttgatgaataaggtgtttatggaatacctagacaagttcgtggtggtctttatagatgatattcttatctactctcgaaccaaagaagagcatgaggaacatcttcgccttgcattggagaagctacgagaacatcaactgtatgctaagtttagcaagtgtgaattttggttgtctgaagtgaagttccttggtcacgtcatctcagccggaggagttgccgtcgatcctagtaacgtggaatccgtaaccaattggaagcaaccaaagacagtttcagagattcgcagtttcctaggcctcgcaggatattaccggaggtttatagagaatttttccaagattgctaagcccatgacacaactgcttcagaaagatgtaaagtacaagtggtcgaaagaatgtgagcggagttttcaagagttaaaaagtcgcttaatatcagctcctattttgattttgcctgatccaaagaagggttttcaagtgtattgcgatgcgtccaaacttgggttaggttgtgttctgatgcaagatgggaaggtggttgcctatgcatctcgtcagttacgtccgcatgagaagaactaccctactcatgatattgagttagctgcagtcgttcatgcattgaagatttggcgtcattatcttttcggtactcgtacagaagtgtataccgatcacaagagtttaaagtatatctttactcagccagatctgaacatgagacaacggagatggttggaattaattaaggattatgacatgggaattcattatcatccgggaaagactaatgtagtagcagacgctcttagcagaaaaggctattgcaatgctacagaaggacgacagttgccattggatttatgcaaggaatttgaaagattaaatttgggaattgtcggtagaggtttcgttgcagccttagaagcgaagcccactctaattgatcaagttagagaagcccaaattaatgatcctgatattcaagagatcaagaagaatatgagaagaggaaaagctattggtttcttggaagatgagcaaggaactgtatggttgggtgagagaatctgtgtccccgacaacaaagatttaaaagatgcaattctgaaagaagctcacgatactttatactccattcaccctggtagtactaagatataccaggatctcaaggaaagattttggtgggcaagtatgaagcgtgaaatcgcagagtacgtagcagtatgtgatgtttgtcagcgagtcaaggcggaacatcagaaacccgccggtttgctgcaacctttgaagattcctggatggaaatgggaagaaatcggtatggattttatcactggtttgcctagaacgtcatcaggccatgactctatttgggtaatagtcgacagacttaccaaagtggctcattttattccggtaaagacaacctattccggaagtcgcttggcggaattgtatatggcaaggattgtgtgtttgcatggcgtccctaagaagatagtgtctgatcgaggcagtcagtttacttcaaatttttggaagaaacttcaggaagagatgggttctaagctgaactttagcactgcttatcatccgcagacagacggacaaaccgaaagggtgaatcaaattttggaagacatgttgagagcttgtgctttagatttcggtggaagttgggataagaatctaccttatgcagaattttcgtacaacaacagttatcaagctagtcttcagatggctccttacgaagcactgtatggtcggaagtgtcgcactccgcttttgtgggatcaaacgggagaacgtcaggttttcgggacggatatcctaagagaagcagaagaaaaggtaaagatcattcaagaaagattgcgtgtggctcagtctcgacataagagttatgccgacaatcgccgcagagatttgagttttgaagaaggagactatgtgtatcttcgtgtcacgcctcttcgaggagttcatcgttttcacaccaagggaaaattggcaccgcgttttgtgggaccttataagattgtcagtagaagaggagaggtcgcttatcagttggagttacctcaatctttggcaggagtccataatgtgttccatgtgtcgcaattgaagaagtgtttaagagtacctaccgaagaagctaatcttgaccagataagtgagagaagaaccaggaatcgagttatccgtttttgcaaagtccagtggagtaatcactcggaagaagagtcaacttgggaacgagaagatgaattgaagtcagctcatccgcatctgttcgccagttcttccgaatctcgaggacgagattctgtt

SEQ ID NO: 15129 - DNA, 4911 bp, Oryza sativa
  Clone ID: TFbOSC400074j.C1.o16.fg
atgtctttcatgattagtctcacccttctcaccacagtaaatgatgctataactggtaatagtttgattagctcctggtttggaatgatgccgcgctacaagcctgagtacttgtttggtgttgagggttttgtccaagagttgcgtacgatatcctttgtcattggatttgggactgcccctttttatgcccagattcctcatgatcgtcatgaagagaagtgccgagtcaaagtcaccttgaacagtaatagtgaagatatcccctcagtgatgttcgaagctggaggaagaaactacatccatgcatgtcaggaggtggcaaggatcgccataggagagctccgcgatcgttatagtgatcagttggccgacactgagtatcgctaccatcctcgtcaaccccagggaagtgaccgtggcagttaccttgagactgaaggaattgagaatgatgctaccacaaggcatttggtcgagatgctgtgggctatggatgaaagtcgtgcggagactgtgttagcggctcaagatcgtgaagaccggaatcgtggtaagatttgcaagttagaagacaaggtggatcgtttggagaaggaattagccgcgttgaagggagaagcaccaccgcagaaggccaggattcgtcttaccgcaaggaagagagctctatttgtccctcgctatcaattggcgccaaagtttcccccggtgtctcttcttgtgccctgtccatgccagatggtgaacactcgcagcaatgggaatggccccagtaacaataacaatgaagggaatcccactcttgctcaagttcttgctcaacagactcagttaatgaacatgatgatgcagcaacttcagaaccagcagaaccaaggaaataaccatgcacctccccataacaagttagcagaatttcttcgtgtgaggccgcctattttctctagtaccactaatcctgttgaagctggtgattggttgcatgccatagagaagaagttggatttgcttcagtgcactgatcaggagaaggcctcatttgcatcacatcagttgcatggccctgcctctgaatggtgggatcacttccgtctgaacaggactactgctgaacctatcacttggcttgaattcaccgctgctttccggaagacgcatataccatcgggagtggtgtccctcaagaagaaggaattcaggtcgctcacccagggatctcgctctgttacggagtatttgcacgagttcaatcgtctggctcgttatgctccggaggatgtgcgcaatgatgaagagcgccaggagaagttcttagaaggacttaatgatgagctttcttacccactcatgactggggattattctgatttccagaagttggtggataaggctattcgtcaagaggacaaatacaaccgcatggagcagaagaaacgccggattgctcaattcaagacacaacaggggaataatcagaggccgcgtcttactttaggaccccagtccatgccacatggaggttcttcgtctgttgttcgtccgcagcgtcagttcttcaacaacaatgctggcaacaacatccgcaatcaagctctacgccctgttgcagctccaacacagcaacagcctgccaagagggagcatggcagcaagcccgtggtgtgtttcaactgtggagacccaggacattacgctgacaagtgtccgaagccccgacgcatgaaggttgtccctgtccagagcaactctaccgcaccagcatcaaaggctcgtgtcaatcatgtcgctgcggcagaagctcaagatgctccagatgtgattttgggtacgttccttgttaacttagttcctgcaacagtgcttttcgattctggtgctacacattcattcttatctatgagttttgcgggaaatcatgggatgaaagtagaagatcttagacgtcctttgatggttagtaccccaagtaatcaagcactctctttgcaacgtagcccctctgtcagaatagaaattaaaggagtaccatttctggccaatcttatcctgttagaatccaaagacctagatgtcatcctagggatggactggttagccagacataaaggtgtgatagactgtgctaacagaaaagtaactctcaccagcaatgatggtcgagtggtaactgttcatgcattgtcttctgaatctttaaggtcaagactgaaccagataactttggaagagattcctatagtccgggagtatcccgatgtgttcccagatgatttgcctggtatgccgcctaaaagggatatagagttcagaatagatttggtaccaggaacaactccgatccataagagaccttatagaatggcagccaatgagttggcagaagtcaagaggcaaaaagatcatacccagaggatgtgtgtagactatcgtgcactaaatgatgtgactatcaagaataagtatccactacctagaattgatgatttgtttgatcagcttaaaggtgctactgttttctccaagatagatcttcgatcaggatatcaccagttgagaatcaaagaggaagatatacctaagacagcttttaccactaggtatgggttgttcgaatgtactgttatgtcttttggacttaccaatgcccctgctttcttcatgaacttgatgaatcaggtgtttatggaatacctagacaagttcgtggtggtctttattgatgatattcttatctactctcgaaccaaagaagagcatgaagaacatcttcgccttgcactagagaagctacgagaacatcaactgtatgctaagtttagcaagtgtgaattttggttgtctgaagtgaagttccttggtcacgtcatctcagccggaggagttgccgttgatcctagtaatgtggaatccgtaaccaactggaaacaaccgaagacagtttcagagatccgcagtttcttaggcctcgcaggatattaccggaggtttatagagaatttttccaagattgctaagcccttgacacgactgcttcagaaagatgtgaagtacaagtggtcggaagaatgtgagcagagttttcaagagttgaaaagtagcttaatatcagctcctattttgattttacctgatccaaagaagggtttccaggtgtattgtgatgcatccaaacttgggttaggttgtgtactgatgcaagatgggaaggtggttgcctatgcatctcgtcagttgggtccgcatgagaagaactaccctactcatgatattgagttggccgcagtagttcatgcgttgaaaatttggcgtcattatcttttcggtactcgtacagaggtatataccgatcacaagagtttaaagtatatctttactcagccggatctgaacatgagacaaaggagatggttggaattaattaaggattatgacatgggaattcattatcacccgggaaaggctaatgttgtagcagacgctcttagcaggaaaggctattgcaatgctacggaaggacgacatttgccattggaattatgcaaggaatttgaaagattaaatttgggaattgtcagtataggttttgttgcagccttagaagcgaagcccactctaattgatcaagttagagaagcccaaattaatgatcctgatattcaagatatcaagaagaataggagaagaggaaaagctatcggtttcttggaggatgagcacggaactgtatggttgggtgagagaatctgtgtccccgacaacaaagatttaaaagatgcaattctgaaagaagctcatgatactttatactccattcaccctggtagtactaagatgtaccaggatctcaaggaaagattttggtgggcaagtatgaggcgtgaaatcgcagaatacgtagcagtatgtgatgtttgtcagcgagtcaaggcagaacatcagaaacctgccggtttgctgcagcctttgaagattcctgaatggaagtgggaagaaatcggtatggattttatcactggtttacccagaacgtcatcaggccatgactctatttgggtgatagtcgacagacttaccaaagtggctcatttcattccagtaaagacaacctattccggaagtcgcttagcggaattgtatatggcaaggattacagacggacaaaccgaaagggtgaatcagattttggaagacatgttgagagcttgtgctttagacttcggtggaagttgggataagaatctaccctatgcggaattttcgtacaacaacagttatcaagctagtctacagatggctccttacgaagcactatatggtcagaagtgccgcactccgcttttgtgggatcaaacgggagaacgtcaagttttcgggacggatatcctaagagaagcagaagaaaagtctcgtcataagagttatgccgacaatcgccgcagagatttgagttttgaagaaggagattatgtgtatcttcatgtcacgccttttcgaggagttcatcgttttcataccaaaggaaaattggcaccgcgttttgtgggaccttataagatcgtcagtagaagaggagaggttgcttatcaattggaattacctcaatctttggcaggagtccataatgtgttccatgtttcgcaattgaaaaagtgtttaagggtacctaccgaagaagctaatcttgaacagatagaagtccaagaggatctgacctatgttgagaaaccaatccgtatcttggaaatagatgagagaagaaccaggaatcgggttatccgtttttgcaaagtccaatggagtaatcactcggaagaagagtcaacttgggaacgagaagatgaattgaagtcagctcatccgcatctgttcgccagttcttccgaatctcgaggacgagattctgtttaa

SEQ ID NO: 15130 - DNA, 4704 bp, Oryza sativa
  Clone ID: TFbOSC400179j.C1.o21.fg
atggcgatgcggcggaggcgcgcggtcgccggcgacgacaaccagcggcaggcgatgccgcgctacaagcctgagtacttgtttggtgttgagggttttgtccaggagttgcgtacgatgtcctttgtcataggatttgggactgtccttttttatgcccagattcctcatgatcgtcatgaagagaagtgccgagtcaaagtcaccttgaacagtaatagtgaagatatcccctcagtgatgttcgaagctggaggaagaaactacatccatgcatgtcaggaggtggcaaggatcgccataggagagctccgcgatcgctacagtgatcagttggccgacactgagtatcgctaccatcctcgccaaccacagggaagtgatcgtggcagctaccttgagactgagggaattgagaatgatgctaccacaaggcatttggttgagatgctgtgggctatggatgaaacccgtgcggagacagtgttagcggctcaagatcgtgaagaccggaatcgtggtaagatttgcaagttggaggacaaggtggatcgtttggagaaggaactagccgcgttgaagggagaagcaccaccgcagaaggccaggattcgtcttaccgcaaggaagagagctctatttgtccctcgttaccaattggcgctaaagatggtgaacactcgcgccagtggaagtggaaacaataacaatgaagggaacccaactcttgcccaagtcctggctcaacaggcacagcttatgaacatgatgatgcagcaactccagaaccagcagaaccaaggaaataaccatgcacctccccagaacaagttagcagaatttcttcgtgtgaggccgcctactttctctagcaccactaatcctgttgaagctggtgattggttgcatgctatagagaagaagttggatttgcttcaatgcaccgatcaggagaaggtctcatttgcatcacatcagctgcatggccctgcctctgaatggtgggatcacttccgcctgaataggactactgctgaacctatcacttggcttgaattcaccgctgctttccggaagacgcatataccatcgggagtggtgtctctcaagaagaaggaattcaggtcgctcactcaggggtctcgctctgttacggagtatctgcacgagttcaatcgtcttactcgttatgctccagaagatgtgcgcactgatgaagagcgccaggagaagttcttggaaggacttaatgatgagctttcttacccactcatgactggggattatcctgatttccagaagttggtggataaggctattcgccaggaagacaagtacaatcgcatggagcaaaagaaacgccggattgctcaattcaagacacaacagggaaataatcagaagccgcgtcttactttaggaccccagtctatgccacagggaggttcttcgtctgttgttcgtccgcagcgtcagttcttcaacaacaatgctggcaacaacatccgcaatcaagctccacgccctgttgcagtttcgacacagcaacaacctgccaagagggagcaaggcagcatgcccgtggtgtgtttcaactgtggagacccaggacattatgctgacaagtgtccgaagccccgacgcgtgaaggttgtccctgcccagagcaactctaccgcacctgcgtcaaaggcccgtgtcaatcatgttgcggctgcagaagctcaaggtgctccagatgtgattttgggtacgttccttgttaactcagtttctgcaacagtgcttttcgattctggtgctacacattcattcttatctatgagttttgcgggaaatcatgggatggaagtagaagatcttagacgtcctttgatggttagtaccccaagtaatcaagcactctctttgcaacgtagcccctctgtcagaatagaaattaaaggagtaccatttttggccaatcttatcctgttagaatccaaagaccttgatgtcatcctatggatggactggttagccagacataaaggtgtgatagactgtgctaacagaaaagtaactctcaccagcaatgatggtcgagttgtaactgttcatgcattgtcttctgagtctttaaggccaagtctaaaccaaataactttggaagagattcctatagtccgggagtatcctgatgtgttcccagatgatttacctggtatgccgcctaaaagggatatagagttcagaatagatttggtaccaggaacaactccgatccataagagaccttatagaatggcagccaatgagttggcagaagtcaagaggcaagtagatgatttgcttcagaaaggatacatcagaccgagttcatctccatggggagctccaattatttttgtggaaaagaaagaccatacccagaggatgtgtgtggactatcgtgcactaaatgatgtgactatcaagaataagtatccgctacccagaattgatgatttgtttgatcagcttaaaggtgccactgttttctccaagatagatcttcgatcagggtatcaccagttgagaattaaagaggaagatatacctaagacagcttttaccactaggtatgggttgtttgaatgtactgttatgtcttttggacttaccaatgcccccgctttcttcatgaacttgatgaataaggtgtttatggaatacctagacaagttcgtggtggtctttattgatgacattcttatctactcccgaaccaaagaagagcatgaagaacatcttcgccttgcactagagaagctacgagaacatcaactgtatgctaagtttagcaagtttgaattttggttgtctgaagtgaagttccttggtcacgtcatctcagccggaggagttgccgtcgatcctagtaatgtggaatccgtaaccaattggaaacaaccaaagacagtttcagagattcgcagtttcttaggcctcgcaggatattatcggaggtttatagagaatttttccaagattgctaagcccatgacacgattgcttcagaaagatgtgaagtacaagtggtcggaagaatgtgagcagagttttcaagagttgaagaatcgcttgatatcagctcctattttgattttgcctgatccaaagaagggtttccaagtgtattgcgatgcatccaaacttggggtaggttgtgttctgatgcaagatgggaaggtggttgcctatgcatctcgtcagttacgtccgcatgagaagaactaccctactcatgatcttgagttagctgcagtagttcatgcgttgaaaatttggcatcattatcttttcggtactcgtacagaagtatataccgatcacaagagtttaaagtatatctttactcagccggatctgaacatgagacaacggagatggttggaattaattaaggattatgacatgggaatacattatcacccgggaaaggctaatgttgtagcagacgctcttagcaggaaaggctattgcaatgctacggaaggacgacagttgccattggaattatgcaaggaatttgaaagattaaatttgggaattgtcagtagaggtttcgttgcagccttagaagcgaagcccactctaattgatcaagttagagaagcccaaattaatgatcctgatattcaagaaatcaagaagaatatgagaagaggaaaagctattggtttcttggaagatgagcaaggaactgtgtggttgggtgagagaatctgcgtccccgacaacaaagatttaaaagatgcaattctgaaagaagctcatgatactttatactccattcaccctggtagtactaaaatgtaccaggatctcaaggaaaggttttggtgggcaagtatgaagcatgaaatcgcagaatacgtagcagtatgtgatgtttgtcagcgcgtcaaggcagaacatcagaaacccgcagtcgacagacttaccaaagtggctcatttcatcccagtaaagacaacctattccggaagtcggttagcggaattgtatatggcaaggattgtgtgtttgcatggcgtccctaagaaaatagtgtctgatcgaggcagtcagtttacttcaaatttttggaagaagcttcaggaagagacagacgaacaaaccgaaagggtgaatcagattttggaagacatgttgagagcttgtgctttagacttcggtggaagttgggataagaatctaccctatgcagaattttcatacaacaacagttatcaagctagtcttcagatggctccttacgaagcactgtatggtcgaaagtgtcgcactccgcttttgtgggatcaaacgggagaacgtcaggttttcgggacggatatcctaagggaagcagaagaaaagccgtgcgccgccgccgttccagtcgtcgccgtcgctcgggaaggtcgtcatcgtggtcgccaagtcgtcgccgtcctcgtccgccccttcgccgtcgctgtagaccgccggagcaccgtcgccgccgtcgacccgatcttctccgccgcttcgacctcgacgccgtcgccgtccgttgatcttccgccgcttctttggtcaccgattccgacgtttccggagagtccgttttcgcaggagaagaatttgaagagttccaaggccagcaaggcaagtcacacagatcccaaacaaccctttgagcatgttgatcctatttaa

SEQ ID NO: 15131 - DNA, 1827 bp, Oryza sativa
  Clone ID: TFbOSC400398j.C1.o3.gm
atgccgcgttacaagcctgagtacctgtttggtgttgagggttttgtccaggagttgcgtacgatgtcctttgtcattggatttggaactgcccctttttatgcccagattgctcatgatcgtcatgaagagaagtgccgagtcaaagtcaccttgaacagtaatagtgaagatatcccctcagtgatgtttgaagctggaggaagaaactacatccatgcatgtcaggaggtggcaaggatcgccataggagagctccgtgatcgctacagtgatcaattggccgacactgagtatcgctaccatcctcgccaaccacagggaagtgaccgtggcagttaccttgagactgaaggaattgagaatgatgttaccacaaagcatttggttgagatgttgtgggctatggatgaaagtcgtgcggagactgtgttagcagcccaagatcgtgaagattggaatcgtggtaagatttgcaagttagaagacaaggtggatcgtttggagaaggaattagccgcattaaagggagaagcaccgccgcagaaggccaggattcgtcttaccgcaaggaagagagctctatttgttcctcgctatcaattggcgccaaaggttcgtgtggtggagaaagaagttgccccagctcaagcggatcctccggtcatcatcataagtagtgatgaagaagaagaatccaagcgcaacaattccaagattgagtgggtagcaacccaagttgataaagacgagccttcaatcgacctccgatgcttggaagaactagagactactgctgaacctatcacttggcttgaattcaccgctgctttccggaagacgcatataccatcaggagtagtgtctctcaagaagaaggagttcaggtcgcttacccagggatctcgctctgttacggagtatctgcacgagttcaatcgtcttgctcgttatgctccggaagatgtgcgcaatgatgaagagcgccaggagaagtttttgggaggacttaatgatgagctttcttacccactcatggttggagattatcctgatttccagaaattagtggataaggctatacgtcaggaggacaagtacaatcacatggagcagaagaaacgtcggattgctcacttcaaggcacaacagggaaataatcagaagccgcgtcttactttaggaccccagtccatgccacagggaggttcttcgtctgttgttcgtccgcagcgtcagttcttcaacaacaatgctggcaacaacatccgtaatcaagctccacgtcctgttgcagctccagcacagcaacaacctgccaagagagagcaaggcagcaagcccgtggtgtgtttcaactgtggagacccaggacattatgctgacaagtgtccgaagccccgacgcgtgaaggttgtccctgcccagaataactctgctgtaccagcatccaaggctcgtgtaaatcatgtcgctgctgcagaagctcaagatgctccagatgtgattttccttgttaactcagttcctgcaacagtacttttcgattctgccaatgagttggcagaagttaagaggcaagtagatgatttgcttcagaagggatacatcagacctagttcatctccatggggagctccgccgtcgccgtcgctcgggaagaccaccgtcgtgctcgccaagtcgtcgccgtcctcgttcgccccttcgccgtcgccggagatcaccggagcagcttcgccgtcgtcgacccgaaggttcccgccgcttcctccttgtcgccgtcgccgtccgttggtcttccgccgccgtttaggtcaccggtga

SEQ ID NO: 15132 - DNA, 3000 bp, Oryza sativa
  Clone ID: TFbOSC400446j.C1.o26.fg
atggacatctctaggacaaatgaaggctacacgagctgcggcccggtaatcgagatgtcatggcacagggctggtgtcctgctgctaggggctcaatcctgcctacctgtcccggaggttccggccgtaggtggggttgggtcggtactcttgtctatggctaggatgggttggaaactatgtcatgtctcccgtccaaatgccgtggtgcctgccaagagggagcaaggcagcaagcccgtggtgtgcttcaactgtggagacccaggacattatgctgacaagtgtccgaagccccgacgcgtgaaggttgtccctgcccagagcaactctaccgcaccagcatcgaaggcccgtgtcaatcatgttgcagctgcagaagctcaagatgctccagatgtgattttgggtacgttccttgttaactcagttcctgcaacagtacttttcgattctggtgctacacattcattcttatctatgagttttgcgggaaatcatgggatggaagtagaagatcttagacgtcctttgatggttagtaccccaaataatcaagcactctctttgcaacgtagcccctctgtcagaatagaaattaaaggagtaccatttctggccaatcttatcttgttagaatccaaagaccttgatgtcatcctagggatggactggttagccagacataaaggtgtgatagactgtgccaacagaaaagtaactctcaccagcaatgatggtcgagttgtaactgttcatgcattgtcttctgagtctttaaggtcaagactgaaccagataactttggaagagattcctatagtccgggagtattccgatgtgttcccagatgatttacctggtatgccgcctaaaagggatatagagttcagaatagatttggtacctggaacaactccgatccataagagaccttatagaatggcagccaatgagttggcagaagtcaagaggcaagtagacgatttgcttcagaaaggatacatcagaccgagttcgtcaccatggggagctccggttatttttgtggaaaagaaagaccatacccagagaatgtgtgtggattatcgtgcactaaatgatgtgactatcaagaataagtatccgctacccagaattgatgatttgtttgatcagcttaaaggtgccactgttttctccaagatagatcttcgatcagggtatcaccagttgagaatcaaagaggaagatatacctaacacaacttttaccactaggtatggattgttcgaatgtactgttatgtcttttggacttaccaatgcccccgctttcttcatgaacttgatgaataaggtgtttatggaatacctagacaagtttgtggtggtctttattgatgacattcttatctactctcgaaccaaagaagagcatgaagaacatcttcgccttgcgttggagaagctacgagaacatcaactgtatgctaagtttagcaagtgtgaattttggctgtctgaagtgaagttccttggtcacgtcatctcagcaggaggagttgccgttgatcctagtaatgtggaatctgtaaccaactggaaacaaccaaagacggtttcagagattcacagattcctaggcctcgcaggatattatcggaggtttatagagaatttttccaagattgctaagcccatgacacgactgcttcagaaagatagttttcaagagttgaaaagtcgcttaatatcagctcctattttgattttgcctgatccaaagaagggtttccaagtgtattgcgatgcatcaaaacttgggttaggttgtgttctgatgcaagatggaaaggtggttgcctatgcatctcgtcagttacgtccgcatgagaagaactaccctactcatgatcttgaattggccgcagtggttcatgcgttgaaaatttggcgtcattatcttttcggtactcgtacagaggtgtataccgatcacaagagtttaaagtatatctttactcagccggatctgaacatgagacaaaggagatggttggaactaattaaggattatgacatgggaattcattatcacccaggaaaggctaatgttgtagcagacgctcttagcaggaaaggctattgcaatgctacggaaggacgacagttgccattggaattatgcaaggaatttgaaagattaaatttgggaattgtcagtagaggtttcgttgcagccttagaagcgaagcccactctaattgatcaagttagagaagcccaaattaatgatcctgatattcaagaaatcaagaagaatatgagaagaggaaaagctatcggtttcttggaggatgagcacggaactgtatggttgggtgagagaatctgtgtccccgacaacaaagatttaaaagatgcaattctgaaagaagctcatgatactttatactccattcaccctggtagtactaagatgtaccaggatctcaaggaaagattttggtgggcaagtatgaagcgtgaaatcgcagaatacgtagcagtatgtgacgtttgtcagcgagtcaaggcagaacatcagaaacccgccggtttgttgcagcctttgaagattcctgaatggaagtgggaagaaatcggtatggattttatcactggtttacccagaacgtcatcaggtcatgactctatttgggtgatagtcgacagacttaccaaagtagctcatttcattccggtaaagacaacctattccggaagtcgcttagcggaattgtatatggcaaggattgtgtgtttgcatggcgtccctaagaaaatagtgtctgatcgaggcagtcagtttacttcaaatttttggaagaaacttcaggaagagatgggttctaagctgaactttagtactgcttatcatccgcagacagacggacaaaaggaccgtataaggaccggtcttcgggcctctgttgcaaagcactaccgtacttccacatgtctagtgggtaaggcttag

SEQ ID NO: 15133 - DNA, 4230 bp, Oryza sativa
  Clone ID: TFbOSC400591j.C1.o10.fg
atgccgcgctacaagcctgagtacctgtttggtgttgagggttttgtccaggagttgcgtacaatgtcctttgccataggatttgggactgcccctttttatgctcagattcctcatgatcgtcacgaagagaagtgccgagtcaaagtcactttgaacagtaatagtgaagatatcccctcagtgatgttcgaagctggaggaagaaactacatccatgcatgtcaggaggtggcaaggatcgccataggagagctccgtgatcgctacagtgatcagttggccgacatggagtatcgctatcatcctcgccaaccccagggaagtgaccgtggcagttatcttgagactgaaggaattgagaatgatgctaccacaaggcatttggttgagatgctgtgggctatggatgaaagtcgtgcagagactgtgttagcggctcaagatcgtgaagaccggaatcgtggtaagatttgcaagctagaagacaaggtggatcgtttggagaaggaattagccgcattaaagggagaagcaccgccgcagaaggccaggattcgtcttaccgcaaggaagagagctctatttgtccctcgctaccaattggcgccaaaggtccgtgtggtggagaaagaagttaccccagccctagcggatcctccggtcgtcaatatggtgaatactcgcagcaacgggaatggccccaacaacaacaataacaacaacaatggagagaatcccacacttgcccaagttctggctcaacagactcagttaatgaacatgatgatgcagcaacttcagaaccagcagaaccaaggaaataaccatgcacctcctcagaataagttagcagaatttcttcgtgtaaggccgcctactttctctagcaccactaatcctgttgaagctggtgattggttgcatgccatagagaagaagttggatttgcttcagtgcactgatcaggagaaggtctcatttgcatcacatcagttgcatggccctgcctctgaatggtgggatcatttccgcctgaataggactactgcggaacctatcacttggcttgaattcaccgctgctatccggaagacgcatataccatcgggagtggtgtctctcaagaagaaggaattcaggtcgctcacccagggatctcgctctgttacggagtatctgcacgagttcaatcgtctggctcgttatgctccggaagatcgtcagttcttcaacaacaatgctggcaacaacatccgcaatcaagctccacatcctgttgcagcttcgacacagcaacagcctgccaagagggagcaaggcagcaagcccgtggtgtgtttcaactgtggagacccaggacattatgctgacaagtgtccgaagccccgacgcgtgaaggttgtccctacccagagcaactctaccgtaccagcatcaaaggcccgtgtcaatcatgtcgctgctgcagaagctcaagatgctccagatgtgattttgggtacgttccttgttaacttagttcctgcaacagtgcttttcgattctggtgctacacattcattcttatctatgagttttgcgggaaatcatgggatggaagtagaagatcttagacgtcctttgatggttagtaccccaagtaatcaagcactctctttgcaacgtagcccctctgtcaaaatagaaattaaaggagtaccatttctggccaatcttatcttgttagaatccaaagaccttgatgtcatcctagggatggactggttagccagacataaaggtgtgatagactgtgctaacagaaaagtaactctcactagcaatgatggtcgagttgtaactgttcatgcaatgtcttctgagtcgttaaggtcaagactgaaacagataactttggaagagattcctatagtccgggagtatcccgatgtgttccccgatgatttgcctggtatgccgcctaaaagggatatagagttcagaatagatttggtaccaggaacaactccgatccataagagaccttatagaatggcagccaatgagttggcagaagtcaagaggcaagtggacgatttgcttcagaaagggtacatcagaccgagttcatctccatggggagctccggttatttttgtggaaaagaaagatcatacccagaggatgtgtgtggactatcgtgcactaaatgatgtgactatcaagaataagtatccgctacccagaattgatgatttgtttgatcagcttaaaggtgccactgttttctccaagatagatcttcgatcagggtatcaccagttgagaatcaaagaggaagatatacctaagacagcttttaccactaggtatggattgttcgaatgtactgttatgtcttttggacttaccaatgcccctgctttcttcatgaatttgatgaataaagtgtttatggaatacctagacaagttcgtggtagtctttattgatgatattcttatctactcccgaaccaaagaagagcatgaagaacatcttcgccttgcactagagaagctacgagaacatcagttgtatgccaagtttagcaagtgtgaattttggttgtctgaagtgaagttccttggtcacgtcatctcagcagaaggagttgccgtcgatcctagtaatgtggaatccgtaaccaactggaaacaaccaaagacagttccagagattcgcagtttcctaggcctcgcaggatattaccggaggtttatagagaatttttccaagattgctaagcccatgacacgactgcttcagaaagatgtgaagtacaagtggtcggaagaatgtgagcagagttttcaagagttgaagaatcgcttgatatcagctcctattttgattttacctgatcaaaagaagggtttccaagtgtattgcgatgcatctaaacttgggttaggttgtgttctgatgcaagatgggaaggtggttgcctatgcatctcgtcagttacgtccgcatgaaaagaactaccctactcatgatcttgagttagctgcagtagttcatgcgttgaaaatttggcgtcattatcttttcggtactcgtacagaggtatataccgatcacaagagtttaaagtatatctttactcagccggatctgaacatgagacaaaggagatggttggaattaattaaggattatgacatgggaattcattatcacccgagaaaggctaatgttgtagcagacgctcttagcaggaaaggctattgcaatgctacggaaggacgacagttgccattggaattatgcaaggaatttgaaagattaaatttgggaattgtcagtagaggttttgttgcagccttagaagcgaagcccactctaattgatcaagttagagaagcccaaattaatgatcccgatattcaagagatcaagaagaatatgagaagaggaaaagctatcggtttcttggaggatgagcacggagctgtatggttgggtgagagaatctgcgtccccgacaacaaagatttaaaagatgcaattctgaaagaagctcacgatactttatactctattcaccctggtagtactaagatgtaccaggatctcaaggaaagattttggtgggcaagtatgaagcgtgaaatcgcagaatacgtagcagtatgtgatgtttgtcagcgagtcaaggcagaacatcagaaacctgccggtttgttgcagcctttgaagattcccgaatggaaatgggaagaaatcggtatggattttattactggtttacccagaacgtcatcgggtcatgactctatttgggtgatagtcgacagacttacaaaagtagctcatttcattccggtaaagacaacttattccggaagtcggttggcggaattgtatatggcaaggatcgtgtgtttgcatggcgtccctaagaaaatagtgtctgatcgaggcagtcaatttacttcaaatttttggaagaagcttcaggaagagatgggttctaagctgaactttagtactgcttatcatccgcagacagacggacaaaccgaaagggtgaatcaggttttggaagacatgttgagagcttgtgctttagacttcggtggaagttgggataagaatctaccttatgcagaattttcgtacaacaacagttatcaagctagtctacagatggaaatcgttggatttgagttcgaatcggattcgtctctctcctccgaaccctaa

SEQ ID NO: 15134 - DNA, 5469 bp, Oryza sativa
  Clone ID: TFbOSC400610j.C1.o8.fg
atgacctcagtgatgacggtgggggcgggcggcggcggcgagctcaggcgcgacggatctggtggcggcacggtggatccggctcaggcgtggcagatccggcagcggcgcgatggatccgacgcggtggcgagtggcagcggcgagctcgggcgctggcggattccgtcgtttccggagagtccgttttcgcagaagaagagtttgaagagttccaaggccagcaaggcaactcctggtttggaatggtatattcctggtttggagatagaactgtgcagccggggtggttgttcagaatggttgggcctatacaacaggatgccgcgttacaagcctgagtacctgtttggtgttgagggttttgtccaggagttgcgtacgatgtcctttgtcattggatttgggactgcccctttttatgcccagattcctcatgatcgtcatgaagagaagtgccgagtcaaagtcaccttgaacagtaatagtgaagatatcccctcagtgatgtttgaagctggaggaagaaactacatccatgcatgtcaggaggcggcaaggatcgccataggagagctccgtgatcgctacagtgatcagttggccgacactgagtatcgctaccatcctcgccaaccccagggaagtgaccgtgacagttaccttgagactgaaggaattgagaatgatgctaccacgaagcatttggttgagatgttgtgggctatggatgaaagtcgtgcggagactgtgttagccgctcaagatcgtgaagaccggaatcgcggtaagatttgcaagttagaagacaaggtggatcgtttggagaaggaattagccgcattgaagggagaagcaccgccgcagaaggccaggattcgtcttaccgcaaggaagagagctctatttgtccctcgctatcaactggcgccaaaggttcatgtgatggagaaagaagttgccccagctcaagcggatcctccggtcatcatcataagtagtgatgaagaagaagaatccaagcgcaacaattccaagattgagtggatggtgaacactcgcagcaatgggaatggtcccaacaaccccaataacaacaacaatggagagaatcccactcttgctcaagttcttgctcaacagacacagcttatgaacatgatgatgcagcaatttcagaatcagcaaaaccaaggaaataatcatgcacctccacagaacaagttagcagaatttcttcgtgtgaggccgcctgttttctctagtaccactaatcctgttgaagctagtgattggctgcatgccatagagaagaagttggatttacttcagtgtactgatcaggacaaggtctcatttgcatcacatcagttgcatggccctgcctctgaatggtgggatcacttccgccttaacaggactactgctgaacctatcacttggcttgaattcaccgctgctttccggaagacgcatataccatcaggagtagtgtctctcaagaagaaggagttcaggtcgcttacccagggatctcgctctgttacggagtatctgcacgagttcaatcgtcttgctcgttatgctccggaagatgtgcgcaatgatgaagagcgccaggagaagtttttgggaggacttaatgatgagctttcttacccactcatggttggagattatcctgatttccagaaattagtggataaggctgttcgtcaggaggacaagtacaatcgcatggagcagaagaaacgccggattgctcaattcaagacacaacaggggaataatcagaagccgcgtcttactttaggaccccagtctgtgccacagggaggttcttcgtctgttgttcgtccgcagcgtcagttcttcaacaacaatgctggcaacaacatccgtaatcaagctccacgtcctgttgcagttccagcacagcaacaacctgccaagagggagcaaggcaacaagcccgtggtgtgtttcaactgtggagatccaggacattatgctgacaagtgtccgaagccccgacgcgtgaaggttgtccctgcccagaataactctgctgtaccagcatccaaggctcgtgtaaatcatgtcgctgctgcagaagctcaaggtgctccagatgtgattttgggtacgttccttgttaactcagttcctgcaacagtacttttcgattctggtgctacacattcattcctatctatgagttttgcgggaaatcatgggatggaagtagaagatcttagacgtcctttgatggttagtaccccaagtaatcaagcactctctttgcaacgtagcccctctgtcagaatagaaattcaaggagtaccatttctggccaatcttatcttgttagaatccaaagaccttgatgtcatcctagggatggactggttagccagacataaaggtgtgatagactgtgccaacaaaaaagtaactctcaccagctatgatggtcgagttgtaactgttcatgcattgtcatctgagtctttaaggtcaagactgaaccagataactttggaagagattcctatagtccgggagtatcctgatgtgttcccagatgatttacctggtatgccgcctaaaagggatatagagttcagaatagatttggtacctggaacaactccgatccataagagaccttatcgaatggcagccaatgagttggcagaagttaagaggcaagtagatgatttgctacagaaaggatacatcagaccgagttcatcaccatggggagctccggttatttttgtggaaaagaaagaccatactcagagaatgtgtgtggactatcgtgcactaaacgatgtgactatcaagaataagtatccactacccaggattgatgatttgtttgatcagcttaaaggtgccactgttttctccaagatagatcttcgatcagggtatcatcagttgagaatcaaagaggaagatatacctaagacatcttttaccactaggtatgggttgttcgaatgtactgttatgtcttttggacttaccaatgcccctgctttcttcatgaacttgatgaataaggtgtttatggaatacctagacaagttcgtggtggtctttattgatgatattcttatctactctcgaaccaaagaagagcatgaggaacatcttcgccttgcattggagaagctacgagaacatcaactgtatgctaagtttagcaagtgtgaattttggttgtctgaagtgaaattccttggtcacgtcatctcagccggaggagttgccgtcgatcctagtaacgtggaatccgtaaccaattggaagcaaccaaagacagtttcagaaattcgcagtttcctaggcctcgcaggatattatcggaggtttatagagaatttttccaagattgctaagcccatgacacgactgcttcagaaagatgtgaagtacaagtggtcggaagaatgtgagcagagttttcaagagttgaaaagtcgcttaatatcagctcctattttgattttgcctgatccaaagaagggttttcaagtgtattgcgatgcatccaaacttgggttaggttgtgttctgatgcaagatgggaaggtggttgcctatgcctctcgacagttacgtccacatgagaagaactaccctactcatgatattgagttagctgcagtcgttcatgcattgaagatttggcgtcattatcttttcggtactcgtacagaagtgtacaccgatcacaagagtttaaagtatatctttactcagccggatctgaacatgagacaacggagatggttggaattaattaaggattatgacatgggaattcattatcatccgggaaaggctaatgttgtagtagacgctcttagcggaaaaggctattgcaatgctacagaaggacgacagttgccattggaattatgcaaggaatttgaaagattaaatttgggaattgtcggtagaggtttcgttgcagccttagaagcgaagcccactctaattgatcaagttagagaagcccaaattaatgatcctgatattcaagagatcaagaagaatatgagaagaggaaaagctattggtttcttggaggatgagcaaggaactgtatggttgggtgagagaatctgtgtccccgacaacaaagatctaaaagatgcagttctgaaagaagctcatgatactttatactccattcaccctggtagtactaagatgtaccaggatctcaaggaaagattttggtgggcaagtatgaagcgtgaaatcgtagaatatgtagcagtatgtgatgtttgtcagcgagtcaaggcagaacatcagaaacccgccggtttgttgcagcctttgaagattcctgaatggaaatgggaagaaataggtatggattttattactggtttacccagaacgtcatcaggccatgattctatttgggtgatagtcgacagacttaccaaagtggctcattttattccggtaaagacaacctattccggaagtcgtttggcggaattgtatatggcaaggattgtgtgtttgcatggcgtccctaagaagatagtgtctgatcgaggcagtcagtttacttcaaatttttggaagaaacttcaggaagagatgggttctaagctgaactttagtactgcttatcatccacagacagacggacaaaccgaaagggtgaatcagattttggaagacatgttgagagcttgtgctttagatttcggtggaagttgggataagaatctaccttatgcagaattttcatacaacaacagttatcaagctagtttacagatggctccttacgaagcactgtatggtcggaagtgccgcactccgcttttgtgggatcaaacgggagaacgtcaggttttcgggacggatatcctaagggaagcagaagaaaaggtaaaggtcattcaagaaagattgcgagtggctcagtctcgacataagagttatgccgacaatcgccgtagagatttgagttttgaagaaggagactatgtgtatcttcgtgtcacgcctcttcgaggagttcatcgttttcacaccaagggaaaattggcaccgcgttttgtgggaccttataagattgtcagtagaagaggagaggttgcttatcagttagaattacctcaatctttggcaggagtccataatgtgttccatgtgtcacaattgaaaaaatgtttaagggtacctaccgaagaagctaatattgagcagatagaagtccaagaggatttgacttctgttgagaaaccaatccgtatcctggaaacaaatgagagaagaaccaggaatcgagttatccgtttctgcaaagttcaatggagtaatcactcggaagaagaatcaacttgggaacgagaagatgaattgaagtcagctcatccgcacctgttcgccagttcttccaaatctcgaggacgagattctgtttaa

SEQ ID NO: 15135 - DNA, 5170 bp, Oryza sativa
  unsure (1)..(5170): unsure at all n locations
  Clone ID: TFbOSC400652j.C1.o1.np
atgtctttcgtgattagtctcacacttctcaccataataaatgatctgtacagccgggtatggttgttcagaatggttgggcctatacaacaggatgccgcgctacaagcctgagtacttgtttggtgttgagggatttgtccaggagttgcgtacgatgtcctttgccataggatttgggactgctcctttttatgctcagattcctcatgatcgtcatgaagagaagtgccgagtcaaagtcaccttgaacagtaatagtgaagatgtcccctcagtgatgttcgaagctagaggaagaaactacaccatgcatgtcaggaggtggcaaggatcgccataggagagctccgcgatcgctatagtgatcagttggccgacactgagtatcgctaccatcctcgccaaccccagggaagtgaccgtggcagctacctagagactgaaggaattgagaatgatgctaccacaaggcatttggttgagatgctgtgggctgtggatgaaacccgtgcggagactgtattagcagctcaagatcgtgaagaccggaatcgtggaaagatttgcaagctagaggacaaggtggatcgtttggagaaggaattagccgcattgaagggagaagcaccaccgcagaaggccaggattcgtcttaccgcaaggaagagagctctttttgtccctcgctaccaattggcgccaaagttttccccggtttctcttcttgtgtcctgcccatgccagatggtgctcactcacagcaatgggaatggcccccaacaacaataacaacaacaacaacaatggagagaatcccacacttgcccaagtcctggctcaacagacacaacttatgaacatgatgatgcagcaactccagaaccagcagaaccaggggaataaccatgcacctccccagaacaagttagcagaatttcttcgtgtgaggccgcctattttctctagtaccactaatcctgttgaagctggtgattggctgcatgccatagagaagaagttggatttgcttcagtgcaccgatcaggagaaggtctcatttgcatcacaccagttgcatggccctgcctctgaatggtgggatcactttcgccttaacaggactattgctgaacctatcacttggcttgaattcaccgctgctttccggaagacgcatatagcatcgggagttgtgtctctcaagaagaaggaattcaggtcgctcactcaggggtctcgctctgttacggagtatctgcacgagttcaatcgtctggctcgttatgctccggaagatgtgcgcaatgatgaagagcgctaggagaagttcttggaaggacttaatgatgagctttcttactcactcatgactggggattatcttgatttccagaagttagtggataaggctattcgtcaggaggacaagtacaatcgcatggaacagaagaaacgccggattgctcaattcaagacacaacaggggaataatcaaagaccgggttttactttaggacccccatccatgccacaaggaggttttttgtctgttgtttgtccgcagggtcagtttttcaacaacaatgctggcaacaacatccggtaatcaagctccacgccctgttgcagcttcgacacagcaacaacctgccaagaaggagcaaggcagcaagcccgtggtgtgtttcaactgtggagacccaggacattacgctgacaagtgtccgaagccccgacgcgtgaaggttgtccctgcccagagcaactctaccgcaccagcgccaaaggcccgtgtcaatcatgttgctgctgcagaagctcaaggtgctccagatgtgattttgggtacgttccttgttaacttagttcctgcaacagtgcttttcgattctggtgctacacattcattcttatctatgagttttgcgggaaatcatgggatggaagtagaagatcttagacgtcctttgatggttagtacccaagtaatcaagcactctctttgcaacgtagcccctctgtcagaatagaaattaaaggagtaccatttctggccaatcttatcctgttagaatccaaagaccttgatgtcatcctaaggatggactggttagccagacataaaggtgtgatagactgtgccaatagaaaagtaactctcaccagcaatgatggtcgagttgtaactgttcatgcattgtcttctgagtttttaaggtcgagactgaaccaaatanctttggaagagattcctatagtccgggagtatcccgatgtgttcccagatgatttacctggtatgccgcctaaaagggatatagagttcagaatagatttggtaaccaggaacaactccgatccataagagaccttatagaatggcagccaatgagttggcagaagtcaagaggcaagtagacgatttgcttcagaaaggatacatcagaccgagttcatctccatggggagctccagttatttttgtggaaaagaaagatcatacccagaggatgtgtgtggactatcgtgcactaaatgatgtgactatcaagaataagtatccgttgcccagaattgatgatttgtttgatcagcttaaaggtgccaccgttttctccaagatagatcttcgatcaggatatcaccagttgagaatcaaagaggaagatatacctaagacagcttttaccactaggtatgggttgttcgaatgtactgttatgtcttttggactcaccaatgcccctgctttcttcatgaacttgatgaataaggtgtttatggaatacctagacaagttcgtggtggtctttattgatgatattcttatctactcccgaaccaaagaagagcatgaagaacatcttcgccttgcactagagaagctacgaggacatcaactgtatgctaagtttagcaagtgtgaattttggttgtctgaagtgaagtttcttggtcacgtcatctcagccggaggagttgccgttgatcccagtaatgtggaatccgtaaccaactggaaacaaccaaagacagtttcagagatccgcagtttcctaggcctcacaggttattatcggaggtttatagagaatttttccaagattgctaagcccatgacacggttgcttcagaaagatgtgaagtacaagtggtcagaagaatgtgagcagagttttcaagagttgaagaatcgcttgatatcagctcctattttgattttacctgatccaaagaagggtttctaagtgtactgcgatgcatccaaacttgggttaggttgtgttctgatgcaagatgggaaggtggttgcctatgcatctcgtcagttacgtccgcatgagaagaactaccctactcatgatcttgagttagctgcagtggttcatgcgttgaagatttggcgtcattatcttttcggtactcgtacagaggtatataccgatcacaagagtttaaagtatatctttactcagccggatctgaacatgagacaacggagatggttggaattaattaaggattatgacatgggaattcattatcatccgggaaaggctaatgttgtagcagacgctcttagtaggaaaggctattgcaaagctacggaaggatgacagttgccattggaattatgccaggaagttgaaagattgaatttgggaattgtccgaaggggtttcgttgcagccttagaagcgaagcccactctaattgatcaagttagagaagcccaaattaatgatcctgatattcaagaaatcaagaagaatatgagaggaggaaaagctattggtttcttggaagatgagcaaggaactgtatggttgggtgagagaatctgcgtccccgacaacaaagatttaaaagatgcaattctgaaagaagctcatgatactttatactccattcaccctggtagtaccaaaatgtaccaggatctcaaggaaagattttggtgggcaagtatgaagcgtgaaatcgcagaatacgtagcagtatgtgatgtttgtcagcgagtcaaggcagaacatcagaaacccgccggtttgttgcagcctttgaagattcctgaatggaaatgggaagaaatcggtatggattttatcactggtttacccagaacgtcaacaggccatgactctatttgggtgatagtcgacagatttatcaaagtggctcatttcattccagtaaagacaacctattccggaagtcagttagcggaattgtatatggcaaggattgtgtgtttgcatggcgtccctaagaaaatagtgtctgatcgaggcagtcagtttacttcaaatttttggaagaagcttcaggaagagatgggttctaagctgaactttagtactgcttatcatccggagacagacggacaaaccgaaagggtgaatcagattttggaagacatgttaagagcttgtgctttagacttcggtggaagttgggataagaatctaccttatgcagaatttttgtacaacaacagttatcaagctagtcttcagatggctccttacgaagcactgtatggtcggaagtgccgcactccgcttttgtgggatcaaacgggagaacgtcaggttttcgggatggatatcctaagggaagcagaagaaaaggtaaagatcattcaagaaggattgcgagtggctcagtctcgtcataagagttatgccgacaatcgccgcagagatttgagttttgaagaaggagattatgtgtatcttcgtgtcacgcctcttcgaggagttcatcgtttccacaccaaaggaaattggcaccgcgttttgtgggaccttataagattgtcagtagaagcggagaggttgcttatcagttggagttacctcaatctttggcaggagtccataatgtgttccatgtgtcgcaattgaaaaagtgtttaagggtacctaccgaagaagctaatcttgaacagatagaagtccaagaggatctgacctatgttgagaaaccaatccgtatcttggaaatagatgagagaagaaccagaaatcgagttatccgcttttgcaaagtccaatggagtaatcactcggaagaagaatcaacttgggaacgagaagatgaattgaagtcagctcatccgcatttgttcgccagttcttccgaatctcgaggacgagattctgtt

SEQ ID NO: 15136 - DNA, 5205 bp, Oryza sativa
  Clone ID: TFbOSC400655j.C1.o23.np
cccttctctctctcctcggcccagattccgtcgtttccggagagtccgttttcgccggagaagagtttgaagagttccaaggccagcaaggcaactcctggtttggaatggtacattcctggtttggagatagaactgtgcagccgggatggttgtttagaatggttgggcctatacaacaggatgccgcgctacaagcctgagtacctgtttggtgttgagggttttgtccaggagttgcgtacgatgtcctttgtcattggatttgggactgcccctttttatgcccagattcctcatgatcgtcatgaagagaagtgccgagtcaaagtcaccttgaacagtaatagtgaagatatcccctcagtgatgttcgaagctgtaggaagaaactacatccatgcatgtcaggaggtggcaaggatcgccataggagagctacagtgatcagttggccgacacggagtatcgctaccatcctcgtcaaccacagggaagtgaccgtggcgttaccttgagactgaaggaattgagaatgatgctaccacaaggcatttggtcgagatgctgtgggctatggatgaaagtcgtgcggagactgtgttagcagctcaagatcgtgaagaccggaatcgtggtaagatttgcaagctagaagacaaggtggattgtttggagaaggaactagccgcattaaagggagaagcaccgccgcagaaggccaggattcgtctcaccgcaaggaagagagctctatttgtccctcgctatcaattggcgccaaagatggtgaacactcgcagcaacgggaatggccccaacaaccccaataacaacaacaatggagagaatcccactcttgctcaagttcttgctcaacagactcagttaatgaacatgatgatgcagcaacttcagaatcagcagaaccagggaaataaccatgcacctccccagaacaagttagcagaatttcttcgtgtgaggccgcctattttctctagtaccactaatcttgttgaagctggtgattggttgcatgccatagagaagaagttggatttgcttcagtgcactgatcaggagaaggtctcatttgcatcacatcagttgcatggccctgcctctgaatggtgggatcacttccgtctgaacaggactactgctgaacctatcacttggcttgaattcactgctgctttccggaagacgcatataccatcgggagtggtgtctctcaagaagaaggaattcaggtcgctcactcagggatctcgctctgttacggagtatttgcacgagttcaatcgtctggctcgttatgctccggaagatgtgcgcaatgatgaagagcgccaggagaagttcttggaaggacttaatgatgagctttcttacccactcatgactggagattattctgatttccagaagttagtggataaggctattcgtcaggaagacaagtacaaccgcatggagcagaagaaacgccggattgctcaattcaagacacaacaggggaataatcagaagccgcgtcttactttaggaccccagtccgtgccacagggaggttcttcgtctgttgttcgtccgcagcgtcagttcttcaacaacaatgctggcaacaacatccgcaatcaagctccacgtcctgttgcagctccaacacagcaacaacctgccaagagggagcaaggcagcaagcccgtggtgtgtttcaactgtggagacccaggacattatgctgacaagtgtccgaagccccgacgcgtgaaggttgtccctgctcagagcaactctactgtaccagcatcaaaggcccgtgttaatcatgttgctgctgcagaagctcaagatgctccagatgtgattttgggtacgtttcttgttaactccgttcctgcaacagtgcttttcgattctggtgctacacattcattcttatctatgagttttgtgggaaatcatgggatggaagtagaagatcttagacgtcctttgatggttagtaccccaagtaatcaagcactctctttgcaacgtagcccctcggtcagaatagaaattcaaggaataccatttctggccaatcttatcttgttagaatccaaagaccttgatgtcatcctagggatggactggttagccagacataaaggtgtgatagactgtgctaacagaaaagtaactctcaccagcaatgatggtcaagttgtaactgttcatgcattgtcttctgagtttttaaggtcaagactgaaccaaataactttggaagagattcctatagtccgggagtatcccgatgtgttcccagatgatttacctggtatgccacctaaaagggatatagagttcagaatagatttggtaccaggaacaactctgatccataagagaccttatagaatggcagccaatgagttggcagaagtcaagaggcaagtagatgatttgcttcagaaaggatacatcagaccaagttcatcaccatggggagctccggttatttttgtggaaaagaaagaccatacccagagaatgtgtgtggactatcgtgcactaaatgatgtgactatcaagaataagtatccactacccagaattgatgatttgtttgatcagcttaaaggtgctactattttctccaagatagatcttcgatcagggtatcaccagttaagaatcaaagaggaagatatacctaagacagcttttaccactaggtatggattgttcgaatgtactgttatgtcttttggacttaccaatgcccccgctttcttcatgaacttgatgaataaggtgtttatggaatacctagacaagttcgtggtggtctttattgatgacattcttatctactcccgaaccaaagaagagcatgaagaacatcttcgccttgcactagagaagctacgagaacatcaactgtatgctaagtttagcaagtgtgaattttggttgtctgaagtgaagttccttggtcacgtcatctcagccgggggagttgccgttgatcccagtaatgtggaatccataaccaactggaaacaaccgaagacagtttcagagatccgcagtttcctaggcctcgcagggtattatcggaggtttatagagaatttttccaagattgctaagcccatgacacgactgcttcagaaagatgtaaagtacaagtggtcagaagaatgtgagcagagttttcaagagttgaagaatcgcttgatatcagctcctattttgattttgcctgatccaaagaagggtttccaagtgtattgcgatgcatccaaacttgggttaggttgtgttctgatgcaagatgggaaggtggttgcctatgcatctcgtcagttacgtccgcatgagaagaactaccctactcatgatcttgagttagctgcagtagttcatgcattgaaaatttggcgtcattatcttttcggtactcgtacagaggtatataccgatcacaagagtttaaagtatatctttactcagccggatctgaacatgagacaaaggagatggttggaattaattaaggactatgacatgagaattcattatcacccgggaaaggctaatgttgtagcagatgctcttagcagaaaaggcaattgcaatgctacggaaggacgacagttgccattggaattatgcaaggaatttgaaagattaaatttgggaattgtcagtagaggtttcgttacagccttagaagcgaagcccactctaattgatcaagttagaaaagcccaaattaatgatcctgatattcaagagatcaagaagaatatgagaagaggaaaagctatcggtttcttggaggatgagcacggaactgtatggttgggtgagaaaatctgtgtccccgacaacaaagatttaaaagatgcaattctgaaagaagctcatgatactttatactccattcaccctggtagtactaagatgtaccaggatctcaaggaaagattttggtgggcaagtatgaagcgtgaaatcgcagaatacgtagcagtatgtgatgtttgtcagcgagtcaaggcagaacatcagaaacctgccggtttgctgcagcctttgaagattcctgaatggaagtgggaagaaatcggtatggattttatcactggtttacccagaacgtcatcgggtcatgactctatttgggtgatagtcgacagacttaccaaagtggctcatttcattccggtaaagacaacttattccggaagtcgcttagcggaattgtatatggcaaggattgtgtgtttgcatggcgtccctaagaaaatagtgtctgatcgaggcagtcagtttacttcaaatttttggaagaaacttcaggaagagatgggttctaaattgaactttagtactgcttatcatccgcagacagacggacagaccgaaagggtgaatcagattttgaaagacatgttgagagcttgtgctttagacttcggtggaagttgggataagaatctaccttatgcagaattctcgtataacaacagttatcaagctagtctacagatggctccttacgaagcactgtatggtcgaaagtgccgcactccgcttttgtgggatcaaacgggagaatgtcaggttttcgggacggatatcctaagggaagcagaagaaaaggtgaaaatcatccaagaaagattgcgtgtggctcagtctcgacataagagttatgccgacaatcgccgcagagatttgagttttgaagaaggagattatgtgtatcttcgtgtcacgcctcttcgaggagttcatcgtttccacaccaaaggaaaattggcaccgcgttttgtgggaccttataagattgtcagtagaagaggagaggttgcttatcagttggagttacctcaatctttggcaggagtccataatgtgttccatgtttcgcaattgaaaaagtgtttaagggtacctaccgaagaagctaatcttgaacagatagaggtccaagaggatctgacctatgttgagaaaccaatccgtatcttggaaatagatgagagaagaaccagaaatcgagttatccgtttttgcaaagtccaatggagcaatcactcggaagaagaatcaacttgggaacgagaagatgaattgaagtcagctcatccgcatctgttcgccagttcttccgaatctcgaggatgagattctgtt

SEQ ID NO: 15137 - DNA, 5208 bp, Oryza sativa
  Clone ID: TFbOSC400676j.C1.o13.fg
atgcgccgcccgagccgtccgctccgccgagccgccgccgctgtcggtgacgtcattgccgacgtcatcggggtcgtccgccctcctggtttggaatggtacattcctggtttggagatagaactgtgcagccgggatggttgttcagaatggttgggcctatacaacaggatgccgcgctacaagcctgagtacctgtttggtgttgagggttttgtccaggagttgcgtacgatgtcctttgccattggatttgggactgcccctttttatgcccagattcctcatgatcgtcatgaagagaagtgccgagtcaaagtcaccttaaacagcaatagtgaagaggtcccctcagtgatgttcgaagctggaggaagaaactacgtccatgcatgtcaggaagtggcaaggatcgccataggagaactccgtgatagctacagtgatcagttggccgacactgagtatcgctaccatcctcgtcaaccccagggaagtgaccgtggcagctaccttgagactgaaggaattgagaatgatgctaccacaaggcatttggttgagatgctgtgggctatggatgaaagtcgtgcggagactgtgttagcagctcaagatcgtgaagaccggaatcgtggtaagatttgcaagctagaagacaaggtggatcgtttggagaaggagctagccgcattgaagggagaagcaccaccgcagaaggccaggattcgtcttaccgcaaggaagagagctctattcgtccctcgctatcaattggcgccaaagatggtgaatactcgcagcaacgggaatggtcccaacaaccccaataacaataacaatggagagaacccaactctggcccaagttcttgctcaacagacacagcttatgaacatgatgatgcagcaacttcagaatcagcagaaccaaggaaataaccatgcacctccccagaacaagttagcagaatttcttcgtgtgaggccgcctattttctctagtaccactaatcctgttgaagctggtgattggctgcatgccatagagaagaagttggatttacttcagtgcactgatcaggagaaggtatcttttgcatcacatcagttgcatggctctgcctctgaatggtgggatcacttccgcctgaataggactactgctgaacctatcacttggcttgaattcactgctgctttccggaagacgcatataccatcaagagtagtgtctctcaagaagaaggagttcaggtcgcttactcagggatctcgctctgttacggagtatctgcacgagttcaatcgtcttgctcgttatgctccggaagatgtgcgcaatgatgaagagcgccaggagaagtttttgggaggacttaatgacgagctttcttacccactcatggttggagattatcctgatttccagaaattagtggataaggctatacgtcaggaggacaagtacaattgcatggagcagaggaaacgtcggattgctcacttcaaggcacaacaggggagtaatcagaagccgcgctttactttaggaccccagtctatgccacagggaggttcttcgtctgttgttcgtccgcagcgtcagttcttcaacaacaatgctggcaacaacatccgcaatcaagctccacgtcctgttgcagctccaacacagcaacagcctgccaagagggagcaaggcagcaagcccgtggtgtgtttcaactgtggagacccaggacattatgctgacaagtgtccgaagccccgtcgcgtgaaggttgtccctgcccagagtaactctgctgtaccagcatcaaaggcccgtgtcaatcatgtcgctgctgcagaagctcaagatgctccagatgtgattttgggtacgttccctgttaactcagttcctgcaacagtacttttcgattcaggtgctacacattcattcttatctatgagttttgcgggaaatcatgggatggaagtagaagatcttagacatcctttgatggttagtaccccaagtaatcaagcactctctttgcagcgtagcccctcggtcagaatagaaattaaaggagtaccatttgtggccaatcttatcttgttagaatccaaagaccttgatgtcatcctagggatggactggttagccagacatagaggtgtgatagactgtgccaacagaaaagtaactctcaccagtaatgatggtcgagtggtaactgttcatgcattgtcttctgagtctttaaggtcaagactgaatcaaataactttggaagagattcctatagtccgggagtatcccgatgtgttcccagatgatttacctggaatgccgcccaaaagggatatagagttcagaatagatctggtaccaggaacaactccaatccataagagaccttatcgaatggcagccaatgagttggcagaagtcaagaggcaagtggacgatttgcttcagaaaggatacatcagaccgagttcatcaccatggggagctccggttatttttgtggaaaagaaagatcatacccagaggatgtgtgtggactatcgtgcattaaatgatgtgactatcaagaataagtacccgttacccagaattgatgatttgtttgatcagcttaaaggtgctaccgttttctccaagatagatcttcgatcagggtatcaccagttgagaatcaaagaggaagatatacctaagacagcttttaccactaggtatggattgttcgaatgtacggttatgtcttttggacttaccaatgcccccgctttcttcatgaacttgatgaataaggtgtttatggaatacctagacaagttcgtggtggtctttattgatgacattcttatctactctcgaaccaaagaagaacatgaagaacatcttcgccttgcattggagaagctacgagagcatcaactgtatgctaagttcagcaagtgtgaattttggttgtctgaagtgaagttccttggtcacgtcatctcagcaggaggagttgccgttgatcctagtaatgtggaatccgtaaccaactggaaacaaccgaagacagtttcagagattcgcagtttcctaggcctcgcaggatattaccggaggtttatagagaatttttccaagattgctaagcccatgacacgactgcttcagaaagatgtgaagtacaagtggtcggaagaatgtgagcagagttttcaagagttgaaaagtcgcttaatatcagctcctattttgattttacctgatccaaagaagggtttccaagtgtattgcgatgcatccaaacttgggttaggttgtgttttgatgcaagatgggaaggtggttgcctatgcatctcgtcagttacgtccgcatgagaagaactaccctactcatgatcttgagttagccgcagtagttcatgcgttgaagatttggtgtcattatcttttcggtactcgtacagaggtatataccgatcacaagagtttaaagtatatctttactcagccggatctgaacatgagacaaaggagatggttggaattaattaaggattatgacatgggaattcattatcacccgggaaaggctaatgttgtagcagacgctcttagcaggaaaggctattgcaatgctaccgaaggacgacagttgccattggagttatgcaaggaatttgaaagattaaatttgggaattgtcagtagaggtttcgttgcagccttagaagcgaagcccactctaattgatcaagttagagaagcccaaattaatgatcctgatattcaagaaatcaagaagaatatgagaagaggaaaagctatcggtttcttggaggatgagcaaggaactgtatggttgggtgaaagaatctgcgtccccgacaacaaagatttaaaagatgcaattctgaaagaagctcatgatactttatactccattcaccctggtagtactaaggtgtaccaggatctcaaggaaagattttggtgggcaagtatgaagcgtgaaatcgcagaatacgtagcagtatgtgatgtttgtcagcgagtcaaggcagaacatcagaaacctgccggtttgctgcagcctttgaagattcctgaatggaagtgggaagaaatcggtatggattttatcactggtttacccagaacgtcatcaggccatgactctatttgggtaatagtcgacagacttaccaaagtggctcatttcattccggtaaagacaacttattctggaagtcgattggcggaattgtatatggcaaggattgtgtgtttgcatggcgtccctaagaagatagtgtctgatcgaggcagtcagtttacttcaaacttttggaagaagcttcaggaagagatggtttctaagctgaattttagtactgcttatcatccgcagacagacggacaaaccgaaagggtaaatcagattttggaagacatgttgagagcttgtgctctagatttcggtggaagttgggataagaatctaccctatgcagaattttcgtacaacaacagttatcaagctagtcttcagatggctccttacgaagcactgtatggtcggaagtgccgcactccgcttttgtgggatcaaacgggagaacgtcaggttttcgggacagatatcctaagggaagcagaagaaaaggtgaaaataattcaggaaagattgcgagtggctcaatctcgtcataagagttatgccgacaatcgccgtagagatttgagttttgaagaaggagattatgtgtatcttcgtgtcacgccttttcgaggagttcatcgttttcataccaaaggaaaattggcaccgcgttttgtgggaccctataagattgtcagtagaagaggagaggttgcttatcagttggagttacctcaatctttggcaggagtccataatgtgttccatgtgtcgcaattgaaaaagtgtttaagggtacctaccgaagaagctaatcttgaacagatagaagtccaagaggatttgacctatgttgagaaaccaatccgtatcttggcaacaagtgagagaagaaccagaaatcgagttatccgtttttgcaaagtccagtggagtaatcactcggaagaagaatcaacttgggaacgagaagatgaattgaagtcagctcatccgcatctgttcgccagttcttctgaatctcgaggacgagattctgtttag

SEQ ID NO: 15138 - DNA, 4728 bp, Oryza sativa
  Clone ID: TFbOSC400686j.C1.o2.fg
atgagggttcacacacatatgccgcgctacaagcctgagtacttgtttggtgttgagggatttgtccaggagttgcgtacgatgtcctttgccataggatttgggactgcccctttttatgcccagattcctcatgatcatcacgaaaagaagtgccgagtcaaagtcaccttgaacagtaatagtgaggatatcccctcagtgatgttcgaagctggaggaagaaactgcatccatgcatgtcaggaggtggcaaggatcgccataggagagcttcacgatcgctacagtgatcagttggccgacactgagtatcgctaccatcctcgtcaaccacagggaagtgaccgtggcagctaccttgagactgagggaattgagaatgatgctaccacaaggcatttggttgagatgctgtgggctatggatgaaacccgtgcggagactgtgttagcagctcaagatcgtgaagaccggaatcgtggtaagatttgcaagctagaggacaaagtggatcgtttggagaaggaactagccgcattgaagggagaagcaccaccgcagaagtccaggattcgtcttaccgcaaggaagagagctctatttgtccctcgctaccaattggcgccaaaggtccgtgtggtagaaaaagaagttaccccagccctagcagatcctccggtcgtcaacatggtgctcactcgcagcaacgggaatggccccaacaacaacaataacaacaacaacaacaatggagaaaatcccacacttgcccaagtcctgtctcaacaggcacagcttatgaacatgatgatgcagcaactccagaaccagactactgctgaacctatcacttggcttgaattcaccactgctttccggaagacgcatataccatcgggagtggtgtctctcaagaagaaggaattcaggtcgctcacccagggatctcgctctgttgccgagtatctgcacgagttcaatcgtctggctcattatgctccggaagatgtgcgcactgatgaagagcgccaggagaggttcttggaaggacttaatgatgagctttcttatccactcatgactggggattattctgatttccagaagttggtggataaggctattcgccaggaggacaagtacaaccgcatggagcaaaagaaacgccggattgctaaattcaaggcacaacaggggaatagtcaaaggccgcgtcttactttaggaccccagtctatgccacagggaggttcttcgtctgttgctcgtccgcagcgtcaattcttcaacaacaacgcggtcaacaacatccgcaatcaagctccacgtcctgttgcagcctcgacacagcaacaacctgccaagagggagcaaggcagcaagcccgtggtgtgtttcaactgtggagacccaggacattacgctgacaagtgtccgaagccccgacgcgtgaaggttgtccctgtccagagcaactctaccgtaccagcatcaaaggcccgtgtcaatcatgttgctgctgcagaagctcaagatgctccagatgtgattttgggtacgtttcttgttaacttagttcctacaacagtgcttttcgattctggtgctacacattcattcttatctatgagttttgcgggaaatcatgggatggaagtagaagatcttagacgtcctatgatggttagtactccaagtaatcaggcactctctttgcaacgtagcccctctgtcaaaatagaaattcaaggcgtaccatttctggccaatcttatcctgttagaatccaaagaccttgatgtcatcttagggatggactggttagccagatataaaggtgtgatagactgtgccaacagaaaagtaactatcaccagtaatgatggtcgagttgtaactgttcatgcattgtcttctgagtctttaaggtcaagactgaaccaaataactttggaagagattcctatagtccgggagtatcctgatgtgttcccagatgatttacctggtatgcctcctaaaagggatatagagttcagaatagatttggtaccaggaacaactccgatccataagagaccttatagaatggcagccaatgagttggcagaagtcaagaggcaagtagacgatttgcttcagaaaggatacatcagaccgagttcatctccatggggagctccggttatttttgtggaaaagaaagatcatacccagaggatgtgtgtagactatcgtgcactaaatgatgtgactatcaagaataagtatccgctgcccagaattgatgatttgtttgatcagcttaaaggtgccaccgttttctctaagatagatcttcgatcagggtatcaccagttgagaatcaaagaggaagatatacctaagacagctttaatagaagagcatgaagaacatcttcgccttgcactagagaagctacgagaacatcaactgtatgctaagtttagcaagtgtgaattttggttgtctgaagtgaagttccttggtcacgtcatctcagcaggaggagttgccgtcgatcctagtaatgtggaatccgtaaccaactggaaacaaccgaagaccgttttagagattcgcagtttcctaggcctcgcaggatattatcggaggtttatagaaaatttttccaagattgctaagcccatgacacgtctgcttcagaaacatgtgaagtacaagtggtcagaagaatgtgagcagagttttcaagagttgaagaatcgcttaataacagctcctattttgattttgcctgatctaaagaagggtttccaagtgtattgtgatgcatccaaacttgggttaggttgtgttctgatgcaagatgggaaggtggttgcctatgcatctcgtcagttacgtccgcatgaaaagaactaccctactcatgatcttgagttagctgcagtagttcatgcgttgaagatttggcgtcattatcttttcggtactcgtacagaggtgtataccgatcacaagagtttaaagtatatttttactcagccggatctgaacatgagacaacggagatggttggaattaattaaggattacgacatgggaattcattatcacccggggaaggctaatgttgtagcagacgctcttagcagaaaaggctattgcaatgctacggaaggacgacagttgccattggaattatgcaaggagtttgaaagattaaatttggaaattgttagtagaggtttcgttgcagccttagaagcgaagcccactctaattgatcaagttagagaagcccaaattaatgatcttgatattcaagaaatcaagaagaatatgagaagaggaaaggctatcggtttcttggaagatgagcaaggaactgtatggttgggcgagagaatctgtgtccccaacaacaaagatttaaaagatgcaattctgaaagaagctcatgatactttatattccattcaccctggtagtaccaagatgtaccaggatctcaaggaaagattttggtgggcaagtatgaagcgtgaaatcgcagaatacgtagcagtatgtgatgtttgtcagcgagtcaaggcagaacatcagaaacccgccggtttgctgcagcctttgaagattcctgaatggaaatgggaggaaatcggtatggatttcatcactggtctacccagaacgtcatcaggccatgactctatttgggtgatagtcgacagacttaccaaagtggctcatttcattccagtaaagacaacttattctggaagtcggttggcggaattgtatatggccaggattgtgtgtttgcatggcgtccctaagaaaatagtgtctgatcgaggtagtcagtttacttcaaatttttggaagaagcttcaggaagagatgggttctaagctgaactttagtactgcttatcatccgcaaacagacggacaaaccgaaagggtgaatcagattttggaagacatgttgagagcttgtgctttagatttcggtggaagttgggataagaatctaccttatgcagaattttcgtacaacaacagttatcaagctagtcttcagatggctccttacgaagcactgtatggtcggaagtgtcgcactccgcttttatgggatcaaacgggagaacgtcaggttttcgggacggatatcctgagggaagcagaagaaaaggtgaaaatcattcaagaaagattgcgtgtggcccaatctcatcataagagttatgccgacaatcgccgcagagatttgagttttgacgaaggagattatgtgtaccttcgtgtcacgcctcttcgaggagttcatcgttttcacaccaaaggaaaattggcaccgcgttttgtgggaccttataaggttgtcagtagaagaggagaggttgcttatcagttggagttacctcaatctttggcaggagtccataatgtgttccatgtgtcgcaattgaaaaagtgtttaagggtacctaccgaagaagctaatcttgaacagatagaagtccaagaggatctgacctatgttgagaaaccaatccgtatcttggaaacaaatgagagaagaaccagaaatcgagttatccgtttttgcaaagtccaatggagtaatcactcggaagaagaatcaacttgggaacgagaagatgaattgaagtcagctcatccgtatctgttcgccagttcttctgaatctcgaggacgagattctgtttaa

SEQ ID NO: 15139 - DNA, 2430 bp, Oryza sativa
  Clone ID: TFbOSC400718j.C1.o122.gm
atgaagatcggcatgctcggcgttggccaggacagtgccgttctcagtataaaagatgacggcgctcccaataaattgccatcaacgccgcaagccctagcttcgcagtcgccgccgccgttccagccgtgctccgccgccgttccagacgccgccgtcgctcgggaagaccgccgtcgtcatcgccgttgcgtcgccgtcctcgtccgccccttcgccgccgccgaagaccgccggagcaccctcgtcaccgtcgacccgaagagcttcgccgcttcctcctcgtcgccgtcgccgtccgttgatcttccgccgccgttttggtcaccgatgccgcgctacaagcctgagtacctgtttggtgttgagggttttgtccaggagttgcgtacgatgtcctttgccattggatttgggactgcccctttttatgcccagattcctcatgatcgtcatgaagagaagtgccgagtcaaagtcaccttaaacagcaatagtgaagaggtcccctcagtgatgttcgaagctggaggaagaaactacatccatgcatgtcaggaagtggcaaggattgccataggagagctccgtgatcgctacagtgatcagttggccgacactgagtatcgctaccatcctcgtcaaccccagggaagtgaccgtggcagctaccttgaaactgaaggaattgagaatgatgctaccacaaggcatttggttgagatgctgtgggctatggatgaaagtcgtgcggagactgtgttagcggctcaagatcgtgaagaccggaatcgtggtaagatttgcaagctagaagacaaggtggatcgtttggaaaaggaactagccgcgttgaagggagaagcaccgccgcagaaggccaggattcgtctcaccgcaaggaagagagctctattcgtccctcgctatcaattggcgccaaaggtccgtgtggtggagaaagaagttgccccagctcaagcggatcctccggtcatcatcataagtgatgaagaagaagaagaatccaagcgcaaccattccaagattgagtgggtagcaactcaagatgatgaagacgagccgaacgagccttcaatcgacctccgatgctcggaagaactagataccactaatcctgttgaagctggtgattggctgcatgccatagagaagaagttggatttacttcagtgcactgatcaggagaaggtctcatttgcatcacatcagttgcatggccctgcctctgaatggtgggatcacttccgcctgaataggattactgctgaacctatcacttggcttgaattcactgctgctttccggaagacgcatataccatcaggagtagtgtctctcaagaagaaggagttcaggtcgcttactcagggatctcgctctgttacggagtatctgcacgagttcaatcgtcttgctcgttatgctccggaagatgtgcgtaatgatgaagagcgtcaggagaagtttttgggaggacttaatgatgagctttcttacccactcatggttggagattatcctgatttccagaaattagtggataaggctatacgtcaggaggacaagtacaattgcatggagcagaggaaacgtcggattgctcacttcaaggcacaacaggggagtaatcagaagccgcgccttactttaggaccccagtctatgccacagggaggttcttcgtctgttgttcgtccgcagcgtcagttcttcaacaacaatgctggcaacaacatccgcaatcaagctccacgtcctgttgcagctccaacacagcaacaacctgccaagagggagcaaggcagtaagtccgtggtgtgtttcaactgtggagacccaggacattatgctgacaagtgtccgaagccccgtcgcgtgaaggttgtccctgctcagaataactctaccgtaccagcatcaaaagcccgtgtcaatcatgtcgctgctgcagaagctcaagatgctccagatgtgattttggtccgggagtatcccgatgtgttcccagatgatttacctggatattaccggaggtttatagagaatttttcaaagatcgctaagcccatgacacgactgcttcagaaagatgtgaagtacaagtggtcggaagaatcgccgcaagccctagcttcgcagtcgccgccgccgctccagccgtgctccgccgccgttccagacgccgccgtcgctcgggaagaccgccgtcgtgatcgccgttgcgtcgccgtcctcgtccgccccttcgccgccgccgaagaccgccggagcaccctcgtcaccgtcgacccgaagagcttcgccgcttcctcctcgtcgccgtcgccgtccgttgatcttccgccgccgttttggtcaccggtgagttcgccgcgtcgtcctctacgtgctggtgcccttcgttag

SEQ ID NO: 15140 - DNA, 5478 bp, Oryza sativa
  Clone ID: TFbOSC400719j.C1.o1.np
atgccgcgctacaagcctgagtatctttttggtgttgagggttttgtccaggagttgcgtacgatgtcctttgtcattggatttgggactgtccctttttatgcccagattcgtcatgatcgtcatgaagagaagtgccgagtcaaagtcaccttgaacagtaatagtgaagatattccctcagtgatgttcgaagctggaggaagaaactacatccatgcatgtcaggaggtggcaaggatcgccataggagagctccgtgatcgctacagtgatcagttggccgacactgagtatcgctaccatcctcgccaaccccagggaagtgaccgtggagactgaaggaattgagaatgatgctaccacaaggcatttggttgagatgctgtgggccatggatgaaagtcgtgcagagactgtgttagcagctcaagatcgtgaagatcggaatcgtggtaagatttgcaagttagaagacaaggtggatcgtttggagaaggaattagccgcattgaagggagaagcaccacctcagaaggccaggattcgtcttaccgcaaggaagagagctttatttgtccctcgctatcaattggcgccaaaggttcgtgtggtggagaaagaagttgccccagcagatcctccggtcatcatcataagtagtgatgaagaagaagaatccaagcgcaactgttccaagattgagtgggtagcaacccaagatgatgaagacgagccgaacgagccttcaatcgacctccgatgctcggaagaactagacaacgggaatggtcccaacctcaacaaccccaataacaataacaatggagagaatccaacccttgctcaagttcttgctcaacagactcagctaatgaacatgatgatgcagcaacttcagaaccagcagaaccaaggaaataaccatgcaccccctcagaataagttagcagaatttcttcgtgtaaggccgcctgttttctctagtaccactaatcctgttgaagctggtgattggttgcatgccatagagaagaagttggatttgcttcagtgcactgatcaggagaaggtctcatttgcatcacaccagttgcatggccctgcctctgaatggtgggatcacttccgcctgaataggactactgctgaacctatcacttggcttgaattcaccgctgctttccggaagacgcatataccatcgggagtggtgtctctcaagaagaaggaattcaggtcactcactcaaggatctcgctctgttacggagtatttgcacgaattcaatcgtcttgcccgttatgctccggaagatgtacgcaatgatgaagagcgtcaggagaagttcttggaaggacttaatgatgagctttcttacccactcatgactgaagattattctgatttccagaaattagtggataaggctattcatcaggaggacaagtacaatcgcatggagcagaagaaacgccggattgctcacttcaaggcacaacaggggaataatcagaagccgcgtcttactttaggaccccagtctatgccacatggaggttcttcgtctgttgttcgtccgcagcatcagttcttcaacaacaatgctggcaacaacatccgtaatcaagctccacgtcctgttgcagcttcgacacagcaacaacctgccaagagggagcaaggcagcaagcctgtggtatgtttcaactgtggagacccaggacattatgctgacaagtgtccaaagccccgacacgtgaaggttgtccctgcccagagcaactctgctgtaccagcatcaaaggcccgtgtcaatcatgttgcagctgcagaagctcaagatgctccagatgtgattttgggtacgttccttgttaactcagttcctgcaacagtgcttttcgattctggtgctacacattcattcttatctatgagttttgcgggaaatcatgggatggaagtagaagatcttagatgtcctttgatggttagtaccccaagtaatcaagcactctctttgcaacgtagcccctctgtcagaatagaaattcaaggggtaccatttctggccaatcttatattgttagaatccaaagaccttgacgtcattctagggatggactggttagccagacataaaggtgtgatagactgtgctaacagaaaagtaactctcaccagcaatgatggtcgagttgtgactgttcatgcattgtcttctgagtttttaaggtcaagactgaaccagataactttggaagagattcctatagtccgggggtatcctgatgtgttcccagatgatttacctggtatgccacctaaaagggatatagagttcagaaaagatttggtacctggaacaactccgatccataagagaccttatagaatggcagccaatgagttggcagaagttaagaggcaagtagatgatttgcttcagaaaggatacatcagaccgagttcatcaccatggggagctccggttatttttgtggaaaagaaagaccatacccagaggatgtgtgtggactatcgtgcattaaatgatgtgactatcaagaataagtacccgctacccagaattgatgatttgtttgatcagcttaaaggtgccaccgttttctccaagatagatcttcgatcagggtatcaccagttgagaatcaaagagtacgggttgttcgaatgtactgttatgtcttttggacttaccaatgcccccgctttcttcatgaacttgatgaataaggtgtttatggaatatctagacaagttcgtggtggtctttattgatgacattcttatctactctaagaccaaagaagagcatgaagaacatcttcgccttgcattggagaagctacgagaacatcaattgtatgccaagttcagcaagtgtgaattctggttgtctgaagtaaagttccttggtcacgtcatctcagcaggaggagttgccgtcgatcctagtaatgtggaatccgtaaccaactggaaacaaccaaagacagtttcagagatccgcagtttcctaggcctcgcaggatattatcggaagtttatagagaatttttccaagattgctaagcccatgacacgactgtttcagaaagatgtgaagtacaagtggtcagaagaatgtgagcagagttttcaagagttgaagaatcgcttgatatcagctcctattttgattttgcctgatccaaagaagggtttccaggtgtattgcgatgcatccaaacttgggttaggttgtgttttgatgcaagatgggaaggtggttgcctatgcatctcgtcagttacgtccgcatgaaaagaactaccctactcatgatcttgagttagctgcagtagttcatgcgttgaaaatttggcgtcattatcttttcggtactcgtacagaggaatttgaaagattgaatttgggaattgtcagtataggtttcgttgcagccttagaagcgaagcccactctaattgatcaagttagagaagctcaaactaatgatccggatatccaagaaattaagaagaatatgagaagaggaaaagctattggtttcttggaggatgagcacggaactgtatggttgggtgagagaatctgtgtccccgacaacaaagatttaaaagatgcaattctgaaagaagctcatgatactttatactccattcaccctggtagtactaagatgtaccaggatctcaaggaaaggttttggtgggcaagtatgaagcgtgaaattgcagaatacgtagcagtatgtgatgtttgtcagcgagtcaaggcagaacatcagaaacccgccggtttgttgcagcctttgaagattcctgaatggaaatgggaagaaatcggtatggattttatcactggtttgcccaaaacgtcattaggccatgactctatttgggtgatagtcgacagacttaccaaagtggcacatttcattccggtaaaaacaacctattccggaagtcgcttagcagaattgtatatggcaaggattgtgtgtttgcatggcgtccctaagaagatagtgtctgatcgaggcagtcagtttacttcaaatttttggaagaaacttcaggaagagatgggttctaagttgaactttagtactgcttatcatccgcagacagacggacaaactgaaagggtgaatcagattttggaagacatgttgagagcttgtgctttagatttcggtggaagttgggataagaatctaccttatgcagaattttcatacaacaacagttatcaagctagtcttcagatggctccttacgaagcactgtatggtcggaagtgccgcactccgcttttgtgggatcaaacgggagaacgtcaggttttcgggacggatatcctaagggaagcagaagaaaaggtgaaaatcattcaagaaagattgcgagtggctcagtctcgacataagagttatgccgacaatcgccgcagagatttgagttttgaagaaggagattacgtgtatcttcgtgtcacgcctcttagaggagttcatcgtttccataccaaaggaaaattggtaccgcgttttgtgggaccttataagattgtcagtagaagaggagaggttgcttatcagttagagttacctcaatctttggcagaagtccataatgtgttccatgtgtcgcaattgaagaagtgtttaagagtacctaccgaagaagctaatcttgaacaaatagaagtccaagaggatctgacctatgtggagaaaccaatccgtatcttggaaacaaatgagagaagaaccaggaatcgagttatccgtttttgcaaagtccagtggagtaatcactcggaagaagaatcaacttgggaacgagaagatgaattgaacgagggattcgagttcgtctcggattcgtctttcccgaaccttccttcctcgtcgccggtcgccgtgggccttcgccttcgcctccgagcccctttaaaaggttccccgtggtctcctctacccgccgccaccctcgccttcgcctctcgtcgccggagtcgccctagcgccccgtgcgccgccgttgttccagccgtcgccatcgctcgggaaggccgccgtcgtgttcgccgtcgcgtcgccgtcctcgtccgccccttcgccgtcgccgaagaccgccggagcgtcatcgccgccgtcgacccgaagagcttcgccgcttcctcctcgtcgccgtcgccatccgttgatcttccgcctccgtttgcgtcctcgcgccgtcgttcgccggcgagcatgcgccgcccgagccgtcccagctgcccgagccgccgccgccggggtgacgtcatcgctgacgccatcaagttcgtcctccattccgtcgtttccggagagtccgttttcaccggagaagagtttgaagagttccaaggccagcaaggcaaggggagggggtgccggtggacggacggggtcgcagcagt

SEQ ID NO: 15141 - DNA, 4893 bp, Oryza sativa
  Clone ID: TFbOSC400724j.C1.o22.fg
atggtgggttgtgagcatatggttttgatggttgtgctcatgacaattaaggaccggttcgcgagctactgttgtgaaacatttatcgtgccaaccacaagccagcgtgggcaacggctttatcttttgtatagcgtgattcattatagtgcgccagactgtgaaacggcgagaagtccgtgggggtcgctggggagtccatgccttgtttataagggggtgattatgatccaggaaaggtgcgctgtaatgggttatgttgtgcaaggggtattgtcacgactcctttccgagatgcctccccattcaccgagaaatttgatcgaggtgttaggattcgtcagggagctgaggttgatggcttttgaagtaggctatgaagttgctcctgagtatcgccagatttcccatgaccccgacgaagagaagtgtcgtgttcgtgtgacgttggctagtgatagcgaagaccttccgtcttttaagttcgaagctgggggaagatcgtactgccatgcttgtcaagaagcagctttggtggccattggagagttgcgtcaacgctttgaagaagagttggattcatcagctttccagtatcatcctcacaaacctcatggtcaagactatggaacctatatctgtcctgatggcgaagagagtgccactctgatgcatgcggtgcatatgcttagtgctatggatgcagtaagtgtggagcgagacaaagcagctcatgatagggaaaactggaatcaaggtaagatttgcaagttgaagagcaaggtgtaccgtctacagaaggaattagctgaacttaaaggagaaacgccgccgccaacacccaagcttcgcctcaccgcaagaaagagaacctgtccgccacctcgtctccagttagcttcgaagattcgcgtgatgggcgaagctgtgcccgatcatgctgaacctgtcatcgacatcataagtgatgaggaagaagaggaagaccctgaagaaagagagccagctactccagaggaagaagatccatcgcttcgttccgacgcaaggcggaaggctgaaggagagcctattacgtggcaggagttcacggctgcttttaagaagacgcatataccgtcaggtgttgtagctctaaagaagagagaatttagagcactcaaccagggatctcgttcggttactgagtatctccatgatttcaaccgtttagctcgctatgctccagaagatgttcgcactgatgaagaacgtcaggagaagtttttggagggactgaatgatgagttgtcttatgctttgatgtctacggatttccgggatttccagcagttggtggacaaagcgattcgtcaggaagacaagtataaccgcatggagcagaagaagcgcagggctgcccaatttaaggcacaacagggcagtaaccagaggccgcgtctcgttactggacctcaagctccatcgtaccctcaaggaggatcttcatcagttgtccgtccccaacgccagttctacaacaacaatactggtaatcgtggcaatgacaaccgcaacgtggttgctcgtcctgcagcaactccagctcagaaccagcccgtcaggaaggaacagggaagcaagccagtggtgtgctttaattgtggtgatccaggacattatgctgataagtgtcctaagcctcggcgcgtgaagaacgctccagccccgaacaactccaatgttccagcaccgaaggcacgtgtaaatcatgttgcagcagcagaagctcagaatgcgccagatgttgttttgggtacgtttcctgttaactctatacccgcaactgtgctttttgattccggtgctacacattcctttttgtctaaaagttttgcaagcaatcatgggatggaagttgttagtcttgggagacctttactagttaataccccaggcaatcaagtattttcgacacagtattgtccttctgttactatagaaatagaagaagttcctttcccatcctcgcttatcttgctagaatccaaagatctagatgttatcttagggatggactggttatctcgtcacagaggagttatagattgtgccaaccgtaaggtgaccttaaccagtagcaatggggaaaccgtttctttctttgtgtcctctcctaaatctcatggtgtgatcttaaaccaagttgctctacaagagatacccatagtacaagactacccagacgtgtttcccgaggatttgccaggtatgccacctaagagagacatagagtttcggatagacttggtacctggaaccaaccctatccataagagaccatacagaatggcagctaatgagttagctgaagtgaagaaacaggtggatgatttgcttcagaaaggatatattcgacccagtacttcgccatggggagcaccagtcatctttgtggagaagaaagatcatactcagagaatgtgcgtggattatcgagcgttgattgaggttactatcaagaataagtatccgctacccagaattgatgacctgtttgatcaactggaaggtgctacagttttctccaagatagatctccgttctggatatcatcaacttcgaatccgtgaggaagatataccaaagaccgccttcacaattcggtatggtttgtttgagtgtaccgttatgtcatttggactcactaatgccccagcctttttcatgaatctgatgaacaaggtgtttatggaatatctggataagtttgtcgtggtgtttattgatgacattcttatttactccaagacgaaggaagaacatgaagaacatcttcgtctagctttagagaaactacgtgagcatcagctttatgccaagttcagtaaatgtgaattttggttgtctgaagtgaagtttcttggtcatgtcatctcgtctggaggtgtggcagtagatccaagcaatgtggagttagtgttaagttggaagcaacccaagacggtttcagaaattcgtagtttccttggacttgctgggtattaccgcaggtttattgagaacttttcaaagatcgccagaccaatgactcgtctgcttcagaaggaagtgaagcaattacgacctcatgagaataactacccaacgcatgacctagagttggcagctgtggtgcatgcattgaagatttggcgtcattatcttttcggtaatcgtacagagatatatacggatcataaaagtttgaagtacattttcactcaacctgatttgaacatgcgtcagcgaagatggttagagttgattaaagactacgatatggaaatccactatcacccgggaaaagcaaatgttgtagccgatgctcttagcaggaaaagctactgtaatatgtcagaaggtcgacgtttaccttgggagttatgccaagaatttgaaaagttgaacttgggaatagtcagcaaaggttttgtggccgcattagaagctaaacctactctgtttgatcaagtcagagaagctcaagtgaatgatcctgacatacaagaaattaaaaagaacatgcgaagaggtaaagccatcggttttgtagaagatgagcaaggtactgtgtggttaggagaaagaatttgcgtcccagaaaataaggagttgaaggatactatcatgaaagaagctcatgaaactttgtattccattcaccctggaagcactaagatgtatcaagacttaaagcaacaattctggtgggccagtatgcgacatgagatagcagaatatgtggctctatgtgatgtatgtcagcgggtcaaagcagaacatcagaagccagccggtctgttacaaccgttgaagattccagagtggaagtgggaagaaataggaatggattttataaccggtctacccagaacgtcggcaggacatgattctatttgggtagtggttgataggttgacaaaagtcgcccacttcataccggtcaaaacaacctacacggggaataagcttgcagagttatacatggccagagtggtatgtttgcatggtgttcctaagaagatagtgtcagatagaggtagccagtttacttcgaagttttggcagaaattacaattagaattgggtacccgtttgaatttcagtactgcttatcaccctcaaatagatggtcagacggaaagagtaaaccaaattttagaagatatgttgagagcctgtgttctagactttggtggaagttgggataataatttgccgtatgcggaattctcatataacaatagttatcaagctagtttgcaaatgtctccgaatgaagcattatatgatcgaaagtgccgtacgccgctcctttgggatcaaaccggtgaacgtcaagtttttgggacagacatattgcgagaggcagaagaaaaagtaaagattgtccaagaaaggttgcgcattgctcagtcgcgtcaaaagagctatgctgacaatcgttgcagagatttagcttttgaagaaggagattgtgtatatctacgggttacgccgttacgaggagttcatcgtttccaaaccaaagggaaattggcaccgcgttttgtgggaccttttaagatagtgagtcgaagaggtgaagtagcttatcagttagagttgcctccgtcaatggcgggaatacacgacgtgttccatgtgtctcaattgaagaaatgtttacgtgtacctacggaggagacagatcctgatcgtatagagcttcaggaagatttaacttatgttgagaagccagtcagaatcttggaatttccgacgttccggaggagagcgtttccgttgaggaaggttccgaagcgtttgcggaagcccaaggcaagtcacacagatcccaaacaaccctttgagcatgttgaacccgtttaa

SEQ ID NO: 15142 - DNA, 5043 bp, Oryza sativa
  Clone ID: TFbOSC400724j.C1.o24.fg
atggtgggttctcctggtttggaatggtatattcctggtttggagatagaactgtacagccgggatggttgtccagaatggttgggcttatacaacaggatgccgcgctacaagcctgagtatctttttggtgttgagggttttgtccaggagttgcgtacgatgtcctttgtcattggatttgggactgtccctttttatgcccagattcgtcatgatcgtcatgaagagaagtgccgagtcaaagtcaccttgaacagtaatagtgaagatattccctcagtgatgttcgaagctggaggaagaaactacatccatgcatgtcaggaggtggcaaggatcgccataggagagctccgtgatcgctacagtgatcagttggccgacactgagtatcgctaccatcctcgccaaccccagggaaagactgtgttagcagctcaagatcgtgaagatcggaatcgtggtaagatttgcaagttagaagacaaggtggatcgtttggagaaggaattagccgcattgaagggagaagcaccacctcagaaggccaggattcgtcttaccgcaaggaagagagctttatttgtccctcgctatcaattggcgccaaagatggtgaacactcgcagcaacaggaatggtcccaatctcaacaaccccaataacaataacaatggagagaatccaacccttgctcaagttcttgctcaacagactcagcttatgaacatgatgatgcagcaacttcagaaccagcagaaccaaggaaataaccatgcaccccctcagaataagttagcagaatttcttcgtgtaaggccgcctgttttctctagtaccactaatcctgttgaagctggtgattggttgcatgccatagagaagaagttggatttgcttcagtgcactgatcaggagaaggtctcatttgcatcacaccagttgcatggccctgcctctgaatggtgggatcacttccgcctgaataggactactgctgaacctatcacttggcttgaattcaccgctgctttccggaagacgcatataccatcgggagtggtgtctctcaagaagaaggaattcaggtcactcactcaaggatctcgctctgttacggagtatttgcacgaattcaatcgtcttgcccgttatgctccggaagatgtacgcaatgatgaagagcgtcaggagaagttcttggaaggacttaatgatgagctttcttacccactcatgactgaagattattctgatttccagaaattagtggataaggctattcatcaggaggacaagtacaatcgcatggagcagaagaaacgccggattgctcacttcaaggcacaacaggggaataatcagaagccgcgtcttactttaggaccccagtctatgccacatggaggttcttcgtctgttgttcgtccgcagcatcagttcttcaacaacaatgctggcaacaacatccgtaatcaagctccacgtcctgttgcagcttcgacacagcaacaacctgccaagagggagcaaggcagcaagcctgtggtatgtttcaactgtggagacccaggacattatgctgacaagtgtccaaagccccgacacgtgaaggttgtccctgcccagagcaactctgctgtaccagcatcaaaggcccgtgtcaatcatgttgcagctgcagaagctcaagatgctccagatgtgattttgggtacgttccttgttaactcagttcctgcaacagtgcttttcgattctggtgctacacattcattcttatctatgagttttgcgggaaatcatgggatggaagtagaagatcttagatgtcctttgatggttagtaccccaagtaatcaagcactctctttgcaacgtagcccctctgtcagaatagaaattcaaggggtaccatttctggccaatcttatattgttagaatccaaagaccttgacgtcattctagggatggactggttagccagacataaaggtgtgatagactgtgctaacagaaaagtaactctcaccagcaatgatggtcgagttgtgactgttcatgcattgtcttctgagtttttaaggtcaagactgaaccagataactttggaagagattcctatagtccgggggtatcctgatgtgttcccagatgatttacctggtatgccacctaaaagggatatagagttcagaaaagatttggtacctggaacaactccgatccataagagaccttatagaatggcagccaatgagttggcagaagttaagaggcaagtagatgatttgcttcagaaaggatacatcagaccgagttcatcaccatggggagctccggttatttttgtggaaaagaaagaccatacccagaggatgtgtgtggactatcgtgcattaaatgatgtgactatcaagaataagtacccgctacccagaattgatgatttgtttgatcagcttaaaggtgccaccgttttctccaagatagatcttcgatcagggtatcaccagttgagaatcaaagaggaagatatacctaagacagcttttaccactaggtacgggttgttcgaatgtactgttatgtcttttggacttaccaatgcccccgctttcttcatgaacttgatgaataaggtgtttatggaatatctagacaagttcgtggtggtctttattgatgacattcttatctactctaagaccaaagaagagcatgaagaacatcttcgccttgcattggagaagctacgagaacatcaattgtatgccaagttcagcaagtgtgaattctggttgtctgaagtaaagttccttggtcacgtcatctcagcaggaggagttgccgtcgatcctagtaatgtggaatccgtaaccaactggaaacaaccaaagacagtttcagagatccgcagtttcctaggcctcgcaggatattatcggaagtttatagagaatttttccaagattgctaagcccatgacacgactgtttcagaaagatgtgaagtacaagtggtcagaagaatgtgagcagagttttcaagagttgaagaatcgcttgatatcagctcctattttgattttgcctgatccaaagaagggtttccaggtgtattgcgatgcatccaaacttgggttaggttgtgttttgatgcaagatgggaaggtggttgcctatgcatctcgtcagttacgtccgcatgaaaagaactaccctactcatgatcttgagttagctgcagtagttcatgcgttgaaaatttggcgtcattatcttttcggtactcgtacagaggtgtacaccgatcacaagagtttaaagtatatctttactcagccggatctgaacatgagacaaaggagatggttggaattaattaaggattatgacatgggaattcattatcacccaggaaaggctaatgtagtagcagacgctcttagcaggaaaggctattgcaatgctacagaaggacgacagttgccactggaattatgcaaggaatttgaaagattgaatttgggaattgtcagtataggtttcgttgcagccttagaagcgaagcccactctaattgatcaagttagagaagctcaaactaatgatccggatatccaagaaattaagaagaatatgagaagaggaaaagctattggtttcttggaggatgagcacggaactgtatggttgggtgagagaatctgtgtccccgacaacaaagatttaaaagatgcaattctgaaagaagctcatgatactttatactccattcaccctggtagtactaagatgtaccaggatctcaaggaaaggttttggtgggcaagtatgaagcgtgaaattgcagaatacgtagcagtatgtgatgtttgtcagcgagtcaaggcagaacatcagaaacccgccggtttgttgcagcctttgaagattcctgaatggaaatgggaagaaatcggtatggattttatcactggtttgcccaaaacgtcattaggccatgactctatttgggtgatagtcgacagacttaccaaagtggcacatttcattccggtaaaaacaacctattccggaagtcgcttagcagaattgtatatggcaaggattgtgtgtttgcatggcgtccctaagaagatagtgtctgatcgaggcagtcagtttacttcaaatttttggaagaaacttcaggaagagatgggttctaagttgaactttagtactgcttatcatccgcagacagacggacaaactgaaagggtgaatcagattttggaagacatgttgagagcttgtgctttagatttcggtggaagttgggataagaatctaccttatgcagaattttcatacaacaacagttatcaagctagtcttcagatggctccttacgaagcactgtatggtcggaagtgccgcactccgcttttgtgggatcaaacgggagaacgtcaggttttcgggacggatatcctaagggaagcagaagaaaaggtgaaaatcattcaagaaagattgcgagtggctcagtctcgacataagagttatgccgacaatcgccgcagagatttgagttttgaagaaggagattacgtgtatcttcgtgtcacgcctcttagaggagttcatcgtttccataccaaaggaaaattggtaccgcgttttgtgggaccttataagattgtcagtagaagaggagaggttgcttatcagttagagttacctcaatctttggcagaagtccataatgtgttccatgtgtcgcaattgaagaagtgtttaagagtacctaccgaagaagctaatcttgaacaaatagaagtccaagaggatctgacctatgtggagaaaccaatccgtatcttggaaacaaatgagagaagaaccaggaatcgagttatccgtttttgcaaagtccagtggagtaatcactcggaagaagaatcaacttgggaacgagaagatgaattgaagtcagctcatccgtatctgttcgccagttcttccgaatctcggggacgagattctgtttaa

SEQ ID NO: 15143 - DNA, 4905 bp, Oryza sativa
  Clone ID: TFbOSC400726j.C1.o7.fg
atggtgggttctcctggtttggaatggaatattcctggtgtggagatagaactgtgcagccggggtggttgttcagaatggttgggcctatacaacaggatgccgcgttacaagcctgagtacctgtttggtgttgagggttttgtccaggagttgcgttcgatgtcctttgtcattggatttgggactgcccctttttatgcccagattcctcatgatcgtcatgaagagaagtgccgagtcaaagtcaccttgaacagtaatagtgaagatatccccttagtgatgtttgaagctggaggaagaaactacatccatgcatgtcaggaggtggcaaggatcgccataggagagctccgtgatcgctacagtgatcaattggccgacactgagtatcgctaccatcctcgtcaaccccagggaagtgaccgtggcagctatcttgagactgaaggaattgagaatgatgctaccacgaagcatttggttgagatgttgtgggctatggatgaaagtcgtgcggagactgtgttagccgctcaagatcgtgaagaccggaatcgtggtaagatttgtaagttagaagacaaggtggatcgtttggagaaggaattagccgcattgaagggagaagcaccgccgcagaaggccaggattcgtcttaccgcaaggaagagagctctatttgtccctcgctatcaactggcgccaaagatggtgaacactcgcagcaacgggaatggtcccaacaaccccaataacaacaatggagagaatcccattctggcccaagttcttgctcaacagacacagcttatgaacatgatgatgcagcaatttcagaatcaggaaaaccaaggaaataaccatgcacctccccagaacaagttagcagaatttcttcgtgtgaggccacctgttttctctagtaccactaatcctgttgaagctagtgattggctgcatgccatagagaagaagttggatttacttcagtgcactgatcaggagaaggtctcatttgcatcacatcagttgcatggccctgcctctgaatggtgggatcacttccgccttaacaggactactgctgaacctatcatttggcttgaattcaccgctgctttccggaagacgcatataccatcaggagtagtgtctctcaagaagaaggagttcaggtcgcttacccagggatctcgctctgttacggagtatctgcacgagttcaatcgtcttgctcgttatgctccggaagatgtgcgcaatgatgaagagcgccaggagaagtttttgggaggacttaatgatgagctttcttacccactcatggttggagattatcctgatttccagaaattagtggataaggctattcgtcaggaggacaagtacaatcgcatggagcagaagaaacgtcggattgctcaattcaagacacaacagggaaataatcagaagccgcatcttactttaggaccccagcccatgccacagggaggttcttcgtctgttgttcgtccgcagcgtcagttcttcaacaacaatgctggcaacaacatccgtaatcaaggtccacgtcctgttgcagctccagcacagcaacaacctgtcaagagggagcaaggcagcaagcccgtggtgtgtttcaactgtggagatccaggacattatgctgacaagtgtccgaagccccgacgcgtgaaggttgtccctgcccagaataactctgctgtaccagcatccaaggctcgtgtaaatcatgtcgctgctgcagaagctcaagatgctccagatgtgattttgggtacgttccttgttaactcagttcctgcaacagtacttttcgattctggtgctacacattcattcttatctatgagttttgtgggaaatcatgggatggaagtagaagatcttagacgtcctttgatggttagtaccccaagtaatcaagcactctctttgcaacgtagcccctctgtcagaatagaaattcaaggagtaccatttctggccaatcttatcttgttagaatccaaagaccttgatgtcatcctagggatggactggttagccagacataaaggtgtgatagactgtgccaacaaaaaagtaactctcaccagctatgatggtcgagttgtaactgttcatgcattgtcatctgagtctttaaggtcaagactgaaccagataactttggaagagatttctatagtccgggagtatcctgatgtgttcccagatgatttacctggtatgccgcctaaaagggatatagagttcagaatagatttggtacctggaacaactccgatccataagagaccttatcgaatggcagccaatgagttggcagaagttaagaggcaagtagatgatttgctacagaaaggatacatcagaccgagttcatcaccatggggagctccagttatttttgtggaaaagaaagaccatactcagagaatgtgtgtggactatcgtgcactaaacgatgtgactatcaagaataagtatccactacccaggattgatgatttgtttgatcagcttaaaggtgccactgttttctccaagatagatcttcgatcagggtatcatcagttgagaatcaaagaggaagatatacctaagacagcttttaccactaggtatgggttgttcgaatgtactgttatgtcttttggatttaccaatgcccctgctttcttcatgaacttgatgaataaggtgtttatggaatacctagacaagttcgtggtggtctttattgatgatattcttatctactctcgaaccaaagaagagcatgaggaacatcttcgtcttgcattggagaagctacgagaacatcaactgtatgctaagtttagcaagtgtgaattttggttgtctgaagtgaaattccttggtcacgtcatctcagccggaggagttaccgtcgatcctagtaacgtggaatccgtaaccaattggaagcaaccaaagacagtttcagagattcgcagtttcctaggcctcgcaggatattatcggaggtttatagagaatttttccaagattgctaagcccatgacacgactgcttcagaaagatgtgaagtacaagtggtcggaagaatgtgagcagagttttcaagagttgaaaagtcgcttaatatcagctcctattttgattttgcctgatccaaagaagggttttcaagtgtattgcgatgcatccaaacttgggttaggttgtgttctgatgcaagatgggaatgtggttgcctatgcctctcgacagttacgtccgcatgagaagaactaccctactcatgatattgagttagctgcagtcgttcatgcattgaagatttggcgtcattatcttttcggtactcgtacagaagtgtacaccgatcacaagagtttaaagtatatctttactcagccggatctgaacatgagacaacggagatggttggaattaattaaggattatgacatgggaattcatgatcatccgggaaaggctaatgttgtagcagacgctcttagcagaaaaggctattgcaatgctacagaaggacgacagttgccattggaattatgcaaggaatttgaaagattaaatttgggaattgtcggtagaggtttcattgcagccttagaagcgaagcccactctaattgatcaagttagagaagcccaaattaatgatcctgatattcaagagatcaagaagaatatgagaagaggaaaagctattggtttcttggaggatgagcaaggaactgtatggttgggtgagagaatctgtgtccccgacaacaaagatctaaaagatgcagttttgaaagaagctcatgatactttatactccattcaccctggtagtactaagatgtaccaggatctcaaggaaagattttggtgggcaagtatgaagcgtgaaatcgcggaatatgtagcagtatgtgatgtttgtcagcgagtcaaggcagaacatcagaaacccgccggtttgttgcagcctttgaagattcctgaatggaaatgggaagaaataggtatggattttattactggtttacccagaacgtcatcaggccatgactctatttgggtgatagtcgacagacttaccaaagtggctcattttattccggtaaagacaacctattccggaagtcgcttggcggaattgtatatggcaaggattgtgtgtttgcatggcgtccctaagaagatagtgtctgatcgaggcagtcagtttacttcaaatttttggaagaaacttcaggaagagatgggttctaagctgaactttagtactgcttatcatccacagacagacggacaaaccgaaagggtgaatcagattttggaagacatgttgagagcttgtgctttagatttcggtggaagttgggataagaatctaccttatgcagaattttcatacaacaacagttatcaagctagtctacagatggcttcttacgaagcactgtatggtcggaagtgtcgcactccgcttttgtgggatcaaacgggagaacgtcaggttttcgggactgatattctaagagaagcagaagaaaaggtaaaaattattcaagaaagattgcgagtggctcaatctcgtcataagagttatgccgacaatcgccgtagagatttgagttttgaagaaggagactatgtgtatcttcgtgtcacgcctcttcgaggagttcatcgttttcacaccaaaggaaaattggcaccgcgttttgtgggaccttataagattgtcagtagaagaggagaggttgcttatcagttagaattacctcaatctttggcaggagtccataatgtgttccatgtgtcacaattgaaaaaaatgtttaagtgtacctaccgaagaagctaa

SEQ ID NO: 15144 - DNA, 5205 bp, Oryza sativa
  Clone ID: TFbOSC400760j.C1.o1.fg
atgggccttcgccaccgcctccttgcccctataaaaggatccccaagtccgccgctacccgtcgccacccttgccttcgtctctcgccgtcggaagcgccctagcgccccgtgcttcgccgtcgttccagtcgtcgccgtcgctcggggagaccgccatcgtggtcgtcatcgcgtcgccgtcctcgtccgccccttcgccgtcgctgtagaccgccggagcatcgccgtcgtcgtcaagccgaaggaccccgccgccttttcctcgacgccgccgccgtctgttcatcttccgccgtcgttttggtcatcgattccgacgtttccggagagtccgttttcgcaggagaagaatttgaagagttccaaggccactcctggtttggaatggtatattcctggtttggagatagaactgtacagccgggatggttgttcagaatggttgggcctatacaacaggatgccgtgctacaagcctgagtacttgtttggtgttgagggatttgtccaggagttgcgtacgatgtcctttgccataggatttgggactacccctttttatgcccagattcctcatgatcgtcacgaagagaagtgccgagtcaaagtcaccttgaacagtaatagtgaagatatcccctcagtgatgttcgaagctggaggaagaaactacatccatgcatgtcaggagggaagtgaccgtggcagctaccttgagactgaaggaattgagaatgatgctaccacaaagcatttggttgagatgctgtgggctatggatgaaacccgtgcagagactgtgttagcagctcaagatcgtgaagaccggaatcatgagaaggaactagccgcattgaagggagaagcaccaccgcagaaggccaggattcgtcttaccgcaaggaagagagctctatttgtccctcgctaccaattggcgccaaaggtccgtgtggtggagaaagaagttaccccagccctagcgaatcctccggtcgtcaacatggtgctcactcgcagcaacgggaatggccccaacaacaacaataacaacaacaatggagagaatcccacacttgcccaagtcctggctcaacaggtacagcttatgaacataatgatgcagcaacttcagaaccagcagaaccagggaaataatcatgcacctcctcagaacaagttagcagaatttcttcatgtgaggccgcctactttctctagtaccactaatcctgttgaagctggcgattggctgcatgccatagaaaagaagttggatttgcttcagtgcaccgatcaggagaaggtctcatttgcatcacatcagttgcatggccttgcctctgaatggtgggatcacttccgcctgaacaggactactactgaacctatcacttggcttgaattcaccgctgctttccggaagacgcatataccatcgggagtggtgtctctcaagaagaaggaattcaggtcgctcactcaggggtctcgctctgttactgagtatctgcacgaattcaatcgtctggctcgttatgctccggaagatgtgcgcactgatgaagagcgacatgagaggttcttggaaggacttaatgatgagctttcttacccactcatgactggggattatcatgatttccagaagttagtggataaggctattcgccaggagggcaagtacaaccgcatggagcagaagaaacgccggattgctcaattcaaggcacaacaagggaatagtcagaggccgcgtcttactttaggaccccagtccatgcgacagggaggttcttcgtctgttgttcgtccgcagcgtcagttcttcaacaacaatgcgggcaacaacatccgcaatcaagctccacgccctgttgcagcttcgacacagcaacagcctgccaagaaggagcaaggcagcaagcccgtggtgtgcttcaactgtggagacccaggacattacgctgacaagtgtccgaagccccgacgcgtgaaggttgtccctgcccagagcaactctactgtaccagcatcaaaggcccgtgtcaatcatgttgctgctgcagaagcccaaggtgctccggatgtgattttgggtacgttccttgttaacttagttcctgcaacagtgcttttcgattctggtgctacacattcattcttatctatgagttttgcgggaaatcatgggatggaagtagaagatcttagacgtcctttgatggttagtaccccaagtaatcaagcactctctttgcaacgtagcccctctgtcagaatagaaattcaaggagtaccatttctggccaatcttatcctgttagaatccaaagaccttgatgtcatcttagggatggactggttagccagatataaaggtgtgatagactgtgccaacagaaaagtaactatcaccagtaatgatggtcgagttgtaactgttcatgcattgtcttctgagcctttaaggtcaagactgaaccaaataactttggaagagattcctatagtccgggagtatcccgatgtgttcccagacgatttacctggtatgccgcctaaaagggatatagagttcagaatagatttggtaccaggaacgactccgatccataagagaccttatagaatggcagccaatgagttggcagaagtcaagaggcaagtagacgatttgcttcagaaaggatacatcagaccgagttcatctccatggggagctccggttatttttgtggaaaagaaagatcatacccagaggatgtgtgtagactatcgtgcactaaatgatgtgactatcaagaataagtatccgctgcccagaattgatgatttgtttgatcagcttaaaggtgccatcgttttctccaagatagatcttcgatcagggtatcaccagttgaggatcaaagaggaagatatacctaagacagcttttaccactaggtatggattgttcgaatgtactgttatgtcttttggacttaccaatgcccccgctttcttcataaacttgatgaataaggtgtttatggaatacctagacaagttcgtggtggtctttattgatgacattcttatctactcccgaaccaaagaagagcatgaagaacatcttcgccttgcactagagaagctacgagaacatcaactgtatgctaagtttagcaagtgtgaattttggttgtctgaagtgaagttccttggtcacgtcatctcagcaggaggagttgccgtcgatcctagtaatgtggaatccataaccaattggaaacaaccaaagacagtttcagagattcgcagtttcctaggccttgcaggatattatcggaggtttatagagaatttttccaagattgctaagcccatgacacgattgcttcaaaaggatgtgaagtacaagtggtcagaagaatgtaagcagagttttcaagagttgaagaatcgcttaatatcagctcctattttgattttacctgatccaaagaagggtttccaagtgtattgtgatgcatcccaacttgggttaggttgtgttctgatgcaagatgggaaggtggttgcatatgcatctcgtcagttacgtccgcatgagaagaactaccctactcatgatcttgagttagctgcagtaattcatgcgttgaagatttggcgccattatcttttcggtacttgtatagaggtgtataccgatcacaagagtttaaagtatatttttactcagccggatctgaacatgagacaacggagatggttggaattaattaaggattatgacatgggaattcagtatcacccgggaaaggctaatgttgtagcagatgctcttagcaggaaaggctattgcaatgctacggaaggacgacagttgccattggaattatgcaaggaatttgaaagattaaatttgggaattgtcagaagaggtttcgttgcagccttagaagcaaagcccactctaattgatcaagttagagaagcccaaattaatgatcctgatattcaagaaatcaagaagaatatgagaagagggaaagctatcggtttcttggaggatgagcaaggaactgtatggttgggtgagagaatctgcgtccccgacaacaaagatttaaaagatgcaattctgaaagaagctcatgatactttatactccattcaccctggtagtaccaaaatgtaccaggatctcgaggaaagattttggtgggcaagtatgaagcgtgaaatcgcagaatacgtagcagtatgtgatgtttgtcagcgagtcaaggcagaacatcagaaacccgccggtttgctgcagcctttgaagattcctgaatggaaatgggaggaaatcggtatggatttcatcactggtctacccagaacgtcatcaggccatgactctatttgggtgacagacggacaaaccgaaagggtgaatcagattttggaagatatgttgagagcttgtgctttagacttcggtggaagttgggataggaatctaccttatgcagaattttcgtacaacaacagttatcaagctagtcttcagatggctccttacgaagcactgtatggtcggaagtgccgcactccgcttttgtgggatcaaacaggagaacgtcaggttttcgggacggacatcctaagggaagcagaagagaaggtgaaaatcattcaagaaaggttgcgtgtggcccagtctcgtcataagagttatgccgacaatcgtcgtagagatctaagttttgacgaaggagattatgtgtatcttcgtgtcacgcctcttcgaggagttcatcgttttcacaccaaaggaaaattggtaccgcattttgtgggaccttataagattgtcaatagaagaggagaggttgcttatcagttggagttacctcaatctttggcaggagttcataatgtgttccatgtgtcgcaattgaaaaagtgtttaagggtacctaccgaagaagctaatcttgaacagatagaagtccaagaggatctgacctatgttcagaaaccaatccgtatcttggaaatagaagagagaagaaccagaaatcgagttatccgtttttacaaagtccaatggagtaatcactcggaagaagaatcaacttgggaacgagaagatgaattgaagtcagctcatccgcatctgttcgccagttcttccgaatctcgaggacgagattctgtttaa

SEQ ID NO: 15145 - DNA, 2031 bp, Oryza sativa
  Clone ID: TFbOSC400772j.C1.o46.gm
atggtgaacactcgcgccagtggaagtggaaacaacaacaatggagagaatcccacacttgcccaagttcttgctcaacagactcagttaatgaacatgatgatgcagcaactccagaaccagcagaaccagggaaataaccatgcacctccccagaataagttagcagaatttcttcgtgtgaggccgcctattttctctagtaccactaatcctgttgaagctggtgattggttgcatgccatagagaagaagttggatttgcttcagtgcactgatcaggagaaggtctcatttgcatcacatcagttgcatggccctgcctctgaatggtgggatcacttccgcctgaataggactactgctgaacctatcacttggcttgaattcaccgctgctttccggaagacgcatataccatcgggagtggtgtctctcaagaagaaggaattcaggtcgctcactcaggggtctcgctctgtcactgagtatctgcacgagttcaatcgtctggctcgttatgctccggaagatgtgcgcaatgatgaagagcgccaggagaagttcttggaaggacttaatgatgagctttcttacccactcatgactggggattatcctgatttccagaagttggtgattaaggctattcgtcaggaagacaagtacaacagcatggagcaaaagaaacgccggattgctcaattcaaaacacaacagggaaataatcagaagccgcgtcttactttaggaccgcagtctatgccacagggaggttcttcgtctgttgttcgtccgcagcgtcagttcttcaacaacaatgctggcaacaacatccgcaatcaagctccacgtcctgttgcagcttcgacacagcaacaacctgccaagagggagcaaggcagcaagcccgtggtgtgtttcaactgtggagacccaggacattacgcggacaagtgcccgaagcctcgacgcgtgaaggttgtccctgcccagagcaactctaccgtaccagcatcaaaggctcgtgtcaatcatgtcgctgctgcagaagctcaagatgctccagatgatccccggtgtcgccgctacccgtcgccactctcgccttcgcttctcgtcgccgggagcgctctagcgccgtgccgcttcgcgccgccgtcgtcgccgccacttcagccgtgcgccgccgtcgctccagtcatcgtcgtcgctcgggaaggtcgccatcgtggtcgccgtcacgtcgccgtcctcgtccgctccttcgccgttgctgtagaccgccggagcaccgtcgccgccgtcgacccgatcttctccgccgcttcgatctcgccgccggtgccgtccgttgatcttccgccgcttctttggtcaccggtgagttcgccgcgtcacgctctacgtcctggtgccctccgttctcgtcgtcgcgccgtcgttcgccggcgagcttgcgccgcccgagccgccgccggtggtgacgtcaccgctgacgtcatcgtggccgtttgccgtgagccgcatggttcattgcggagcaccagactgagaagtggcggagataagcccacaggggtcgctccagtcatcgtcgtcgctcaggaaggtcgccatcatggtcgccgtcatgtcgccgtcctcgtccgctcctccgccgttgctgtagaccgccggagcaccgtcgccgccgtcgacccgatcttctccgccgcttcgatctcgccgccggtgccgtccgttgatcttccgccgcttctttggtcaccggtgagttcgccgcgtcacgctctacgtcctggtgccctccgttctcgtcgtcgcgccgtcgttcgccggcgagcttgcgccgcccgagccgccgccggtggtgacgtcaccgctgacgtcatcgtggccgtttgccagaacgacgacgatgacgtcagcgacgacgtcagcaccggcggcgactcgggcggctcggacggcgcaagctcgccggcgaacgacggcgcgaggacgcgaacagaggacaccaacggatag

SEQ ID NO: 15146 - DNA, 2400 bp, Oryza sativa
  Clone ID: TFbOSC400806j.C1.o3.gm
atggtgaacactcgcagcaacgggaatggtcccaacaaccccaataacaataacaatggagagaatcccactcttgctcaagttcttgctcaacagacacagctaatgaacatgatgatgcagcaacttcagaaccagcagaaccaaggaaataaccatgtacctcctcagaataagttagcagaatttcttcatgtaaggccgcctgttttctctagtaccactaatcctgttgaagctggtgattggttgcatgccatagagaagaagttggatttgcttcagtgcactgatcaggagaaggtctcatttgcatcgcatcagttgcatggccctgcctctgaatggtgggatcatttccgccttaataggactactgctgaacctatcacttggcttgagttcaccgctgctttccggaagacgcatataccatcgggagtggtgtctctcaagaagaaggagttcaggtcgcttacgcagggatctcgctctgttacggagtatctgcacgagttcaatcgtcttgctcgttatgctccggaagatgtgcgcaatgatgaagagcgtcaagagaagttcttggaaggacttaatgatgagctttcttacccactcatgactggagattattctgatttccagaagttagtggataaggctattcgtcaggaggacaagtataatcgcatggaacagaagaaatgccggattgctcacttcaaggcacaacaggggaataatcagaagccgcgtcttactttaggatcccagtctatgccacagggaggttcttcgtctgttgttcgtccgcagcgtcagttcttcaacaacaatgctggcaacaacatccgcaatcaagctccacgtcctgttgcagctccagcacagcaacaacctgtcaagagggagcaaggcagcaagcccgtggtgtgtttcaactgtggagacccaggacattacgctgacaagtgtccgaagccccgacgcgtgaaggttgtccctgcccagagcaactctaccgcaccagcatcaaaggcccgtgtcaatcatgttgctgctgcagaagctcaagatgctccagatgtgattttggtccgggagtattccgatgtgttcccagatgatttacctgccaatgagttggcagaagttaagaggcaagtagacgatttgcttcagaaaggatacatcagaccgagttcatcaccatggggagctccggttatttttgtggaaaagaaagatcatacccagaggatgtgtgtggactatcgtgcattaaatgatgtgactatcaagaataagtatccactacccagaattgatgatttgtttgatcagcttaaaggtgccactgttttctccaagatagatcttcgatcaggatatcaccagttgagaatcaaagaggaagatatacctaagacagcttttaccactaggtatggattgttcgaatgtactgttatgtcttttggacttaccaatgcccctgctttcttcatgaacttgatgaataaggtgtttatggaatacctagacaagtttgtggtggtctttattgatgatattcttatctactctcgaaccaaagaagagcatgaagaacatcttcgccttgcattggagaagctacgagaacatcaactgtatgctaagtttagcaagtgtgaattttggttgtctgaagtgaagttccttggtcacgtcatctctgcaggaggagttgccgtcgatcctagtaatgtggaatccgtaaccaattggaaacaaccgaagacagtttcagagatccgcagttttctaggccttgcaggatattatcggagatttatagagaatttttccaagattgctaagcccatgacacgactgcttcagaaagatgtgaagtacaagtggtcagaagaatacgtcgccgtcgctcgggaaggacgtcatcgtggtcgccgtcgcgtcgccgtcctcgttcgccccttcgccgtcgccggagatcaccggagcagcgtcgccgtcgacaacccgaaggtttccgccgcttccttctcgtcgccgtcgtcgtctgttgttcgtccgccgccgttttggtcaccggtgtgttcgccgcgtcgtcctctacgtgctggtgccctccgtttgcgtcctagtgccgccgttcgccggcgagcgtgcgccgcccgagccgtccgctccgccgagccgccgccgctgtcggtgacgtcaccgctgacgtcatcggggtcgtccgcccgtggttcattgcggggcaccagactgagaagtggcggagataagcccacgggggtcgctgggagtccatgccttgtttataagggggtgattatgatccaggaagaggaagagttcttcaatgaggctgatggtgtggaggagtag

SEQ ID NO: 15147 - DNA, 4476 bp, Oryza sativa
  Clone ID: TFbOSC400809j.C1.o1.fg
atgcaagcccgagccgcccgagccgccgccgccggtgatgacgtcaccgctgacgtcatcgtcgccctctcccctcctggtttggaatggtacattcctggtttggagatagaactgtgcagccgggatggttgttcagaatggttgggcctatacaacaggatgccgcgctacaagcctgagtacttgtttggtgttgagggttttgtccaggagttgcgtacgatattcctcatgatcgtcatgaagagaagtgccgagtcaaaagtcaccttgaacagtaatagtgaagatatcccctcagtgatgttcgaagctggaggaagaaactgcatccatgcatgtcaggaggtggcaaggattgccataggagagctccgcgatcgctacagtgatcagttggccgacactgagtatcgctatcatcctcgtcaaccccagggaagtgaccgtggcaactatcttgagactgaaggaattgagaatgatgctaccacaaggcatttggttgagatgctgtgggctatggatgaaagtcgtgcggagactgtgttagcggctcaagatcatgaagatcggaatcgtggtaagatttgcaagttagaggacaaggtggatcgtttggaaaaggagttagctgcgttgaagggagaagcaccgctgcagaaggccaggattcgtctcaccgcaaggaagagagctctatttgtccctcgctatcaattggcgccaaaggtccgtgtggtggagaaagaagttgccccaaccctagcagatcctccggtcatcatcataagtgaggatgaagaagaagaatccaagcgcaaccattccaagtttcccccggtttctcttcttgtgccctgtccatgccagatggtgaacactcgcagcaacgggaatggcccaagtaaccataacaatgaaggaaacccaacccttgctcaagttcttgctcaacagactcagcttatgaacatgatgatgcaacaacttcagaatcagcagaaccagggaaataaccatgcacctccccagaacaagttagcagaatttcttcatgtgaggccgcctattttctctagtaccactaatcctgttgaagctggtgattggctgcatgccatagagaagaagttggatttgcttcagtgcactgatcaggagaaggtctcatttgcatcacatcagttgcatggccctgcctctgaatggtgggatcacttccgtttgaataggactaccgctgaacctatcacttggcttgagttcaccgctgcttttcggaagacgcatatatcatcgggagtggtgtctctcaagaagaaggaattcaggtcgctcacccagggatctcgctctgttacggagtacctgcacgagttcaatcgtctggctcgttatgctccggaagatgtgcgcaatgttgaagagcgccaagagaagttcttggaaggacttaatgaggagctttcttacccactcatgactggagattattctgatttccagaagttggtggataaggctattcgtcaggaagacaagtacaatcgcatggagcagaagaaacgtcggattgctcaattcaagacacaacaggggaataatcagaagccgcgtcttactttaggaccccagtccatgccacatggaggttcttcgtctgttgttcgtccgcagcgtcagttcttcaacaacaatgctggcaacaacatccgtaatcaagctccacgtccagttgcagctccagcacagcaacaacctgccaagagggagcaaggcagcaagcccgtggtgtgtttcaactgtggagatccaggacattacgctgacaagtgtccgaagccccgacgcgtgaaggttgtccctgctcagagcaactctgccgtaccagcgtcaaaggcccgtgtcaatcatgttgctgctgcagaagctcaagatgctccagatgtgattttgggtacgttccttgttaacttagttcctgcaacagtgcttttcgattcaggtgctacacattcattcttatctatgagttttgcgggaaatcatgggatggaagtagaagatcttagacgtcctttgatggttagtactccaagtaatcaagcactctctttgcaacgtagcccctctgtcagaatagaaattcaaggggtaccatttctggccaatcttatcctgttagaatccaaagaccttgatgtcatcctagggatggactggttagccagacataaaggtgtgatagactgtgccaacagaaaagtaactctcaccagcaatgatggtcgagttgtaactgttcatgcattgtcttctgcgtctttaaggtcaagactgaaccaaataactttggaagagattcctatagtccgggagtatcccgatgtgttcccagatgatttacctggtatgccgcctaaaagggatatagaattcagaatagatttggcaccaggaacaactccgatccataagagaccttatcgaatggcagccaatgagttggcagaagttaagaggcaagtagatgatttgcttcagaaaggatacatcagaccgagttcatcaccatggggagctccggttatttttgtggaaaagaaagaccatacccagaggatgtgtgtggactatcgtgcactaaatgatgtgactatcaaaaataagtatccgctacccagaattgatgatttgtttgatcagcttaaaggtgctactgttttctccaagatagatcttcgatcaggatatcaccagttgaggatcaaagaggaagatatacctaagacagtttttaccactaggtatgggttgttcgaatgtactgttatgtcttttggacttaccaatgcccctgctttcttcatgaacttgatgaataaggtgtttatggaatacctagacaagttcgtggtggtctttattgatgatattcttatctactcccgaaccaaagaggagcatgaagaacatcttcgccttgcattagagaagctacgagaacatcaactgtatgctaagtttagcaagtgtgaattttggttgtctgaagtgaagttccttggtcacgtcatctcagccggaggagttgccgttgatcctagtaatgtggaatccgtaaccaactggaagcaaccgaagacagttttagagatccgcagtttcttaggcctcgcaggttattatcggaggtttatagagaatttttccaagattgctaagcccatgacacgactgcttcagaaagatgtgaagtacaagtggtcggaagaatgtgagcagagttttcaagagttgaagaatcgcttgatatcagctcctattttgattttacctgaaccaaagaagggtttccaagtgtattgcgatgcatccaaacttgggttaggttgtgtactgatgcaagatgggaagatggttgcctatgcatctcgtcagttacgtccgcatgagaagaactaccctactcatgatcttgaattagctgcagtagttcatgcgttgaaaatttggcgtcattatcttttcggtactcgtacagaggtgtacaccgatcacaagagtttaaagtatatctttactcagccggatctaaacatgagacaacggagatggttggaattaattaaggattatgacatgggaattcattatcacccaggaaaggctaatgttgtagcagacgctcttagcagaaaaggctattgcaatgctacggaaggacgacagttgccattggaattatgcaaggaatttgaaagattaaatttgggaattgtcagtagaggttttgttgcagccttagaagcgaagcccactctaattgatcaagttagagaagcccaaattaatgatcctgatattcaagaaatcaagaagaatatgagaagaggaaaagctattggtttcttggaggatgagcacggaactgtatggttgggtgagagaatctgtgtccccgacaacaaagatttaaaagatgcaattctgaaagaagctcatgacaccttatattccattcaccctggtagtaccaagatgtaccaggatctcaaggaaagattttggtgggcaagtatgaagcgtgaaatcgcagaatacgtagcagtatgtgatgtttgtcagcgagtcaagacagacggacaaaccgaaagggtgaataagattttggaagacatgttgagagcttgtgctttagatttcggtggaagttgggataagaatctaccttatgcagaattttcgtacaacaacagttgtcaagctagtcttcaaatggctccttacgaagcactgtatggtcgaaagtgccgtactccgcttttgtgggatcaaacaggagaacatcaggttttcgggacggatatcctaagggaagcagaagaaaaggtgaaaatcattcaagaaagattgcgtgtggcccagtcgcgtcataagagttatgccgacaatcgcctagagatttga

SEQ ID NO: 15148 - DNA, 5091 bp, Oryza sativa
  Clone ID: TFbOSC400903j.C1.o48.fg
atgccgcgttacaagcctgagtacctgtttggtgttgagggttttgtccaggagttgcgtacgatgtcctttgtcattggatttgggactgcccctttttatgcccagattcgtcatgatcgtcatgaagagaagtgccgagtcaaagtcaccttgaacagcaatagtgaagaggtcccctcagtgatgtttgaagctggaggaagaaactacatccatgcatgtcaggaagtggcaaggatcgccacaggagaactccgtgatagctacagtgatcagttggccgacactgagtatcgctatcatcctcgccaacctcagggaagtgaccgtggcagttaccttgagactgaaggaattgagaatgatgttaccacaagacatttggttgagatgttgtgggctatggatgaaagtcgtgcggagactgtgttagcagctcaagatcgtgaagatcggaatcgtggtaagatttgcaagttagaagacaaggtggatcgcttggagaaggaattagccgcattgaagggagaagcaccgccgcagaaggccaggattcgtctcaccgcaaggaagagagctttgtttgtccctcgttatcaattggcgccaaagatccgcgtggtggagaaagaagttgccccagcaaatcctcccgtcatcatcataagtagtgatgaagaagaagaacccaagcgcaacaattccaagtttgagtggatggtgaacactcgtagcaatgggaatggtcccaacaaccccaatagcaacaacaatggagagaatcccactctggcccaagttcttgctcaacagacacagcttatgaacatgatgatgcagcaatttcagaatcagcaaaaccaagggaataatcatgcacctccacagaacaagttagcagaatttcttcgtgtgaggccgcctgttttctctagtaccactaatcctgttgaagctagtgattggctgcatgccatagagaagaagttggatttacttcagtgtactgatcaggagaaggtctcatttgcatcacatcagttgcatggccctgcctctgaatggtgggatcacttccgccttaacaggactactgctgaacctatcacttggcttgaattcaccgctgctttccggaagacgcatataccatcgggagtagtgtctctcaagaagaaggagttcaggtcgctttcccagggatctcgctctgttacggagtatctgcacgagttcaatcgtcttgctcgttatgctccggaagatgtgcgcaatgatgaagagcgccaggagaagtttttgggaggacttaatgatgagctttcttacctactcatggttggagattatcctgatttccagaaattagtggataaggccattcgtcaggaggacaagtacaatcgcatggagcagaagaaacgtcggattgctcaattcaagacacaacagggaaataatcagaagccgcgtcttactttaggaccccagcccatgccacagggaggttcttcgtctgttgttcgtccgcaacgtcagttcttcaacaacaatgctggcaacaacatccgtaatcaagctccacgtcctgttgcagttccagcacagcaacagcctgccaagagggagcaaggcaacaagcccgtggtgtgtttcaactgtggagatccaggacattatgctgacaagtgtccgaagccccgacgcgtgaaggttgttcctgctcagaataactctgctgtaccagcatcaaaggcccgtgtcaatcatgttgctgctgcagaagctcaagatgctccagatgtgattttgggtacgttccttgttaactcagttcctgcaacagtacttttcgattctggtgctacacattcattcttatctatgagttttgcgggaaatcatgggatggaagtagaagatcttagacgtcctttgatggttagtaccccaagtaatcaagcactctctttgcaacgtagcccctctgtcagaatagaaattcaaggagtaccatttctggccaatcttatcttgttagaatccaaagaccttgatgtcatcctagggatggactggttagccagacataaaggtgtgatagactgtgccaacagaaaagtaactctcaacagctatgatggtcgagttgtaactgttcatgcattgtcatctgagtctttaaggtcaagactgaaccagataactttggaagagattcctatagtccgggagtatcctgatgtgttcccagatgatttacctggtatgccgcctaaaagggatatagagttcagaatagatttggtacctggaacaactccgatccataagagaccttatcgaatggcagccaatgagttggcagaagttaagaggcaagtagatgaattgctacagaaaggatacatcagaccgagttcatcaccatggggagctccggttatttttgtggaaaagaaagaccatactcagagaatgtgtgtggactatcgtgcactaaacgatgtgactattaagaataagtatccattacccaggattgatgatttgtttgatcagcttaaaggagccactgttttctccaagatagatcttcgatcagggtatcatcagttgagaatcaaagaggaagatatacctaagacagcttttaccactaggtatgggttgttcgaatgtactgttatgtcttttggacttaccaatgcccctgctttcttcatgaacttgatgaataaggtgtttatggaatacttagacaagttcgtggtggtctttatagatgatattcctatctactctcgaatcaaagaagagcatgaggaacatcttcgccttgcattggagaagctacgagaacatcaactgtatgctaagtttagcaagtgtgaattttggttgtctgaagtgaaattccttggtcacgtcatctcagccggaggagttgccgtcgatcctagtaacgtggaatccgtaaccaattggaagcaaccaaagacagtttcagagattcgcagtttcctaggccttgcaggatattatcggaggtttatagagaatttttccaagattgctaagcccatgacacgactgcttcagaaagatgtgaagtacaagtggtcggaagaatgtgaacagagttttcaagagttgaaaagtcgcttaatatcagctcctattttgattttgcctgatccaaagaagggttttcaagtgtattgtgatgcatccaaacttgggttaggttgtgttctgatgcaagatgggaaggtggttgcctatgcctctcgacagttacgtccgcatgagaagaactaccctactcatgatattgagttagctgcagtcgttcatgcgttgaagatttggcgtcattatcttttcggtactcgtacagaagtgtacaccgatcacaagagtttaaagtatatctttactcagccggatctgaacatgagacaacggagatggttggaattaattaaggattatgacatgggaattcattatcatccgggaaaggctaatgttgtagcagacgctcttagcagaaaaggctattgcaatgctacagaaggacgacagttgccattggaattatgcaaggaatttgaaagattaaatttgggaattgtcggtagaggtttcgttgcagccttagaagcgaagcccactctaattgatcaagttagagaagcccaaattaatgatcctgatattcaagagatcaagaagaatatgagaagaggaaaagctattggtttcttggaggatgagcacggaactgtatggttgggtgagagaatctgtgtccccgacaacaaagatttaaaggatgcaattctgaaagaagctcatgatactttatactccattcaccctggtagtactaagatgtaccaggatcttaaggaaagattttggtggcaacgagtcaaggcagaacatcagaaacccgccggtttgttgcaacctttgaagattcctgaatggaaatgggaagaaattggtatggattttattactggtttacccagaacatcatcaggccatgactctatttgggtgatagtcgacagacttaccaaagtggctcattttattccggtaaagacaacttattccggaagtcgcttagcagaattgtatatggcaaggattgtgtgtttgcatggcgtccctaagaaaatagtgtctgatcgaggcagtcagtttacttcaaacttttggaagaaacttcaggaagagatgggttctaagctgaactttagtactgcttatcatccgcagacagacggacaaaccgaaagggtgaatcaaattttggaagacatgttgagagcttgtgctctagatttcggtggaagttgggataagaatctaccttatgcagaattttcgtacaacaacagttatcaagctagtcttcagatggctccttacgaagcactgtatggtcggaagtgccgcactccgcttttgtgggatcaaacgggagaacgtcaggttttcgggacggatatcctaagggaagcggaagaaaaggtaaagatcattcaagaaagattgcgtgtggctcagtctcgtcataagagttatgccgacaatcgccgcagagatttgagttttgaagagggagattatgtgtatcttcgtgtcacgcctttacgaggagttcatcgttttcataccaagggaaaattggcaccgcgttttgtgggaccttataagattgtcagtagaagaggagaggtcgcttatcagttggagttacctcaatctttggcaggagtacataatgtgttccatgtgtcgcaattgaaaaagtgtttaagggtacctaccgaagaagctaatattgagcagatagaagtccaagaggatttgacctatgtggagaaaccgatccgtatcttggaaacaagtgagagaagaaccaggaatcgagttatccgattttgcaaagtccagtggagtaatcactcggaagaagaatcaacttgggaacgagaagatgaattgaagtcagctcatccgcacctgtttgccagttcttccgaatctcgaggacgagattctgtttaa

SEQ ID NO: 15149 - DNA, 2460 bp, Oryza sativa
  Clone ID: TFbOSC400935j.C1.o41.gm
atggtgaacactcgcagcaacgggaatggtcctaacctcaacaaccccaataacaacaacaatggagagaatccaacccttgctcaagttcttgctcaacagactcagttaatgcacatgatgatgcagcaatttcagaatcagcaaaaccaagggaataatcatgcacctccacagaacaagttagcagaatttcttcgtgtgaggccgcctgttttctctagtaccactaatcctgttgaagctagtgattggctgcatgccatagagaagaagttggatttacttcagtgtactgatcaggagaaggtctcatttgcatcacatcagttgcatggccctgcctctgaatggtgggatcacttccgccttaacaggactactgctgaacctatcacttggcttgaattcaccgctgcttttcggaagacgcatataccatcgggagtagtgtctctcaagaagaaggagttcaggtcgcttactcagggatctcgctctgttacggagtatctgcacgagttcaatcgtcttgctcgttatgctccggaagatgtgcgcaatgatgaagaacgccaggagaagtttttgggaggacttaatgatgagctttcttacccacttatggttggagattatcctgatttccagaaattagtggataaggctattcgtcaggaggacaagtacaatcgcatggagcagaagaaacgtcggattgctcaattcaagacacaacagggaaataatcagaagccgcgccttactttaggaccccagtccatgccacagggatgttcttcgtctgttgttcgtccgcaacgtcagttcttcaacaacaatgctggcaacaatatccgtaatcaagctccacgtcctgttgcagttccagcacagcaacaacctgccaagagggagcaaggcaacaagcccgtggtgtgtttcaactgtggagatccaggacattatgctgacaagtgtccgaagccccgacgcgtgaaggttgtccctgcccagaataactctgctgtaccagcatccaaggctcgtgtaaatcatgtcgcggctgcagaagctcaagatgctccagatgtgattttggtccgggagtatcctgatgtgttcccagatgatttacctgccaatgagttggcagaagttaagaggcaagtagatgatttgctacagaaaggatacatcagaccgagttcatcaccatggggagctccggttatttttgtggaaaagaaagaccatacccagagaatgtgtgtggattatcgtgcactaaacgatgtgacaatcaagaataagtatccgctgcccagaattgatgatttgtttgatcagcttaaaggagccactgttttctccaagatagatcttcgatcagggtatcatcagttgagaatcaaagaggaagatatacctaagacagcttttaccactaggtatgggttgttcgaatgtactgttatgtcttttggacttaccaatgcccctgctttcttcatgaacttgatgaataaggtgtttatggaatacttagacaagttcgtggtggtctttattgatgatattcttatctactctcgaaccaaagaagagcatgaggaacatcttcgccttgcattggagaagctacgagaacatcaactgtatgctaagtttagcaagtgtgaattttggttgtccgaagtgaaactccttggtcacgtcatctcagccggaggagttgccgtcgatcctagtaacgtggaatccgtaaccaattggaagcaaccaaagacagtttcagagattcgcagtttcctaggccttgcaggatattatcggaggtttatagagaatttttccaagattgctaagcccatgacacgactgcttcagaaagatgtgaagtacaagtggtcggaagaatccttagaagcgaagcccactctaattgatcaggttagagaagcccaaattaatgatcctgatattcaagagatcaagaagaatatgagaagaggaaaagctattggtttcttggaggatgagcacggaactgtatggttgggtgagagaatctgtgtccccgacaacaaagatttaaaggatgcaattctgaaagaagctcatgatactttatactccattcaccctggtagtactaagatgtaccaggatcttaaggaaagattttggtggccgtcgccgtcgctcgggaaggtcgccgtcgtcgtcgccaagtcgtcgccgtcctcgtccgctctttcgctgccgtcggagaccgccggagcatcgtcgccgtcgtcaagccgaagaccgccgccgtttcaacctcgtcgccgtcgccgtccgttggtcgtccgccgtcgctttggtcgtcggccgtccgccgtgaaccgccgtggacccgatcaatctcggccgtccgatttggatcggatcaatctcggccgtccgttcgcgtga

SEQ ID NO: 15150 - DNA, 3804 bp, Oryza sativa
  Clone ID: TFbOSC400948j.C1.o1.fg
atgccgtgttacaagcctgagtacctgtttggcgttgagggttttgtccaggagttgcgtacgatgtcctttgtcattggatttgggaatgctcctttttatgcccagattcgtcatgatcgtcatgaagaaaagtgccgagtcaaagtcaccttgaacagcaatagtgaagatatcccctcagtaatgtttgaagctggaggaagaaactacatccatgcatgtcaggaggtggcaaggatcgccataggagagctccgtgatcgctacagtgatcagttggtcgacactgagtatcgctatcatcctcgccaaccccagggaagtgaccgtggcagttaccttgagactgaaggaattgagaatgatgttaccacaagacatttggttgagatgttgtgggctatggatgaaagtcgtgcggagactgtgttagcagctcaagatcgtgaagatcggaatcgtggtaagatttgcaagctagaagacaaggtggatcgtttggagaaggaattagccgcattgaagggagaagcaccgccgcagaaggccaggattcgtcttaccgcaaggaagagagctttatttgtccctcgctatcaactggcgccaaaggttcgtgtggtggagaaagaagttgccccagctcaagcggatcctccggtcatcatcataagtagtgatgaagaagaagaatccaagcgcatcaattccaagattgagtgggtagcaactcaagatgatgaagatgagccttcaatcgacctcctatgctcggaagaactagagaagttggagagtttagtggtgtgggagtcttcagtttgtaataatgaaactcagttaagatcaataaaagttaaaatggtgaacactcgtagcaatgggaatggtcccaacaaccccaataataacatcaatggagagaatcccactctggcccaagttcttgctcagcagacacagcttatgaacatgatgatgcaacaatttcagaatcagcaaaaccaagggaataatcatgcacctccacagaacaagttagcagaatttcttcgtgtgaggccgcctgttttctctagtaccactaatcctgttgaagctagtgattggctacatgccatagagaagaagttggatttacttcagtgtactgatcaggagaaggtctcatttgcatcacatcagttgcatggccctgcctctgaatggtgggatcacttccgtcttaacaggactactgctgaacctatcacttggcttgaattcaccgctgctttccggaagacgcatataccatcgggggtagtgtctctcaagaagaaggagttcaggtcgcttacccagggatctcgctctgttacggagtatctgcacgagttcaatcgtcttgctcgttatgctccggaagatgtgcgcaatgatgaagagcgccaggagaagtttttgggaggacttaatgatgagctttcttacccacttatggttggagattaccctgatttccagaaattagtggataaggctattcgtcaggaagacaagtacaatcgcatggagcagaagaaacgtcggattgctcaattcaagacacaacagggaaataatcagaagccgcgtcttactttaggaccccagtccatgccacagggaggttcttcgtctgttgttcgtccgcaacgtcagttcttcaacaacaatgctggcaacaacatccgtaatcaagctccacgtcctgttgcagctccagcacagcaacaacctgccaagagggagcaaggcagcaagcccgtggtgtgtttcaactgtggagatccaggacattatgctgacaagtgtccgaagccccaacgcgtgaaggttgtccctgcccagagtaactctgctgtaccagcatcaaaggcccgtgtcaatcatattgctgctgcagaagctcaaggtgctccagatgtgattttgggtacgttccttgttaactcagttcctgcaacagtacttttcgattctggtgctacacattcattcttatctatgagttttgcgggaaatcatgggatggaagtagaagatcttagacgtcctttgatggttagtaccccaagtaatcaagcactctctttgcaacgtagcccctctgtcagaatagaaattcaaggagtaccatttctggccaatcttatcttgttagaatccaaagaccttgatgtcatcctagggatggactggttagccagacataaaggtgtgatagactgtgccaacagaaaagtaactctcaacagctatgatggtcgagttgtaaccgttcatgcattgtcttctgagtctttaaggtcaagactgaatcaaataactttggaagagattcctatagtccgggagtatcctgatgtgttcccagatgatttaccgggtatgccgcctaaaagggatatagagttcagaatagatttggtacctggaacaactccgatccataagagaccttatcgaatggcagccaatgagttggcagaagttaagaggcaagtagatgatttgctacagaaaggatacatcagaccgagttcatcaccatggggagctccggtaatttttgtggaaaagaaagaccatactcagagaatgtgtgtggactatcgtgcactaaacgatgtgactatcaagaataagtatccactacccaggattgatgatttgtttgatcagcttaaagacaagttcgtggtggtctttattgatgatattcttatctactctcgaaccaaagaagagcatgaggaacatcttcgccttgcattggagaagctacgagaacatcaactgtatgctaagtttagcaagtgtgaattttggttgtccgaagtgaaattccttggtcacgtcatctcagccggaggagttgccgttgatcctagtaacgtggaatccgtaaccaattggaagcaaccaaagacagtttcagagattcgcagtttcctaggccttgcaggatattatcggaggtttatagagaatttttctaagattgctaagcccatgacacgactgcttcagaaagatgtgaagtacaaatggtcggaagaatgtgagcggagttttcaagagttgaaaagtcgcttaatatcagctcctattttgattttgcctgatccaaagaagggtttccaagtatattgcgatgcatccaaacttgggttaggttgtgttctgatgcaagatgggaaggtggttgcctatgcatctcgtcagttacgtccgcatgagaagaactaccctactcatgatattgagttagctgcagtcgttcatgcattaaagatttggcgtcattatcttttcggtactcgtacagaagtgtacaccgatcacaagagtttaaagtatatctttactcagccggatctgaatatgagacaacggagatggttggaattaattaaggattatgacatgggaattcattatcatccgggaaaggctaatgttgtagcagacgctcttagcagaaaaggttattgcaatgctacagaaggacgacagttgccattggaattatgcaaggaatttgaaagattaaatttgggaattgtcggtagaggtttcgttgcagctttagaagcgaagcccactctaattgatcaagttagagaagcccaaattaatgatcctgatattcaagagatcaagaagaatatgagaagaggaaaagctattggtttcttggaagatgagcacggaactgtatggttgggtgaaagaatctgtgtctgtcacgtcctgataaattcatcccaaaattaa

SEQ ID NO: 15151 - DNA, 5941 bp, Oryza sativa
  Clone ID: TFbOSC400968j.C1.o4.np
atgcttaaactgataataatttgattagctcctggtttggaatggtacattcctggtttggagatagaactgtgcagccgatgccgcgttacaagcctgagtacctgtttggtgttgagggttttgtccaggagttgcgcacgatgtcctttgtcattggatttgggactgcccctttttatgcccagattcctcatgatcgtcatgaagagaagtgccgagtcagagtcaccttgaacagcaatagtgaagaggtcccctcagtgatgtttgaagctggaggaagaaactacatccatgcatgtcaggaggtggcaaggatcgccataggagagctccgtgatcgctacagtgatcaattggccgacactgagtatcgctaccatcctcgccaacctcagggaagtgaccgtggcagttaccttgagactgaaggaattgagaatgatgttaccacgaaacatttggttgagatgttgtgggctatggatgaaagtcgtgcggagactgtgttagcagctcaagatcgtgaagatcggaatcgtggtaagatttgcaagttagaagacaaggtggatcgtttggagaaggaattagccgcattgaagggagaagcaccgccgcagaaggccaggattcgtcttaccgcaaggaagagagctctatttgtccctcgctatcaactggcgccaaaggttcgtgtggtggagaaagaagttgctccagctcaagcggatcctccggtcatcatcataagtagtgatgaagaagaagaatctaagcgcaacaattccaagattgagtgggtagcaactcaagatgatgaagacgagccttcaatcgacctccgatgcttggaagaactagacaatgggaatggtcccaacaaccccaataacaacaacaatggagagaatcccactctggcccaagttcttgctcaacagacacagcttatgaacatgatgatgcagcaatttcagaatcagcaaaaccaagggaataatcatgcacctccccaaaacaagttagcagaatttcttcgtgtgaggccgcctgttttctctagtaccactaatcctgttgaagctagtgattggctgcatgccatagagaagaagttggatttacttcagtgtactgatcaggagaaggtctcatttgcatcacatcagttgcatggccctgcctctgaatggtgggatcacttccgccttaacaggactactgctgaacctatcacttggcttgaattcaccgctgctttccggaagacgcatataccatcgggagtagtgtctctcaagaagaaggagttcaggtcgctttcccagggatctcgctctgttacggagtatctgcacgagttcaatcgtcttgctcgttatgctccggaagatgtgcgcaatgatgaagagcgccaggagaagtttttgggaggacttaatgatgagctttcttacccactcatggttggagattatcctgatttccagaaattagtggataaggctattcgtcaggaggacaagtacaatcgcatggagcagaagaaacgtcggattgctcaattcaagacacaacagggaaataatcagaagccgcgtcttactttaggaccccagcccatgccacagggaggttcttcgtctgttgttcgtccgcaacgtcagttcttcaacaacaatgctggcaacaacatccgtaatcaagctccacgtcctgttgcagctccagcacagcaacaacctgccaagagggagcaaggcaacaagcccgtggtgtgtttcaactgtggagatccaggacattatgctgacaagtgtccgaagccccgacgtgtgaaggttgtccctgcccagaataactctgctgtaccagcatccaaggctcgtgtaaatcatgtcgctgctgcagaagctcaagatgctccagatgtgattttgggtacgttccttgttaactcagttcctgcaacagtacttttcgattctggtgctacacattcattcttatctacgagttttgcgggaaatcatgggatggaagtagaagatcttagacgtcctttgatggttagtaccccaagtaatcaagcactctctttgcaacgtagcccctctgtcagaatagaaattcaaggagtaccatttctggccaatcttatcttgttaaaatccaaagaccttgatgtcatcctagggatggactggttagccagacataaaggtgtgatagactgtgccaacagaaaagtaactctcaacagctatgatggtcgagttgtaactgttcatgcattgtcatctgagtctttaaggtcaagactgaaccagataactttggaagagattcctatagtccgggagtatcctgatgtgttcccagatgatttacctggtatgccgcctaaaagggatatagagttcagaatagatttggtacctggaacaactccgatccataagagaccttatcgaatggcagccaatgagttggcagaagttaagaggcaagtagatgatttgctacagaaaggatacatcagaccgagttcatcaccatggggagctccggttatttttgtggaaaagaaagaccatactcagagaatgtgtgtggactatcgtgcactaaacgatgtgactattaagaataagtatccactacccaggattgatgatttgtttgatcaacttaaaggtgccactgttttctccaagatagatcttcgatcagggtatcatcagttgagaatcaaagagtatgggttgtttgaatgtactgttatgtcttttggacttaccaatgcccctgctttcttcatgaacttgatgaataaggtgtttatggaatacctagacaagttcgtggtggtctttattgatgatattcttatctactctcgaaccaaagaagagcatgaagaacatcttcgccttgcattggagaagctacgagaacatcaactgtatgctaagtttagcaagtgtgaattttggttgtctgaagtgaaattccttggtcacgtcatctcagccggaggagttgccgtcgatcctagtaacgtggaatccgtaaccaattggaagcaaccaaagacagtttcagagattcgcagtttcctaggccttgcaggatattatcggaggtttatagagaatttttccaagattgctaagcccatgacacgactgcttcagaaagatgtgaagtacaagtggtcggaagaatgtgaacagagttttcaagaattgaaaagtcgcttaatatcagctcctattttgattttgcctgatccaaagaagggttttcaagtgcattgtgatgcatccaaacttgggttaggttgtgttctgatgcaagatgggaaggtggttgcctatgcctctcgacagttacgtccgcatgagaagaactaccctactcatgatattgagttagctgcagtcgttcatgcattgaagatttggcatcattatcttttcggtactcgtacagaagaatttgaaagattaaatttgggaattgtcgatagaggtttcgttgcagccttagaagcgaaccccactctaattgatcaagttagagaagcccaaattaatgatcctgatattcaagagatcaagaagaatatgagaagaggaaaagctattggtttcttggaggatgagcacggaactgtatggttgggtgagagaatctgtgtccccgacaacaaagatttaaaggatgcaattctgaaagaagctcatgatactttatactccattcaccctggtagtactaagatgtaccaggatcttaaggaaagattttggtgggcaagtatgaagcgtgaaatcgcagaatacgtagcagtatgtgatgtttgtcagcgagtcaaggcagaacatcaaaaacccgccggtttgttgcaacctttgaagattcctgaatggaaatgggaagaaattggtatggattttattactggtttacccagaacgtcatcaggccatgactctatttgggtgatagtcgacagacttaccaaagtggctcatttcattccggtaaagacaacttattccggaagtcgcttagcggaattgtatatggcaaggattgtgtgtttgcatggcgtccctaagaagatagtgtctgatcgaggcagtcagtttacttcaaatttttggaagaaacttcaggaagagatgggttctaagctgaactttagtactgcttatcatccgcagacagacggacaaaccgaaagggtgaatcaaattttggaagacatgttgagagcttgtgctctagatttcggtggaagttgggataagaatctaccctatgcagaattttcgtacaacaacagttatcaagctagtcttcagatggctccttacgaagcactgtatggtcggaagtgtcgcactccgcttttgtgggatcaaacgggagaacgtcaggttttcggaacggatatcctaagggaagcagaagaaaaggtaaagatcattcaagaaagattgcgtgtggctcagtctcgtcataagagttatgccgacaatcgccgcagagatttgagttttgaagagggagattatgtgtatcttcgtgtcacgcctctacgaggagttcatcgttttcataccaagggaaaattggcaccgcgttttgtgggaccttataagattgtcagtagaagaggagaggttgcttatcagttggagttacctcaatctttggcaggagtacataatgtgttccatgtgtcgcaattgaaaaagtgtttaagggtacctaccgaagaagctaatattgagcagatagaagtccaagaggatttgacttatgttgagaaaccaatccgtatcctggaaacaagtgagagaagaaccaggaatcgagttatccgtttttgcaaagtccagtggagtaatcactcggaagaagaatcaacttgggaacgagaagatgaattgaactttggaatcgagttcgattcggatcggttttccctctctccaagccgcgagtttccttcgccgttgccgtcgccgtgggccttcgccgccgcctccgagcccctttaaaaggacccccggtgtctcctctacccgtcgccaccttcgccttcgcctctcgtcgtcggaaaagccctagcgccccgtgcgccgccgtcgtttcagccgtcgccgtcgctcgggaagaccgccgtcgtgctcgccaagtcgtcgccgtcctcgtccgccccttcgccgtcgccggagatcaccggagcagcttcgccgccgtcgacccgaagagcttcgccgcttcctcctcgtcgccgtcgccgtccgttggtcttccgccgccgtttaggtcaccgtgccgccgttcgccggcgagcgtgcgccgttcgagccgtcttctccgccgagccgccgccgctgtcggtgacgtcaccgctgacgtcatcggggtcgtccgccattccgtcgtttccggagagtccgttttcgcggaagaagagtttgaagagttccaaggccagcaaggcaagtcaccagaatatgtggctctatgtgatgtatgtcagcgggtcaaggcagaacatcagaaaccagccggtctgttacaaccgttgaagattccagagtggaagtgggaagaaataggaatggattttataaccggtctacccagaacgtcggcaggacatgattctatttgggtagtggttgatagattgactaaagtcgctcactttataccggttaaaacaacctatacgggacataagcttgcagagttatacatggccagagtgacagatggtcagacggaaagagtaaaccaaattttagaagatatgttgagagcctgtgttctagattttggtggaagttgggataagaatttgccgtacgcggaattctcatataacaacagttatcaagctagtttgcaa

SEQ ID NO: 15152 - DNA, 6468 bp, Oryza sativa
  Clone ID: TFbOSC400983j.C1.o2.fg
atggcggaagagagagaaagttttgagagatttttccgaggaactctgaacttctatggaattagcctgcatcatctgaatccaaactccatagtgcatatcgccaattttattcatgcctgcgaagcttttctgggcattagacctcattttgctttgttccgccgcatcttcttcctcaagccccagccgaacaagagcaaaccatgcgttgttgggggcgctggtttccaactcagaggaacactaagccaaaagtatttctccatgcccttcaagacctcaaacaaaggctggcacgcaaactggttttacgttcagaatcctgaaccagcactccccgagtactcctgtctccctccggtctgccaggacacatggaattcattgcctatgggagatgaagctgctcaggcagtggaactgatggagcgcatgctaaaactgaaggaacaaggtttgcagggaaagcagatcactcggcacttcatcaaaagtcggctagctccaatcaaagagagatcccgcacggcttttgaatttgatggcaaacatgatccaaatcgtgaagatccagactctcttgactttaaggtcatgaaggaaagaatgtacaagatcttctcaaatgctatcgttgtcagctattcacatctgctgccagttgtaccatacaatgctttcaacccccctccaccggagtttaccttgatgaagtctgatcctccgattacccaacaccgcactccttgtgggaagactagccaaactagtggagggccaaaaatccgttctgactctcatcccaccaccactcagtcggccaaccaatcagatttccgtaagaggaaattggtcctgagtgacgacgatgatgctgaaaaggctggcagcaaaggggtgactggaaaacatccaaggcaggctaacccaaagaagaaaacatccagtcgtcccatgccaaaaatcaggaagtcttctaggaagccatctgacatagatccttctagaaaagactccgaaccgactggcatggagacaggtttttcaaaagagaccgagccgactgcaggggatcgcctgagtgacgaacagccggcaaccgacaatgtaggtcccagcaatgagcccccgactggaaaccagtcggccgaagctagggtcgacgctaatcaggagcccccgactggaaaccagtcgggtacagagcgaaacaaggacatcctcgaagtagaagctcaagttgacaatcctcctaaaaaagatgccaatgtcgatctagggtctagctctcctgctaaagtacaagggcctgctcgtccccgaccggaaataatcacagctcctggtttggaatggtatattcctggtttggagatagaactgtgcagccggggtggttgttcagaatggttgggcctatacaacaggatgccgcgttacaagcctgagtacctgtttggtgttgagggttttgtccaggagttgcgtacgatgtcctttgtcattggatttgggactgcccctttttatgcccagattcctcatgatcgtcatgaagagaagtgccgagtcaaagtcaccttgaacagtaatagtgaagatatcccctcagtgatgtttgaagctggaggaagaaactacatccatgcatgtcaggaagtggcaaggatcgccataggagagctccgtgatcgctacagtgatcaattggccgacactgagtatcgctaccatcctcgccaaccccagggaagtgaccgtggcagttaccttgagactgaaggaattgagaatgatgctaccacgaagcatttggttgagatgttgtgggctatggatgaaagtcatgcggagactgtgttagccgctcaagatcgtgaagaccggaatcgtggtaagatttgcaagttagaagacaaggtggatcgtttggagaaggaattagccgcattgaagggagaagcaccgccgcagaaggccaggattcgtcttaccgcaaggaagagagctctatttgtccctcgctatcaactggcgccaaagatggtgaacactcgcagcaatgggaatggtcccaacaaccccaataacaacaacaatggagagaatcccactcttgctcaagttcttgctcaacagacacagcttatgaacatgatgatgcagcaatttcagaatcagcaaaaccaaggaaataaccatgcacctccacagaacaagttagcagaatttcttcgtgtgaggccgcctgttttctctagtaccactaatcctgttgaagctagtgattggctgcatgccatagagaagaagttggatttacttcagtgtactgatcaggagaaggtctcatttgcatcacatcagttgcatggccctgcctctgaatggtgggatcacttccgccttaacaggactactgctgaacctatcacttggcttgaattcaccgctgctttccggaagacgcatataccatcaggagtagtgtctctcaagaagaaggagttcaggtcgcttacccagggatctcgctctgttacggagtatctgcacgagttcaatcgtcttgctcgttatgctccggaagaagtgcgcaatgatgaagagcgccaggagaagtttttgggaggacttaatgatgagctttcttacccactcatggttggagattatcctgatttccagaaattagtggataaggctattcgtcaggaggacaagtacaatcgcatggagcagaagaaacgtcggattgctcaattcaagacacaacagggaaataatcagaagccgcgtcttactttaggaccccagcccatgccacagggaggttcttcgtctgttgttcgtccgcagcgtcagttcttcaacaacaatgctggcaacaacatccgtaatcaagctccacgtcctgttgcagctccagcacagcaacaacctgccaagagggagcaaggcagcaagcccgtggtgtgtttcaactgtggagatccaggacattatgctgacaagtgtccgaagccccgacgcgtgaaggttgtccctgcccagaataactctgctataccagcatccaaggctcgtgtaaatcatgtcactgctgcagaagctcaagatgctccagatgtgattttgggtacgttccttgttaactcagttcctgcaacagtacttttcgattctggtgctacacattcattcttatctatgagttttgcgggaaatcatgggatggaagtagaagatcttagacgtcctttgatggttagtaccccaagtaatcaagcactctctttgcaacgtagcccctctgtcagaatagaaattcaaggagtaccatttctggccaatcttatcttgttagaatccaaagaccttgatgtcatcctagggatggactggttagccagacataaaggtgtgatagactgtgccaacaaaaaagtaactctcaccagctatgatggtcgagttgtaactgttcatgcattgtcatctgagtctttaaggtcaagactgaaccagataactttggaagagattcctatagtccgggagtatcctgatgtgttcccagatgatttacctggtatgccgcctaaaagggatatagagttcagaatagatttggtacctggaacaactccgattcataagagaccttatcgaatggcagccaatgagttggcagaagttaagaggcaagtagatgatttgctacagaaaggatacatcagaccgagttcatcaccatggggagctccggttatttttgtggaaaagaaagaccatactcagagaatgtgtgtggactatcgtgcactaaacgatgtgactatcaagaataagtatccactacccaggattgatgatttgtttgatcagcttaaaggtgccactgttttctccaagatagatcttcgatcagggtatcatcagttgagaatcaaagaggaagatatacctaagacagcttttaccactaggtatgggttgttcgaatgtactgttatgtcttttggacttaccaatgcccctgctttcttcatgaacttgatgaataaggtgtttatggaatacctagacaagttcgtggtggtctttattgatgatattcttatctaccttcgaaccaaagaagagcatgaggaacatcttcgtcttgcattagagaagctacgagaacatcaactgtatgctaagtttagcaagtgtgaattttggttgtctgaagtgaaattccttggtcacgtcatctcagccggaggagttgccgtcgatcctagtaacgtggaatccgtaaccaattggaagcaaccaaagacagtttcagagattcgcagtttcctaggcctcgcaggatattatcggaggtttatagagaatttttccaagattgctaagcccatgacacgactgcttcagaaagatgtgaagtacaagtggtcggaagaatgtgagcagagttttcaagagttgaaaagtcgcttaatatcagctcctattttgattttgcctgatccaaagaagggttttcaagtgtattgcgatgcatccaaacttgggttaggttgtgttctgatgcaagatgggaaggtggttgcctatgcctctcgacagttacgtccgcatgagaagaactaccctactcatgatattgagttagctgcagtcgttcatgcattgaagatttggcgtcattatcttttcggtactcgtacagaagtgtacaccgatcacaagagtttaaagtatatctttactcagccggatctgaacatgagacaacggagatggttggaattaattaaggattatgacatgggaattcattatcatccgggaaaggctaatgttttagcagacgctcttagcagaaaaggctattgcaatgctacagaaggacgacagttgccattggaattatgcaaggaatttgaaagattaaatttgggaattgtcggtagaggtttcgttgcagccttagaagcgaagcccactctaattgatcaagttagagaagcccaaattaatgatcctgatattcaagagatcaagaagaatatgagaagaggaaaagctattggtttcttggaggatgagcaaggaactgtatggttgggtgagagaatctgtgtccccgacaacaaagatctaaaagatgcagttatgaaagaagctcatgatactttatactccattcaccctggtagtactaagatgtaccaggatctcaaggaaagattttggtgggcaagtatgaagcgtgaaatcgcggaatatgtagcagtatgtgatgtttgtcagcgagtcaaggcagaacatcagaaacccgccggtttgttgcagcctttgaagattcctgaatggaaatgggaagaaatatgtatggattttattactggtttacccagaacgtcatcaggccatgactctatttgggtgatagtcgacagacttaccaaagtggctcattttattccggtaaagacaacctattccggaagtcgcttggcggaattgtatatggcaaggattgtgtgtttgcatggcgtccctaagaagatagtgtctgatcgaggcagtcagtttacttcaaatttttggaagaaacttcaggaagagatgggttctaagctgaactttagtactgcttatcatccacagacagacggacaaaccgaaagggtgaatcagattttggaagacatgttgagagcttgtgctttagatttcggtggaagttgggataagaatctaccttatgcagaattttcatacaacaccagttatcaagctagtttacagatggctccttacgaagcactgtatggtcggaagtgccgcactccgcttttgtgggatcaaacgggagaacgtcaggttttcgggacggatatcctaaggaaagcagaagaaaaggtaaaggtcattcaagaaagattgcgagtggctcagtctcgacataagagttatgccgacaatcgccgtagagatttgagttttgaagaaggagactatgtgtatcttcgtgtcacgcctcttcgaggagttcatcgttttcacaccaaaggaaaattggcaccgcgttttgtgggaccttataagattgtcagtagaagaggagaggttgcttatcagttagaattacctcaatctttggcaggagtccataatgtgttccatgtgtcacaattgaaaaaatgtttaagggtacctaccgaagaagctaatattgagaagatagaagtccaagaggatttgacttatgttgagaaaccaatccgtatcctggaaacaaatgagagaagaaccaggaatcgagttatccgtttctgcaaagttcaatggagtaatcactcggaagaagaatcaacttgggaacgagaagatgaattgaagtcagctcattcgcacctgttcgccagttcttccgaatctcaaggacgagattctgtttaa

SEQ ID NO: 15153 - DNA, 4626 bp, Oryza sativa
  Clone ID: TFbOSC400991j.C1.o11.fg
atggttgttcagaatggttgggcctatgcaacaggatgccgcgctacaagcctgagtacttgtttggtgttgagggatttgtccaggagttgcattcctcatgatcgtcatgaagagaagtgccgagtcaaagtcactttgaacagtaatagtgaagatatcccctcagtgatgttcgaagctggaggaagaaactacatccatgcatgtcaggaggtagcaaggatcgccataggcgagctccgcgatcgctacagtgatcagttggccgacactgagtatcgctaccattctcgtcaaccccagggaagtgaccgtggcagctaccttgagactgagggaattgagaatgatgctaccacaaggcatttggttgagatgctgtgggctatggatgaaacccgtgcagagactgtgttagcagctcaagatcgtgaagatcggaatcgaggtaagatttgcaagctagaggacaaagtggatcgattggagaaggaactagccgcgttgaagggagaagcaccaccgcagaaggccaggatttgtcttaccgcaaggaagagagctctatttgtccctcgctatcaattggcaccaaaggtccgtgtggtggaaaaagaagttaccccagccctagcggatcctccggtcgtcaacatggtggtcactcgcagcaacgggaatggccccaacaacaacaataacaacaacaacaatggagagaatcccacacttgcccaagtcctggctcaacaggcacagcttatgaacatgatgatgcagcaactccagaaccagcagaaccagggaaataaccatgcacctccccagaacaagttagcagaatttcttcgtgtgaggccgcctactttctctagtaccactaatcctgttgaagctggcgattggctgcatgccatagagaagaagttggatttgcttcagtgcactgatcaggagaaggtctcatttgcatcacaccagttgcatggccctgcctctgaatggtgggatcacttccgcctgaataggactactgctgaacctatcacttggcttgagttcaccgctgctttccggaagatgcatataccatcgggagtggtgtctctcaagaagaaggaatttaggtcgctcacccagggatcccgctctgttacggagtatctacacgagttcaatcgtctggctcgttatgctccggaagatgtgcgcactgatgaagagcaccaggagaagttcttggaaggacttaatgatgagctttcttacccactcatgactggggattatcatgatttccagaagttagtggataaggctattcgtcaggaggacaagtacaatcgcatggagcagaagaaacgccggattgctcaattcaagacacaacaggggaataatcagaggccgcatcttactttaggaccccagtccatgccacagggaggttattcgtctgttgttcgtccgcagcgtcagttcttcaacaacaatgctggcaacaacatccgcaatcaagttccacgtcctgttgcagcctcgacacagcaacaacctgccaagagggagcaaggcagcaagcccgtggtgtgtttcaactgtggagacccaggacattacgctgacaagtgtccgaagccccgatgcgtgaaggttgtccctgcccagagcaactctaccgtatcagcatcaaaggcccgtgtcaatcatgttgctgctgcagaagctcaaggtgctccagatgtgattttgggtacgtttcttgttaactcagttcctgcaacagtgcttttcgattctggtgctacacattcattcttatctatgagttttgcgggaaatcatgggatggaagtagaagatcttagatgtcctttgatggttagtaccccaagtaatcaagcactctctttgcaacgtagcccctctgtcagaatagaaattcaaggagtaccatttctggccaatcttatcttgttagagtccaaagaccttgatgttatcctagggatggactggttagccaggcataagggtgtgatagactgtgctaacagaaaagtaactctcaccagcaatgatggtcgagttgtaactgttcatgcattgtcttctgagtctttaaggtcaatactgaaccaaataactttggaagagattcctatagtccgggagtatcccgatgtgttctcagatgatttacctggtatgccgcctaaaagggatatagagttcagaatagatttggtaccaggaacaactccgatccataagagaccttatcgaatggcagccaacgagttggcagaagtcaagaggcaagtggacgatttgcttcagaaaggaattgatgatttgtttgatcagcttaaaggtgccactgttttctccaagatagatcttcgatcagggtatcatcagttgagaatcaaagaggaagatatacctaagacagcttttaccactaggtatgggttgttcgaatgtactgttatgtcttttggacttaccaatgcccctgctttcttcatgaacttgatgaataaggtgtttatggaatacctagacaagttcgtggtagtctttattgatgatattcttatctactcccgaaccaaagaagagcatgaagaacaccttcgccttgcattggagaagctacgagagcatcaactgtatgctaagtttagcaagtgtgaattttggttgtctgaagtgaagttccttggtcacgtcatctcagcaggaggagttgccgtcgatcctagtaatgtagaatccgtaaccaactggaaacaaccaaagaccgtttcagagattcgcagtttcctaggcctcgcaggatattatcggaggtttatagagaatttttccaagattgctaagcccatgacacggctgcttcagaaagatgtgaagtacaagtggtcagaagaatgtgagcagagttttcaagagttgaagaatcgcttaatatcagctcctattttgatcttacctgatccaaagaagggattccaagtgtattgcgatgcatccaaacttgggttaggttgtgttctgatgcaagatgggaaggtggttgcctatgcatctcgtcagttacgtccgcatgagaagaactaccctactcatgatcttgaattagctgcagtagttcgtgcgttgaagatttggcgtcattatcttttcggtactcgtacagaggtgtataccgatcacaagagtttaaagtatatctttactcagccggatctgaacatgagacaaaggagatggttggaattaattaaggattatgacatgggaattcattaccacccaggaaaggttaatgttgtagcagacgctcttaggaggaaaggctattgcaatgctacggaaggacgacagttgccattggaattatgcaaggaatttgaaagattaaatttgggaattgtcagtagaggtttcgttgcagccttagaagcgaagcccactctaattgatcaaattagagaagcccaaattaatgatcctgatattcaagaaatcaaaaagaatatgagaagaggaagagctatcggtttcttggaggatgagcaaggaacagtatggttgggcgagagaatctgtgttcctgacaacaaagatttaaaagatgcaattctgaaagaagctcatgatactttatattccattcaccctggtagtaccaaaatgtaccaggatctcaaggaaagattttggtgggcaagtatgaagcgtgaaatcgcagagtacgtagcagtatgtgatgtttgtcagcgagtcaaggcagaacatcagaaacctgccggtttgttgcagcctttgaagattcctgaatggaaatgggaggaaatcggtatggatttcatcactggtctacccagaacgtcatcaggccatgactctatttgggtgatagtcgacagacttaccaaagtggctcatttcatcccagtaaagacaacctattccggaagtcggttggcggaattgtatatggcaaggattgtgtgtttgcatggcgtccctaagaaaatagtgtctaatcgaggcagtcagtttacctcaaatttttggaagaagcttcaggaagagatgggttctaagctgaactttagtactgcttatcatccgcagacagacggacaaaccgaaagggtgaatcagattttggaagacatgttgagagcttgtgctttagacttcggtggaagttgggataagaatctaccttatgcggaattctcgtacaacaacagttatcaagctagtcttcagatggctccgtacgaagcactgtatggtcgaaagtgccgcactccacttttgtgggatcaaacgggagaacgtcaggttttcgggacggatatcctgagggaagcagaagaaaaggtgaaaatcattcaagaaagattgcgtgtggcccagtctcgtcataagagttatgccgacaatcgccgcagagatttgagtttcgacgaaagagattatgtgtatcttcgtgtcacgcctcttcgaggagttcatcgttttcacaccaaaggaaaattggcaccgcgttttgtgggaccttataagattgtcagtagaagaggagaggttgcttattag

SEQ ID NO: 15154 - DNA, 2361 bp, Oryza sativa
  Clone ID: TFbOSC401051j.C1.o104.gm
atgccgtgttacaagcctgagtacctgtttggagttgagggttttgtcgaggagttgcgtacgatgtcctttgtcattggatttgggaatgctcctttttatgcccagattcgtcatgatcgtcatgaagaaaagtgccgagtcaaagtcaccttgaacagcaatagtgaagatatcccctcagtgatgtttgaagctggaggaagaaactacatccatgcatgtcaggaggtggcaaggattgccataggagagctccgtgatcgctacagtgatcagttggccgacactgagtatcgctatcatcctcgccaacctcagggaagtgaccgtggcagttaccttgagactgaaggaattgagaatgatgttaccacaagacatttggttgagatgttgtgggctatggatgaaagtcgtgcggagactgtgttagcagctcaagatcgtgaagatcggaatcgtggtaagatttgcaagctagaagacaaggtggatcgtttggagaaggaattagccgcattgaagggagaagcaccgccgcagaaggctaggattcgtcttaccgcaaggaagagagctttgtttgtccctcgctatcaattggcgccaaaggtccgcgtggtggaaaaagaagttgccccagcaaatcctccggtcatcatcataagtagtgatgaagaagaagaacccaagcgcaacaattccaagtttgagtgggtagctatcaaagatgaggaagatgagccgaacgagccttcgatcgacctcctatgctcggaagaactagataccactaatcctgttgaagctggtgattggctgcatgccatagagaagaaattggatttgcttcagtgcactaatcaggagaaggtctcttttgcatcacatcagttgcatggccctgcctctgaatggtgggatcacttccgcctgaataggattactgctgaacctatcacttggcttgaattcaccgctgctttccggaagacgcatataccatcgggagtagtgtctctcaagaagaaggagttcaggtcgcttacccagggatctcgctctgttacggagtatctgcacgagttcaatcgtcttgctcgttatgctccggaagatgtgcgcaatgatgaagagcgccaggagaagtttttgggaggacttaatgatgagctttcttacccacttatggttggagattaccctgatttccagaaattagtggataaggctattcgtcaggaagacaagtacaatcgcatggagcagaagaaacgtcggattgctcaattcaagacacaacagggaaataatcagaagccgcgtcttactttaggaccccagcccatgccacagggaggttcttcgtctgttgttcgtccgcaacgtcagttcttcaacaacaatgctggcaacaacatccgtaatcaagctccacgtcctgttgcagctccagcacagcaacaacctgccaaaagggagcaaggcagcaagcctgtggtgtgtttcaactgtggagatccaggacattatgctgacaagtgtccgaagccccgacgcgtgaaggttgtccctgtccagaataactctgctgtaccagcatcaaaggcccgtgtcaatcatgttgctgctgcagaagctcaagatgctccagatgtgattttggtccgggagtatcctgatgtgttcccagatgatttacctgaaaggatacatcagaccgagttcatcaccatggggagctccggatattatcggaggtttatagagaatttttccaagattgctaagcccatgacacgactgcttcagaaagatgtgaagtacaagtggtcggaagaatctttagaagcgaagcccactctaattgatcaagttagagaagcccaaattaatgatcctgatattcaagagatcaagaagaataggagaagaggaaaagctattggtttcttggaggatgagcacggaactccgtgctccgccgtcgctccagctgtcgccgccgctcgggaagaccgccgtcgtcatcgccaagtcgccgccgtcctcgtccgccccttcgcagccgtcggaacccgccggagcatcgtcgccgtcgtcaacccgaaggtagccgccgcttccttctcgtcgccgtcgccgtccgttccttttccgccgccgttttggtcaccggtgtgttcgccgcgttgtcctctacgtgctggtgccctccgttggtgccgtggtgccgccgttcgccggcgagtgtccgccgcccgagccgtcttcttcgccgagccgccgccgtcgtcggtgacgtcatcgctgacgtcatcgggatcctatcccgtgagccggtcgtggaccgattga

SEQ ID NO: 15155 - DNA, 5598 bp, Oryza sativa
  Clone ID: TFbOSC401057j.C1.o1.fg
atggccgagatcgattcgatctaccacgtggcggtggctgacaggatgctgacatcagcaatgacaacaccaccggcggcggctcgggaccttatggtcgccggcgatctagggcacggcggtgctatccgagggcactatcgtgatgaggggaactcaccggtgcacgacacgacgacggatggcgatagcggtgaggaagaccgccgtcgtggtcgccaagtcgccgccgtcctcatccgccccttcgccgtcgccgaagatcaccggagcaccgtcgccgccgtcgacccgatctccgccgccgcttcttcttcgtcgtcgtcgccgtccgttcctcttccgccgtcgctttggtcgccgattccgtcgtttccggagagtccgttttcgccgaagaagagtttgaagagttccaaggccggcaaggaaactcctggtttggaatggtatattcctggtttggagatagaactgtgcagccgggatggttgttcagaatggttgggcctatacaacaggatgccgcgctacaagcctgagtacttgtttggtgttgagggttttgtccaggagttgcgtacgatgtcctttgtcattggaattgggactgcccctttttatgctcagattcctcatgatcgtcatgaagagaagtgccgagtcaaagtcaccttgaacagtaatagtgaagatatcccctcagtgatgttcgaagctggaggaagaaattacatccatgcatgtcaggaggtggcaaggatcgccataggagagctccgcgatcgttacagtgatcagttggccgacactgagtatcgctaccatcctcgccaacctcagggaagtgaccgtggcagctaccttgagactgaaggaattgagaatgatgctaccacaaggcatttggttgagatgttgtgggctatggatgaaagccgtgcggagactgtgttagcagctcaagatcgtgaagaccggaatcgtggtaagatttgcaagttagaagacaaggtggatcgtttggagaaggaactagctgcgttgaagggagaagcaccgccgcagaaggccaggattcgtctcaccgcaaggaagagagctctatttgtccctcgttaccaattggcgccaaagtttcccccggtttctcttcttgtgccctgtccatgccagatggtgaacactcgcagcaacgggaatggccccaacaaccccaataacaacaacaatggagagaatcccactcttgctcaagttcttgctcaacagactcagttaatgaacatgatgatgcagcaacttcagaaccagcagaaccaaggaaataaccatgcacctccccagaacaagttagcagaatttcttcgtgtgaggccgcctactttctctagtaccactaatcctgtcgaagctggtgattggttgcatgccatagagaagaagttggatttgcttcagtgcactgatcaggagaaggtctcatttgcatcacatcagttgcatggccctgcctctgaatggtgggatcacttccgccttaacaggactactgctgaacctatcacttggcttgaattcaccgctgctttccggaagacgcatataccatcgggagtggtgtctctcaagaagaaggaattcaggtcgctcacccagggatctcgctctgttacggagtatttgcacgagttcaatcgtctggcttgttatgctccggaagatgtgcgcaatgatgaagagcgccaagagaagttcttggaaggacttaatgatgagctttcttatccactcatgactggagattattctgatttccagaagttggtggataaggctattcgtcaggaggacaaatacaaccgcatggagcagaagaaacgccggatggctcaattcaagacacaacaggggaataatcagaggccgcgtcttactttaggaccccagtccatgccacatggaggttcttcgtctgttgttcgtccgcagcgtcagttcttcaacaacaatgctggcaacaacatccgcaatcaagctccacgccctgttgcagttccaacacagcaacagcctgccaagagggagcaaggcagcaagcccgtggtgtgtttcaactgtggagacccaggacattacgctgacaagtgtccgaagccccgacgcgtgaaggttgtccctgctcagagcaactctgctgtaccagcatcaaaggcccgtgtcaatcatgttgctgctgcagaagctcaagatgctccagatgtgattttgggtacgttccttgttaactcagttcctacaacagtgcttttcgattctggtgttacacattcattcttatctatgagttttgcgggaaatcatgggatggaagtagaagatcttagacgtcctttgatggttagtaccccaagtaatcaagcactctctttgcaacgtagcccctctgtcagaatagaaattaaaggagtaccatttctggccaatcttatcctgttagaatccaaagaccttgatgtcatcctagggatggactggctagccagacataaaggtgtgatagactgtgctaacagaaaagtaactctcaccagcaatgatggtcgagttgtaactgttcatgcattgtcttctgagtctttaaggtcaagactgaaccaaataactttggaagagattcctatagtccaggagtatcccgatgtgttcccagatgatttacctggtatgccgcccaaaagggatatagagttcagaatagatttggtacctggaacaactccgatccataagagaccttatagaatggcagccaatgagttggcagaagtcaagaggcaagtagatgatttgcttcagaaaggatacatcagaccaagttcatctccatggggagctccggttatttttgtggaaaagaaagatcatacccagagaatgtgtgtggactatcgtgcactaaatgatgtgactatcaagaataagtatccactacccagaattgatgatttgtttgatcagcttaaaggtgctactgttttctccaaaatagatcttcgatcaggatatcaccagttgagaatcaaagaggaagatatacctaagacagcttttaccactaggtatgggttgttcgaatgtactgttatgtcttttggacttaccaatgcccctgctttcttcatgaacttgatgaataaagtgtttatggaatacctagacaagttcgtggtggtctttattgatgatattcttatctactctcggaccaaagaagagcatgaagaacatcttcgccttgcattggagaagctacgagaacatcaactatatgctaagtttagcaagtgtgaattttggttgtctgaagtgaagttccttggtcacgtcatctcagcaggaggagttgccgtcgatcctagtaatgtggaatccgtaaccaactggaaacaaccgaagacagtttcagagattcgcagtttcttaggcctcgcaggatattatcggaggtttatagagaatttttccaagattgctaggcccaggacacgactgcttcagaaagatgtaaagtacaagtggtcggaagaatgtgagcagagttttcaagaattgaagaatcgcttgatatcagctcctattttgattttgcctgatccaaagaagggtttccaagtgtattgcgatgcatccaaacttgggttaggttgtgtactgatgcaagatgggaaggtggttgcctatgcatctcgtcagttacgtccgcatgagaagaactaccctactcatgatcttgaattagctgcagtagttcatgcgttgaagatttggcgtcattatctcttcggtactcgtacagaggtatataccgatcacaagagtttaaagtatatctttactcagccggatctgaacatgagacaaaggagatggttggaattaattaaggagtatgacatgggaattcattatcacccgggaaaggctaatgttgtagcagacgctcttagcaggaaaggctattgcaatgctacggaaggacgacagttgccgttggaattatgcaaggaatttgaaagattaaatttgggaattgtcagtagaggttttgttgcaaccttagaagcaaagcccactctaattgatcaagttagagaagcccaaattaatgatcctgatattcaagaaatcaagaagaatatgagaagaggaaaagctattggtttcttggaagatgagcacggaactgtatggttgggtgagagaatctgtgtccccgacaataaagatttaaaagatgcaattctgaaagaagctcatgatactttatactccattcaccctggtagtaccaaaatgtaccaggatctcaaggaaagattttggtgggcaagtatgaagcgtgaaatcgcagaatacgtagcagtatgtgatgtttgtcagcgagtcaaggcagaacatcagaaacctgccggtttgttgcagcctttgaagattcctgaatggaagtgggaagaaatcggtatggattttatcactggtttacccagaacgtcatcaggccatgactctatatgggtaatagtcgatagacttaccaaagtggcacatttcattccggtaaagacaacttattccggaagtcgcttagcggaattatatatggcaaggattgtgtgtttacatggcgttcctaagaagatagtgtctgatcgaggcagtcaatttacttcaaatttttggaagaaacttcaggaagagatgggttctaagctgaactttagtactgcttatcatccgcagacagacggacaaaccgaaagggtgaatcagattttggaagacatgttgagagcttgtgctttagacttcggtggaagttgggataagaatctaccttatgcggaattctcgtataacaacagttatcaagctagtctacagatggctccttacgaagcactgtatggtcggaagtgccgcactccgcttttgtgggatcaaacgggagaacgtcaggttttcgggacggatatcctaagggaagcaaaagaaaaggtgaaaatcattcaagaaagattgcgagtggctcagtctcgacataagagttatgctgacaatcgccgcagagatctaagttttgaagaaggagattatgtgtatcttcgtgtcacgcctcttcgaggagttcatcgtttccacaccaaaggaaaattggcaccgcgttttgtgggaccttataagattgtcagtagaagaggagaggttgcatatcaattggagttacctcaatccttggcaggagtccataatgtgttccatgtgtcgcaactaaaaaagtgtttaagggtacctatcgaagaagctaatcttgaacagatagaagtccaagaggatctgacctatgttgagaaaccaatccgtatcatggaaatagatgagagaaaaaccaggaatcgagttatccgtttttgcaaagtccaatggggtaatcactcggaagaagaatcaacttgggaacgagaagatgaattgaagtcagctcatccgcatctgttcgccagttcttccgaatctcgaggacgagattctgtttaa

SEQ ID NO: 15156 - DNA, 4221 bp, Oryza sativa
  Clone ID: TFbOSC401068j.C1.o1.fg
atgaattttagagtcgatttgggacgcgacattgaagctagtgattggctacatgccatagagaagaagttggatttacttccgtgtactgatcaggagaaggtctcatttgcatcacatcagttgcatggccctgcctctgaatggtgggatcacttccgtcttaacaggactactgctgaacctatcacttggcttgaattcaccgctgctttccggaagacgcatataccatcgggggtagtgtctctcaagaagaaggagttcaggtcgcttacccagggatctcgctctgttacggagtatctgcacgagttcaatcgtcttgctcgttatgctccggaagatgtgcgcaatgatgaagagcgccaggagaagtttttgggaggacttaatgatgagctttcttacccacttatggttggagattaccctgatttccagaaattagtggataaggctattcgtcaggaagacaagtacaatcgcatggagcagaagaaacgtcggattgctcaattcaagacacaacagggaaataatcagaagtcgcgtcttactttaggaccccagtccatgccacagggaggttcttcgtctgttgttcgtccgcaacgtcagttcttcaacaacaatgctggcaacaacatccgtaatcaagctccacgtcctgttgcagctccagcacagcaacaacctgccaagagggagcaaggcagcaagcccgtggtgtgtttcaactgtggagatccaggacattatgctgacaagtgtccgaagccccgacgcgtgaaggttgtccctgcccagagtaactctgctgtaccagcatcaaaggcccgtgtcaatcatgttgctgctgcagaagctcaagatgctccagatgtgattttgggtacgttccttgttaactcagttcctgcaacagtacttttcgattctggtgctacacattcattcttatctatgagttttgcgggaaatcatgggatggaagtagaagatcttagacgtcctttgatggttagtaccccaagtaatcaagcactctctttgcaacgtagcccctcggtcagaatagaaattcaaggagtaccatttctggccaatcttatcttgttagaatccaaagaccttgatgtcatcctagggatggactggttagccagacataaaggtgtgatagactgtgccaacagaaaagtaactctcaacagctatgatggtcgagttgtaaccgttcatgcattgtcttctgagtctttaaggtcaagactgaatcagataactttggaagagattcctatagtccgggagtatcctgatgtgttcccagatgatttaccgggtatgccgcctaaaagggatatagagttcagaatagatttggtacctggaacaactccgatccataagagaccttatcgaatggcagccaatgagttggcagaagttaagaggcaagtagatgatttgctacagaaaggatacatcagaccgagttcatcaccatggggagctccggttatttttgtggaaaagaaagaccatactcagagaatgtgtgtggactatcgtgcactaaacgatgtgactatcaagaataagtatccactacccaggattgatgatttgtttgatcagcttaaaggtgccactgttttctccaagatagatcttcgatcagggtatcatcagttgagaatcaaagaggaagatatacctaagacagcttttaccactaggtatgggttgttcgaatgtactgttatgtcttttggacttaccaatgcccctgctttcttcatgaatttgatgaataaggtgtttatggaatacctagacaagttcgtggtggtctttattgatgatattcttatctactctcaaaccaaagaagagcatgaagaacatcttcgccttgcattggagaagctacgagaacatcaactgtatgctaagtttagcaagtgtgaattttggttgtccgaagtgaaattccttggtcacgtcatctcagccggaggagttgccgtcgatcctagtaacgtggaatccgtaaccaattggaagcaaccaaagacagtttcagagattcgcagtttcctaggccttgcaggatattatcggaggtttatagagaatttttccaagattgctaagcccatgacacgactgcttcagaaagatgtgaagtacaaatggtcggaagaatgtgagcggagttttcaagagttgaaaagtcgcttaatatcagctcctattttgattttgcctgatccaaagaagggtttccaagtgtattgcgatgcatccaaacttgggttaggttgtgttctgatgcaagatgggaaggtggttgcctatgcatctcgtcagttacgtccgcatgagaagaactaccctactcatgatattgagttagctgcagtcgttcatgcattaaagatttggcgtcattatcttttcggtactcgtacagaagtgtacaccgatcacaagagtttaaagtatatctttactcagccggatctgaatatgagacaacggagatggttggaattaattaaggattatgacatgggaattcattatcatccgggaaaggctaatgttgtagcagacgctcttagcagaaaaggttattgcaatgctacagaaggacgacagttgccattggaattatgcaaggaatttgaaagattaaatttgggaattgtcggtagaggtttcgttgcagctttagaagcaaagcccactctaattgatcaagttagagaagcccaaattaatgatcctgatattcaagagatcaagaagaatatgagaagaggaaaagctattggtttcttggaagatgagcacggaactgtatggttgggtgaaagaatctgtgtccccgacaacaaagatctaaaggatgcaattctgaaagaagctcatgatactttatactccattcaccctggtagtaccaagatgtaccaggatctcaaggaaagattttggtgggcaagtatgaagcgtgaaatcgcagaatacgtagcagtatgtgatgtttgtcagagagtcaaggcagaacatcagaaacccgccggtttgttgcaacctttgaagattcctgaatggaaatgggaagaaataggtatggattttatcactggtttacccagaacgtcatcaggccatgactctatttgggtgatagtcgatagacttaccaaagtggctcatttcattccggtaaagacaacctattctggaagtcgcttggcggaattgtatatggcaaggattgtgtgtttgcatggcgtccctaagaagatagtgtctgatcgaggcagtcagtttacttcaaatttttgggagaaacttcaggaagagatgggttctaagctgaactttagtactgcttatcatccgcagacagacgggcaaaccgaaagggtgaatcaaattttggaagacatgttgagagcttgtgctctagatttcggtggaagttgggataagaatctaccctatgcagaattttcgtacaacaacagttatcaagctagtctacagatggctccttacgaagcactgtatggtcggaagtgccgcactccgcttttgtgggatcaaacgggagaacgtcaggttttcgggacggatatcctaagggaagcagaagaaaaggtaaagatcattcaagaaagattgcgagtggctcaatctcgttataagagttatgccgacaatcgccgcagagatttgagttttgaagaaggagattatgtgtatcttcgtgtcacgcctcttcgaggagttcatcgttttcagaccaaaggaaaattggcaccgcgttttgtgggaccttataagattgtcagcagaagaggagaggttgcttatcagttggagttacctcaatccttggcaggagtccataatgtgttccatgtgtcgcaattgaaaaagtgtttaagggtacctaccgaagaagctaatattgaccagatagaagtccaagaggatttgacttatgttgagaaaccaatccgtatactggaaacaaatgagagaagaaccaggaatcgagttatccgtttctgcaaagttcaatggagtaatcactcggaagaagaatcaacgtgggaacgagaagatgaattaaagtcagctcatccgcttctgttcgccagttcttccgaatctcgaggacgagattctgtttaa

SEQ ID NO: 15157 - DNA, 3762 bp, Oryza sativa
  Clone ID: TFbOSC401143j.C1.o24.gm
atggccgccaccggcaaccataggggcacgggcgcgctgcctcccgccggccgcgccgacgtggccgccttcgggcgcgacgagtggccgccgcgtggggcccggccgtcagccgcccacgccctcggagtaaaagcctttttcctttccgttggtcgtgtagacgctgtagcttcggaagatccgctctacgtggaggttgaagccgaccttcgccgcatcctcaccgacctcgtccacccctccgtttcgcacgccgaccgccggagcaccgtcgaccccgtccacccaagccgcgccgccgccttcctccgctccgatgtaagttggcccggcctgggggaggcgggacgttacacgcgccgcctcccgtcggctgtgccggcgtggccgccttcgggcgcgccccgcggctgccgtgtggggcccggctgtcagccgcccacgcccttaggtgcggctgacgcgtgggacccacggcgtcggccggtgcgagcccgggtgcgcccggtccaccgtggaccgtggggctgccgcgtgggccccacccccgtggacccggcaaatgaaggctacacgagctgcggcccggtagtcgacatgtcatggcacagggctggtgtcctgctgctaggggctcagtcctgcctacctgtcccggaggttccggccgtagcgtcgtgtgccctagcttcgccgtcgccgccgccgctccagccgtgctccgccgccgttccagacgtcgccgtcgctcgggaagaccgtcgtcgtggtcgccaagtcgtcgccgtcctcgtccgccccttcgccgtcgccggagatcgtcggagcttcgtcgccgtcgacaacccgaaggtttccgccgtttcctcctcgtcgccgtcgtcgttcgttgtttttccgccgccgttttggtcaccggtgtgttcgccgcgtcgtcctctacgtgctggtgccctccgtttgcgtcctcgcgccgccgttcgccggcgagcgtgcgccgcccgagccgtccgctccgccgagccgccgccgctgtcggtgacgtcattgccgacgtcatcggggtcgtccgccgtgagccggcctgagtacctgtttggtgttgagggttttgtccaggagttgcgtacgatgtcctttgccattggatttgggactgcccctttttatgcccagattcctcatgatcgtcatgaagaaaagtgccgagtcaaagtcaccttaaacagcaatagtgaagaggtcccctcagtgatgttcgaagctggaggaagaaactacgtccatgcatgtcaggaagtggcaaggatcgccataggagaactccgtgatagctacagtgatcagttggccgacactgagtatcgctaccatcctcgccaaccccagggaagtgaccgtggcagctaccttgaaactgaaggaattgagaatgatgctaccacaaggcatttggttgagatgctgtgggctatggatgaaagtcgtgcggagactgtgttagcggctcaagatcgtgaagaccggaatcgtggtaagatttgcaagctagaagacaaggtggatcgtttggagaaggaactagctgcattaaagggagaagcaccgccgcagaaggccaggattcgcctcaccgcaaggaagagagctctattcgtccctcgctatcaattggcgccaaaggttcgtgtggtggagaaagaagttgccccatcccaagcggatcctccggtcatcatcataagtgatgaagaagaagaatccaagcgcaacaattccaagattgagtgggtagcaacccaagatgatgaagacgagccgaacgagccttcaatcgacctccgatgcttggaagaactagattttcccccggtttctcttcttgtgccatgttcctgccagatggtgaatactcgcagcaacgggaatggtcccaacaaccccaataacaataacaatggagagaacccaactctggcccaagttcttgctcaacagacacagcttatgaacatgatgatgcagcaacttcagaatcagcagaaccaaggaaataaccatgcacctcctcagaataagttagcagaatttcttcgtgtgaggccgcctgttttctctagtaccactaatcctgttgaagctggtgattggctgcatgccatagagaagaagttggatttacttcagtgcactgatcaggagaaggtatcttttgcatcacatcagttgcatggctctgcctttgaatggtgggatcacttccgcctgaataggactactgctgaacctatcacttggcttgaattcaccgctgctttccggaagacgcatataccatcaggagtagtgtctctcaagaagaaggagttcaggtcgcttactcagggatctcgctctgttacggagtatctgcacgagttcaatcgtcttgctcgttatgctccggaagatgtgcgcaatgatgaagagcaccaggagaagtttttgggaggacttaatgacgagctttcttacccactcatggttggagattatcctgatttccagaaattagtggataaggctatacgtcaggaggacaagtacaattgcatggagcagaggaaacgtcggattgctcacttcaaggcacaacaagggagtaatcagaagccgcgttttactttaggaccccagtctatgccacagggaggttcttcgtctgttgttcgtccgcagcgtcagttcttcaacaacaatgctggcaacaacatccgcaatcaagctccacgtcctgttgcagctccaacacagcaacagcctgccaagagggagcaaggcagcaagcccgtggtgtgtttcaactgtggagacccaggacattatgctgacaagtgtccgaagccccgtcgcgtgaaggttgtacctgcccagagtaactctgctgtaccagcatcaaaggcccgtgtcaatcatgtcgctgctgcagaagctcaagatgctccagatgtgattttggatgatattcttatctattctcgaaccaaagaagagcatgaagaacatcttcgccttgcattggagaagctacgagagcatcaactgtatgctaagttcagcaagtgtgaattttggttgtctgaagtgaagttccttggtcacgtcatctcagcaggaggagttgccgttgatcctagatattaccggaggtttatagagaatttttccaagattgctaagcccatgacacgactgcttcagaaagatgtgaagtacaagtggtctgaagaatcgccgtgtgccctagcttcgccgtcgccgccgccgctccagccgtgctccgccgccgttccagacgtcgccgtcgctcgggaagaccgtcgtcgtggtcgccaagtcgtcgccgtcctcgtccgccccttcgccgtcgccggagatcgtcggagcttcgttgccgtcgacaacccgaaggtttccgccgtttcctcctcgtcgccgtcgtcgttcgttgtttttccgccgccgttttggtcaccggtgtgttcgccgcgtcgtcctctacgtgctggtgccctccgtttgcgtcctcgcgccgccgttcgccggcgagcgtgcgccgcccgagccgtccgctccgctgagccgccgccgctgtcggtgacgtcattgccgacgtcatcggggtcgtccgccgtgagccgctacctcagcgccgaccgcttcggcgctgagatggccaatctcagcgccaatggcctggcgctgagttttggtacttag

SEQ ID NO: 15158 - DNA, 1254 bp, Oryza sativa
  Clone ID: TFbOSC401143j.C1.o4.fg
atgtcatggcagagggttggtgccctgctgctaggggctcagtctcgcctgcctgtcccgggggttccggccgtaggcgggattaggtcggtactcttgtctatggctaggatgggttggaaactatgtcacgtcttccgtctgtataccgtggtgatgtttaacagagaaaaaggaaagaatgtcagcaggcatgcctccagtaactcaagttttcaactccatccaccactagcctcaagagagttaacaagggtacacccttggtccattccaagcatgctgcttggttcacagctaccattggttggaagtcaagaccaaaatcagtatgtgtttgatcgagcatttgccacccaggtcaatgagcttccaatgccagaagaggatgtccccttttgtcaggattgtagagagcaaggacactatgccctgaattgtccatgggtatataccaaagaagctccttcctttggtttagcagggcaggcatcgctaaaccagcctcctcgcaccaagtcaagcttgcagcctagtgtgcaaagcagagagcccaatgaagagaatccattgaatcccgggaattgctttcctcctagcctttcgtaccacgtggggtcacgtactaagcacgccaaaggcaagaagagtaagaatcagaagagaaaagcgccgatgcgaactgaagaagaagtacgtaagatgactattaccagcaccgaatggcctccagcagggataactattcctagacgtcaaagaggaaataccttccgaggtgcacggcagttgacccagcacctcctaagccatggtggcagagtatctgatagtgaagggtcagatcaagtctcctcggattatgaatatgagtccccccgacgtctcggcgaggaagagatggaattaaaagcatgcacccgttgcggagaaattggacacattgctagcatgtgtctcacactctgccctcattgtgaagaagaccatccaccaggggagtgtcccacccgcaaggtcacatgttttctatgcgaaggtacaaaccatgtgcccaaggattgccaactcagtgtgttgttgaccaagaccgcagaaatccaacgaacaaccctacgattgtctcatcagctagtcagctccaacagcaacctcgacgatatcatccacagcaccaatgctcctcctgctgcacctgactctgcaataaatcatagcaataataccttcagcaccaaccattctctgcactga

SEQ ID NO: 15159 - DNA, 5340 bp, Oryza sativa
  Clone ID: TFbOSC401275j.C1.o46.fg
atgatcgactatgatgacgaaattgctcatcaaacagtagtagagtgggctatgttgaagaggcttgacaccaatagcagtgtagcaaccaatgataatgacaaagacgctcatcagcatttgcatagtaggtcaaccatgaagattccgtcgtttccggagagtccgttttcgcagaagaagagtttgaagagttccaaggccagcaaggcaactcctggtttggaatgttatattcctggtttggagatagaactgtgcagccggggtggttgttcagaatggttgggcctatacaacaggatgccgcgttacaagcctgagtacctgtttggtgttgagggttttgtccaggagttgcgtacgatgtcctttgtcattggatttgggactgcccctttttatgcccagattcctcatgatcgtcatgaagagaagtgccgagtcaaagtcaccttgaacagtaatagtgaagatatcccctcagtgatgtttgaagctggaggaagaaactacatccatgcatgtcaggaggtggcaaggatcgccataggagagctccgtgatcgctacagtgatcagttggccgacactgagtatcgctaccatcctcgccaaccccagggaagtgaccgtggcagttaccttgagactgaaggaattgagaatgatgctaccacgaagcatttggttgagatgttgtgggctatggatgaaagtcgtgcggagactgtgttagccgctcaagatcgtgaagaccggaatcgcggtaagatttgcaagttagaagacaaggtggatcgtttggagaaggaattagccgcattgaagggagaagcaccgccgcagaaggccaggattcgtcttaccgcaaggaagagagctctatttgtccctcgctatcaactggcgccaaagatggtgaacactcgcagcaatgggaatggtcccaacaaccccaataacaacaacaatggagagaatcccactcttgctcaagttcttgctcaacagacacagcttatgaacatgatgatgcagcaatttcagaatcagcaaaaccaaggaaataatcatgcacctccacagaacaagttagcagaatttcttcgtgtgaggccgcctgttttctctagtaccactaatcctgttgaagctagtgattggctgcatgccatagagaagaagttggatttacttcagtgtactgatcaggacaaggtctcatttgcatcacatcagttgcatggccctgcctctgaatggtgggatcacttccgccttaacaggactactgctgaacctatcacttggcttgaattcaccgccgctttccggaagacgcatataccatcaggagtagtgtctctcaagaagaaggagttcaggtcgcttacccagggatctcgctctgttacggagtatctgcacgagttcaatcgtcttgctcgttatgctccggaagatgtgcgcaatgatgaagagtgccaggagaagtttttgggaggacttaatgatgagctttcttacccactcatggttggagattatcctgatttccagaaattagtggataaggctattcgtcaggaggacaagtacaatcgcatggagcagaagaaacgccggattgctcaattcaagacacaacaggggaataatcagaagccgcgtcttactttaggaccccagtctgtgccacagggaggttcttcgtctgttgttcgtccgcagcgtcagttcttcaacaacaatgctggcaacaacatccgtaatcaagctccacgtcctgttgcagttccagcacagcaacaacctgccaagagggagcaaggcaacaagcccgtggtgtgtttcaactgtggagatccaggacattatgctgacaagtgtccgaagccccgacgcgtgaaggttgtccctgcccagaataactctgctgtaccagcatccaaggctcgtgtaaatcatgtcgctgctgcagaagctcaaggtgctccagatgtgattttgggtacgttccttgttaactcagttcctgcaacagtacttttcgattctggtgctacacattcattcttatctatgagttttgcgggaaatcatgggatggaagtagaagatcttagacgtcctttgatggttagtaccccaagtaatcaagcactctctttgcaacgtagcccctcggtcagaatagaaattcaaggagtaccatttctggccaatcttatcttgttaaaatccaaagaccttgatgtcatcctagggatggactggttagccagacataaaggtgtgatagactgtgccaacagaaaagtaactctcaacagctatgatggtcgagttgtaactgttcatgcattgtcatctgagtctttaaggtcaagactgaaccagataactttggaagagattcctatagtccgggagtatcctgatgtgttcccagatgatttacctggtatgccgcctaaaagggatatagagttcagaatagatttggtacctggaacaactccgatccataagagaccttatcgaatggcagccaatgagttggcagaagttaagaggcaagtagatgatttgctacagaaaggatacatcagaccgagttcatcaccatggggagctccggttatttttgtggaaaagaaagaccatactcagagaatgtgtgtggactatcgtgcactaaacgatgtgactatcaagaataagtatccactacccaggattgatgatttgtttgatcagcttaaaggtgccactgttttctccaagatagatcttcgatcagggtatcatcagttgagaatcaaagaggaagatatacctaagacagcttttaccactaggtatgggttgttcgaatgtactgttatgtcttttggacttaccaatgcccctgctttcttcatgaacttgatgaataaggtgtttatggaatacctagacaagttcgtggtggtctttattgatgatattcttatctactctcgaaccaaagaagagcatgaggaacatcttcgccttgcattggagaagctacgagaacatcaactgtatgctaagtttagcaagtgtgaattttggttgtctgaagtgaaattccttggtcacgtcatctcagccggaggagttgccgtcgatcctagtaacgtggaatccgtaaccaattggaagcaaccaaagacagtttcagaaattcgcagtttcctaggcctcgcaggatattatcggaggtttatagagaatttttccaagattgctaagcccatgacacgactgcttcagaaagatgtgaagtacaagtggtcggaagaatgtgagcagagttttcaagagttgaaaagtcgcttaatatcagctcctattttgattttgcctgatccaaagaagggttttcaagtgtattgcgatgcatccaaacttgggttaggttgtgttctgatgcaagatgggaaggtggttgcctatgcctctcgacagttacgtccacatgagaagaactaccctactcatgatattgagttagctgcagtcgttcatgcattgaagatttggcgtcattatcttttcggtactcgtacagaagtgtacaccgatcacaagagtttaaagtatatctttactcagccggatctgaacatgagacaacggagatggttggaattaattaaggattatgacatgggaattcattatcatccgggaaaggctaatgttgtagtagacgctcttagcagaaaaggctattgcaatgctacagaaggacgacagttgccattggaattatgcaaggaatttgaaagattaaatttgggaattgtcggtagaggtttcgttgcagccttagaagcgaagcccactctaattgatcaagttagagaagcccaaattaatgatcctgatattcaagagatcaagaagaatatgagaagaggaaaagctattggtttcttggaggatgagcaaggaactgtatggttgggtgagagaatctgtgtccccgacaacaaagatctaaaagatgcagttctgaaagaagctcatgatactttatactccattcaccctggtagtactaagatgtaccaggatctcaaggaaagattttggtgggcaagtatgaagcgtgaaatcgcagaatatgtagcagtatgtgatgtttgtcagcgagtcaaggcagaacatcagaaacccgccggtttgttgcagcctttgaagattcctgaatggaaatgggaagaaataggtatggattttattactggtttacccagaacgtcatcaggccatgattctatttgggtgatagtcgacagacttaccaaagtggctcattttattccggtaaagacaacctattccggaagtcgtttggcggaattgtatatggcaaggattgtgtgtttgcatggcgtccctaagaagatagtgtctgatcgaggcagtcagtttacttcaaatttttggaagaaacttcaggaagagatgggttctaagctgaactttagtactgcttatcatccacagacagacggacaaaccgaaagggtgaatcagattttggaagacatgttgagagcttgtgctttagatttcggtggaagttgggataagaatctaccttatgcagaattttcatacaacaacagttatcaagctagtttacagatggctccttacgaagcactgtatggtcggaagtgccgcactccgcttttgtgggatcaaacgggagaacgtcaggttttcgggacggatatcctaagggaagcagaagaaaaggtaaaggtcattcaagaaagattgcgagtggctcagtctcgacataagagttatgccgacaatcgccgtagagatttgagttttgaagaaggagactatgtgtatcttcgtgtcacgcctcttcgaggagttcatcgttttcacaccaagggaaaattggcaccgcgttttgtgggaccttataagattgtcagtagaagaggagaggttgcttatcagttagaattacctcaatctttggcaggagtccataatgtgttccatgtgtcacaattgaaaaaatgtttaagggtacctaccgaagaagctaatattgagcagatagaagtccaagaggatttgacttatgttgagaaaccaatccgtatcctggaaacaaatgagagaagaaccaggaatcgagttatccgtttctgcaaagttcaatggagtaatcactcggaagaagaatcaacttgggaacgagaagatgaattgaagtcagctcatccgcacctgttcgccagttcctccgaatctcgaggacgagattctgtttaa

SEQ ID NO: 15160 - DNA, 3501 bp, Oryza sativa
  Clone ID: TFbOSC401329j.C1.o57.gm
atggcggctgcccacggcgaggtccccgtggaggcggatccccgtgctcttctcttctcgccgccaccctcgccttcgcctctcgtcgccggagtcgtcctagcgccgtgcgccctagcttcgctgtcgccgccgccgctccagccgtgcgccgccgtcgttccagccgtcgccgtcactcgggaaggccgccgtcgtcatcgccaagtcgccgccgtcctcgtccgccccttcgctgccgtcggagaccgccggagcatcgtcgccgtcgtcaagccgaaggtagccgccgcttcctcctcgtcgccgtcgccgtccgttggtcgtccgccgtcgccttggtcgtcggtgagttcgccgtgccgtccgctacccgttggtgtcctccgtttgcgtcctagtgccgccgttcgccggcgagtgtccgccgcccgagccgtcttctttgccgagccgccgccgccgtcggtgacgtcatcgctggcgtcatcaagcccctctcccatgccgtgttacaagcctgagtacctgtttggtgttgagggttttgtccaggagttgcgtacgatgtcctttgtcattggatttgggactgcccctttttatgcccagattcgtcatgatcgtcatgaagagaagtgccgagtcaaagtcaccatgaacagtaatagtgaagatatcccctcagcgatgttcgaagctggaggaagaaactacatccatgcatgtcaggaagtggcaaggatcgccataggagagctccgtgatagctacagtgatcaattggccgacactgagtatcgctaccatcctcgtcaaccacagggaagtgaccgtggcagttaccttgagactgaaggaattgagaatgatgctactacaaggcatttggttgagatgctgtgggctatggatgaaagtcgtgcggagactgtgttagcagctcaagatcgtgaagaccggaatcgtggtaagatttgcaagctagaagacaaggtggatcgtttggagaaggaattagccgcattgaagggagaagcaccgccgcagaaggccaggattcgtctcaccgcaaggaagagagctttgtttgtccctcgttatcaattggcgccaaagatccgcgtggtggagaaagaagttgccccagcaaatcctcccgtcatcattataagtagtgatgaagaagaagaacccaagcgcaacaattccaagtttgagtgggagaaggtctcatttgcatcacatcagttgcatggccctgcctctgaatggtgggatcacttccgccttaacaggactactgctgaacctatcacttggcttgaattcaccgctgctttccggaagacgcatataccatcgggagtagtgtctctcaagaagaaggagttcaggtcgcttactcagggatctcgctctgttacggagtatctgcacgaattcaatcgtcttgctcgttatgctccggaagatgtgcgcaatgatgaagagcgccaggagaagtttttgggaggacttaatgatgagctttcttacccactcatggttggagattatcctgatttccagaaattagtggataaggctattcgtcaggaggacaagtacaatcgcatggagcagaagaaacgtcggattgctcaattcaagacacaacagggaaataatcagaagccgcgtcttactttaggaccccagtctatgccacagggaggttcttcgtctgttgttcgtccgcaacgtcagttcttcaacaacaatgctggcaacaacatccgtaatcaagctccacgtcctgttgcagctccagcacagcaacaacctgccaagagggagcaaggcaacaagcccgtggtgtgtttcaactgtggagatccaggacattatgctgacaagtgtccgaagccccgacgcgtgaaggttgtccctgcccagaataactctgctgtaccagcatccaaggctcgtgtaaatcatgtcgctactgcagaagctcaagatgctccagatgtgattttggtccgggagtatcctgatgtgttcccagatgatttacctgccaatgagttggcagaagttaagaggcaagtagatgatttgcttcagaaaggatacatcagaccgagttcatcaccatggggagctccggttatttttgtggaaaagaaagatcatacccagaggatgtgtgtggactatcgtgcactaaacgatgtgacaatcaagaataagtatccgctgcccagaattgatgatttgtttgatcagcttaaaggagccactgttttctccaagatagatcttcgatcagggtatcatcagttgagaatcaaagaggaagatatacctaagacagcttttaccactaggtatgggttgttcgaatgtactgttatgtcttttggacttaccaatgcccctgctttcttcatgaacttgatgaataaggtgtttatggaatacttagacaagttcgtggtggtctttattgatgatattcttatctactctcgaaccaaagaagagcatgaggaacatcttcgccttgcattggagaagctacgagaacatcaactgtatgctaagtttagcaagtgtgaattttggttgtccgaagtgaaattccttggtcacgtcatctcagccggaggagttgccgtcgatcctagtaacgtggaatccgtaaccaactggaaacaaccaaagacagtttcagagatccgcagtttcctaggccttgcaggatattatcggaggtttatagagaatttttccaagattgctaagcccatgacacgactgcttcagaaagatgtgaagtacaagtggtcggaagaatccttagaagcgaagcccactctaattgatcaggttagagaagcccaaattaatgatcctgatattcaagagatcaagaagaatatgagaagaggaaaagctattggtttcttggaggatgagcacggaactgatccccgtgctcttctcttctcgccgccaccctcgccttcgcttctcgtcgccggagtcgtcctagcgccgtgcgccctagcttcgctgtcgccgccgccgctccagccgtgcgccgtcgccgtcactcgggaaggccgccgtcgtcatcgccaagtcgccgccgtcctcgtccgccccttcgctgccgtcggagaccgccggagcatcgtcgccgtcgtcaagccgaaggtagccgccgcttcctcctcgtcgccgtcgccgtctgttggtcgtccgccgtcgccttggtcgtcggtgagttcgccgtgccgtccgctacccgttggtgtcctccgtttgcgtcctagtgccgccgttcgccggcgagtgtccgccgcccgagccgtcttctttgccgagccgccgccgccgtcggtgacgtcatcgctggcgtcatcaagcccctctcccgtgagccgccgtggactcgttcgatctcggccgtccgatttggatcggatcaatctcggccgtccgttcgcgtga

SEQ ID NO: 15161 - DNA, 4443 bp, Oryza sativa
  Clone ID: TFbOSC401340j.C1.o13.fg
atgccgcgctacaagcctgagtacttgtttggtgttgaaggatttgtccaggagttgcgtacgatgtcctttgccataggatttgggactgctcctttttatgcccagattcctcatgatcgtcacgaagagaagtgcggagtcaaagtcaccttgaacagtaatagtgaagatatcccctcagtgatgttcgaagctggaggaagaaactacatccatacatgtcaggaggtggcaaggatcgccataggagagctccgcgatcgctacagtgatcagttggccgacactgagtatcgctaccatccccgtcaaccacagggaagtgaccgtggcagctaccttaagactgaaggaattgagaatgatgctaccacaaggcatttggttgagatgctgtgggctatggatgaaagccgtgtggagactgtgttagcagctcaagatcgtgaagatcggaatcgtggtaagatttgcaagctagaagacaaagtggatcgtttggagaaggaactagccgcgttgaagggagaagcaccaccgcagaaggccagggttcgtcttaccgcaaggaagagagctctatttgtccatcgctaccaattggcgccaaagatggtgctcactcgcagcaacgggaatggcctcaacaacaacaacaacaataacaacaacaatggagagaatcccacacttgcccaagtcctggctcaacaggcacatcttatgaacatgatgatgcagcaactccagaaccagcagaaccagggaaataaccatgcacctccccagaacaagttagcagaatttcttcgtgtgaggccgcccactttctctagtaccactaatcctgttgaagctggactactgctgaacctatcacttggcttgaccgctgctttccggaagacgcatataccatcgggagtggtgtctctcaagaagaaggaattcaggtcgctcactcaggggtctcgctctgttacggagtatctgcacgagttcaatcgtctggctcgctatgctccagaagatgtacgcactgatgaagagcgccaggagaagttcttggaaggacttaatgatgagctttcttatccactcatgactggagattatcctgatttccagaagttagtggataaggctattcgccaggaggacaagtacaaccgcatggagcagaagaaacgccggattgctcacttcaagacacaacaggggaataatcagaggccgcgtcttactttaggaccccagtccatgccacagggaggttcttcgtccgttgttcgtccgcagcgtcagttcttcaacaacaatgctggcaacaacatccgcaatcaagctccacgccctgttgcagcttcgacacagcaacaacctgccaagaaggagcaaggcagcaatcccgtggtgtgtttcaactgtggagacccaggacattacgctgataagtgtccgaagccccgacgtgtgaaggttgtccctgcccagagcaactctaccgcaccagcatcaaaggcccgtgtcaatcatgttgctgctgcagaagctcaagatgctccagatgtgattttgggtacgtttcttgttaacttagttcctgcaacagtgcttttcgattctggtgctacacattcattcttatctatgagttttgcgggaaatcatgggatggaagtagaagatattagacgtcctttgttggttagtaccccaagtaatcaggcactctctttgcaacgtagcccctctgtcagaatagaaattcaaggagtaccatttctggccaatcttatcttgttagaatccaaagaccttgatgtcatcctagggatggactggttagccagatataaagacgatttacctggtatgccgcccaaaagggatatagagttcagaatagatttggtaccaggaacaactccgatccataagagaccttatagaatggcagccaatgagttggcagaagtcaaaaggcaagtagacaatttgcttcagaaaggatacatcagaccgagttcatctccatggggagctccggttatttttgtggaaaagaaagatcatacccagaggatgtgtgtggactatcgtgcactaaatgatgtgactatcaagaataagtatccgctgccccgaattgatgatttgtttgatcagcttaaaggtgccaccgttttctccaagatagatcttcgatcagggtatcaccagttgagaattaaagaggaagatatacctaagacggcttttaccactaggtatggattgttcgaatgtactgttatgtcttttggacttaccaatgcccccgctttcttcatgaacttgatgaataaggtgtttatggaatacctagacaagttcgtggtggtctttattgatgacattcttatctactcccgaaccagagaagagcatgaggaacatcttcgccttgcactagagaagctacgagaacatcaactgtatgctaagtttatttcagagattcgcagtttcctaggcctcgcaggatattatcggaggtttatagagaatttttccaagattgctaagcccatgacacggctgcttcagaaagatgtgaagtacaagtggtcagaagaatgtgagcagagttttcaagaattgaagaatcgcttaatatcagctcctattttgattttacctgatccaaagaagggtttccaagtgtattgcgatgcatccaaacttgggttaggttgcgttctgatgcaagatgggaaggtggttgcctatgcatctcatcagttacgtccgcatgagaagaactaccctactcatgatcttgagttagctgcagtagttcatgcattgaaaatttggcgtcattatcttttcggtactcgtacggagttgccattggaattatgcaaggaatttgaaagattaaatttgggaattgtcagtagaggttttgttgcagccttagaagcgaagcccactctaattgatcaagttagagaagcccaaattaatgattctgatattcaagaaatcaagaagaatatgagaagaggaaaagctatcggtttcttggaggatgagcaaggaactgtatggttgggtgagagaatctgcgtccccgacaacaaagatttaaaagatgcaattctgaaagaagctcatgatactttatactccattcaccctggtagtaccaaaatgtaccaggatctcaaggaaagattttggtgggcaagtatgaagcgtgaaatcgcagaatacgtagcagtatgtgatgtttgtcagcgagtcaaggcagaacatcagaaacccgccggtttgctgcagcctttgaagattcctgaatggaaatgggaggaaatcggtatggatttcatcactggtctacccagaatgtcatcaggccatgactctatttgggtgatagtcgacagacttaccaaagtggctcatttcatcccagtaaagacaacttattccggaagtcggttggcggaattgtatatggcaaggattgtgtgtttgcatggcgtccctaagaaaatagtgtctgatcgaggcagtcagtttacttcaaatttttggaagaagcttcaggaagagatgggttctaagctgaactttagtactgcttatcatccacaggcagacggacaaaccgaaagggtgaatcagattttggaagatatgttgagagcttgtgctttagacttcggtggaagttgggataagaatctaccttatgcagaactttcgtataacaacagttatcaagctagtcttcagatggctccttacgaagcactgtatggtcggaagtgccgcactccgcttttgtgggatcaaaagggagaacgtcaggttttcgggactgatatcctaagggaagcagaagagaaggtaaagatcattcaagaaagattgcgtgtggcccagtctcgtcataagagttatgccgacaatcgccgcagagatttgagttttgaagaaggagattatgtgtaccttcgtgtcacgcctcttcgaggagttcatcgtgttcacaccaaaggaaaattggcaccgcgttttgtgggaccttataagattgtcagtagaagaggagaggttgcttatcagttagagttacctcaatctttggcaggagtccataatgtgttccatgtgtcgcaattgaaaaagtgtttaagggtacctaccgaagaagctaatcttgaacagatagaagtccaagaggatctgacctatgttgagaaaccaatccgtattttggaaatagatgagagaagaaccagaaatcgagttatccgtttttgcaaagtccaatggagtaatcactcggaagaagaatcaacttgggaacgagaagatgaattgaagtcagctcatccgcatctgttcgccagttcttccgaatctcgaggacgagattctgtttaa

SEQ ID NO: 15162 - DNA, 5343 bp, Oryza sativa
  Clone ID: TFbOSC401449j.C1.o1.np
gccgccgctcgggaagaccgccgtcgtcatcgccaagtcgccgccgtcctcgtccgccccttcgcagccgtcggaacccgccggagcttcgtcgccgtcgacaacccgaaggtagccgccgcttccttctcgtcgccgtcgtcgtccgttattccgtcgtttccggagagtccgttttcgcagaagaagagtttgaagagttccaaggccagcaaggcaactcctggtttggaatggtacattcctggtttggagatagaactgtgcagccggggtggttgttcagagtggttgggcctatacaacaggatgccgcgttacaagcctgagtacctgtttggtgttgagggttttgtccaggagttgcgtacgatgtcctttgtcattggatttgggactgcccctttttatgcccagattcctcatgatcgtcatgaagagaagtgccgagtcaaagtcaccttgaacagcaatagtgaagaggtcccctcagtgatgtttgaagctggaggaagaaactacatccatgcatgtcaggaggtggcaaggatcgccataggagagctccgtgatcgctacagtgatcaattggccgacactgagtatcgctaccatcctcgccaacctcagggaagtgaccgtggcagttaccttgagactgaaggaattgagaatgatgttaccacgaaacatttggttgagatgttgtgggctatggatgaaagtcgtgcggagactgtgttagcagctcaagatcgtgaagatcggaatcgtggtaagatttgcaagctagaagacaaggtggatcgtttggagaaggaattagccgcattgaagggagaagcaccgccgcagaaggccaggattcgtcttaccgcaaggaagagagctttatttgtccctcgctatcaactggcgccaaagatggtgaacactcgtagcaatgggaatggtcccaacaaccccaataacaacaacaatggagagaatcccactcttgcccaagttcttgctcaacagacacagcttataaacatgatgatgcagcaatttcagaatcagcaaaaccaagggaataatcatgcacctccacagaacaagttagcagaatttcttcgtgtaaggccgcctgttttctctagtaccactaatcctgttgaagctagtgattggctgcatgccatagagaagaagttggatttacttcagtgtactgatcaggagaaggtctcatttgcatcacatcagttgcatggccctgcctctgaatggtgggatcacttccgccttaacaggactactgctgaacctatcacttggcttgaattcaccgctgctttccggaagacgcatataccatcgggagtagtgtctctcaagaagaaggagttcaggtcgcttacccagggatctcgctctgttacggagtatctgcacgagttcaatcgtcttgctcgttatgctccggaagatgtgcgcaatgatgaagagcgccaggagaagtttttgggaggacttaatgatgagctttcttacccactcatggttggagattatcctgatttccagaaattagtggataaggctattcgtcaggaggacaagtacaatcgcatggagcagaagaaacgtcggattgctcaattcaagacacaacagggaaataatcagaagccgcgtcttactttaggaccccagtccatgccacagggaggttcttcgtctgttgttcgtccgcaacgtcagttcttcaacaacaatgctggcaacaacatccgcaatcaagctccacgtcctgttgcagctccagcacagcaacaacctgccaagagggagcaaggcaacaagcccgtggtgtgtttcaactgtggagatccaggacattatgctgacaagtgtccgaagccccgacgcgtgaaggttgtccctgcccagaataactctgctgtaccagcatccaaggctcgtgtaaatcatgtcgctgctgcagaagctcaagatgctccagatgtgattttgggtacgttccttgttaactcagttcctgcaacagtacttttcgattctggagctacacattcattcttatctatgagttttgcgggaaatcatgggatggaagtagaagatcttagacgtcctttgatggttagtaccccaagtaatcaagcactctctttgcaacgtagcccctctgtcagaatagaaattcaaggagtaccatttctggccaatcttatcttgttagaatccaaagaccttgatgtcatcctagggatggactggttagccagacataaaggtgtgatagactgtgccaacagaaaagtaactctcaacagctatgatggtcgagttgtaactgttcatgcattgtcatctgagtctttcaggtcaagactgaaccagataactttggaagagattcctatagtccgggagtatcctgatgtgttcccagatgatttacctggtatgccgcctaaaagggatatagagttcagaatagatttggtacctggaacaactccgatccataagagaccttatcgaatggcagccaatgagttggcagaagttaagaggcaagtagatgatttgctacagaaaggatacatcagaccgagttcatcaccatggggagctccggttatttttgtggaaaagaaagaccatactcagagaatgtgtgtggactatcgtgcactaaacgatgtgactatcaagaataagtatccactacccaggattgatgatttgtttgatcagcttaaaggtgccactgttttctccaagatagatcttcgatcagggtatcatcagttgagaatcaaagaggaggatatacctaagacagcttttaccactaggtatgggttgttcgaatgtactgttatgtcttttggacttaccaatgcccctgctttcttcatgaacttgatgaataaggtgtttatggaatacctagacaagttcgtggtggtctttattgatgatattcttatctactcttgaaccaaagaagagcatgaggaacatcttcgccttgcattggagaagctacgagaacatcaattgtatgctaagtttagcaagtgtgaattttggttgtccgaagtgaaattccttggtcacgtcatctcagctggaggagttgccgtcgatcccagtaacgtggaatccgtaaccaattggaagcaaccaaagacagtttcagagattcgcagtttcctaggcctcgcaggatattatcggaggtttatagagaatttttccaagattgctaagcccatgacacgactgcttcagaaagatgtgaagtacaagtggtcggaagaatgtgaacagagttttcaagaattgaaaagtcgcttaatatcagctcctattttgattttgcctgatccaaagaagggttttcaagtgtattgtgatgcatccaaacttgggttaggttgtgttctgatgcaagatgggaaggtggttgcctatgcctctcgacagttacgtccgcatgagaagaactaccctactcatgatattgagttagctgcagtcgttcatgcattgaagatttggcgtcattatcttttcggtactcgtacagaagtgtacaccgatcataagagtttaaagtatatctttactcagccggatctgaacatgagacaaaggagatggttggaattaattaaggattatgacatgggaattcattatcatccgggaaaggctaatgttgtagcagacgctcttagcagaaaaggctattgcaatgctacagaaggacgacagttgccattggaattatgcaaggaatttgaaagattaaatttgggaattgtcggtaaaggtttcgttgcagccttagaagcgaagcccactctaattgatcaagttagagaagcccaaattaattatcctgatattcaagagatcaagaagaatatgagaagaggaaaagctattggtttcttggaggatgagcacggaactgtatggttgggtgagagaatctgtgtccccgacaacaaagacttaaaggatgcaattctgaaagaagctcatgatactttatactccattcaccctggtagtactaagatgtaccaggatcttaaggaaagattttggtgggcaagtatgaagcgtgaaatcgcagaatacgtagcagtatgtgatgtttgtcagcgagtcaaggcagaacatcagaaacccgccggtttgttgcaacctttgaagattcctgaatggaaatgggaagaaattggtatggattttattactggtttacccagaacgtcatcaggccatgactctatttgggtgatagtcgacagacttaccaaagtggctcattttattccggtaaaaacaacctattccggaagtcgcttagcggaattgtatatggcaaggattgtgtgtttgcatggtgtccctaagaagatagtgtctgatcgaggcagtcagtttacttcaaatttttggaagaaacttcaggaagagatgggttctaagctgaactttagtactgcttatcatccgcagacagacggacaaaccgaaagggtgaatcaaattttggaagacatgttgagagcttgtgctctagatttcggtggaagttgggataagaatctaccctatgcagaattttcatacaacaacagttatcaagctagtttacagatggctccgtacgaagcactgtatggtcggaagtgccgcactccgcttttgtgggatcaaacgggagaacgtcaggttttcggaacggatatcctaagggaagcagaagaaaaggtaaagatcattcaagaaagattgcgtgtggctcagtctcgtcataagagttatgccgacaatcgccgcagagatttgagttttgaagagggagattatgtgtatcttcgtgtcacgcctctacgaggagttcatcgttttcataccaagggaaaattggcaccgcgttttgtgggaccttataagattgtcagtagaagaggggaggtcgcttatcagttggagttacctcaatctttggcaggagtacataatgtgttccatgtgtcgcaattgaaaaagtgtttaagggtacctaccgaagaagctaatattgagcagatagaagtccaagaggatttgacttatgttgagaaaccaatccgtatcctggaaacaaatgagagaagaaccaggaatcgagttatccgtttttgcaaagtccagtggagtaatcactcggaagaagaatcaacttgggaacgagaagatgaattgaagtcagctcatccgcacctgtttgccagttcttccgaatctcgaggacgagattctgtt

SEQ ID NO: 15163 - DNA, 4737 bp, Oryza sativa
  Clone ID: TFbOSC401523j.C1.o2.fg
atgatgatggaccgcggaggggtttggatggaggggaaacgatgccgaggacggccttgccgctgcgatgccggaggtgatggggggggtgtggccgaccggtgcacggcgaggagggacgggcggccgaacaactccggcgaggcggacggagaggttcgcggcgacgttccggcgaaaccgagggcaggccggggtggagggcgatgcggcgtcgccgagggaggagacggcgacgtcggccgacgctctggcgcggcgaccggggcagccggaggagatgtcgacgaggaggaaggtgaggccggcgcgggcgacggtgttccggcgatgttcgggcgaggaggaggtgataccggggatgagggcggcgtcgtggagccgaggaaggtggtgaacactcgcagcaacgggaatggccccaacaaccccaataacaataacaatgaagagaatcccactcttgctcaagttcttgctcaacagacacagctaatgaacatgatgatgcagcaacttcagaaccagcagaaccaaggaaataaccatgcacctcctcagaacaagttagcagaatttcttcgtgtgaggccgcctattttctctagtaccactaatcctgttgaagctggtgattggctgcatgccatagagaagaagttggatttgcttcaatgcactgatcaggaaaaggtctcatttgcatcacaccagttgcatggccctgcctttgaatggtgggatcacttccgcctgaataggactaccactgaacctatcacttggcttgagttcaccgctgctttccggaagacgcatataccatcgggagtggtgtctctcaagaagaaggaattcaggtcgctcacccagggatctcgctctgttacggagtatctacacgagttcaatcgtctggctcgttatgctccggaagatgtgcgcaatgatgaagagcgccaggagaagttcttggaaggacttaatgatgagctttcttacccactcatgaccggagattattctgatttccagaagttagtggataaggctattcgtcaggaagacaagtacaaccgcatggagcagaagaaacgtcggattgctcaattgaagacacaacaggggaatattcagaagccgcgtcttactttaggaccccagtccatgccacagggaggttcttcgtctattgttcgtccgcagcgtcagttcttcaacaacaatgctggcaacaacatccgcaatcaagctccacgtcctgttgcagctccagcacaacaacaacctgtcaagagggagcaaggcagcaagcccgtggtgtgtttcaactgtggagacccaggacattatgctgacaagtgtccgaagccccgacgcgtgaaggttgtccctgctcagagcaactctgctgtaccagcatcaaaggcccgtgttaatcatgttgctgctgcagaagctcaagatgctccagatgtgattttgggtacgttccttgttaactcagttcctgcaacagtgcttttcgattctggtgctacacattcattcttatctatgagttttgcgggaaatcatgggatggaagtagaagatcttagacgtcctttgatggttagtaccccaagtaatcaagcactctctttgcaacgtagcccctctgtcagaatagaaattcaaggtgtaccatttcgggccaatcttatcctgttagaatccaaagaccttgatgtcatcctagggatggactggttagccagatataaaggtgtgatagactgtgctaacagaaaagtaactctcaccagtaatgatggtcgagttgtgactgttcatgcattatcttctgagtctttaaggtcaagactgaaccagataactttggaagagattcctatagtccgggagtatcccgatgtgttccctgatgatttacctggtatgcctcctaaaagggatatagagttcagaatagatttggtactaggaacaactccgatccataagagaccttatagaatggcagctaatgagttggcagaagtcaaaaggcaagtagacgatttgcttcagaaaggatacatcagaccaagttcatctctatggggagctccagttatttttgtggaaaagaaagatcatacccagaggatgtgtgtggactatcgtgcactaaatgatgtgactatcaagaataagtatccactacccagaattgatgatttgtttgatcagcttaaaggtgccaccgttttctccaagatagatcttcgatcaggatatcaccagttgagaatcaaagaggaagatatacctaagacagcttttaccactaggtatggattgttcgaatgtactgttatgtcttttggacttaccaatgcccctgttttcttcatgaacttgatgaataaggtgtttatggaatacctagacaagttcgtggtggtctttattgatgacattcttatctactcccgaaccaaagaagagcatgaagaacattttcgccttgcattagagaagctacgagaacatcaactgtatgctaagtttagcaagtgtgaattttggttgtctgaagtgaagttccttggtcacgtcatctcagcaggaggagttgccgtcgatcctagtaatgtggaatccgtaaccaactggaaacaaccaaagacagtttcagagattcgcagtttcttaggcctcgcaggatattaccggaggtttatagagaatttttccaagattactaagcccatgacacgactgcttcagaaagatgtgaagtacaagtggtcggaagaatgtgagcagagttttcaagagttgaagaatcgcttaatatcagctcctattttaattttacctgatccaaagaagggtttccaagtgtattgcgatgcatccaaacttgggttaggttgtgttctgatgcaagatgggaaggtggttgcctatgcatctcgtcagttacgtccgcatgagaagaactaccctactcatgatcttgaattagctgcagtagttcatgcgttgaagatttggcgtcattatctcttcggtactcgtacagaggtatataccgatcataagagtttaaagtatatctttactcagccggatctgaacatgagacaaaggagatggctggaattaattaaggattatgacatgggaattcattatcacccgggaaaggctaatgttgtagcagacgctcttagcaggaaaggctattgcaatgctacggaaggacgacagttgccgttggaattatgcaaggaatttgaaagattaaatttgggaattgtcagtagaggtttcgttgcagccttagaagcgaagcccactctaattgatcaagttagagaaacccaaattaatgatcctgatattcaagaaatcaagaagaatatgagaagaggaaaatctattggtttcttggaggatgagcaaggaactgtatggttgggtgagagaatttgtttccccgacaacaaagatttaaagaatgcaattctgaaagaagctcatgataccttatactccattcaccctggtagtaccaagatgtaccaggatctcaaggaaagattttggtgggcaagtatgaagcgtgaaatcgcagaatacgtagcagtatgtgatatttgtcagcgagtcaaggcagaacatcagaaacctgccggtttgctgcagcctttgaagattcctgaatggaagtgggaagaaatcggtatggattttatcactggtctacccagaacgtcatcaggccatgactctatttgggtgatagtcgacagacttaccaaagtggctcatttcattccggtaaagacaacttatttcggaagtcgcttagcggaattgtatatggcaaggattgtgtgtttgcatggcgtccctaagaaaatagtgtctgatcgaggcagtcagtttacttcaaatttttggaagaagcttcaggaagagatgggttctaagctgaactttagtactgcttatcatccgcagacagacggacagaccgaaagggtgaatcaaattttggaagacatgttgagagcttgtgctttagacttcggtggaagttgggataagaatctaccttatgcagaattttcgtacaacaacagttatcaagctagtcttcagatggctccttacgaagcactgtatggtcgaaagtgccgcactccgcttttgtgggatcaaacgggagaacgtcaggttttcgggactgatatcctgagggaagcagaagaaaaggtgaaaatcattcaagaaagattgcgtgtggcccagtctcgtcataagagttatgccgacaatcgccgcagagatttgagttttgaagaaggagattatgtgtatcttcgtgtcacgcctcttcgaggggttcatcgttttcacaccaaaggaaaattggcaccgcgttttgtgggaccttataagattgtcagtagaagaggagaggttgcttatcagttggagttacctcaatctttggcaggagtccataatgtgttccatgtgtcgcaattgaaaaagtgtttaagggtacctaccgaagaagctaatcttgaacagatagaagtccaagaggatctgacctatgttgagaaaccaatccgtatcttggaaatagatgagagaagaaccagaaatcgagttatccgtttttgcaaagtccagtggagtaatcactcggaagaagaatcaacttgggaatga

SEQ ID NO: 15164 - DNA, 3993 bp, Oryza sativa
  Clone ID: TFbOSC401566j.C1.o14.fg
atggtgcgctgcggtggattgtgttatgcaaggggtattgtcacagctcctttccgagctcctggtttggaatggtatattcctggtttggagatagaactgtgcagccgggatggttgttcagaatggttgggcctatacaacaggatgccgcgctacaagcctgagtacttgtttggtgttgagggatttgtccaggagttgcgtacaatgtcctttgccataggatttgggactgcccctttttatgcccagattcctcatgatcgtcacgaagagaagtgccgagtcaaagtcaccttgaacagtaatagtgaagatatcccctcagtgatgttcgaagctggaggaagaaactacatccatgcatgtcaggaggtggcaaggatcgccataggagagctccgcgatcgctacagtgatcagttggccgacactgagtatcgctaccatcctcgtcaaccacagggaagtgaccgtggcagctaccttgagactgaaggaattgagaatgatgctaccacaaggcatttggttgagatgctgtgggctatggatgaaacccgtgcggagaccgtgttagcaggtcaagatcgtgaagatcggaatcgtggtaagatttgcaagctagaggacaaggtggatcgtttggagaaggaactagccgcattaaagggagaagcaccaccgcagaaggccaggattcatcttaccgcaaggaagagagctctatttgtccctcgctaccaattggcgccaaaggtccgtgtggtggagaaagaagttaccccagccccagcggatcctccggtcgtcaataacaagttagcagaatttcttcgtgtgaggccgcctattttctctagcaccactaatcctgttgaagctggtgattggctgcatgccatagagaagaagttggatttgcttcagtgcactgatcaggagaaggtctcatttgcatcacaccagctgcatggccctgcctctgaatggtgggatcacttccgccttaacaggactactgctgaacctatcacttggcttgaattcaccgctgctttccggaagacgcatataccatcgggagtggtgtctctcaagaagaaggaattcaggtcgctcactcaggggtctcgctctgttacggagtatctgcacgagttcaatcgtctggctcgttatgctccggaagatgtacgcactgatgaagagcgccaggagaagttcttggaaggacttaataatgagctttcttatccactcatgactggagattatcctgatttccagaagttagtggataaggctattcgccaggaggacaagtacaaccgcatggagcaaaagaaacgccggattgctcaattcaagacacaacaggggaataatcagaggccgcgtcttactttaggaccccagtccatgccacagggaggttcttcgtctgttgttcgtccgcagtgtcagttcttaaacaacaacgcagtcaacaacatccgcaatcaagctccacgtccagttgtagcctcgacgcagcaacaacctgccaagagggagcaaggcagcaagcccgtggtgtgtttcaactgtggagacccaggacattacgctgacaagtgtccgaagccccgacgcgtgaaggttgtccctgctcagagcaactctaccgcaccagcatcaaaggcccgtgtcaatcatgttgctgctgcagaagctcaagatgctccagatgtgattttgggtacgtttcttgttaacttagttcctgcaacagtgcttttcgattctggtgctacacattcattcttatctatgagttttgcgggaaatcatgggatggaagtagaaaattttagacgtcctatgatggttagtaccccaagtaatcaggcactctatttgcaacgtagcccctctgtcagaatagaaattcaaggcataccatttctggccaatcttatcctgttagaatccaaagaccttgatgtcatcctagggatggactggttagccagatataaaggtgtgatagactgtgctaacagaaaagtaactctcacgagtgatgatggtcgagttgtaactgttcatgcattgtcttctgagtctttaaggtcaagactgaaccaaataactttggaagagattcctatagtccgggagtatcctgatgtgttcccagatgatttacctggtatgcctcctaaaagggatatagagttcagaattgatttggtaccaggaacaactccaatccataagagaccttatcgaatggcagccaatgagttggcagaagtcaagaggcaagtggacgatttgcttcagagagggtacatcagaccgagttcatctccatggggagctccggttatttttgtcgaaaagaaagatcatacccagaggatgtgtgtggactatcgtgcactaaatgatgtgactatcaagaataagtatccgctgcccagaattgatgatttgtttgatcagcttaaaggtgctaccgttttctccaagatggatcttcgatcagggtatcaccagttgagaatcaaagaggaagatatacctaagacagcttttaccactaggtatggattgtttgaatgtactgttatgtcttttggacttaccaatgcccccgctttcttcatgaacttgatgaataaggtgcttatggaatacctagacaagttcgtggtggtctttattgatgacattcttatctactcccgaaccagagaagagcatgaagaacatcttcgctttgcactagagaagctacgagaacatcaactgtatgccaagtttagttgtgttctgatgcaagatgggaaggtggttgcctatgcatctcgtcagttacgcccgcatgagaagaactaccctactcatgatcttgagttagctacagtagttcatgcgttgaaaatttggcgtcattatcttttcggtactcgtacagaggtgtataccgatcacaagagtttaaagtatatctttactcagccggatctgaacatgagacaaaggagatggctagaattaattaaggattatgacatgggaattcattatcacccaggaaaggctaatgttgtagcagacgctcttagcaggaaaggctattgcaatgctacggaaggacgacagttgccattggaattatgcaaggaatttgaaagattaaatttggaaattgtcagtagagctttcgttgcagccttagaagcgaagcccactctaattgatcaagttagagaagcccaaattaatgatcctgatattcaagaaatcaagaagaatatgagaagaggaaaggctatcggtttcttggaagatgagcaaggaactgtatggttgggtgagagaatctgcgtccccgacaacaaagatttaaaagatgcaattctgaaagaagctcatgatactttatattccattcaccctggtagtaccaagatgtaccaggatctcaaggaaagattttggtgggcaagtatgaagcgtgaaatcgcagagtacgtagcagtatgtgatgtttgtcagcgagtcaaggcagaacatcagaaacccgccggtttattgcagcctttgaagattcctgaatggaaatgggaggaaatcggtatggatttcatcactggtctacccagaacgtcatcaggccatgactctatttgggtgatagtcgacagacttaccaaagtggctcatttcatcccagtaaagacaacctattccggaagtcggttggccgaattgtatatggcaaggattgtgtgtttgcatggcgtccctaagaaaatagtgtctgatcgaggcagtcagtttacttcaaatttttggaagaagcttcaggaagagatgggttctaagctgaactttagtactgcttatcatccgcagacagacggacaaaccgaaagggtaaatcagattttggaagacatgttgagagcttgtgctttagacttcggtggaagttga

SEQ ID NO: 15165 - DNA, 2256 bp, Oryza sativa
  Clone ID: TFbOSC401688j.C1.o7.gm
atggtgaacactcgcagcaatgggaatggtctcaacaacctcaacaacaacaaccctaacaacaacaatggagagaatcccactctggcccaagagaaggtctcatttgcatcacatcagttgcatggccctgcctctgaatggtgggatcacttccgccttaacaggactactgctgaacctatcacttggcttgaattcaccgctgctttccggaagacgcatataccatcgggagtagtgtctctcaagaagaagaagttcaggtcgcttactcagggatctcgctctgttacggagtatctgcacgagttcaatcgtcttgctcgttatgctccggaagatgtgcgcaatgatgaagagcgccaggagaagtttttgggaggacttaatgatgagctttcttacccactcatggttggagattatcctgatttccagaaattagtggataaggctattcgtcaggaggacaagtacaatcgcatggagcagaagaaacgtcggattgctcaattcaagacacaacagggaaataatcagaagccgcgtcttactttaggaccccagcccatgccacagggaggttcttcgtctgttgttcgtccgcaacgtcagttcttcaacaacaatgctggcaacaacatccgtaatcaagctccacgtcctgttgcagctccagcacagcaacaacctgccaagagggagcaaggcagcaagcccgtggtgtgtttcaactgtggagacccaggacattatgctgacaagtgtccgaagccccgtcgcgtgaaggttgtccctgcccagaataactctgctgtaccagcatccaaggctcgtgtaaatcatgtcgctgctgcagaagctcaagatgctccagatgtgattttggtccgagagtatcctgatgtgttcccagaggatttacctgaaaggatacatcagaccgagttcatcaccatggggagctccggatattatcggaggtttatagagaatttttccaagattgctaagcccatgacacgactgcttcagaaagatgtaaagtacaagtggtcggaagaatccttagaagcgaagcccactctaattgatcaagttagagaagcccaaattaatgatcctgatattcaagagatcaagaagaatatgagaagaggaaaagctattggtttcttggaggatgagcacggaactgtatggttgggtgagagaatctgtgtccccgacaacaaagatttaaaggatgcaattctgaaagaagctcatgatactttatactccattcaccctggtagtactaagatgtaccaggatcttaaggaaagattttggtgggcaaccgtcgccgtcgctcgggaaggccgccgtcgtcatcgccaagtcgccgccgtcctcgtccgccccttcgcagccgtcggaacccgccggagcttcgtcgccgtcgacaacccgaagatgccgcgttacaagcctgagtacctgtttggtgttgagggttttgtccaggagttgcgtacgatgtcctttgtcattggatttgggactgcccttttttatgcccagattcgtcatgatcgtcatgaagaaaagtgccgagtcaaagtcaccttgaacagcaatagtgaagaggtcccctcagtgatgtttgaagctggaggaagaaactacatccatgcatgtcaggaagtggcaaggatcgccataggagagctccgtgatcgctacagtgatcggttggccgatactgagtatcgctaccatcctcgtcaaccacagggaagtgaccgtggcagttaccttgagactgaaggaattgagaatgatgctactacaaggcatttggttgagatgctgtgggctatggatgaaagtcgtgcggagactgtgttagcagctcaagatcgtgaagatcggaatcgtggtaagatttgcaagctagaagacaaggtggatcgcttggagaaggaattagccgcattgaagggagaagcaccgccgcagaaggccaggattcgtctcaccgcaaggaagagagctttgtttgtccctcgttatcaattggcgccaaagatccgcgtggtggagaaagaagttgccccagcaaatcctcccgtcatcatcataagtagtgatgaagaagaagaacccaagcgcaacaattccaagtttgagtgggtagctatcaaagatgaggaagatgagccgaacgagccttcaatcgacctcctatgctcggaagaactagagtga

SEQ ID NO: 15166 - DNA, 2985 bp, Oryza sativa
  Clone ID: TFbOSC401832j.C1.o3.gm
atggtgaacactcgcagcaacgggaatggtcccaacctcaacaaccccaataacaacaacaatggagagaatccaacccttgctcaagttcttgcacaacagactcagttaatgaacatgatgatgcagcaacttcagaaccagcagaaccagggaaataaccatgcacctccccagaacaagctagcagaatttcttcgtgtgaggccgcctattttctctagtaccactaatcctgttgaagctagtgattggttgcatgccttagagaagaagttggatttgcttcagtgcactgatcaggagaaggtctcatttgcatcacatcagttgcatggccctgcctctgaatggtgggatcacttccgtctgaataggactactgctgaacctatcacttggcttgaattcaccgctgcttttcggaagacgcatataccatcgggagtggtgtctctcaagaagaaggagttcaggtcgctcacccagggatctcgctctgttacggagtatctgcacgagttcaatcgtctggctcgttatgctccagaagatgtgcgcaatgatgaagagcgtcaggagaagttcttggaaggacttaatgatgagctttcttacccactcatgactggagattattctgatttccagaaattagtggataaggctattcgtcaggaggacaagtataatcgcatggagcagaagaaacgccggattgctcaattcaagatacaacaggggaataatcagaagccgcgtcttattttaggacaccagtctatgccacatggaggttcttcgtctgttgttcgtccgcagcgtcagttcttcaacaacaatgctggcaacaacaaccgcaatcaagctccacgccttattgcagcctcgacacagcaacaacctgccaagagggagcaaggcagcaagcttgtggtgtgtttcaactgtggagacccaggacattatgctgacaagtgtccgaagccccgacgcgtgaaggttgtccctgcccagagcaactctaccgcaccagtatcaaaggcccgtgtcaatcatgttgctgctgcagaagctcaagatgctctagatgtgattttggacgatttacctgccaatgagttggcagaagttaagaggcaagtagatgatttgcttcagaaaggatacatcagaccgagttcatctccatggggagctccggttatttttgtggaaaagaaagatcatacccagaggatgtgtgtggactatcgtgcactaaatgatgtgactatcaagaataagtatccactacccagaattgatgatttgtttgatcagcttaaaggtgccaccattttctccaagatagatcttcgatcagggtatcatcagttgagaatcaaagaggaagatatacctaagacagcttttaccactaagtatggattgttcgaatgtactgttatgtcttttggacttaccaatgcccctgctttcttcatgaacttgatgaataaggtgtttatggagtacctagacaagttcgtggtggtctttattgatgacattcttatctactcccgaaccaaagaagagcatgaagaacatcttcgccttgcattagagaagctacgagaacatcaactgtatgctaagtttagcaagtgtgaattttggttgtttgaagtgaagttccttggtcacgtcatctcagccggaggagttgccgtcgattctagtaatgtggaatccgtaaccaactggaaacaaccaaagacagtttcagagattcgcagtttcctaggcctcgcaggatattaccggaggtttatagagaatttttccaagattgctaagcccatgacacgactgcttcagaaagatgtgaagtacaagtggtcggaagaatggcgtgacattgatcaagttagagaagcccaaattaatgatcctgatattcaagagatcaagaagaatatgagaagaggaaaagctatcggtttcttggaggatgagcatggaactccgtgcgccgccgtcgctccagccgtcgccgtcgctcgggaaggccgacgtcgtgttcgccgtcgcgtcgccgtcctcgtcctccccttcgccaccgccgaagaccgccggagcgtcatcgccgtcgtcgacccgaagagcttcgccgcttcctcctcgtcgccgtcgccgtccgttgatcttccgccgtcgttttggtcgccgcgaagattggagacaatccccttcttcgttgctgacattactgtccctgccgccggccgccaccccgccagatcaggccggggcggcacggatctagcggtcgccgccgccgccaccggggcgactcccctggccaccggagcaggctggcgagaagccccgccgccgccatccttacggtctttgctggcgaccgctcaggcagcggcgaggtggaggaggaagaaggagcgggaaggggtggccggacttgtcgcctccggagccgtcccgggggtagggcgacgcaagagcgtgacggttgacgctgtgaggtcccttcagcggtgggaacttcatggctgcggatcaatggaggcggtggcgatgaccacggatcctgaggcggggcccccatttgccaccccttatggcggatctggctggtggcggcgcgccaacggtgttgccaggaggccggtggctggggccggcgcgactcgggaaggtggcgacaacgggcagccgaagaaggagaatagatggggaccgacggcagcggggatggagatgatggcggggatggaaggcggcggcgaggatggtgacagcgggccggatccagtcgcgccggagtcgggcagatctggtgtgaggcaagcccgcagtggtggcggcgctgcggagttcgcgggctcatggcgatggtggtggcagcgactggacagcggcgacaacaggtggctggccaacggtagcatcggctgccggctactgtggcaacgacgctag

SEQ ID NO: 15167 - DNA, 4515 bp, Oryza sativa
  Clone ID: TFbOSC401836j.C1.o9.fg
atggttgttcagaatggttgggcctatgcaacaggggtttacacacatatgccgcgctacaagcctgagtacttgtttggtgttgagggttttgtccaggagttgcgtacaatgtcctttgtcgttggatttgggactgcccctttttatgcccagattcctcatgatcgtcatgaagagaagtgccgagtcaaagtcaccttgaacagtaatagtgaagatatcccatcggtgatgttcgaagctggaggaagaaactacatccattcatgtcaggaagtggcaaggatcgccataggagagctccgtgatcgttacagtgatcagttggctgacactgagtatcgttaccatcctcgtcaaccacagggaagtgaccgtggcagttaccttgagactgaaggaattgagaatgatgctaccacaacacatttggttgagatgctatgggctatggatgaaagtcgtgcggaaactgtgttagcggcccaagatcgtgaagattggaatcgtggtaagatttgcaagctagaagacaaggtggatcgtttggagaaggaactagccgcgttgaagggagaagcaccacctcagaaggtcaggattcgtcttaccgcaaggaagagagctctatttgtccctcgctatcaattggcgccaaaggtccgtgtggtggagaaagaagttgccccagcagatcctccggtcgtcaacatggtgaacactcgtagcaacgggaatggtcccaaccccaacaaccccaataacaataacaatggggagaatccaacccttgctcaagttcttgctcaacagactcagctaatgcacatgatgatgcaacaacttcagaaccagcagaaccaaggaaataaccatgcacctcctcagaataagttagcagaatttcttcgtgtgaggccgcctattttctctagtaccactaatcctgttgaagctgctgattggctgcatgccatagagaagaagttggatttgcttcagtgcactgatcaggaaaaggtctcatttgcatcgcatcagttgcatggccctgcctctgaatggtgggatcacttccgtctgaataggactactgctgaacctatcacttggcttgaattcaccgctgcttttcggaagacgcatataccatcgggagtggtgtctctcaagaagaaggagttcaggtcgcttacccagggatctcgcactgttacggagtatctacacgagttcaatcgtctagcccgttatgctccggaaaatgtacgcaatgatgaagagcgtcaggagaagttcttggaaggacttaatgatgagctttcttacccactcatgactggagattattctgatttccagaaattagtggataaggctattcgtcaggaggacaagtataatcgcatggagcagaagaaacgccagattgctcaattcaagacgcaacaggggaataatcagaggccgcgtcttactttaggaccccagtctatgccacatggaggttcttcgtctgtcgttcgtccgcagcgtcagttcttcaacaacaatgttggcaacaacatccgcaatcaagttccacgtcctgttgcagctccaacacaacaacagcctgccaagagggagcaaggtagcaagcccgtggtgtgtttcaactgtggagacccgggacattacgctgacaagtgtccgaagccccgacgcgtgaaggttgtccctgtccagagcaactctaccgcaccagcatcagaggctcgtgtcaatcatgttgcagctgcagaggctcaagatgctccagatgtgattttgggtacgttccttgttaactcagttcctgcaacagtgcttttcgattctggtgctacacattcatttctatctatgagttttgcgggaaatcatgggatggaagtagaagatcttagacgtcctttgatggttagtaccccaagtaatcaagcactctctttgcaacgtagcccctctgtcagaatagaaattaagggagtaccatttctagccaatcttatcttgttagaatccaaagaccttgatgtcatcctagggatggattggttagctagacataaaggtatgatagactgtgccaacagaaaagtaactctctccagcaatgatggtcgagttgtaactgttcatgcattgtcttctgagtctttaaggtcaagactgactcaagtaactttggaagagattcctatagttcgggagtatcccgatgtgttcccagatgatttacctggtatgccgcccaaaagggatatagagttcagaatagatttggtacctggaacaactccgatccataatagaccttatagaatggcagccaatgagttggcagaagtcaagaggcaagtggatgatttgcttcagaagggatacatcagaccgagttcatctctatggggagctccggttatttttgtggaaaagaaagatcatacccagaggatgtgtgtggactatcgtgcactaaatgatgtgactatcaagaataagtatccgctacccagaattgatgatttgtttgatcagcttaaagataagtttgtggtggtctttattgatgacattcttatctactctcgaaccaaagaagagcatgaagaacatcttcgccttgcattggagaagctacgagaacatcaactgcatgctaagtttagcaagtatgaattttggttgtctgaagtgaaattccttggtcacaaagatgtgaagtacaagtggtcagtagaatgtgagcagagttttcaagagttgaaaagtcgcttaatatcagctcctattttgattttacctgatccaaagaagggtttccaggtgtattgcgatgcatccaaacttgggttaggttgtgttctgatgcaagatgggaaggtggttgcctatgcatctcgtcagttacgcttgcatgagaagaactaccctactcatgatcttgaattagctgcagtagttcatgcgttgaagatttggcatcattatcttttcggtactcgtacagaggtatacactgatcacaagagtttaaagtatatctttactcagccggatctgaacatgagacaacggagatggttggaattaattaaggattttgacatgggaattcattatcacccgggaaaggctaatgttgtagcagatgctcttagcaggaaaagctattgcaatgctacggaaggacgacagttgccattggaattatgcaaggaatttgaaagattaaatttgggaattgtccgaagaggtttcgttgcagccttagaagcgaagtccactctaattgatcaagttagagaagcccaaattaatgatcctgatattcaagagatcaagaagaatatgagaagaggaaaagctatcggtttcttagaggatgagcaaggaactgtatggttgggtgagagaatttgtgtccccgacaacaaagatttaaaagatgcaattctgaaagaagcccatgatactttatactctattcaccctggtagtacaaaaatgtaccaggatcgcaaggaaagattttggtgggcaagtatgaagcgtgaaatcgcagaatacgtagcactatgtgatgtttgtcaacgagtcaaggcagaacatcagaaacctgccggtttgctgcagcctttgaagattcctgaatggaaatgggaagaaatcggtatggattttatcactggtttgcccagaacgtcatctggccatgactctatttgggtaatagtcgacagacttaccaaggtggcacatttcattccggtaaagacaacttattccggaagtcgcttagcggaattgtatatggcaaggattgtgtgtttgcatggcgtccctaagaagatagtgtctgatcgaggaagtcagtttacttcaaatttttggaagaaacttcaggaagagatgggttctaagctgaactttagtactgcttatcatccgcagacagacggacaaaccgaaagggtgaatcaaattttggaagacatgttgagagcttgtgctttagatttcggtggaagttgggataagaatctaccctatgcagaattttcgtataataacagttatcaagctagtcttcagatggctccgtacgaagcactgtatggtcggaagtgccgcactccgcttttgtgggatcaaacgggagaacgtcaggttttcgggacagatatcctaagggaagcagaagaaaaggtgaaaatcattcaagaaagattgcgtgtggctcagtctcgtcataagagttatgccgacaatcaccgcagagatttgagttgtatcctaagggagattatgtgtatcttcgtgtcacgcctcttcgaggagttcatcgttttcacaccaaaggaaaattggcaccgcgttttgtgggaccttataagattgtcagtagaagaggagaagttgcttatcagttggagttacctcaatctttggcaggagtccataatgtgttccatgtgtcgcaattga

SEQ ID NO: 15168 - DNA, 1370 bp, Oryza sativa
  Clone ID: TFbOSC401920j.C1.o4.np
gcgagggggcggccggggagcggcgaaaacgagcggaggaggcgaaaagggctccgttcgtgccgaagcaccgccgttcgccggtgagcttgcgccgtccgagctgtcgagccgccgagccgccgccgccggtggtgacgtcatcgctgacgtcatcgtccccgtctcccgtgagccgtggaagtggaaacaataataatgaagataacccaactcttgctcaagttctggctcaacagactcagttaatgaacatgatgatacagcagatgcagaaccagctcaaccaaggaaacaacaatgctccaccgccgcagaacaagttagctaattttcttcgtgtgaggccacctaccttttctagcactactaacccagtggaagcaggtgattggttgcacactattgagaagaagttagatttgcttcagtgcactgatcaggagaaggtctcatttgcatcacaccaattgcatggccctgcctctgaatggtgggatcacttccgcctgaataggactactgctgaacctatcacttggcttgaattcaccgctgctttccggaagacgcatataccatcgggagtggtgtctctcaagaggaaggaattcaggtcgctcacccagggatctcgctcagttacggagtatctgcacgagttcaatcgtctggctcgttatgctccggaagatgtgcgcactgatgaagagcgccaggagaagttcttggaaggacttaatgatgagctttcttacccactcatgactggagattatcatgatttccagaagttagtggataaggctattcgccaggaggacaaatacaatcgcatggagcagaagaaacgccggattgctcaattcaagacacaacaggggaataatcagaagccgcgtcttactttaggaccccagtctatgccacagggaggttcttcgtctgttgttcgtccgcagcgtcagttcttcaacaacaatgctggcaacaacatccgtaatcaagctccacgtcctgttgcagcctcgacacagcaacaacctgccaagagggagcaaggcagcaagcccgtggtgtgtttcaactgtggagacccaggacattacgctgacaagtgtccgaagcctcgacgtgtgaaggttgtccctgcccagagcaactctaccgcaccagcgccaaaggcccgtgtcaatcatgttgctgctgcagaagctcaagatgctccagatgtgattttgggtacgtttcttgttaacttagttcctgcaacagtgcttttcgattctggtgctacacattcattcttatccatgagttttgcgggaaatcatgggatagaagttgagtttatgaagttccccctctgg

SEQ ID NO: 15169 - DNA, 3039 bp, Oryza sativa
  Clone ID: TFbOSC401925j.C1.o12.gm
atggatgatagagaatgtggggcccacctgtcgggcccgtctcctacctccagccggcgccaacgcatcccgcaaccgccgcaccgctcgctcccgcacctcctgggccacgtcgcccacccgaaggtttccttcgccgttgccgtcgccgtgggcctccgccgtcgcctccgagcccctttaaaaggatccccgccgtgctccgccgtcgctccagctgtcgccgccgctcgggaagaccgccgtcgtcatcgccaagtcgccgccgtcctcgtccgccccttcgcagccgtcggaacccgccggagcttcgtcgccgtcgacaacccgaagcgccgccgttcgccggtgagcgtgcgccgcccgagccgtccgctccgccgagccgccgccgccgtcggtgacgtcattgctggcgtcatcaaggccgtccgccgtggttccggagaccgtccaccgttcgtcgtcgcctcccactcattcctcgccgccgttcgccgtcgcccctccgtgccggccgaatcctcgggaagtgaccgtggcagttatcttgagactgaaggaattgagaatgatgctaccacgaaacatttggttgagatgttgtgggctatggatgaaagtcgtgcggagactgtgttagcagctcaagatcgtgaagatcggaatcgtggtaagatttgcaagttagaagacaaggtggatcgtttggagaaggaattagccgcattgaagggagaagcaccgccgcagaaggccaggattcgtcttaccgcaaggaagagagctctatttgtccctcgctatcaactggcgccaaaggttcgtgtggtggagaaagaagttgctccagctcaagcggatcctccggtcatcatcataagtagtgatgaagaagaagaatctaagcgcaacaattccaagattgagtgggagaaggtctcatttgcatcacatcagttgcatggccctgcctctgaatggtgggatcacttccgccttaacaggactactgctgaacctatcacttggcttgaattcaccgctgctttccggaagacgcatataccatcgggagtagtgtctctcaagaagaaggagttcaggtcgctttcccagggatctcgctctgttacggagtatctgcacgagttcaatcgtcttgctcgttatgctccggaagatgtgcgcaatgatgaagagcgccaggagaagtttttgggaggacttaatgatgagctttcttacccactcatggttggagattatcctgatttccagaaattagtggataaggctattcgtcaggaggacaagtacaatcgcatggagcagaagaaacgtcggattgctcaattcaagacacaacagggaaataatcagaagccgcgtcttactttaggaccccagcccatgccacagggaggttcttcgtctgttgttcgtccgcaacgtcagttcttcaacaacaatgctggcaacaacatccgtaatcaagctccacgtcctgttgcagctccagcacagcaacaacctgccaagagggagcaaggcaacaagcccgtggtgtgtttcaactgtggagatccaggacattatgctgacaagtgtccgaagccccgacgcgtgaaggttgtccctgcccagaataactctgctgtaccagcatccaaggctcgtgtaaatcatgtcgctgctgcagaagctcaagatgctccagatgtgattttggtccgggagtatcctgatgtgttcccagatgatttacctgccaatgagttggcagaagttaagaggcaagtagatgatttgctacagaaaggatacatcagaccgagttcatcaccatggggagctccggttatttttgtggaaaagaaagaccatactcagagaatgtgtgtggactatcgtgcactaaacgatgtgactattaagaataagtatccactacccaggattgatgatttgtttgatcaacttaaaggtgccactgttttctccaagatagatcttcgatcagggtatcatcagttgagaatcaaagaggaagatatacctaagacagcttttaccactaggtatgggttgttcgaatgtactgttatgtcttttggacttaccaatgcccctactttcttcatgaacttgatgaataaggtgtttatggaatacttagacaagttcgtggtggtctttattgatgatattcttatctactctcgaaccaaagaagagcatgaagaacatcttcgccttgcattggagaagctacgagaacatcaactgtatgctaagtttagcaagtgtgaattttggttgtccgaagtgaaattccttggtcacgtcatctcagccggaggagttgccgtcgatcctagtaacgtggaatccgtaaccaattggaagcaaccaaagacagtttcagagattcgcagtttcctaggccttgcaggatattatcggaggtttatagagaatttttccaagattgctaagcccatgacacgactgcttcagaaagatgtgaagtacaagtggtcggaagaatccttagaagcgaagcccactctaattgatcaagttagagaagcccaaattaatgatcctgatattcaagagatcaagaagaatatgagaagaggaaaagctattggtttcttggaggatgagcacggaactccgaaggtttccttcgccgttgccgtcgccgtgggcctccgccgtcgcctccgagcccctttaaaaggatccccgccgtgctccgccgtcgctccagctgtcgccgccgctcgggaagaccgccgtcgtcatcgccaagtcgccgccgtcctcgtccgccccttcgcagccgtcggaacccgccggagcttcgtcgccgtcgacaacccgaagcgccgccgttcgccggtgagcgtgcgccgcccgagccgtccgctccgccgagccgccgccgccgtcggtgacgtcattgctggcgtcatcaaggccgtccgccaggaagagttctacaatgaggctgatggtgtggaggattag

SEQ ID NO: 15170 - DNA, 4209 bp, Oryza sativa
  Clone ID: TFbOSC404471j.C1.o39.gm
atggcgtcgaagcggatcctcaaggaactaaaggacctgcagaaagatcctccaacatcatgcagtgcaggtcctgctggtgaggatatgttccattggcaggcaaccattatgggccctccagatagtccctatgctggtggtgttttcttggtgaatattcatttccccccggactaccccttcaaacctccaaaggtgtcttttaagacaaaggtcttccatccaaacatcaatagcaatggaagcatatgcctcgacattcttaaggaacagtggagccctgctttgacaatatctaaggtcttgctttcgatctgctcgctgctcactgaccccaacccggacgaccctcttgtccctgagattgcccacatgtacaagacggaccgtccaaagagagagagagccgccgccgcccgacgccggcgccgctccaagtcgtccgctcgtcggcgccgagatccgcccggccgcctctccgccgggtgccacgccgtggtggaaggctgcctctccgtcccgccgctcgaccgccccctgcctctccgcccggcgtcgtggcccctcgtgccgccggcgaagtcgccgcgggatctgcctcaccgcccgggctgccccgccggccgccgccactgctcgaccaccccgcccgccgccaccgctcacgacgcggaggccggatccgagcgtcggcgcgccggccgcctctccgcctggccggctgtgctccgccgccagccaccgccgctcgaccccgccatcgccgctcagagagctcactaccgtgggcctttgccgccgcctccgagcccctttaaaaggctccccgcttcgccgtcgccgccgtcgctccagccgtgcgccgccgtcgctccagccgtcgccgtcgctcgggaagaccgccgtcgtggtcgccaagtcgccgccgtcctcgtccgcctcttcgctgccgtcggagatcgccggagcttcatcgccgtcgacaacccgaaggtttccgccgtttcctcctcgtcgccgtcgtcgttcgttgttcctccgccgtcgctttggtcgccgatgccgcgctacaagcctgagtacttgtttggtgttgagggttttgtccaggagttgcgtacgatgtcctttgtcattggatttgggaatgcccctttttatacccagattcctcattatcgtcatgaagagaagtgccgagtcaaagtcaccttgaacagcaatagtgaagaggtcccctcagtgatgttcgaagctggaggaagaaattacatccatgcatgtcaggaggtggcaaggatcgccataggagagctccgtgatcgctacagtgatcagttggccgacactgagtatcgctaccatcctcgtcaacctcagggaagtgaccgtggcagctaccttgagactgaaggaattgagaatgatgctaccacaaggcatttggttgagatgctgtgggctatggatgaaagtcgtgcggagactgtgttagcggctcaagatcgtgaagaccggaatcgtggtaagatttgcaagttagaagacaaggtggatcgtttggagaaggaattagctgcgttgaagggagaagcaccgccgcagaaggccagggttcgtctcaccgcaaggaagagagctctatttgtccctcgctatcaattggcgccaaaggttcgtgtggtggaaaaagaagttgccccaaccctagcagatcctccggtcatcatcataagtgatgatgaagaagaaggatccaagcgcacccgttccaagattgagtgggtagcaactcaagatgatgaagacgagccgaatgagccttcaatcgacctccgatgctcggaagaactagacaacgggaatggtcccaacaatcccaataataacaatggagagaaccccactcttgctcaagttcttgctcaacagactcagcttatgaacatgatgatgcaacaacttcagaatcagcagaaccaaggaaataaccatgtacctcctcagaataagttagcagaatttcttcgtgtgaggccgcctgttttctctagtaccactaatcctgttgaagctggtgattggctgcatgccatagagaagaagttggatttacttcagtgcactgatcaggagaaggtttcatttgcatcgcatcagttgcatggccctgcctctgaatggtgggatcacttccgcctgaataggattactgctgaacctatcacttggcttgaattcgccgctgctttccgaaagacgcatataccatcaggagtagtgtctctcaagaagaaggagttcaggtcgcttactcagggatctcgctctgttacggagtatctgcacgagttcaatcgtcttgctcgttatgctccggaagatgtgcgcaatgatgaagagcgccaggagaagttcttggaaggacttaatgatgagctttcttacccactcatgactggagattatcctgatttccagaagttagtggataaggctattcgtcaggaggacaagtacaatcgcatggagcagaagaaacgccggattgctcacttcaaggcacaacaggggagtaatcagaagccgcgtcttactttaggaccccagcctatgccacagggaggttcttcgtctgttgttcatccgcaacgtcagttcttcaacaacaatgctggcaacaacatccgcaatcaagctccacgccctgttgcagcttcaacacagcaacagcctgccaagagggagcaaggcagcaagcttgtggtgtgtttcaactgtggagacccaggacattatgctgacaagtgtccgaagcctcgacgtgtgaaggttgtccctgcccagaacaactctactgtaccagcatcaaaggctcgtgtcaatcatgtcgctgctgcagaagctcaagatgctccagatgtgattttggtccgggagtatcctgatgtgttcccagatgatttacctgaaaggatacatcagaccaagttcgtcaccatggggagctccagttatttttgtggaaaagaaagaccatacccagagaatcttaaaggtgccactgttttctccaagatagatcttcgatcagggtatcaccagttgagaatcaaagaggaagatatatctaagacagcttttaccactagagccctagcgccgtgtgccctagcttcgccgtcgccgccgtcgctccagccgtgcgccgccgtcgctccagccgtcgccgtcgctcgggaagaccgccgtcgtggtcgccaagtcgccgccgtcctcgtccgcctcttcgctgccgtcggagatcgccggagcttcgtcgccgtcgacaacccgaaggtttccgccgtttccttctcgtcgccgtcgtcgttcgttgttcctccgccgtcgctttggtcgccgatgccgcgctacaagcctgagtacttgtttggtgttgagggttttgtccaggagttgcgtacgatgtcctttgtcattggatttgggaatgcccctttttatacccagattcctcattatcgtcatgaagagaagtgccgagtcaaagtcaccttgaacagcaatagtgaagaggtcccctcagtgatgttcgaagctggaggaagaaattacatccatgcatgtcaggaggtggcaaggatcgccataggagagctccgtgatcgctacagtgatcagttggccgacactgagtatcgctaccatcctcgtcaacctcagggaagtgaccgtggcagctaccttgagactgaaggaattgagaatgatgctaccacaaggcatttggttgagatgctgtgggctatggatgaaagtcgtgcggagactgtgttagcggctcaagatcgtgaagaccggaatcgtggtaagatttgcaagttagaagacaaggtggatcgtttggagaaggaattagctgcgttgaagggagaagcaccgccgcagaaggccagggttcgtctcaccgcaaggaagagagctctatttgtccctcgctatcaattggcgccaaaggttcgtgtggtggaaaaagaagttgccccaaccctagcagatcctccggtcatcatcataagtgatgatgaagaagaaggatccaagcgcacccgttccaagattgagtgggtagcaactcaagatgatgaagacgagccgaatgagccttcaatcgacctccgatgctcggaagaactagagtga

SEQ ID NO: 15171 - DNA, 2508 bp, Oryza sativa
  Clone ID: TFbOSC405035j.C1.o5.gm
atgggggagagtggtttgaaacaagaaatggtgaacgcggcgagcccaacgacgatgcagacacaggcagcgccgtgcgccgccgccgttccagacgtcgccgtcgctcgggaagaccgtcgtcgtggtcgccaagtcgtcgccgtcctcgtccgcctcttcgtcgccgccgaagaccgccggagcaccgtcgccgccgtcaacccgaagagcgccgccgcttcttcctcgtcgccgtcgccgtccgttcctcttccgccgtcgctttggtcgccgatgccgcgctacaagcctgagtacttgtttggtgttgagggttttgtccaggagttgcgtacaatgtcctttgtcattggatttgggactgcccctttttatgctcagattcctcatgatcgtcatgaagagaagtgccgagtcaaagtcactttgaacagtaatagtgaagatatcccttcagtgatgttcgaagctggaggaagaaactacatccatgcatgtcaggaggtggcaaggatcgccataggagagctccgtgatcgctacagtgatcagttggccgacactgagtatcgctaccatcctcgccaaccccagggaagtgaccgtggcagctaccttgagactgaaggaattgagaatgatgctaccacaaggcatttggttgagatgctgtgggctatggatgaaacccgtgcagagactgtgttagcagctcaagatcatgaagaccggaatcgtggtaagatttgcaagctagaagacaaagtggatcgtttggagaaggaattagccgcattgaagggagaagcaccaccgcagaaggccagggttcgtcttaccgcaaggaagagagttctatttgtccctcgctatcaattggcgccaaaggtccgtgtggtggagaaagaagttgccccaaccctagcagatcctccagtcatcatcataagtgatgatgaagaagaagaatccaagcgcaaccattccaagattgagtgggtagcaactcaagatgatgaagacgagccgaacgagccttcaatcgacctccgatgctcggaaggactagataccactaatcctgttgaagctggtgattggttgcatgccatagagaagaagttggatttgcttcaatgcactgatcaggaaaaggtctcatttgcatcacaccagttgcatggcactgcctctgaatggtgggatcacttccgcctgaataggactactgttgaacctatcacttggcttgaattcaccgctgctttccggaagacgcatataccatcgggagtggtgtctctcaagaagagggaattcagatcgctcactcagggatctcgctctgttacggagtatttgcacgagttcaatcgtctggctcgttatgctccggaagatgtgcgcaatgatgaagagcgccaagagaagttcttggaaggacttaatgatgagctttcttacccactcatgactggagattatcctgatttccagaagttagtggataaggctattcgtcaggaggacaaatacaaccgcatggagcagaagaaacgtcggattgctcaattcaaggcacaacaggggaatagtcagaagccgcgtcttaccttagaaccccagtccatgccacagggaggttcctcgtctgttgttcgtccgcagcgtcagttcttcaacaacaatgctggcaacaacatccgtaatcaagctccacgccctgttgtagctccaacacagcaacaacctgccaagagggagcaaggcagcaagcccgtggtgtgtttcaactgtggagacccaggacattacgctgacaagtgtccgaagccccgacgtgtgaaggttgtccctgcccagagcaactttaccgcaccagcgccaaaggcccgtgtcaatcatgttgctgctgcagaagctcaagatgctccagatgtgattttggtgaagttccttggtcacgtcatctcagccggaggagttgccgttgatcctagtaatgtggaatccgtaaccaactggaaacaaccaaagacagtttcagagatccgcagtttcttaggcctcgcaggatattatcggaggtttatagagaatttctccaagattgctaagcccatgacacgactgcttcagaaagatgtgaagtacaagtggtcggaagaatacgtcgccgtcgctcgggaagaccgtcgtcgtggtcgccaagtcgtcgccgtcctcgtccgcctcttcgtcgccgccgaagaccgccggagcaccgtcgccgccgtcaacccgaagagcgccgccgcttcttcctcgtcgccgtcgccgtccgttcctcttccgccgtcgctttggtcgccgatggtgggagctttgtgtcaaagtcttgcctggtctttaaccaatgctaatgacgttgatgccctctacgagccgttctccttgaaggaagattgctttgtgctttcaattctgcatggcaaccatcaattcagggaagtggagacatgttaa

SEQ ID NO: 15172 - DNA, 1692 bp, Oryza sativa
  Clone ID: TFbOSC406028j.C1.o24.gm
atggtgaacactcgcagcaacgggaatggccccaacaacaacaataacaataacaatggagagaatcccacacttgctcaagttcttgctcaacagacacagctaatgaacatgatgatgcagcaacttcagaaccagcaaaaccaaggaaataaccatgcacctccccaaaacaagttagcagaatttcgtcgtgtgaggccgcctattttctctagtaccactaatcctgttgaagctggtgattggttgcatgccatagagaagaagttggatttgcttcaatgcactgatcaggaaaaggtctcatttgcatcacaccagttgcatggcactgcctctgaatggtgggatcacttccgcctgaataggactactgttgaacctatcacttggcttgaattcaccgctgctttccggaagacgcatataccatcgggagtggtgtctctcaagaagagggaattcagatcgctcactcagggatctcgctctgttacggagtatttgcacgagttcaatcgtctggctcgttatgctccggaagatgtgcgcaatgatgaagagcgccaagagaagttcttggaaggacttaatgatgagctttcttacccactcatgactggagattatcctgatttccagaagttagtggataaggctattcgtcaggaggacaaatacaaccgcatggagcagaagaaacgtcggattgctcaattcaaggcacaacaggggaatagtcagaagccgcgtcttaccttagaaccccagtccatgccacagggaggttcctcgtctgttgttcgtccgcagcgtcagttcttcaacaacaatgctggcaacaacatccgtaatcaagctccacgccctgttgtagctccaacacagcaacaacctgccaagagggagcaaggcagcaagcccgtggtgtgtttcaactgtggagacccaggacattacgctgacaagtgtccgaagccccgacgtgtgaaggttgtccctgcccagagcaactttaccgcaccagcgccaaaggcccgtgtcaatcatgttgctgctgcagaagctcaagatgctccagatgtgattttggtccgggagtatcccgatgtgttccccgatgatttacctgtgaagttccttggtcacgtcatctcagccggaggagttgccgttgatcctagtaatgtggaatccgtaaccaactggaaacaaccaaagacagtttcagagatccgcagtttcttaggcctcgcaggatattatcggaggtttatagagaatttctccaagattgctaagcccatgacacgactgcttcagaaagatgtgaagtacaagtggtcggaagaatacgtcgccgtcgctcgggaagaccgtcgtcgtggtcgccaagtcgtcgccgtcctcgtccgcctcttcgtcgccgccgaagaccgccggagcaccgtcgccgccgtcaacccgaagagcgccgccgcttcttcctcgtcgccgtcgccgtccgttcctcttccgccgtcgctttggtcgccgatggtgggagctttgtgtcaaagtcttgcctggtctttaaccaatgctaatgacgttgatgccctctacgagccgttctccttgaaggaagattgctttgtgctttcaattctgcatggcaaccatcaattcagggaagtggagacatgttaa

SEQ ID NO: 15173 - DNA, 4005 bp, Oryza sativa
  Clone ID: TFbOSC409249j.C1.o3.gm
gttccccatggtctcctctacccgccgccaccctcgccttcgcctctcgtcgtcggaatcgccctagcgtcgtgtgccctagctttgccgccgccgccgccgctccagccgtgcgccgccgtcgttccagccgtcgccgtcgctcgggaaggccaccgtcgtgatcgccaagtcgtcaccgtcgtcgtccgccccttcgccgccgccgaagaccgccggagcgtcatcgccgtcgtcgacccgaaaagcttcgccgtttcctcctcgtcgccgtcgccgtccgttgatcttccgtcgccgttttggtcgccggtgagttcgccgtgccgcccgctttgtcttggtgctttccgtttgtgtcctcgcgccgccgttcgccggcgagcgtgcgccgcccgagccgtccgccccgccgagccgccgccgccgtcggtgacgtcaccgctgacgtcatcaaagccgtccgccatgccgcgctacaagcctgagtacttgtttggtgttgagggttttgtccaggagttgcgtacaatgtcctttgtcattggatttgggactgcccctttttatgcccagattcgtcatgatcgtcatgaagagaggtgccgagtcaaagtcaccttgaacagtaatagtgaagatattccatcggtgatgttcgaagctggaggaagaaactacatccatgcatgtcaggaggtggcaaggatcgccataggagagctccgtgatcgctacagtgatcagttggccgacactgagtatcgttaccatcctcgtcaaccacaggggagtgaccgtagcagttaccttgagactgaaggaattgagaatgatgttaccacaagacatttggttgagatgctgtgggctatggatgaaagtcgtgcggaaactgtgttagcggctcaagatcgtgaagattggaatcgtggtaagatttgtaagctagaagacaaggtggatcgtttggagaaggaactagctgcgttgaagggagaagcaccgccgcagaaggccaggattcgtcttaccgcaaggaagagagctttatttgtccctcgttatcaattggcgccaaaggtccgtgtggtggagaaagaagttgccccagcagatcctccggtcgtcaacgtgagtgatgatgaagaagaacccaagcacactcattccaagattgagtgggtagcaactcaggatgatgaagaagagccgaacgaaccttcaatcgacctccgatgctcggaagaactagacaacgggaatggtcccaacaaccccaataacaacaatggagagaaccccactcttgctcaagttcttgctcaacagactcagcttatgcacatgatgatgcaacaacttcagaatcagcagaaccaaggaaataaccatgcaactccccagaacaagttagcagaatttcttcgtgtgaggccgcctgttttctctagtaccactaatcctgtcgaaactggtgattggctgcatgccatagagaagaagttggatttgcttcaatgcactgatcaggagaaggtctcatttgcatcacatcagttgcatggccctgcctctgaatggtgggatcacttccgcctgaataggactactgctgaacctatcacttggcttgaattcaccactgctttccggaagacgcatataccatcgggagtggtgtctctcaagaagaaggagttcaggtcgcttacccagggatctcgctctgttacggagtatctgcacgagttcaatcgtctagctcgttatgctccggaagatgtgcacaatgatgaagagcgtcaggagaagttcttggaaggacttaatgatgagctttcttacccactcatgactggagattattctgatttccagaagttggtggataaggctattcatcaggaggacaaatacaatcgcatggagcagaagaaacgccggattgctcaattcaagacgcaacaggggaataatcagaagccgcgtcttactttaggacctcagtccatgccaccgggaggttcttcgtcggttgttcgtccgcagcgtcagttcttcaacaacaatgctggcaacaacatccgcaatcaagttccacgccctgttgtagctccaacacagcaacagcctgctaagagggagcaaggtagcaagcccgtggtgtgtttcaactgtggagacccaggacattatgctgacaagtgtccgaagccccgtcgcgtgaaggttgttcctgctcagagcaactctaccgcaccagtatcaaaggcccgtgtcaatcatgttgcagctgcagaggctcaagatgctccagatgtgattttggtccgggagtattctgatgtgttcccagatgatttacctgccaatgagttggcagaagttaagaggcaagtagatgatttgcttcagaaaggatacatcagaccgagttcatcaccatggggagctccggttatatttgtggaaaagaaagaccatacccaaaggatgtgtgtggactatcgtgcactaaacgatgtgactatcaagaataagtacccgctacccagaattgatgatttgtttgatcagcttaaaggtgccaccgttttctccaagatagatcttcgctcagggtatcaccagttaagaatcaaagaggaagatatccctaagacagcttttaccactaggtatgggttgttcgaatgtactgttatgtcttttggacttaccaatgcccctgctttctacatgaacttgatgaataaggtgtttatggaatacctagataagtttgtggtggtctttattgatgacattcttatctactctcgaaccaaagaagagcatgaagaacatcttcgccttgcattggagaagctacgagaacatcaactgtatgctaagtttagcaagtgtgaattttggttgtctgaagtgaaattccttggtcacgtcatctcagcaggaggagttgccgtcgatcctagtaatgtggaatccgtaaccaattggaaacaaccaaagacagtttcagagattcgcagtttcctaggcctcgcaggatattaccggaggtttatagagaatttttccaagattgctaagcccatgacacgattgcttcagaaagatgtgaagtacaagtggtcagaagaatccgtcgccgtcgctcgggaaggccaccgtcgtgatcgccaagtcgtcgccgtcctcgtccgccccttcgccgccgccgaagaccgccggagcgtcatcgccgtcgtcgacccgaaaagcttcgccgtttcctcctcgtcgccgtcgccgtccgttgatcttccgtcgccgttttggtcgccggtgagttcgccgtgccgcccgctttgtcttggtgctttccatttgtgtcctcgcgccgccgttcgccggcgagcgtgcgccgctcgagccgtccgccccgccgagccgccgctgccgtcggtgacgtcaccgctgacgtcatcaaggccgtccgcccgtggttcattgcggggcaccagactgagaagtggcggagataagcccacgggggtcgctggggagtccatgccttgttataagggggtgattatgatccaggaaggtgcgctgcagtggattgtgttgtataaggggtattgtcacaactcctttccgaggtaccgtggtggtattgaggcacatggtgacatgatccacgggaacgcagagctcgccgacgatgctctggagcgcgcactggacgccgtcatcgggttctcatcgtcgttccgaccgaaccgaaccaccccaagccgaacccttgcgccaccaggatcacctcgacgtcctcttcaagataccccaagaaaacccatccaatggcgcagcgatcttggagatcgacatcgtgttctccaactccattcaatcgcttccatcatcgattccattctctccgccgacgtcattcctggagttgtgccatgccgccatggagcttcgccgtcgctgtggctctgcagacatccctag

SEQ ID NO: 15174 - DNA, 2754 bp, Oryza sativa
  Clone ID: TFbOSC410860j.C1.o1.gm
atgccgcgttacaagcctgagtacctgtttggtgttgagggttttgtccaggagttgcgcacgatgtcctttgtcattggatttgggactgcccctttttatgcccagattcctcatgatcgtcatgaagagaagtgccgagtcaaagtcaccttgaacagcaatagtgaagaggtcccctcagtgatgtttgaagctggaggaagaaactacatccatgcatgtcaggaggtggcaaggatcgccataggagagctccgtgatcgctacagtgatcaattggccgacactgagtatcgctaccatcctcgccaacctcagggaagtgaccgtggcagttaccttgagactgaaggaattgagaatgatgttaccacgaaacatttggttgagatgttgtgggctatggatgaaagtcgtgcggagactgtgttagcagctcaagatcgtgaagatcggaatcgtggtaagatttgcaagctagaagacaaggtggatcgtttggagaaggaattagccgcattgaagggagaagcaccgccgcagaaggccaggattcgtcttaccgcaaggaagagagctttatttgtccctcgctatcaactggcgccaaaggttcgtgtggtggagaaagaagttgccccagctcaagcggatcctccggtcatcatcataagtagtgatgaagaagaagaatccaagcgcaaccattccaagattgagtgggtagcaactcaagatgatgaagatgagccttcaattgacctccgatgcttggaagaactagataccactaatcctgttgaagctagtgattggctgcatgccatagagaagaagttggatttacttcagtgtactgatcaggagaaggtctcatttgcatcacatcagttgcatggccctgcctctgaatggtgggatcacttccgccttaacaggactactgctgaacctatcacttggcttgaattcaccgctgctttccggaagacgcatataccatcgggagtagtgtctctcaagaagaaggagttcaggtcgctttcccagggatctcgctctgttacggagtatctgcacgagttcaatcgtcttgctcgttatgctccggaagatgtgcgcaatgatgaagagcgccaggagaagtttttgggaggacttaatgatgagctttcttacccactcatggttggagattaccctgatttccagaaattagtggataaggctattcgtcaggaggacaagtacaatcgcatggagcagaagaaacgtcggattgctcaattcaagacacaacagggaaataatcagaagccgcgtcttactttaggaccccagtccatgccacagggaggttcttcgtctgttgttcgtccgcaacgtcagttcttcaacaacaatgctggcaacaacattcgtaatcaagctccacgtcctgttgcagctccagcacagcaacaacctgccaagagggagcaaggcaacaagcccgtggtgtgtttcaactgtggagacccaggacattatgctgacaagtgtccgaagccccgacgcgtgaaggttgtccctgcccagaataactctgctgtaccagcatccaaggctcgtgtaaatcatgtcgctgctgcagaagctcaagatgctccagatgtgattttggtccgggagtatcctgatgtgttcccagatgatttacctgccaatgagttggcagaagttaagaggcaagtagatgatttgctacagaaaggatacatcagaccgagttcatcaccatggggagctccggttatctttgtggaaaagaaagaccatactcagagaatgtgtgtggactatcgtgcactaaacgatgtgactatcaagaataagtatccactacccaggattgatgatttgtttgatcagcttaaaggtgccactgttttctccaagatagatcttcgatcagggtatcatcagttgagaatcaaagaggaagatatacctaagacagcttttaccactaggtatgggttgttcgaatgtactgttatgtcttttggacttaccaatgcccctgctttcttcatgaacttgatgaataaggtgtttatggaatacttagacaagttcgtggtggtctttattgatgatattcttatctactctcgaaccaaagaagagcatgaggaacatcttcgccttgcattggagaagctacgagaacatcaactgtatgctaagtttagcaagtgtgaattttggttgtccgaagtgaaattccttggtcacgtcatctcagccggaggagttgccgtcgatcctagtaacgtggaatccgtaaccaattggaagcaaccaaagacagtttcagagattcgcagtttcctaggccttgcaggatattatcggaggtttatagagaatttttccaagattgctaagcccatgacacgactgcttcagaaagatgtgaagtacaagtggtcggaagaatccttagaagcgaagcccactctaattgatcaagttagagaagcccaaattaatgatcctgatattcaagagatcaagaagaatatgagaagaggaaaagctattggtttcttggaggatgagcaaggaacaccgtgctccgccgtcgctccagctgtcgccgccgctcgggaagaccgccgtcgtcatcgccaagtcgccgccgtcctcgtccgccccttcgcagccgtcggaacccgccggagcttcgtcgccgtcgacaacccgaag

SEQ ID NO: 15175 - DNA, 4655 bp, Oryza sativa
  Clone ID: TFbOSC412750j.C1.o1.fg
ctcctggtttggaatggtatattcctggtttggagatagaactgtgcagccgggatggttgttcagattggttgggcctatacaacaggatgccgcgctacaagcctgagtacttgtttggtgttgagggatttgtccaggagttgcgtacgatgtcctttgccataggatttgggactgcccctttttatgcccagattcctcatgatcatcacgaaaagaagtgccgagtcaaagtcaccttgaacagtaatagtgaggatatcccctcagtgatgttcgaagctggaggaagaaactgcatccatgcatgtcaggaggcggcaaggatcgccataggagagcttcgcgatcgctacagtgatcagttggccgacactgagtatcgctaccatcctcgtcaaccccagggaagtgaccgtggcagctaccttgagactgaaggaattgagaatgatgctaccacaaggcatttggttgagatgctgtgggctatggatgaaagtcgtgcggagactgtgttagcggctcaagatcgtgaagatcggaatcgtggtaagatttgcaagctagaagacaaggtggatcgtttggagaaggagctagctatattgaagggagaagcaccgccgcagaaggccaggattcgtcttaccgcaaggaagagagctctatttgtccctcgctaccaattggcgccaaaggttcgtgtggtggagaaagaagttgccccagccttagcggatcctccggtcatcatcataagtgatgatgaggaagaagaatccaagcacaaccattccaagattgagtgggtagcaactcaagatgatgaagacgagccgaacgagccttcaatcgacctccgatgctcggaagaactagatgggattaccactaatcctgttgaagctggtgattggctgcatgccatagagaagaagttggatttgcttcaatgcactgatcaggaaaaggtctcatttgcatcccatcagttgcatggccctgcctctgaatggtgggatcacttccgccttaacaggactactgctgaacctatcacttggcttgaattcaccgctgctttccggaagacgcatataccatcgggagtggtgtctctcaagaagaaggaattcaggtcgctcacccagggatctcgctctgttacggagtatctgcacgagttcaatcgtctggctcgttatgctccggaagatgtgcgcaatgatgaagagcgccaggagaagttcttggaaggacttaatgatgagctttcttacccactcatgactggagattatcatgatttccagaagttagtggataaggctattcgtcaggaggacaaatacaatcgcatggagcagaagaagcgccggattgctcaattcaagacacaacaggggaataatcagaagtcgcgtcttactttaggaccccagtccatgccacagggaggttcttcgtctgttgttcgtccgcagcgtcagttcttcaacaacaatgctggcaacaacatccgtaatcaagctccacgtcctgttacagctccaacacagcaacaacctgccaagagggagcaaggcagcaagcccgtggtgtgtttcaactgtggagacccaggacattatgctgacaagtgtccgaagccccgacgcatgaaggttgtccctgcccagaacaactctaccgtaccagcatcaaaggcccgtgtcaatcatgttgctgctgcagaagctcaagatgctccagatgtgattttggatgatttacctggtatgccgcctaaaagggatatagagttcagaatagattgggtaccaggaacaactccgatccataagagaccttatagaatggcagccaatgagttggcagaagtcaagaggcaagtagatgatttgcttcagaaaggatacatcagaccaagttcatctccatggggagctccggttatttttgtggaaaagaaagatcatacccagaggatgtgtgtggactatcgtgccctaaatgatgtgactatcaagaataagtatccgctacccagaattgatgatttgtttgatcagcttaaaggtgctactgttttctccaagatagatcttcgatcagggtatcaccagttgagaatcaaagaggaagatatacctaagacagcttttaccactaggtatgggttgttcgaatgtactgttatgtcttttggacttaccaatgcccctactttcttcatgaacttgatgaataaggtatttatggaatacctagacaagttcgtagtggtctttatagatgatattcttatctattctcgaaccagagaagagcatgaagaacatcttcgccttgcattggagaagctacgagaacatcaactatatactaagtttagcaagtgtgaattttggttgtctgaagtgaagttccttggtcacgtcatctcagcaggaggagttgccgtcgatcctagtaatgtggaatccgtaaccaactggaagcaaccgaagacagtttcagagattcacagtttcttaggcctcgcaggatattaccggaggtttatagagaatttttccaagattgctaagcccatgacacgattgcttcagaaagatgtgaagtacaagtggtcggaagaatgtgagcagagttttcaagaattgaagaatcgcttaatatcagctcctattttgattttgcctgatccaaagaagggtttccaggtgtattgcgatgcatccaaacttgggttaggttgtgtactgatgcaagatgggaaggtggttgcctatgcatctcgtcagttacgtccgcatgagaagaactaccctactcatgatcttgaattagctgcagtagttcatgcgttgaagatttggcgtcattatcttttcggtactcgtacagaggtatataccgatcacaagagtttaaagtatatctttactcagccggatctgaacatgagacaacggagatggtcggaattaattaaggactatgacatgggaattcattatcacccgggaaaggctaatgttgtagcagatgctcttagcaggaaaggctattgcaatgctacggaaggacgacagttgccattggaattatgcaaggaatttgaaagattaaatttgggaattgtcagtagaggtttcgttgcagccttagaagcgaagcccactctaattgatcaagttagagaagcccaaattaatgatcctgatattcaagaaatcaagaagaatatgagaagaggaaaagctattggtttcttggaagatgagcacggaactgtatggttgggtgagagaatctgcgtccccgacaacaaagatttaaaagatgcaattctgaaagaagctcatgatactttatactctattcaccctggtagtactaagatgtaccaggatctcaaggaaagattttggtgggcaagtatgaagcgtgaaatcgcagaatacgtagcagtatgtgatatttgtcagcgagtcaaggcagaacatcagaaacccgccggtttgctgcagcctttgaagattcctgaatggaaatgggaagaaatcggtatggattttatcactggtttacccagaacgtcatcgggccatgactctatttgggtgattgtcgacagacttacaaaagtagctcatttcattccggtaaagacaacctattccggaagtcggttagcggaattgtatatggcaagaattgtgtgtttgcatggcgttcctaagaagatagtgtctgatcgaggcagtcaatttacttcaaatttttggaagaagcttcaggaagagatgggttctaagctgaactttagtactgcttatcatccgcagacagacggacagaccgaaagggtgaatcagattttggaagacatgttgagagcttgtgctttagacttcggtggaagttgggataagaatctaccttatgcagaattttcgtacaacaacagttatcaagctagtcttcagatggctccttacgaagcactgtatggtcggaagtgccgcactccgcttttgtgggatcaaacgggagaacgtcaggttttcgggacggatatccttagggaagcagaagaaaaggtaaagatcattcaagaaagattgcgagtggctcagtctcgacataagagttatgccgacaatcgccgcagagatctaagttttgaagaaggagattatgcgtatcttcgtgtcacgcctcttcgaggagttcatcgtttccacaccaaaggaaaattggcaccgcgttttgtgggaccttataagattgtcagtagaagaggagaggttgcttatcagttggagttacctcaatctttggcaggagtccataatgtgttccatgtgtcgcaactgaaaaagtgtttaagggtacctaccgaagaagctaatcttgaacagatcgaagtccaagaggatctgacctatgttgagaaaccaatccgtatcttggaaatagatgagagaagaaccaggaatcgagttatccgtttttgcaaagtccaatggagtaatcactcggaagaagagtcaacttgggaacgagaagatgaattgaagtcagctcatccgtatctgttcgccagttcttccgaatctcgaggacgagattctgtttaa

SEQ ID NO: 15176 - DNA, 10188 bp, Oryza sativa
  Clone ID: TFbOSC412948j.C1.o13.fg
atggtgaacactcgtagcaatgggaatggtcccaacaaccccaataacaacaacaatggagagaatcccactctggcccaagttcttgctcaacagacacagcttatgaacatgatgatgcagcaatttcagaatcagcaaaaccaagggaataatcatgcacctccacagaacaagttagcagaatttcttcgtgtgaggccgcctgttttctctagtaccactaatcctgttgaagctagtgattggctgcatgccatagagaagaagttggatttacttcagtgtactgatcaggagaaggtctcatttgcatcacatcagttgcatggccctgcctctgaatggtgggatcatttccgccttaacaggactactgctgaacctatcacttggcttgaattcaccgctgctttccggaagacgcatataccatcgggagtagtgtctctcaagaagaaggagttcaggtcgctttcccagggatctcgctctgttacggagtatctgcacgagttcaatcgtcttgctcgttatgctccggaagatgtgcgcaatgatgaagagcgccaggagaagtttttgggaggacttaatgatgagctttcttacccactcatggttggagattatcctgatttccagaaattagtggataaggctattcgtcaggaggacaagtacaatcgcatggagcagaagaaacgtcggattgctcaattcaagacacaacagggaaataatcagaagccgcgtcttactttaggaccccagcccatgccacagggaggttcttcgtctgttgttcgtccgcaacgtcagttcttcaacaacaatgctggcaacaacatccgtaatcaagctccacgtcctgttgcagctccagcacagcaacaacctgccaagagggagcaaggcaacaagcccgtggtgtgtttcaactgtggagatccaggacattatgctgacaagtgtccgaagccccgacgcgtgaaggttgtctctgctcaaagtaactctgctgtaccagcatcaaaggcccgtgtcaatcatgttgctgctgcagaagctcaagatgctccagatgtgattttgggtacgttccttgttaactcagttcctgcaacagtacttttcgattctggtgctacacattcattcttatctatgagttttgcgggaaatcatgggatggaagtagaagatcttagacgtcctttgatggttagtactccaagtaatcaagcactctctttgcaacgtagcccctctgtcagaatagaaattcaaggagtaccatttctggccaatcttatcttgttagaatccaaagaccttgatgtcatcctagggatggactggttagccagacataaaggtgtgatagactgtgccaacagaaaagtaactctcaacagctatgatggtcgagttgtaactgttcatgcattgtcatctgagtctttaaggtcaagactgaaccagataactttggaagagattcctatagtccgggagtatcctgatgtgttcccagatgatttacctggtatgccgcctaaaagggatatagagttcagaatagatttggtacctggaacaactccgatccataagagaccttatcgaatggcagccaatgagttggcagaagttaagaggcaagtagatgatttgctacagaaaggatacatcagaccgagttcatcaccatggggagctccggttatttttgtggaaaagaaagaccatacccagagaatgtgtgtggactatcgtgcactaaacgatgtgactatcaagaataagtatccactacccaggattgatgatttgtttgatcagcttaaaggtgccactgttttctccaagatagatcttcgatcagggtatcatcagttgagaatcaaagaggaagatatacctaagacagcttttaccactaggtatgggttgttcgaatgtactgttatgtcttttggacttaccaatgcccctgctttcttcatgaacttgatgaataaggtgtttatggaatacttagacaagttcgtggtggtctttattgatgatattcttatctactctcgaaccaaagaagagcatgaggaacttcttcgccttgcattggagaagctacgagaacatcaactgtttatagagaatttttccaagattgctaagcccatgacacgactgcttcagaaagatgtgaagtacaagtggtcggaagaatgtgaacagagttttcaagaattgaaaagtcgcttaatatcagctcctattttgattttgcctgatccaaagaagggttttcaagtgtattgtgatgcatccaaacttgggttaggttgtgttctgatgcaagatgggaaggtggttgcctatgcctctcgacagttacgtccgcatgagaagaactaccctactcatgatattgagttagctgcagtcgttcatgcattgaagatttggcgtcattatcttttcggtactcatacagaagtgtacaccgatcacaagagtttaaagtatatctttactcagccggatctgaacatgagacaacggagatggttggaattaattaaggattatgacatgggaattcattatcatccgggaaaggctaatgttgtagcagacgctcttagcagaaaaggccattgcaatgctacagaaggacgacagttgccattggaattatgtaaggaatttgaaagattaaatttgggaattgtcggtagaggtttcgttgcagccttagaagcgaagcccactctaattgatcaagttagagaagcccaaattaatgatcctgatattcaagagatcaagaagaatatgagaagaggaaaagctattggtttcttggaggatgagcaaggaactgtatggttgggtgagagaatctgtgtccccgacaacaaagatctaaaagatgcaattctgaaagaagctcatgatactttatactccattcaccctggtagtactaagatgtaccaggatcttaaggaaagattttggtgggcaagtatgaagcgtgaaatcgcagaatacgtagcagtatgtgatgtttgtcagcgagtcaaggcagaacatcagaaacccgccggtttgttgcaacctttgaagattcctgaatggaaatgggaagaaattggtatggattttattactggtttacccagaacgtcatcaggccatgactctatttgggtgatagtcgacagacttaccaaagtggctcatttcattccggtaaagacaacttattccggaagtcgcttagcggaattgtatatggcaaggattgtgtgtttgcatggcgtccctaagaagatagtgtctgatcgaggcagtcagtttacttcaaatttttggaagaaacttcaggaagagatgggttctaagctgaactttagtactgcttatcatccgcagacagacggacaaaccgaaagggtgaatcaaattttggaagacatgttgagagcttgtgctctagatttcagtggaagttgggataagaatctaccctatgcagaattttcatacaacaacagttatcaagctagtctacagatggctccgtacgaagcactgtatggtcgaaagtgccgcactccgcttttgtgggatcaaacgggagaacgtcaggttttcggaacggatatcctaagggaagcagaagaaaaggtaaagatcattcaagaaagattgcgagtggctcagtctcgacataagagttatgccgacaatcgccgtagagatttgagttttgaagaaggagactatgtgtatcttcgtgtcacgccttttcgaggagttcatcgttttcataccaaggaaaaattggcaccgcgttttgtgggaccttataagattgtcagtagaagaggagaggttgcttatcagttggagttacctcaatctttggcaggaatccataatgtgttccatgtgtcacaattgaaaaagtgtttaagggtacctaccgaagaagctaatattgagcagatagaagtccaagaggatttgacttatgttgagaaaccaatccgtatcctggaaacaactcctggtttggaatggtacattcctagtttggagatagaactgtgcagccggggtggttgttcagaatggttgggcctatacaacaggggttcacacacatgtaagcgtttggaattttggatagaaattccgggcgtgacaggcaagatctctctccttgactcggtgtcagaccagtcgggagagaaccggatttcagccccgtttggactcccaaacgcggctgaaagttacttcaagaccatctcaatcgagttggcttcaaaccactcgggtgagatcgcatcttctccaacatcaccagatcaagatgatggggcttacccaccgatcctgatgaagctccccgacgatttggcggccgtctccatcacgacagcgtctccatcccgtaggcctaggcggaagtcggcttcaacaccgacttcgcctagcttcagggaagtcggcgtcatcctccaaccactcggcacggtttcgacggatcagctggatggctactacagctctcccaccgtcgactcgcgccccaccgacatcgtggagtacgacgagtttagctctcgctacaacgacccggatctcgacgacttcgacggaagcctagatgacaactacacccctctctacttcggtgtcttcatggctgataacgagacggaggagcaatgccaagcccgggagaccgaagcacgtcgcgagactgaacgtcgccgactggaggaggagcatcaagcacaagaacaagaacggctacggcgtgagcagcaggagcgtgagcggaccgcgaaggaggctgaggatcgacggcagcgagctttggaagcagggcgccgagcgcgtgatctcatcggccaacaagatgttgaagggacaccggttttccgcacccctcagcagaatgcggttgccgcgatcaccctcctcgacaccctcctcaaggaaaacgagctcaatcaatctgatcacgtcgtcaacatcttaaaccagacgaagaccatgattgcggcttcggtcccagttaactccgaaagcgtccacacgccgactggcagccgagtcccccactcccgatctcatgactaccgtcatctaagcctcagcatcaccggcgcaggatccaatcgcaggagcaggggtcacgacgagcggtccgttcactcacctcccgaccatcatagggagcgccgagtggaacggcctcgctcaccacctcgtcgccgccccgtcgatcttcgcgacacaatcatacagcgccgagcagctcgaggccatcatcatgcgccggaccgccacgacgacgacctcgacggagtagcagccttcaccgacgacctgcgtcgagtggattggccagccggcttcaagccgactggaatagagaagtatgacggtaccactaacccagaatcgtggcttaccgtctacggtctcgcaatccgcgcagcaggaggagacagcaaggccatggcgaactatttaccagtggctttagcggattccgcccgatcttggctccatggattgccccgtggtacaattggatcttgggctgaattacgcgaccacttcatcgccaactttcaaggcaccttcgagcgtcccggcacacaatacgacctctacaacgttattcagaagtccggagaatcccttcgagattacatccgacgattttccgaacaacgtaacaagatctccgacatcaccgacgacgttatcatcgccgcattcaccaaagggattcgccacgaagaattggtcggcaagttcgggcgtaagcctcccaagacagtcaagcttatgttcgaaaaagccaacgagtacgccaaggccgaagacgccgtcaccgcatcaaagcagtcaggtcccagttggaagccaaacaagggtacgccggctaagggaggaggtggaagtaacaatcataaggaccgcaagcgtaagcctgaggaacttgttgcaaccgccactcactcttctcgacagcgttcgcgcgtcaacacgttcgacaagatcatgaactcccaatgcccgcaccatcctaactccaaccacgtggccaaagattgtttcgtctacaagcagtttgcggagcaatacaccaagactacacggaagaactccgacgaagaacaaagtacgtcgaggaagaaggacgacggtgacaccccggcaggatttcaagaccaccgcaaggagctcaaccatatcttcagcggccccctggcttatgagtctaaaaggaagcaaaagttgactgaacgggagatcaatgctgttcagcccgacacaccccagtatcttcgatggtcagaaattgcaatcaagtttgaccgctcggatcatcctgaccgagtggtccacccggggcggtaccccctggtactagacccagtggtccgtaatgtcaagcttcgcagaaccctcatcgacggcggcagtgcactcaatatcctcttcgccaagaccttggatgatatgcagattcctcgctccgagctaaaaccaagcaatgcgccttttcacggagtaattccaggattatccgcaactccactcggccagatcaccctcccggtcacttttggcactcgggaaaacttccgcacagagaatatcagctttgaagtcgccgatttcgagacaacataccatgccatactcggacgcccggcgttagccaagtttatggccgtcccgcactacacttacatgatgacgaagatgcctggtccccgaggagtcctatccctacggagcgacatcaagcaagccgtcacatgcgacaaggagagttgcgacatggcccaaacccgcgagatggcgtcagcccgagaggatatccgactggctgcagccacggcgagcgaaggagaagtgcccgctaccaagatttcaaaaagtggagaaagcgaagccaagactaaaaagattcccttagatccttctgattctactaaaactgctaacaataaagatatctttgcgtggaaaccatctgatatgcccggtattcctagagaggtgattgagcactccttatatgtcaaagaagatgccaagcctatcaaacaacgactccgccgattcgcacaagacagaaaagacgcgatcaaggaggaattaaccaagctgttagcagcaggcttcattaaagaagtccttcatcccgactggctagcaaacccggttctagttcggaagaaaacggggcaatggcgcatgtgtgttgattatactgacctcaacaaatcttgccctaaagatccttttgggttgcctcgcattgaccaggtagtcgactcgaccgccggctgtgagcttctcagttttttggactgctactcggggtatcatcagatccgactgaaggaatccgactgcttgaagacttcattcatcacgccctttggagcatactgctatgtcaccatgccgtttggactaaaaaacgcaggagcaacttatcaacgtatgatccagagatgcttctcaacgcagatcggtcgcaacgttgaagcctatgtggatgatgtagttgtcaagaccaagcaaaaggatgatttgatctcggatctagaagaaaccttcgcgagcatccgcgctttcaggatgaaattaaaccctgaaaagtgcaccttcggagtactgtcagggaagctgcttggttttatggtgtctcataggggcatccaagccaacccggagaaaattactgctatcctcaacatgaaaccgccaagtacccagaaagatgttcagaagctgactggatgcatggcggcgctcagccgatttgtttcaagacttggcgagcgggggatgcccttctttaagctactaaagaaaacagacgacttccagtggggacccgatgcacagaaggccttcgaagatttcaagaaactcctcaccgagccaccggtcttagcctcaccacacccgcaggagccgttgttgttgtatatagcagccgcctcccaggttgtgagcacagtcttggtcgttgagcgcgaggaagaaggccatgtccagaaagtccaacgatcgatttactttgtcagcgaagtcctagccgactccaaaacgaggtaccctcaggttcagaagctgttatatggtattctaattactaccaggaagctatctcactactttcaaagtcactcggtaacggtggtcacatcatttccactcggtgatatactgcacaaccacgaagcaaacgggcggattgctaagtgggctttggagttgatgtctttggacatatcattcaagccccgaatttcaattaagtcccaagcgttagctgattttgtcgccgaatggaccgagtgccaggaggatacccccgcggagaagatggagcactggaccatgcattttgacggatcaaaacgactttcgggcactggagcaggagtggttttgatttccccaactggagaaagattaagctatgtgctttggatacatttttcggcatcccacaacgtcgccgagtatgaggcgctccttcatggactgcggattgcaatttccctaggaataaagcgtctaatagttcgaggcgattcacagctggttgtcaaccaggttatgaaagagtggtcctgccttgacgacaatatgatggcatatcgacaagaggtacgcaaattggaagacaagttcgatggactcgagcttagtcatgttcttcgacacaacaatgaagccgccgacagacttgccaactttggatccaagcgcgaggtggcgccctctgatgttttcgtcgaacacctttatacgccgaccgtacctcacaaggatactacccaaattgcgggcactcatgacgtagctctggttgaagccgattggcgagagcccctcatacgatttttgacttctcaagaactcccacaagacaaagatgaagccgagcggatttcaaggcggagcaaactttacgttatgcatgaagctgagttgtacaagaaaagcccttcagggattctgcaacgctgcgtatctttagaggaagggaggcaattgctgaaagacatacattctgggatatgcggaaaccatgctgccgcacgcaccattgtcggcaaagcttaccggcagggttttttctggcccactgcagtgtccgacgccgacaaaattgtgcgcacgtgcgaaggttgccaatttttcgccagacaaattcatctaccagctcaagagttgcagaccatcccactgtcttggccgtttgcggtttgggggctcgacatggttggcccgtttaaaaaggcagtcggcggttacacgcacctttttgtggccattgacaaattctccaagtggattgaagctaagccggttgtcacaatcacagcagataacgctcgagacttcttcatcaacattgtgcatagatttggagtgcccaatcggatcatcactgacaatggcagacaattcaccggcggagtttttaaagacttttgtgaagactttggaatcaagatttgctatgcctcagtggcacatcccatgagcaatggacaggtggaacgagccaatggcatgatacttcaagggattaaagcgcgtgtttttgaccggctaaaaccctatgccggcaaatgggtgaaacagctgccatcagtactttggtctttgcgaactacacccagtcgggccacaggccagtcaccttttttccttgtctatggggcagaagcaatgttgccgagtgaagttgaattcgagtctttgcgctttcgaaatttccgtgaagaacgctacgaagaggaccgagtggatgacttgcaccgattggaagaagtccgcgaagcagctttgattcagtcggctcgatacttacaagggctgcgacgttatcataatcgcaatgttcgatcccgtgcctttctagtcggcgacctagttttgaggaaaattcaaactacacgagatcggcacaagttatctcctctatgggaagggccatttatcatctctgaagtcacccgaccaggttcctatcgactcaagcgcgaagacggtacactcgttgacaactcttggaacattgaacatcttcgtcgtttctacgcttaa

SEQ ID NO: 15177 - DNA, 5313 bp, Oryza sativa
  Clone ID: TFbOSC413683j.C1.o8.fg
atggtgcgctgcggtggattgtgttatgcaaggggtattgtcacagctcctttccgagctcctggtttggaatggtatattcctggtttggagatagatctgtacagccggatgccacactacaagcctgagtacttgtttggtgttgagggatttgtccaggagttgcgtacgatgtcctttgccataggatttgggactgcccctttttatgcccagattcctcatgatcgtcacgaagagaagtgccgagtcaaagtcaccttgaacagtaatagtgaagatatcccctcagtgatgttcgaagctggaggaagaaactacatccatgcatgtcaggaggtggcaaggatcgccataggagagcttcgcgatcgctacagtgatcagttggccgacactgagtatcgctaccatcctcgtcaaccacagggaagtgatcgtggtagttaccttgagactgaaggaattgagaatgatgctaccacaaggcatttggttgagatgctgtgggctatggatgaaacccgtgcggagactgtgttagcagctcaagatcgtgaagaccggaatcgtggtaagatttgcaagctagaagacaaggtggatcgtttggagaaggaattagccgcgttgaagggagaagcaccaccgcagaaggccagggttcgtcttaccgcaaggaagagagctctatttgtccctcgttaccaattggcgccaaaggtccgtgtggtggagaaagaagttaccccagccctagcggatcctccggtcgtcaattggtgggatgtaagtgcatgcgtttgtttgcttttgagtgttaggaagttgatggtgctcactcgcagcaacgggaatggccccaacaacaacaacaataacaataacaacaacaatggagagaatcccacacttgcccaagtcctggctcaacaggcacagcttatgaacatgatgatgcagcaactccagaaccagcagaaccagggaaataaccatgcacctccccagaacaagttagcagaatttcttcgtgtgaggccgcccattttctccagtaccactaatcctgttgaagctggtgattggctgcatgccatagagaagaagttggatttgctccagtgcactgatcaggagaaggtctcatttgcatcacaccagttgcatggccctgcctctgaatggtgggatcacttccgcctgaatcgaactactgctgaacctatcacttggcttgaattcaccgctgctttccggaagacgcatataccatcgggagtggtgtccctcaagaagaaggaattcaggtcgctcaaccagggatctcgctctgttaccgagtatctgcacgagttcaatcgtctggctcgttatgctctggaagatgtgcgcactgatgaagagcgtcaggagaggttcttggaaggacttaatgatgagctttcttatccactcatgactggggattatcctgatttccagaagttagtggataaggctattcgccaggaggacaagtacaaccgcatggagcaaaagaaacgccggattgctcaattcaagacacaacaggggaataatcagaggctgcgtcttactttaggaccccagtccatgccacagggaggttcttcgtctgttgttcgtccgcagcgtcagttcttcaacaaccatgccggcaacaacatccgtaatcaagctccacgccctgttgcagcttcgacacagcaacaacctgccaagagggagcaaggcagcaagcccgtggtgtgtttcaactgtggagacccaggacattacgctgacaagtgtccgaagccccgacgcgtgaagattgtccctgtccagagcaactctaccgcaccagcatcaaaggcccgtgtcaatcgcgttgctgttgcagaagctcaaggtgctccagatgtgattttgggtacgttccttgttaacttagttcctgcaacagtgcttttcgattctggtgctacacattcattcttatctatgagttttgcgggaaatcatgggatggaagtagaagatcttagacgtcctttgatggttagtaccccatgtaatcaagcactctctttgcaacgtagcccctccgtcagaatagaaattcaaggagtaccatttctggccaatcttatcttgttagaatccaaagaccttgatgtcatcctagggatggactggttagccagatataaaggtgtgatagactgtgctaacagaaaagtaactctcaccagcaatgagggtcaagttgtaactgtttatgcattgtcttctgagtctttaaggtcaagactaaaccaaataactttggaagagattcctatagtccgagagtatcctgatgtgttcccagatgatttacctggaatgcctcctaaaaggggtatagagttcagaatagatttggtaccaggaacaactccgatccataagagaccttatagaatggcagccaatgagttggcagaagttaagaggcaagtagatgatttgcttcagaaaggatacatcagaccgagttcatctccatggggagctccggttatttttgtggaaaagaaagatcatacccagaggatgtgtgtggactatcgtgcactaaatgatgtgactatcaagaataagtacccgctacccagaattgatgatttgtttgatcagcttaaaggtgccaccgttttctccaagatagatcttcgatcagggtatcaccagttgagaatcaaagaggaagatatacctaagacagcttttaccactaggtatgggttgttcgaatgtactgttatgtcttttggacttaccaatgcccccgctttcttcatgaacttgatgaataaggtgtttatggaatacctagacaagttcgtggtggtctttattgatgacattcttatctactcccgaaccaaagaagagcatgaagaacatcttcgccttgcactagagaagctacgagaacatcaactgtatgctaagttcagtaagtgtgaattttggttgtcggaagtgaagttccttggtcacgtcatctcagcaggaggagttgccgtcgatcctagtaatgtggaatccgtaaccaactggaaacaaccaaagacagtttcagagattcgcagtttcctaggcctcgcaggatattatcggaggtttatagagaatttttccaagattgctaagcccatgacacgattacttcagaaagatgtaaagtacaagtggtcagaagaatgtgagcagagttttcaagagttgaaggatcgcttaatatcagctcctattttgattttacctgatccaaagaagggattccaagtgtattgcgatgcatccaaatttgggttaggttgtgttctgatgcaagatgggaaggtggttgcctatgcatctcgtcagttacgtccgcatgagaagaactaccctactcatgatcttgagttagatgcagtggttcatgcgttgaagatttggcgtcattatcttttcggtactcgtacagaggtgtataccgatcacaagagtttaaaatatatctttactcagccggatctgaacatgagacaacggagatggttggaattaattaaggattatgacatgggaattcattatcacccgggaaaggctaatgttgtagcagacactcttagcaggaaaggctattgcaatgctacggaaggacgacagttgccgttggagttatgtaaggaatttgaacgattgaatttgggaattgtcagtagaggtttcgttgccgccttagaagcgaagcccactctaattgatcaagttagagaagcccaaattaatgatcctgatattcaagaaatcaagaagaatatgagaagaggaaaagctatcggtttcttggaggatgagcaaggaactgtatggttgggcgagagaatctgcgtccccgacaacaaagatttaaaagatgcaattctgaaggaagcccatgataccttatactccattcaccctggtagtactaagatgtaccaggatctcacggaaggattttcgtgggcaagtatgaagcgtgaaatcgcagaatacgtagcagtatgtgatgtttgtcagcgagtcaaggcagaacatcagaaacccgccggtttgttgcagcctttgaagattcctgaatggaaatgggaggaaatcggaatggattttatcactggtttacccagaacatcatcgggccatgactctatttgggtgatagtcgacagacttaccaaagtggctcatttcatcccagtaaagacaacttattccggaagtcggttggcggaattgtatatggcaaggattgtgtgtttgcatggcgtccctaagaaaatagtgtctgatcgaggcagtcagtttacttcaaatttttggaagaagcttcaggaagagatgggttctaagctgaactttagtactgcttatcatccgcagacagatggacaaaccgaaagggtaaatcaggttttggaagacatgttgagagcttgtgctttagacttcggtggaagttgggataagaatctaccttatgcagaattttcgtacaacaacagttatcaagctagtcttcagatggctccgtacgaagcactgtatggtcggaagtgccgcactccgcttttgtgggatcaaacgggagaacgtcaggttttcgggacggatatcctgagggaagcagaagaaaaggtgaaaatcattcaagaaaggttgcgtgtggctcagtctcgtcataagagttatgccgacaatcgtcgtagagatctaagttttggcaaaggagattatgtgtatcttcgtgtcacgccttttcgaggagttcatcgttttcacaccaaaggaaaattggcaccgcgttttgtgggaccttataagattgtcagtagaagaggagaggttgcttatcagttggagttacctcaatctttggcaggagtccataatgtgttccatgtttcgcaattgaaagtgtttaaggccgtcgccgtcgctcggggaggtcgccatcgtggtcgccaagtcgtcgccgtccttgtccgccccttcgtcgtcgccgaagaccgccggagcaccgtcgccgccgtcgacccgatcttctccgccgcttcgacctcgtcgccgtcgccgtccgttgatcttccgccgccgttttggtcaccgattccgatgtttccggagagtccgttttcgcaggagaagaatttgaagagttccaaggccagcaaggcaagtcacacagatcccaaacaaccctttgagcatgttgatcccgattaa

SEQ ID NO: 15178 - DNA, 3027 bp, Oryza sativa
  Clone ID: TFbOSC414224j.C1.o3.gm
atgccgcgttacaagcctgagtacctgtttggtgttgagggttttgtccaggagttgcgtacgatgtcctttgtcattggatttgggactgcccctttttatgcccagattcctcatgatcgtcatgaagagaagtgccgagtcaaagtcaccttcaacagtaatagtgaagatatcccctcagtgatgtttgaagctggaggaagaaactacatccatgtatgtcaggaggtggcaaggatcgccataggagagctccgtgatcgctacagtgatcaattggccgacactgagtatcgctaccatcctcgccaaccccagggaagtgaccgtggcagttaccttgagactgaaggaattgagaatgatgctaccacgaagcatttggttgagatgttgtgggctatggatgaaagtcgtgcggagactgtgttagccgctcaagatcgtgaagaccggaatcgtggtaagatttgcaagttagaagacaaggtggatcgtttggagaaggaattagccgcattgaagggagaagcaccgccgcagaaggccaggattcgtcttaccgcaaggaagagagctctatttgtccctcgctatcaactggcgccaaaggttcgtgtggtggagaaagaagttgccccagctcaagcggatcctccggtcatcatcataagtagtgatgaagaagaagaatccaagcgcatcaattccaagattgagtgggtagcaactcaagatgataaagacaagccttcaatcgacctccgatgcttggaagaactagatactactaatcctgttgaagctagtgattggctgcatgccatagagaagaagttggatttacttcagtgtactgatcaggagaaggtctcatttgcatcacatcagttgcatggccctgcctctgaatggtgggatcacttccgccttaacaggactactgctgaacctatcacttggcttgaattcaccgctgctttccggaagacgcatataccatcaggagtagtgtctctcaagaagaaggagttcaggtcgcttacccagggatctcgctctgttacggagtatctgcacgagttcaatcgtcttgctcgttatgctccggaagatgtgcgcaatgatgaagagcgccaggagaagtttttgggaggacttaatgatgagctttcttacccactcatggttggagattatcctgatttccagaaattagtggataaggctattcgtcaggaggacaagtacaatcgcatggagcagaagaaacgtcggattgctcaattcaagacacaacagggaaataatcagaaaccgcgtcttactttaggaccccagcccatgccacagggaggttcttcgtctgttgttcgtccgcagtgtcagttcttcaacaacaatgctggcaacaacatccgtaatcaagctccacgtcctgttgcagctctagcacagcaacaacctgccaagagggagcaaggcagcaagcccgtggtgtgtttcaactgtggagatccaggacattatgctgacaagtgtccgaagccccgacgcgtgaaggttgtccctgcccagaataactctgctgtaccagcatctaaggctcgtgtaaatcatgtcgctgctgcagaagctcaagatgctccagatgtgattttggtccgggagtatcctgatgtgttcccagatgatttacctgccttagaagcgaagcccactctaattgatcaagttagagaagcccaaattaatgatcctgatattcaagagatcaagaagaatatgagaagaggaaaagctattggtttcttggaggatgagcaaggaactgtatggttgggtgagagaatctgtgtccccgacaacaaagatctaaaagatgcacttctgaaagaagctcatgatactttatactccattcaccctggtagtactaagatgtaccaagatctcaaggaaagattttggtgggcaaccgtcgccgtcgctcgggaagaccaccgtcgtgctcgccaagtcgtcgccgtcctcgtccgccccttcgccgtcgccggagatcgccggagcttcgtcgccgtcgacaacccgaaggtttccgccgtttcctcctcgtcgtcgtcgtcgtccgttgtttttccgccgccgttttggtcaccggtgtgttcgccgcgtcgtcctctacgtgctggtgccctccgtttgcgtcctggtgccgccgttcgccggcaagcgtgcgccgcccgagccgtccgctccgccgagccgccgccgctgtcggtgacgtcaccgttgacgtcatcggggtcgtccgccggcatccccgcgccgacgccgccgccgtatctcgccgtcgtctcgcgctcgtcgtcgtcgccgccgtctccgcctcctccgccgccgccgcatctctggggtgaacaagggcaggcgatgatggaaagaaacaaagaaaatgccgccaagaagaaataccatcactacttggggtcaggcggctatagcgtcgcgatgccgaagtgggaggagatggaggctagcttgcttgagaggggtatcgaaccggccaccgctaattggccggaacgatcgaagttctggtactatgctcaaggtggaacgctcaacccagctgatggctcactggtcttcggcgatcagatacgagaggctgcgcatcgactaacagacgcaatggaagcctcttctcagggcacgttccgaccggacagagagagggtcgagctgtcactcgccctgcagactccagagcatcaaggacgaacacgagggaaaggggtgattccttggaagattgggttcaaggaggacatccacacgtacaggagtcggatgaggagcaagagagataccttggcgaagattgcagatctagagttcagggtatcgagctacgagcgcatcatacaagtggaggtggcaaggaaggttgatgaacgcatggccgcacatcagtcccatgatccccagccgaccattcctcctgcaatggtgagcccgtaa

SEQ ID NO: 15179 - DNA, 4959 bp, Oryza sativa
  Clone ID: TFbOSC415905j.C1.o6.fg
atgtctttcgtgattagtcccacacttctcaccatagtaaatgatgctatatttggtaataatttgattagctcctggtttggaatgatgccgcgctacaagcctgagtacctgtttggtgttgagggttttgtccaggagttgcgtacaatgtcctttgccataggatttgggactgcccctttttatgcccagattcctcatgatcgtcacgaagagaagtgccgagtcaaagtcactttgaacagtaatagtgaagatatcccctcagtgatgttcgaagctggaggaagaaactacatccatgcatgtcaggaggtggcaaggatcgccataggagagctccgtgatcgctacagtgatcagttggccgacacggagtatcgctatcatcctcgccaaccccagggaagtgaccgtggcagttatcttgagactgaaggaattgagaatgatgctaccacaaggcatttggttgagatgctgtgggctatggatgaaagtcgtgcagagactgtgttagcggctcaagatcgtgaagaccggaatcgtggtaagatttgcaagctagaagacaaggtggatcgtttggagaaggagctagctacgttgaagggagaagcaccaccgcagaaggctaggattcgtctcaccgcaaggaagagagctctatttgtccctcgctatcaattggcgccaaagatggtgaacactcgcagcaatgggaatggccccaacaaccccaataacaacaacaatggagagaatcccacacttgcccaagttcttgctcaacagacacagctaatgaacatgatgatgcagcaactccagaaccagcaaaaccaaggaaataaccatgcacctccccagaacaagttagcagaatttcttcgtgtaaggccgcctactttctctagcaccactaatcctgttgaagctggtgattggttgcatgccatagagaagaagttggatttgcttcagtgcactgatcaggagaaggtctcatttgcatcacctcagttgcatggccctgcctctgaatggtgggatcatttccgcctgaataggactactgcggaacctatcacttggcttgaattcaccgctgctttccggaagacgcatataccatcgggagtggtgtctctcaagaagaaggaattcaggtcgctcacccagggatctcgctctgttacggagtatttgcacgagttcaatcgtctggctcgttatgctccggaagatgtgcgcaatgatgaagagcgccaggagaagttcttggaaggacttaatgatgagctttcttacccactcatgactggagattatcatgatttccagaagttagtggataaggctattcgtcaggaagacaagtacaatcgcatggagcagaagaaacgccggattgctcaattcaagacacaacaggggaataatcagaagccgcgtcttactttaggaccccagtccatgccacagggaggttcttcgtctgttgttcgtccgcagcgtcagttcttcaacaacaatgctggcaacaacatccgcaatcaagctccacgtcctgttgcagctccagcacagcaacaacctgccaagagggagcaaggcagcaagcccgtggtgtgtttcaactgtggagacccaggacattatgctgacaagtgtccgaagccccgacgcgtgaaggttgtccctgcccagagcaactctaccgcacctgcgccaaaggcccgtgtcaatcatgttgctgctgcagaagctcaagatgctccagatgtgattttggaagatcttagacgtcctttgatggttagtaccccaagtaatcaagcactctctttgcaacgtagcccctctgtcagaatagaaattaaaggagtaccatttctggccaatcttatcttgttagaatccaaagaccttgatgtcatcctagggatggactggttagccagacataaaggtgtgatagactgtgctaacagaaaagtaactctcacccgcaatgatggtcgagttgtgactgttcatgcattgtcttctgagtttttaaggtcaagactgaaccaaataattctggaaaagattcctatagtccgggagtatcccgatgtgttccccgatgatttgcctagtatgccgcctaaaagggatatagagttcagaatagatttggtaccaggaacaactccgatccataagagaccttatagaatggcagccaatgagttggcagaagtcaagaggcaagtagataatttgcttcagaaaggatacatcagaccaagttcatctccatggggagctccggttatttttgtggaaaagaaagatcatacccagaggatgtgtgtggactatcgtgccctaaacgatgtgactatcaagaataagtatccgctacccagaattgatgatttgtttgatcagcttaaaggtgctactgttttctccaagatagatcttcgatcagggtatcaccagttgagaatcaaagaggaagatatacctaagacagcttttaccactaggtatggattgttcgaatgtactgttatgtcttttggacttaccaatgcccccgctttcttcatgaacttgatgaataaggtgtttatggaatacctagacaagttcgtggtggtctttattgatgatattcttatctactctcgaaccaaagaagagcatgaagaacatcttcgccttgcactagagaagctacgagaacatcaactgtatgctaagtttagcaagtgtgaattttggttgtctgaagtgaagttccttggtcacgtcatctcagctggaggagttgccgttgatcctagtaatgtggaatccgtaaccaactggaaacaaccaaagacagtttcagagattcgcagtttcttaggcctcgcaggatattaccggaggtttatagagaatttttccaagattgctaagcccatgacacgactgcttcagaaagatgtgaagtacaagtggtcggaagaatgtgagcagagttttcaagagttgaagaatcgcttgatatcagctcctattttgattttacctgatccaaagaagggtttccaagtgtattgcgatgcatctaaacttgggttaggttgtgttctgatgcaagatgggaaggtggttgcctatgcatctcgtcagttacgtccgcatgaaaagaactaccctactcatgatcttgagttagctgcagtagttcatgcgttgaaaatttggcgtcattatcttttcggtactcgtacagaggtatataccgatcacaagagtttaaagtatatctttactcagccggatctgaacatgagacaaaggagatggttgaaattaattaaggattatgacatgggaattcattatcacccgggaaaggctaatgttgtagcagacgctcttagcaggaaaggctattgcaatgctacggaaggacgacagttgccattggaattatgcaaggaatttgaaagattaaatttgggaattgtcagtagaggttttgttgcagccttagaagcgaagcccactctaattgatcaagttagagaagcccaaattaatgatcctgatattcaagagatcaagaagaatatgagaagaggaaaagctatcggtttcttggaggatgagcacggaactgtatggttgggtgagagaatctgcgtccccgacaacaaagatttaaaagatgcaattctgaaagaagctcacaatactttatactctattcaccctggtagtactaagatgtaccaggatctcaaggaaagattttggtgggcaagtatgaagcgtgaaatcgcagaatacgtagcacctttgaagattcctgaatggaagtgggaagaaatcggtatggattttatcactggtttacccagaacgtcatcaggccatgactctatttgggtaatagtcgacagacttaccaaagtggcatatttcattccggtaaagacaacttattccggaagtcgcttagcggaattgtatatggcaaggattgtgtgtttgcatggcgtccctaagaagatagtgtctgatcgaggcagtcagtttacttcaaatttttggaagaaacttcaggaagagatgggttctaagctgaactttagtactgcttatcatccgcaaacagacggacaaaccgaaagggtgaatcaaattttggaagacatgttgagagcttgtgctttagacttcggtggaagttgggataagaatctaccttatgcagaattttcgtacaacaacagttatcaagctagtcttcagatggctccttacgaagcactgtatggtcggaagtgccgcactccgcttttgtgggatcaaacgggagaacgtcaggttttcgggacggatatcctaagggaagcagaagaaaaggtaaaggtcattcaagaaagattgcgagtggctcagtctcgacataagagttatgccgataatcgccgcagagatttgagttttgaagaaggagattatgtgtatcttcgtgtcacgcctcttcgaggagttcgtcgttttcacaccaaaggaaaattggcaccgcgttttgtgggaccttataagatcgtcagtagaagaggagaggttgcttatcagttggagttacctcaatctttggcaggagtccataatgtgttccatgtttcgcaattgaaaaagtgtttaagggtacctaccgaagaagctaatcttgaacagatagaagtccaagaagatctgacctatgttgagagaccaatccgtatcctggaaatagatgagagaagaaccaggaatcgggttatccgtttttgcaaagtccaatggagtaatcactcggaagaagagtcaacttgggaacgagaagatgaattgaagtcagctcatccgcatctattcgccagttcttccgaatctcgtggacgagattccgtttaa

SEQ ID NO: 15180 - DNA, 5641 bp, Oryza sativa
  Clone ID: TFbOSC416072j.C1.o1.fg
atgggttctaagctgaactttcgtactgcttatcatccgcagacagacggacaaaccgaaagggtgaatcaaattttggaagacatgttgagagcttgtgctctagatttcggtggaagttgggataagaatctaccttatgcagaattttcatacaacaacagttatcaagctagtcttcagatggctccttacgaagcactatatggtcggaagtgccgcactccgcttttgtgggatcaaacgggagaacgtcaggttttcggaatggatatcctaagggaagcagaagaaaaggtaaagatcattcaagaaagattgcgtgtggctcagtctcgtcataagagttatgccgacaatcgccgcagagatttgagttttgaagagggagattatgtgtatcttcgtgtcacgcctcttcgaggagttcatcgttttcataccatgggaaaattggcaccgcgttttgtgggaccttataagattgtcagtagaagaggagaggttgcttatcagttggagttacctcaatctttggcaggagtacataatgtgttccatgtgtcgcaattgaaaaagtgtttaagggtacctaccgaagaagctaatattgagcagatagaggtccaagaggatttgacttatattgagaaaccaatccgtatcctggaaacaactcctggtttggaatggtacattcctggtttggagatagaactgtgcagccggggtggttgttcagaatggttgggcctatacaacaggatgccgcgttacaagcctgagtacctgtttggtgttgagggttttgtccaggagttgcgcacgatgtcctttgtcattggatttggaactgcccctttttatgcccagattcgtcatgatcatcatgaagagaagtgccgagtcaaagtcaccttaaatagcaatagtgaagaggtcccctcagtgatgtttgaagctggaggaagaaactacatccatgcatgtcaggaggtggcaaggatcgccataggagagctccgtgatcgctacagtgatcaattggccgacactgagtatcgttaccatcctcgtcaacctcagggaagtgaccgtggcagttaccttgagactgaaggaattgagaatgatgttaccacgaaacatttggttgagatgttgtgggctatggatgaaagtcgtgcggagactgtgttagcagctcaagatcgtgaagatcggaatcgtggtaagatttgcaagctagaatacaaggtggatcgtttggagaaggaattagccgcattgaagggagaagcaccgccgcagaaggccaggattcgtctcaccgcaaggaagagagctttatttgtccctcgctatcaactggcgccaaagatggtgaacactcgtagcaatgggaatggtcccaacaaccccaataacaataacaatggagagaatcccactcttgctcaagttcttgctcaacagactcagttaatgaacatgatgatgcagcaacttcagaatcagcaaaaccaagggaataatcatgcacctccacagaacaagttagcagaatttcttcgtgtgaggccgcctgttttctctagtaccactaatcctgttgaagctagtgattggctgcatgccatagagaagaagttggatttacttcagtgtactgatcaggagaaggtctcatttgcatcacatcagttgcatggccctgcctctgaatggtgggatcacttccgccttaacaggactactgctgaacctatcacttggcttgaattcaccgctgctttccggaagacgcatataccgtcgggagtagtgtctctcaagaaaaaggagttcaggtcgctttcccagggatctcgctctgttacggagtatctgcacgagttcaatcgtcttgctcgttatgctccggaagatgtgcgcaatgatgaagagcgccaggagaagtttttgggaggacttaatgatgagctttcttacccactcatggttggagattatcctgatttccagaaattagtggataaggctattcgtcaggaggacaagtacaatcgcatggagcagaagaaacgtcggattgctcaattcaagacacaacagggaaataatcagaagccgcgtcttactttaggaccccagcccatgccacagggaggttcttcgtctgttgttcgtccgcaacgtcagttcttcaacaacaatgctggcaacaacatccgtaatcaagctccacgtcttgttgcagctccagtacagcaacaacctgccaagagggagcaaggcaacaagcccgtggtgtgtttcaactgtggagatccaggacattatgctgacaagtgtccgaagccccgacgcgtgaaggttgtccctgcccagaataactctgctgtaccagcatccaaggctcgtgtaaatcatgtcgctgctgcagaagctcaagatgctccagatgtgattttgggtatgttccttgttaactcagttcctgcaacagtacttttcgattctggtgctacacattcattcttatctatgagttttgcgggaaatcatgggatggaagtagaagatcttagacgtcctttgatggttagtaccccaagtaatcaagcactctctttgcaacgtagcccctctgtcagaatagaaattcaaggagtaccatttctggccaatcttatcttgttagaatccaaagaccttgatgtcatcctagggatggactggttagccagacataaaggtgtgatagactgtgccaacagaaaagtaactctcaacagctatgatggtcgagttgtaactgttcatgcattgtcatctgagtctttaaggtcaagactgaaccagataactttggaagagattcctatagtccgggagtatcctgatgtgttcccagatgatttacctggtatgccgcctaaaagggatatagagttcagaatagatttggtacctggaacaactccgatccataagagaccttatcgaatggcagccaatgagttggcagaagttaagaggcaagtagatgatttgctacagaaaggatacattagaccgagttcatcaccatggggagctccggttatttttgtggaaaagaaagaccatactcagagaatgtgtgtggactatcgtgcattaaatgatgtgactatcaagaataagtatccgctgcccagaattgatgatttgtttgatcagcttaaaggtgccactgttttctccaagatagatcttcgaccagggtatcatcagttgagaatcaaagaggaagatatacctaagacagcttttaccactaggtatggattgttcgaatgtactgttatgtcttttggacttaccaatgcccctgctttcttcatgaacttgatgaataaggtgtttatggaatacttagacaagttcgtggtggtctttattgatgatattcttatctactctcgaaccaaagaagagcatgaggaacatcttcgccttgcattggagaagctacgagaacatcaactgtatgctaagtttagcaagtgtgaattttggttgtccgaagtgaaattccttggtcacgtcatctcagccggaggagttgccgttgatcctagtaacgtggaatccgtaaccaattggaagcaaccaaagacagtttcagagattcgcagtttcctaggccttgcaggatattatcggaggtttatagagaatttttccaagattgctaagcccatgacacgactgcttcagaaagatgtgaagtacaagtggtcggaagaatgtgagcggagttttcaagagttgaaaagtcgcttaatatcagctccaattttgattttgcctgatccaaagaagggttttcaagtgtattgtgatgcatccaaacttgggttaggttgtgttctgatgcaagatgggaaggtggttgcctatgcctctcgacagttacgtccgcatgagaagaactaccctactcatgatattgagttagctgcagtcgttcatgcattgaagatttggcgtcattatcttttcggtactcgtacagaagtgtacaccgatcacaagagtttaaagtatatctttactcagccggatctgaacatgagacaacggagatggttggaattaattaaggattatgacatgggaattcattatcatccgggaaaggctaatgttgtagcagacgctcttagcagaaaaggctattgcaatgctacagaaggacgacagttgccattggaattatgcaaggaatttgaaagattaaatttgggaattgtcgatagaggtttcgttgcagctttagaagcgaagcccactctaattgatcaagttagagaagcccaaattaatgatcctgatattcaagagatcaagaagaatatgaaaagaggaaaagctattggtttcttggaggatgagcacggaactgtatggttgggtgagagaatctgtgtccccgacaacaaagatttaaaggatgcaattctgaaagaagctcatgatactttatactccattcaccctggtagtactaagatgtaccaggatcttaaggaaagattttggtgggcaagtatgaagcgtgaaatcgcagaatacgtagcagtatgtgatgtttgccagcgagtcaaggcagaacatcagaaacccgccggtttgttgcaacctttgaagattcctgaatggaaatgggaagaaattggtatggattttattactggtttacccagaacgtcatcaggccatgactctatttgggtaatagttgacagacttaccaaagtggctcatttcattccggtaaagacaacttattccggaagtcgcttagcggaattgtatatggcaaggattgtgtgtttgcatggcgtccctaagaagatagtgtctgatcgaggcagtcagtttacttcaaatttttggaagaaacttcaggaagagatgggttctaagctgaactttcgtactgcttatcatccgcagacagacggacaaaccgaaagggtgaatcaaattttggaagacatgttgagagcttgtgctctagatttcggtggaagttgggataagaatctaccttatgcagaattttcatacaacaacagttatcaagctagtcttcagatggctccttacgaagcactatatggtcggaagtgccgcactccgcttttgtgggatcaaacgggagaacgtcaggttttcggaatggatatcctaagggaagcagaagaaaaggtaaagatcattcaagaaagattgcgtgtggctcagtctcgtcataagagttatgccgacaatcgccgcagagatttgagttttgaagagggagattatgtgtatcttcgtgtcacgcctcttcgaggagttcatcgttttcataccatgggaaaattggcaccgcgttttgtgggaccttataagattgtcagtagaagaggagagtttgcttatcagttggagttacctcaatctttggcaggagtacataatgtgttccatgtgtcgcaattgaaaaagtgtttaagggtacctaccgaagaagctaatattgagcagatagaggtccaagaggatttgacttatattgagaaaccaatccgtatcctggaaacaa

SEQ ID NO: 15181 - DNA, 4968 bp, Oryza sativa
  Clone ID: TFbOSC416688j.C1.o1.np
cgaaagtcggcccaaaacctctcttctctctcctcggcccaaattccgtcgtttccggagagtccgttttcgcagaagaagagtttgaagagttccaaggccagcaaggcaactcctggtttggaatggtacattcctggtttggagatagaactgtgcagctgggatggttgttcagaatggttgggcctatacaacaggatgccgcgttacaagcctgagtacctgtttggggttgagggttttgtccaggagttgcgtacgatgtcctttgtcattggatttgggactgcccctttttatgcccagattcctcatgatcgtcatgaagagaagtgccgagtcaaagtcaccttgaacagtaatagtgaagatatcccctcagtgatgtttgaagctggaggaagaaactacatccatgcatgtcaggaggtggcaaggatcgccataggagagctccgtgatcgctacagtgatcaattggccgacactgagtatcgctaccatcctcgccaaccacagggaagtgaccgtggcagttaccttgagactgaaggaattgagaatgatgctaccacgaagcatttggttgagttattgtgggctatggatgaaagtcgtgcggagactgtgttagccgctcaagatcgtgaagaccggaatcgtggtaagatttgcaagttagaagacaaggtggatcgtttggagaaggaattagccgcattgaagggagaagcaccgccgcagaaggccaggattcgtcttaccgcaaggaagagagctctatttgtccctcgctatcaactggcgccaaagatggtgaacactcgcagcaatgggaatggtcccaacaaccccaataacaacaacaatggagagaatcccactcttgctcaagttcttgctcaacagacacagcttatgaacatgatgatgcagcaatttcagaatcagcaaaaccaaggaaataatcatgcacctccacagaacaatttagcagaatttcttcgtgtgaggccgcctgttttctctagtaccactaatcctgttgaagctagtgattggctgcatgccatagagaagaagttggatttgcttcagtgtactgatcaggagaaggtctcatttgcatcacatcagttgcatggccctgcctctgaatggtgggatcacttccgccttaacaggactactgctgaacctgtcacttggcttgaattcaccgctgctttccggaagacgcatataccatcaggagtagtgtctctcaagaagaaggagttcaggtcgcttacccagggatctcgctctgttacggagtatctgcacgagttcaattgtcttgctcgttatgctccggaagatgtgcgcaatgatgaagagcgccaggagaagtttttgggaggacttaatgatgagctttcttacccactcatggttggagattatcctgatttccagaaattagtggataaggctattcgtcaggaggacaagtacaatcgcatggagcagaagaaacgtcggattgctcaattcaagacacaacagggaaataatcagaagccgcgtcttactttaggaccccagcccatgccacagggaggttcttcgtctattgttcgtccgcagcgtcagttcttcaacaacaatgctggcaacaacatccgtaatcaagctccacgtcctgttgcagctccagcacagcaacaacctgccaagagggagcaaggcagcaagcccgtggtgtgtttcaactgtggagatccaggacattatgctgacaagtgtccgaagccccgacgcgtgaaggttgtccctgcccagaataactctgctgtaccagcatccaaggctcgtgtaaatcatgtcgctgctgcagaagctcaagatgctccagatgtgattttgggtacgttccttgttaactcagttcctgcaacagtacttttcgattctggtgctacacattcattcctatctatgagttttgcgggaaatcatgggatggaagtagaagatcttagacgtcctttgatggttagtaccccaagtaatcaagcactctctttgcaacgtagcccctctgtcagaatagaaattcaaggagtaccatttctggccaatcttatcttgttagaatccaaagaccttgatgtcatcctagggatggactagttagccagacataaaggtgtgatagactgtgccaacaaaaaagtaactctcaccagctatgatggtcgagttgtaactgttcatgcattgtcatctgagtctttaaggtcaagactgaaccagataactttggaagagattcctatagtccgggagtatcctgatgtgttcccagatgatttacctggtatgccgcctaaaagggatatagagttcagaatagatttggtacctggaacaactccgatccataagagaccttatcgaatggcagccaatgagttggcagaagttaagaggcaagtagatgatttgctacagaaaggatacatcagaccgagttcatcaccatggggagctccggttatttttgtggaaaagaaagaccatactcagagaatgtgtgtggactatcgtgcactaaacgatgtgactatcaagaataagtatccactacccaggattgatgatttgtttgatcagcttaaaggtgccactgttttctccaagatagatcttcgatcagggtatcatcagttgagaatcaaagaggaagatatacctaagacagcttttaccactaggtatgggttgttcgaatgtactgttatgtcttttggacttaccaatgcccctgctttcttcatgaacttgatgaataaggtgtttatggaatacctagacaagttcgtggtggtctttattgatgatattcttatctactctcgaaccaaagaagagcatgaggaacatcttcgccttgcattggagaagctacgagaacatcaactgtatgctaagtttagcaagtgtgaattttggttgtctgaagtgaaattccttggtcatgtcatctcaagcggaggagttgccgtcgatcctagtaacgtggaatccgtaaccaattggaagcaaccaaagacagtttcagagattcgcagtttcctaggcctcgcaggatattatcggaggtttatagagaatttttccaagattgctaagcccatgacacgactgcttcagaaagatgtgaagtacaagtggtcggaagaatgtgagcggagttttcaagagttgaaaagtcgcttaatatcagctcctattttgattttgcctgatccaaagaagggttttcaagtgtattgcgatgcgtccaaacttgggttaggttgtgttctgatgcaagatgggaaggtggttgcctatgcctctcgacagttacgtccgcatgagaagaactaccctactcatgatattgagttagctgcagtcgttcatgcattgaagatttggcgtcattatcttttcggtactcgtacagaagtgtacaccgatcacaagagtttaaaggatatctttactcagccagatctgaacatgagacaacggagatggttggaattaattaaggattatgacatgagaattcattatcatccgggaaaggctaatgttgtagcagacgctcttagcagaaaaggctattgcaatgctacagaaggacgacagttgccattggaattatgcaaggaatttgaaagattaaatttgggaattgtcagtagaggtttcgttgcagccttagaagcgaagcccactctaattgatcaagttagagaagcccaaattaatgatcctgatattcaagaaatcaagaagaatatgagaagaggaaaagctatcggtttcttggaggatgagcaaggaactgtatggttgggtgagagaatctgtgtccccgacaacaaagatctaaaagatgcagttctgaaagaagctcatgatactttatactccattcaccctggtagtactaagatgtaccaggatctcaaggaaagattttggtgggcaagtatgaagcgtgaaatcgcagaatatgtagcagtatgtgatgtttgtcagcgagtcaaggcagaacatcagaaacccgtcggtttgttgcagcctttgaagattcctgaatggaaatgggaagaaataggtatggattttattactggtttacccagaacgtcatcaggccatgattctatttgggtgatagtcgacagacttaccaaagtggctcattttattccggtaaagacaacctattccggaagtcgcttggcggaattgtatatggcaaggattgtgtgtttgcatggcgtccctaagaagatagtgtctgatcgaggcagtcagtttacttcaaaattttggaagaaacttcaggaagagatgggttctaagctgaactttagcactgcttatcatccgcagacagacggacaaaccgaaagggtgaatcagattttggaagacatgttgagagcttgtgctttagatttcggtggaagttgggataagaatctaccttatgcagaattttcatacaacaacagttatcaagctagtttacagatggctccttacgaagcactgtatggtcggaagtgccgcactccgcttttgtgggatcaaacgggagaacgtcaggttttcgggacggatatcctaagggaagcagaagaaaaggtgaaaatcattcaagaaagattgcgagtggctcagtctcgtcataagagttatgccgacaatcgccgtagagatttgagttttgaagaaggagactatgtgtatcttcgtgtcacgcctcttcgaggagttcatcgttttcacaccaagggaaaattggcaccgcgttttgtgggaccttataagattgtcagtagaagaggagaggttgcttatcagttagaattacctcaatctttggcaggagtccataatgtgttccatgtgtct

SEQ ID NO: 15182 - DNA, 5232 bp, Oryza sativa
  Clone ID: TFbOSC417326j.C1.o1.np
ccgccttctctctcttctcggcccagtccggccattccgtcgtttccggagagtccgtttttgcagaagaagagtttgaagagttccaaggccagcaaggcaactcctggtttggaatggtacattcctggtttggagatagaactgtgcagccggggtggttgttcagaatggttgggcctatacaacaggatgccgtgttacaagcctgagtacctgtttggtgttgagggttttgtccaggagttgcgtacgatgtcctttgtcattggatttgggactgcccctttttatgcccagattcgtcatgatcgtcatgaagagaagtgccgagtcaaagtcaccatgaacagtaatagtgaagatatcccctcagcgatgttcgaagctggaggaagaaactacatccatgcatgtcaggaagtggcaaggatcgccataggagagctccgtgatagctacagtgatcaattggccgacactgagtatcgctaccatcctcgtcaaccacagggaagtgaccgtggcagttaccttgagactgaaggaattgagaatgatgctactacaaggcatttggttgagatgctgtgggctatggatgaaagtcgtgcggagactgtgttagcagctcaagatcgtgaagaccggaatcgtggtaagatttgcaagctagaagacaaggtggatcgtttggagaaggaattagccgcattgaagggagaagcaccgccgcagaaggccaggattcgtctcaccgcaaggaagagagctttgtttgtccctcgttatcaattggcgccaaagatggtgaacactcgcagcaacgggaatggtcctaacctcaacaaccccaataacaacaacaatggagagaatccaacccttgctcaagttcttgctcaacagactcagttaatgcacatgatgatgcagcaatttcagaatcagcaaaaccaagggaataatcatgcacctccacagaacaagttagcagaatttcttcgtgtgaggccgcctgttttctctagtaccactaatcctgttgaagctagtgattggctgcatgccatagagaagaagttggatttacttcagtgtactgatcaggagaaggtctcatttgcatcacatcagttgcatggccctgcctctgaatggtgggatcacttccgccttaacaggactactgctgaacctatcacttggcttgaattcaccgctgctttccggaagacgcatataccatcgggagtagtgtctctcaagaagaaggagttcaggtcgcttactcagggatctcgctctgttacggagtatctgcacgaattcaatcgtcttgctcgttatgctccggaagatgtgcgcaatgatgaagagcgccaggagaagtttttgggaggacttaatgatgagctttcttacccactcatggttggagattatcctgatttccagaaattagtggataaggctattcgtcaggaggacaagtacaatcgcatggagcagaagaaacgtcggattgctcaattcaagacacaacagggaaataatcagaagccgcgtcttactttaggaccccagtctatgccacagggaggttcttcgtctgttgttcgtccgcaacgtcagttcttcaacaacaatgctggcaacaacatccgtaatcaagctccacgtcctgttgcagctccagcacagcaacaacctgccaagagggagcaaggcaacaagcccgtggtgtgtttcaactgtggagatccaggacattatgctgacaagtgtccgaagccccgacgcgtgaaggttgtccctgcccagaataactctgctgtaccagcatccaaggctcgtgtaaatcatgtcgctactgcagaagctcaagatgctccagatgtgattttgggtacgttccttgttaactcagttcctgcaacagtacttttcgattctggtgctacacattcattcttatctatgagttttgcgggaaatcatgggatggaagtagaagatcttagacgtcctttgatggttagtaccccaagtaatcaagcactctctttgcaacgtagcccctctgtcagaatagaaattcaaggagtaccatttctggccaatcttatcttgttagaatccaaggaccttgatgtcatcctagggatggactggttagccagacataaaggtgtgatagactgtgccaacagaaaagtaactctcaacagctatgatggtcgagttgtaactgttcatgcattgtcatctgagtctttaaggtcaagactgaaccagataactttggaaaagattcctatagtccgggagtatcctgatgtgttcccagatgatttacctggtatgccgcctaaaagggatatagagttcagaatagatttggtacctggaacaactccgatccataagagaccttatcgaatggcagccaatgagttggcagaagttaagaggcaagtagatgatttgcttcagaaaggatacatcagaccgagttcatcaccatggggagctccggttatttttgtggaaaagaaagatcatacccagaggatgtgtgtggactatcgtgcactaaacgatgtgacaatcaagaataagtatccgctgcccagaattgatgatttgtttgatcagcttaaaggagccactgttttctccaagatagatcttcgatcagggtatcatcagttgagaatcaaagaggaagatatacctaagacagcttttaccactaggtatgggttgttcgaatgtactgttatgtcttttggacttaccaatgcccctgctttcttcatgaacttgatgaataaggtgtttatggaatacttagacaagttcgtggtggtctttattgatgatattcttatctactctcgaaccaaagaagagcatgaggaacatcttcgccttgcattggagaagctacgagaacatcaactgtatgctaagtttagcaagtgtgaattttggttgtccgaagtgaaattccttggtcacgtcatctcagccggaggagttgccgtcgatcctagtaacgtggaatccgtaaccaactggaaacaaccaaagacagtttcagagatccgcagtttcctaggccttgcaggatattatcggaggtttatagagaatttttccaagattgctaagcccatgacacgactgcttcagaaagatgtgaagtacaagtggtcggaagaatgtgaacagagttttcaagagttgaaaagtcgcttaatatcagctcctattttgattttgcctgatccaaagaagggtttccaggtgtattgcgatgcatccaaacttgggttaggttgtgttctgatgcaagatgggaaggtggttgcctatgcctctcgacagttacgtccgcatgagaagaactaccctactcatgatattgagttagctgcagtcgttcatgcattgaagatttggcgtcattatcttttcggtactcgtacagaagtgtacaccgatcacaagagtttaaagtatatctttactcagccggatctgaacatgagacaacggagatggttggaattaattaaggattatgacatgggaattcattatcatccgggaaaggctaatgttgtagcagacgctcttagcagaaaaggctattgcaatgttacagaaggacgacagttgccattggaattatgcaaggaatttgaaagattaaatttgggaattgtcggtagaggtttcgttgcagccttagaagcgaagcccactctaattgatcaggttagagaagcccaaattaatgatcctgatattcaagagatcaagaagaatatgagaagaggaaaagctattggtttcttggaggatgagcacggaactgtatggttgggtgagagaatctgtgtccccgacaacaaagatttaaaggatgcaattctgaaagaagctcatgatactttatactccattcaccctggtagtactaagatgtaccaggatcttaaggaaagattttggtgggcaagtatgaagcgtgaaatcgcagaatacgtagcagtatgtgatgtttgtcagcgagtcaaggcagaacatcagaaacccgccgggttgttgcagcctttgaagattcctgaatggaaatgggaagaaattggtatggattttattactggtttacccagaacgtcatcaggccatgactctatttgggtgatagtcgatagacttaccaaagtggctcattttattccggtaaagacaacttattccggaagtcgcttagcggaattgtatatggcaaggattgtgtgtttgcatggcgtccctaagaaaatagtgtctgatcgaggcagtcagtttacttcaaatttttggaagaaacttcaagaagagatgggttctaagctgaactttagtactgcttatcatccgcagacagacggacaaactgaaagggtgaatcaaattttggaagacatgttgagagcttgtgctctagatttcggtggaagttgggataagaatctaccttatgcagaattttcatacaacaacagttatcaagctagtctacagatggctccttacgaagcactgtatggtcggaagtgccgcactccgcttttgtgggatcaaacgggagaacgtcaggttttcggaacggatatcctaagggaagcagaagaaaaggtaaagatcattcaagaaagattgcgtgtggctcagtctcgtcataagagttatgccgacaatcgccgcagagatttgagttttgaagagggagattatgtgtatcttcgtgtcacgcctcttcgaggagttcatcgttttcataccaaaggaaaattggcaccgcgttttgtgggaccttataagattgtcagtagaagaggagaggttgcttatcagttagagttacctcaatctttggcaggagtccataatgtgttccatgtgtcgcaattgaaaaagtgtttaagggtacctaccgaagaagctaatattgagcagatagaagtccaagaggatttgacttatgttgagaaaccaatccgtatcctggaaacaagtgagagaagaaccaggaatcgagttatccgcttttgcaaagtccagtggagtaatcactcggaagaagaatcaacttgggaacgagaagatgaattgaagtcagctcatccgtatctgtttgtcagttcttccgaatctcgaggacgagattctgtt

SEQ ID NO: 15183 - DNA, 5022 bp, Oryza sativa
  Clone ID: TFbOSC419125j.C1.o3.fg
atggtgtggtacacctctgatcagagtaaaactattcgaatagccgtgcccgcggttatgggcgggtctaacaatgtctttcctcctggtttggaatggtacattcctggtttggagatagaactgtgcagccgggatggttgttcagaatggttgggcctatacaacaggatgccgcgctacaagcctgagtacttgtttggtgttgagggttttgtccaggagttgcgtacgatgtcctttgtcattggatttgggactgcccctttttatgcccagattcctcatgatcgtcatgaagagaagtgccgagtcaaagtcaccttgaacagcaatagtgaagaggtcccctcagtaatgttcgaagctggaggaagaaactacatccatgcatgtcaggaagtggcaaggatcgccataggagagcttcgcgatcgctacagtgatcagttggctgacactgagtatcgctaccatcctcgccaaccccaaggaagtgaccgtggcagttaccttgagactgaaggaattgagaatgatgctaccacaaggcatttggttgagatgctgtgggctatggatgaaagtcgtgtggagactgtgttagcggctcaagatcgtgaagaccggaatcgtggtaagatttgcaagctagaagacaaagtggatcgcttggagaaggaactagccgcgttgaagggagaagcaccgccgcagaaggccaggattcgtcttaccgcaaggaagagagctctatttgtccctcgctatcagttggcgccaaaggggtgggatgtaagtgcatgcgtttgtttgcttttgagtgttaggaagttgtttcccccggtttctcttcttgtgccctgtccatgccagatggtgaacactcgcagcaacgggaatggccccaacaacaacaataacaataacaatggagagaatcccacacttgctcaagttcttgctcaacagactcagcttatgaacatgatgatgcagcaacttcagaatcagcagaaccaaggaaataaccatgcacctcctcagaataagttagcagaatttcttcgtgtgaggccgcctgttttctctagtaccactaatcatgttgaagctggtgattggctgcatgccatagaaaagaagttggatttgcttcagtgcactgatcaggagaaggtctcatttgcatcacatcagttgcatggccctgcctctgaatggtgggatcacttccgcctgaataggattactgctgaacctatcacttggcttgaattcaccgctgctttccggaagacgcatataccatcgggagtggtgtctctcaagaagaaggagttcaggtcgctcacccagggatctcgctctgttacggagtatctgcacgagttcaatcgtcttgctcgttatgctccggaagatgtgcgcaatgatgaagagcgtcaagagaagttcttggaaggacttaatgatgagctttcttacccactcatgactggagaatattctgatttccagaaattagtggataaggctattcgccaggaggacaagtacaatcgcatggagcagaagaaacgccggattgctcacttcaaggcacaacaggggaataatcagaagccgcgtcttactttaggaccccagtccatgccacatggaggttcttcgtctgttattcgtccgcagcgccagttcttcaacaacaatgctggcaacaacatccgcaatcaagttccacgtcctgttgcagctccaacacagcaacaacctgccaagagggagcaaggcagcaagcccgtggtgtgtttcaactgtggagacccagggcattatgctgacaagtgtccgaagccccgacgcgtgaaggttgtctctacccagagcaactctaccgtaccagcatcaaaggcccgtgtcaatcatgtcgctgctgcagaagctcaagatgctccagatgtgattttgggtacgttccctgttaactcagttcctgcaacagtgcttttcgattctggtgctacacattcattcttatctatgagttttgcgggaaatcatgggatggaagtagaagatcttagacgtcctttgatggttagtaccccaagtaatcaagcactctctttgcaacgtagcccctctgtcagaatagaaattaaaggagtaccatttctggccaatcttatcttattagaatccaaagaccttgatgttatcctagggatggattggttagccagacataaaggtgtgatagactgtgccaacagaaaagtaactctcaccagtaatgatggtcgagttgtaactgttcatgcattgtcttctgagtctttaaggtcaagactgaatcagataactttggaagagattcctatagtccgggagtatcccgatgtgttcccagatgatttacctggtatgccgcctaaaagggatatagagttcagaatagatttggtacctggaacaactccaatccataagagaccttatagaatggcagccaatgagttggcagaagtcaagaggcaagtagatgatttgcttcagaaaggatacatcagaccgagttcatctccatggggagctccggttattttttgtggaaaagaaagatcatacccagaggatcttaaaagtgccactgttttctccaagatagatcttcgatcaggatatcaccagttgagaatcaaagaggaagatatacctaagacagcttttaccactaggtatgggttgttcgaatgtactgttatgtcttttggacttaccaatgcccctgctttcttcatgaacttgatgaataaggtgtttatggaatacctagacaagttcgtagtggtctttattgatgatattcttatctactctcgaaccaaagaagagcatgaagaacatcttcgccttgcattggagaagctacgagaacatcaactgtatgctaagtttagcaagtgtgaattttggttgtctgaagtgaaattccttggtcacgtcatctcagcaggaggagttgccgttgatcctagtaatgtggaatccgtaactaattggaagcaaccaaagacagtttcagagatccacagtttcctaggcctcgcaggatattaccggaggtttatagagaatttttccaagattgctaagcccatgacacgactgcttcagaaagatgtgaagtacaagtggtcggaagaatgtgagcagagttttcaagagttgaaaagtcgcttaatatcagctcctattttgattttacctgatccaaagaagggtttccaggtgtattgtgatgcatccaaacttgggttaggttgtgttctgatgcaagatgggaaggtggttgcctatgcatctcgtcagttacgtccgcatgagaagaactaccctactcatgatcttgagttagctgcagtagttcatgcgttgaaaatttggcgtcattatcttttcggtactcgtacagaggtgtataccgatcacaagagtttaaagtatatctttactcagccggatctgaacatgagacaaaggagatggttggaattaattaaggattatgacatgggaattcattatcacccgggaaaggctaatgttgtagcagacgctcttagcaggaaaggctattgcaatgctacggaaggacaacagttgccattggaattattcaaggaatttgaaagattaaatttgggaattgtcagtagaggtttcgttgcagccttagaagcgaagcccactctaattgatcaagttagagaagcccaaattaatgatcctgatattcaagaaatcaagaagaatatgagaagaggaaaggctatcggtttcttggaagatgagcaaggaactcgagtcaaggcagaacatcagaaacctgccggtttgttgcagcctttgaagattcctgaatggaaatgggaagaaattggtatggattttatcactggtttacccagaacgtcatcaggccatgactctatttgggtgatagtcgatagacttaccaaagtggctcattttattccggtaaagacaacttattctggaagtcgattggcggaattgtatatggcaaggattgtgtgtttgcatggcgtccctaagaaaatagtgtctgatcgaggcaatcagtttacttcaaatttttggaaaaagattcaggaagagatgggttctaagctgaactttagtactgcttatcatccgcagacagacgaacaaaccgaaagggtgaatcagattttggaagacatgttgagagcttgtgctttagatttcggtggaagttgggataagaatctaccctatgcagaattttcgtacaacaacagttatcaagctagtcttcagatggctccttacgaagcactgtatgatcggaagtgtcgcactccgcttttgtgggatcaaatgggagaacgtcaggttttcgggacggatatcctaagggaagcagaagaaaaggtaaaaatcattcaagaaagattgcgagtggctcagtcacgtcataagagttatgccgacaatcgtcgcagagatttgagttttgaagaaggagattatgtgtatcttcgtgtcacgcctcttcgaggggttcatcgttttcacaccaaaggaaaattggcaccgcgttttgtgggaccttataagattgtcagtagaagaggagaggtcgcttatcagttggagttacctcaatctttggcaggagtccataatgtgttccatgtgtcgcaattgaagaagtgtttaagagtacctaccgaagaagctaatcttgaacagatagaagtccaagaggatttgacttatgttgaaaaaccaatccgtatcttggaaatagatgagagaagaaccaggaatcgagttatccgtttttgcaaagtccagtggagtaatcactcggaagaagaatcaacttgggaacgagaagatgaattgaagtcagctcatccgcatctgttcgccagttcttccgaatctcgaggacgagattctgtttaa

SEQ ID NO: 15184 - DNA, 3854 bp, Oryza sativa
  Clone ID: TFbOSC5437j.C1.o1.fg
ctcctggtttggaatggtatattcctggtttggagatagaactgtgcagccgggatggttgttcagaacggttgggcctatgcaacaggatgccgcgctacaagcctgagtacttgtttggtgttgagggatttgtccaagagttgtgtacgatgtcctttgccataggatttgggactgcccctttttatgcccagattcctcatgatcgtcatgaagagaagtgccgagtcaaagtcactttgaacagtaatagtgatgaaatcccctcagtgatgttcgaagctggaggaagaaactacatccatgcgtgtcaggaggtggcaaggatcgccataggagagctccgcgatcgctattgtgatcagttggccgacactgagtatcgctaccatcctcgccaaccacagggaagtgatcgtggcagctaccttgagactgaaggaattgagaatgatgctaccacaaggcatttggttgagatgctgtgggctatggatgaaacccgtgcggagactgtgttagcagctcaagatcgtgaagaccggaatcgtggtaagatttgcaagctagaggacaaagtggatcgtttggagaaggaactagccgcattgaagggagaagcaccaccgcagaaggccagggttcgtcttaccgcaaggaagagagctctatttgtccctcgttaccaattggcgccaaagatggtgctcactcgtagcaacgggaatggccccaacaacaacaacaataacaacaacaacaatggagagaatcccacacttgcccaagtcctggctcaacagacacagcttatgaacataatgatgcagcaactccagaaccagcagaaccagggaaataaccatgcacctccccagaacaagttagcagaatttcttcgtgtgaggccgcccactttctctagcaccactaatcctgttgaagctggtgactggctgcacgccatagaaaagaagttggatttgcttcagtgcactgatcaggagaaggtctcatttgcatcacaccagctgcatggccctgcctctgaatggtgggatcatttccgccttaacaggactactactgaacctatcacttggcttgagttcaccgctgctttccggaagacgcatataccatcgggagtggtgtctctcaagaagaaggaattcaggtcgctcactcaagggtctcgctctgttacggagtatctgcacgagttcaatcgtctggctcgttatgctccggaagatgtgcgcactgatgaagagcgccaggagaagttcttggaaggacttaatgatgagctttcttacccactcatgactggggattatcctgatttccagaagttagtggataaggctattcgtcaggaggacaagtacaaccgcatggaacagaagaaacgtcagattgctcaattcatggcacaacaggggaatagtcagaggccgcgtcttactttaggaccccagtccatgcctcagggaggttcttcgtctgttgttcgtccgcagcgtcagttcttcaacaacaatgctggcaacaacctccgtaatcaagctccacgccctgttgcagctccaacacagcaacagcctgccaagagggagcaaggcagcaagcccgtggtgtgtttcaactgtggagacccaggacattacgctgacaagtgtccgaagccccgacgcgtgaaggttgtccctgcccagagcaactctaccgcaccagcatcaaaggcccgtgtcaaccatgttgctgctgcagaagctcaagatgctccagatgtgattttgggtacgttccttgttaacctagttcctgcaacagtgcttttcgattctggtgctacacattcattcttatctatgagttttgcgggaaatcatgggatggaagtagaagatcttagacgtcctttgatggttagtaccccaagtaatcaagcactctctttgcaacgtagcccctctgtcagaatagaaattcagggagtaccatttctggccaatcttatcctgttagaatccaaagaccttgatgtcatcctagggatggactggttagccagatataagggtgtgatagactgtgctaacagaaaagtaactctcaccagcaatgatggtcgagttgtaactgttcatgcattgtcttctgagtctttaaggtcaagactgaaccaaataactttggaagaaattcttgtagtccgggagtatcctgatgtgttcccagacgatttacgtggtatgccgcctaaaagggatatagagttcagaatagatttggtaccaggaacaattccgatccataagagaccttatagaatggcagccaatgaattggcaaaagtcaagaggcaagtagacgaaagaacgacagttgccattggagttattagaggttttgttgcggctttagaagcgaagctcactctaattgatcaagttagagaagcccaaattaatgatcctgatattctagaaatcaaaaagaatatgagaagaggaaaagctatcggtttcttggaggatgagcaaggaactgtatggttgggcgagagaatctgtgtccccgataacaaagatttaaaagatgcaattctgaaagaagctcatgatactttatattccattcaccctggtagtaccaaaatgtaccaggatctcaaggaaagattttggtggcgagtcaaggaagaacatcagaaacctgccggtttgttgcagtctttgaagattcctgaatggaaatgggaggaaatcggtatggatttcatcactggtctacccagaacgtcatcaggccatgactctatttgggtgatagtcgatagacttaccaacgtggctcatttcatcccagtaaagacaacatattccggaagtcggttggcggaattgtatatggcaaggattgtgtgtttgcatggcgtccctaagaaaatagtgtctgatcgaggcagtcagtttacttcaaatttttggaagaaacttcaggaagagatgggttctaagctgaactttagtactgcttatcatccgcagacagacggacaaaccgaaagggtgaatcagattttggaagacatgttgagagcttgtactttagacttcggtggaagttgggataagaatttaccttatgcggaattctcgtataacaacagttatcaagctagtcttcagatggctccttacgaagcactgtatattcggaagtgccgcactccgcttttgtgggatcaaacgggagaacgtcaggttttcgggacggatatcctgagggaagtagaagaaaaggtgaaaatcattcaagaaagattgcgagtggcccagtctcgtcataagagttatgccgacaatcgccgcagagatttgagttttgaagaaggagattatgtgtaccttcgtgtcacgcctcttcgaggtgttcatcgttttcacaccaaaggaaaattggcaccgcgttttgtgggaccttataagattgtcagtagaagaggagaggttgcttatcagttggagttacctcaatctttggcaggagtccataatgtgttccatgtgtcgcaattgaaaaagtgtttaagggtacctatcgaagaagctaatcttgaacagatagaagtccaagaggatctgacctatgttgagagaccaatccgtattttggaaatagatgagagaagaactagaaatcgagttattcgtttttgtaaagtccaatggagtaatcattcggaagaagaatcaacttgggaacgagaagatgaattgaagtcagctcatccgcatctgttcgccagttcttccgaatctcgaggacgagattctgtttaa

SEQ ID NO: 15185 - DNA, 2361 bp, Oryza sativa
  Clone ID: TFbOSC5659j.C1.o1.gm
atgacgtcagcagtgacgtcaccaccggcggcggtggctcggcggctcgggcttgcatgctcgccggcgaacgacggcacggcggcgcgaacggaaggcaccaacggccgcgccgcgccgccgttgcagccgccgtcgtcggtcgccgtcgccaccatcgggatcgcgaggtcgtcgccgtccccgtccaccgcttcgccgccgccgaagaccgccggagcaccgccgtcaccgtcgacccgaagaccgccgccgcttcttcctcatggccggcgccgtccgttgctcttccgccgtggttttggtcaccgcgccctagcgccgagtagcctcgagccgccgtcgccgccgtcgctccagccgtgcgccgccgccgttccggtcatcgccgtcgctcgggaagaccaccgtcgtggtcgccaagtcgccgccgtcctcgtccgccccttcgccgtcgccgaagaccgccggagcaccgtcgccgtcgtcaagccgaagagctccgccgtttcaacctcgtcgccgtcgccgtccgttggtcttccgccgctcctttggtcatcggcgagcatgcgcgtccgagccgccgagccgccgccgccggtggtgcgccaaggtgaagagaagcccggccgcacctcctccttcgtcgccggccgccgtagctcgccgttgccggtcaagccgagccgccgccgccgttcatctcgtcgccggccgtcgtcgttcgtcgtttggctcaagggtgagtaccgttgggttcgtctcgtcgttctccacgtgtacatgtcctccaaatttgcagccgaccatccaatctccggcgaggtcgccaacccgggccggccattgatgatccgcgccgagcagccgtctccgccgtcgccgccgcttgccgccaccgccattagcaccactaatcctgttgaagctggtgattggctccatgccatagagaagaagttggatttgcttcaatgcactgatcaggagaaggtctcatttgcatcccatcagttgcatggccctgcctctgaatggtgggatcacttccgtctgaataggactactgctgaacctatcacttggcttgaattcaccgctgctttccggaagacgcatataccatcgggagtggtgtctctcaagaagaaggaattcaggtcgctcactcagggatctcgctctgttacggagtatctgcacgagttcaatcgtcttgctcgttatgctccggaagataagttagtggataaggctattcgccaggaggacaagtacaatcgcatcgagcagaagaaacgtcggattgctcaattcaagacacaacaggggaatagtcagaggccgcgtcttactttaggaccccagtccatgccacagggaggttcttcgtctgttgttcgtccgcagcgtcagttcttcaacaacaatgctggcaacaacatccgcaatcaagctctacgccctgttgcagcctcgacacagcaacaacctgccaagagggagcaaggcagaaagcccgtggtgtgtttcaactgtggagacccaggacattacgctgacaagtgtccgaagccccgacgcgtgaaggttgtccctgctcagagcaactctaccgcaccagcgccaaaggcccgtgttaatcatgtcgctgctgcagaagctcaagatgctccagatgtgattttggaaaggatacatcagaccgagttcatctccatggggagctccggttatttttgtggaaaagaaagaccatacccagaggatcttaaaggtgccactgttttctccaagatagatcttcgatcagggtatcaccagttgagaatcaaagaggaagatatacctaagacagcttttaccactagatatgggttgttcgaatgtactgttatgtcttttggacttaccaatgcccctgctttcttcatgaacttgatgaataaggtgtttatggaatacctagacaagttcgtggtggtctttattgatgacattcttatgatcggagcgaggatcagggacacggacttcttgcaaggagatgacattctctggatcaatttcaggggaatctacgaactataccagctggacgccctcgacgtctctattatgagttgctggattttaatggagattcaaagggcccgacggcggagggttttcgatactggattcatcgaccctcggagagtaaacgtcacaatgcttgaccaatatccacaagaaacagaggacaatctcgtccatctcctgaaggcgcagcattacaagacgttcatactgttgccgtacaacatagaattccactgggtgcttttactcttcgacctgtcggcctgcaccgtcaac

SEQ ID NO: 15186 - DNA, 5173 bp, Oryza sativa
  Clone ID: TFbOSC5663j.C1.o2.np
atgtctttcgtgattagtctcacacctctcatcataataaaagaactgtgcagccgggatggttgttcagaacggttgggcctatgcaacaggatgccgcgctacaagcctgagtacttgtttggtgttgagggatttgtccaagagttgtgtacgatgtcctttgccataggatttgggactgcccctttttatgcccagattcctcatgatcgtcatgaagagaagtgccgagtcaaagtcactttgaacagtaatagtgatgaaatcccctcagtgatgttcgaagctggaggaagaaactacatccatgcgtgtcaggaggtggcaaggatcgccataggagagctccgcgatcgctattgtgatcagttggccgacactgagtatcgctaccatcctcgccaaccacagggaagtgatcgtggcagctaccttgagactgaaggaattgagaatgatgctaccacaaggcatttggttgagatgctgtgggctatggatgaaacccgtgcggagactgtgttagcagctcaagatcgtgaagaccggaatcgtggtaagatttgcaagctagaggacaaagtggatcgtttggagaaggaactagccgcattgaagggagaagcaccaccgcagaaggccagggttcgtcttaccgcaaggaagagagctctatttgtccctcgttaccaattggcgccaaagttttccccggtttctcttcttgtgctcctgtccatgccagatggtgctcactcgtagcaacgggaatggccccaacaacaacaacaataacaacaacaacaatggagagaatcccacacttgcccaagtcctggctcaacagacacagcttatgaacataatgatgcagcaactccagaaccagcagaaccagggaaataaccatgcacctccccagaacaagttagcagaatttcttcgtgtgaggccgcccactttctctagcaccactaatcctgttgaagctggtgactggctgcacgccatagaaaagaagttggatttgcttcagtgcactgatcaggagaaggtctcatttgcatcacaccagctgcatggccctgcctctgaatggtgggatcatttccgccttaacaggactactactgaacctatcacttggcttgagttcaccgctgctttccggaagacgcatataccatcgggagtggtgtctctcaagaagaaggaattcaggtcgctcactcaagggtctcgctctgttacggagtatctgcacgagttcaatcgtctggctcgttatgctccggaagatgtgcgcactgatgaagagcgccaggagaagttcttggaaggacttaatgatgagctttcttacccactcatgactggggattatcctgatttccagaagttagtggataaggctattcgtcaggaggacaagtacaaccgcatggaacagaagaaacgtcagattgctcaattcatggcacaacaggggaatagtcagaggccgcgtcttactttaggaccccagtccatgcctcagggaggttcttcgtctgttgttcgtccgcagcgtcagttcttcaacaacaatgctggcaacaacctccgtaatcaagctccacgccctgttgcagctccaacacagcaacagcctgccaagagggagcaaggcagcaagcccgtggtgtgtttcaactgtggagacccaggacattacgctgacaagtgtccgaagccccgacgcgtgaaggttgtccctgcccagagcaactctaccgcaccagcatcaaaggcccgtgtcaaccatgttgctgctgcagaagctcaagatgctccagatgtgattttgggtacgttccttgttaacctagttcctgcaacagtgcttttcgattctggtgctacacattcattcttatctatgagttttgcgggaaatcatgggatggaagtagaagatcttagacgtcctttgatggttagtaccccaagtaatcaagcactctctttgcaacgtagcccctctgtcagaatagaaattcagggagtaccatttctggccaatcttatcctgttagaatccaaagaccttgatgtcatcctagggatggactggttagccagatataagggtgtgatagactgtgctaacagaaaagtaactctcaccagcaatgatggtcgagttgtaactgttcatgcattgtcttctgagtctttaaggtcaagactgaaccaaataacgttggaagagattcctatagtccgggagtatcctgatgtgttcccagacgatttacctggtatgccgcctaaaagggatatagagttcagaatagatttggtaccaggaacaactccaatccacaagagaccttatagaatggcaaccaatgagtttgcagaagtcaagaggcaagtagacgatttgcttcagaaaggatacatcagaccgagttcatctccatggggagctccggttatttttgtggaaaagaaagatcatacccagaggatgtgtgtggactatcgtgctctaaatgatgtgactatcaagaataagtatccgctacccagaattgatgatttgtttgatcagcttaaaggtgccaccattttctccaagatagatcttcgatcagggtatcaccagttgagaatcaaagaggaagatatacctaagacagcttttaccactagatacggattgttcgaatgtactgttatgtcttttggacttaccaatgcccccactttcttcatgaacttgatgaataaggtgtttatggaatacctagacaagttcgtggtagtctttattgatgacattcttatctactcccgaaccaaagaagagcatgaagaacatcttcgccttgcactggagaagctgcgagaacatcagctgtatgctaagtttagcaagtgtgaattttggttgtcggaagtgaagttccttggtcacgtcatctcagcaggaggagttgccgtcgatcctagtaatgtggaatccgtaaccaactggaaacaaccaaagacagtttcagagattcgcagtttcctaggcctcgcaggatattatcggaggtttatagagaatttttccaagattgctaagcccatgacacgactgcttcagaaagatgtgaagtacaagtggtcagaagaatgtgagcagagttttcaagagttgaaggatcgcttaatatcagctcctattttgattttgcctgatccaaagaagggttttcaagtgtattgtgatgcatccaagcttgggttaggttgtgttttgatgcaagatgggaaggtggttgcctatgcatctcgtcagttacgtccgcatgaggagaactaccctactcatgatcttaagttagccgcagtggttcatgcgttgaaaatttagcgtcattatcttttcggtactcgtacagaggtgtataccgatcacaagagtttaaagtatatctttactcagccggatctgaacatgagacaacggagatggttggaattaattaaggattatgatatgggaattcattatcacccgggaaaggctaatgttgtagcagacgctcttagcaggaaaggctattgcaatgctacgaaaggacgacagttgccattggaattatgcaaggaatttgaaagatttaatttgggaattgccagtagaggtttcgttgcagccttagaagcaaagcccattctaattgatcaagttagagaagcccaaattaatgatcctgatattctagaaatcaaaaagaatatgagaagaggaaaagctatcggtttcttgagggatgagcaaggaactgtatggttgggcgagaaaatctgtgtccccgataacaaagatttaaaagatgcaattctgaaagaagctcatgatactttatattccattcaccttggtagtaccaaaatgtaccaggatctcaaggaaagattttggtgggcaagtatgaagcgtgaaatcgcagagtacgtagcagtatgtgatgtttgtcagcgagtcaaggcagaacatcaaaaacctgccggtttgttgcagcctttgaagattcctgaatggaaatgggaggaaatcggtatggatttcatcactggtttacccagaacgtcatcaggccatgactctatttgggtgatagttgacagacttaccaaagtggctcatttcatcccagtaaacacaacatattccggaagtcggttggcggaattgtatatggcaaggattgtgtgtttgcatggcgtccctaagaaaatagtgtctgatcgaggcagtcagtttacttcaaatttttggaagaaacttcaggaagagatgggttctaagctgaactttagtactgcttatcatccgcagacagacggacaaaccgaaagggtgaatcagattttggaagacatgttgagagcttgtactttagacttcggtggaagttgggataagaatttaccttatgcggaattctcgtataacaacagttatcaagctagtcttcagatggctccttacgaagcactgtatattcggaagtgccgcactccgcttttgtgggatcaaacgggagaacgtcaggttttcgggacggatatcctgagggaagtagaagaaaaggtgaaaatcattcaagaaagattgcgagtggcccagtctcgtcataagagttatgccgacaatcgccgcagagatttgagttttgaagaaggagattatgtgtatcttcgtgtcacgcctcttcgaggagttcatcgttttcacaccaaaggaaaattggcaccgcgttttgtgggaccttataagattgtcagtagaagaggagaggttgcttatcagttggagttacctcaatctttggcaggagtccataatgtgttccatgtgtcgcaattgaaaaagtgtttaagggtacctatcgaagaagctaatcttgaacaaatagaagtccaagaggatctgacctatgttgagagaccaatccgtattttggaaatagatgagagaagaaccaggaatccagttatccgtttttgtaaagtccaatggagtaatcattcggaagaagaatcaacttgggaacgagaagatgaattgaagtcagctcatccgcatctgttcgccagttcttccgaatctcgaggacgagattctgtt

SEQ ID NO: 15187 - DNA, 838 bp, Oryza sativa
  Clone ID: TFbOSC5862j.C1.o5.np
atgacgtcaccaccggcggcggcggctcggcggctcggacgcgcatgctcgcctgcgaacggcggcacttcggcacgaacggagggcaccaacgggtagagcgcgacgcggcgaactcaccgatgaccaaaggagcggcggaagaccaacggacggcgacggcgacgaggttgaaacggcggagctcttcggcttgacgacggcgacggtgctccggcggtcttcggcgacggcgaaggggcggacgaggacggcggcgacttggcgaccacgacggtggtcttcccgagcgacggcgatgaccggaacggcggcggcgcacggctggagcgacggcggcgacggcggctcgaggctactcggcgctagggcgctacggacgacgagaggcgaaggcgagggtagcggcgggtagagaagagctcgggggtccttttaaaggggttggagggcgacggcgaaggcccacggcggccggcgacgagaaggaaaggtcgggctcggagagagaaaagccgatccgattcgacctcgaatcaaacgctttccaagccgatttagccgatgtttccaaaagggaaaaggtagaggagatcccgaggatcatttcccctctatcaattcggccggagaaggaaaggagcggccggatttggaaggagacggcggcggcgcagcgctagggtttcgggaggcggccgacgcgaggaagacgacgacctgacaggcgggggcgcgcgcgcgtgggcggctgcggactggactgggccgacttgggccgaggagagagagaacggtttttgggccgactttcggcccagagccaaaagagactctt

SEQ ID NO: 15188 - DNA, 2035 bp, Oryza sativa
  Clone ID: TFbOSC5862j.C1.o6.gm
ccgcgccgcgccgccgttgcagccgccgtcgtcggtcgccgtcgccaccatcgggatcgcgaggtcgtcgccgtccccgtccaccgcttcgccgccgccgaagaccgccggagcaccgccgtcaccgtcgacccgaagaccgccgccgcttcttcctcatggccggcgccgtccgttgctcttccgccgtggttttggtcaccgcgccctagcgccgagtagcctcgagccgccgtcgccgccgtcgctccagccgtgcgccgccgccgttccggtcatcgccgtcgctcgggaagaccaccgtcgtggtcgccaagtcgccgccgtcctcgtccgccccttcgccgtcgccgaagaccgccggagcaccgtcgccgtcgtcaagccgaagagctccgccgtttcaacctcgtcgccgtcgccgtccgttggtcttccgccgctcctttggtcatcggcgagcatgcgcgtccgagccgccgagccgccgccgccggtggtgcgccaaggtgaagagaagcccggccgcacctcctccttcgtcgccggccgccgtagctcgccgttgccggtcaagccgagccgccgccgccgttcatctcgtcgccggccgtcgtcgttcgtcgtttggctcaagggtgagtaccgttgggttcgtctcgtcgttctccacgtgtacatgtcctccaaatttgcagccgaccatccaatctccggcgaggtcgccaacccgggccggccattgatgatccgcgccgagcagccgtctccgccgtcgccgccgcttgccgccaccgccattagcaccactaatcctgttgaagctggtgattggctccatgccatagagaagaagttggatttgcttcaatgcactgatcaggagaaggtctcatttgcatcccatcagttgcatggccctgcctctgaatggtgggatcacttccgtctgaataggactactgctgaacctatcacttggcttgaattcaccgctgctttccggaagacgcatataccatcgggagtggtgtctctcaagaagaaggaattcaggtcgctcactcagggatctcgctctgttacggagtatctgcacgagttcaatcgtcttgctcgttatgctccggaagataagttagtggataaggctattcgccaggaggacaagtacaatcgcatcgagcagaagaaacgtcggattgctcaattcaagacacaacaggggaatagtcagaggccgcgtcttactttaggaccccagtccatgccacagggaggttcttcgtctgttgttcgtccgcagcgtcagttcttcaacaacaatgctggcaacaacatccgcaatcaagctctacgccctgttgcagcctcgacacagcaacaacctgccaagagggagcaaggcagaaagcccgtggtgtgtttcaactgtggagacccaggacattacgctgacaagtgtccgaagccccgacgcgtgaaggttgtccctgctcagagcaactctaccgcaccagcgccaaaggcccgtgttaatcatgtcgctgctgcagaagctcaagatgctccagatgtgattttggaaaggatacatcagaccgagttcatctccatggggagctccggttatttttgtggaaaagaaagaccatacccagaggatcttaaaggtgccactgttttctccaagatagatcttcgatcagggtatcaccagttgagaatcaaagaggaagatatacctaagacagcttttaccactagatatgggttgttcgaatgtactgttatgtcttttggacttaccaatgcccctgctttcttcatgaacttgatgaataaggtgtttatggaatacctagacaagttcgtggtggtctttattgatgacattcttatgatcggagcgaggatcagggacacggacttcttgcaaggagatgacattctctggatcaatttcaggggaatctacgaactataccagctggacgccctcgacgtctctattatgagttgctggattttgtaa

SEQ ID NO: 15189 - DNA, 5272 bp, Oryza sativa
  Clone ID: TFbOSC6233j.C1.o1.np
gcttgtcagtcgtcgtcttcctcgggccgaaaccctagtttcgcgccgccgagctgccgtcgccgccgctttccaaatattccgtcgtttccggagagtccgttttcgcagaagaagagtttgaagagttccaaggccagcaaggcaactcctggtttggaatggtacattcctggtttggagatagaactgtgcagccgggatggttgttcagaatggttgggcctatacaacaggatgccgcgttacaagcctgagtacctgtttggtgttgagggttttgtccaggagttgcgcacgatgtcctttgtcattggatttgggactgcccctttttatgcccagattcctcatgaccgtcatgaagagaagtgccgagtcaaagtcaccttgaacagcaatagtgaagaggtcccctcagtgatgtttgaagctggaggaagaaattacatccatgcatgtcaggaagtggcaaggatcgccataggagagctccgtgatcgctacagtgatcaattggccgacactgagtatcgctaccatcctcgccaaccccagggaagtgaccgtggcagttaccttgagactgaaggaattgagaatgatgttaccacgaaacatttggttgagatgttgtgggctatggatgaaagtcgtgcggagactgtgttagcagctcaagatcgtgaagatcggaatcgtggtaagatttgcaagctagaagacaaggtggatcgtttggagaaggaattagccgcattgaagggagaagcaccgccgcagaaggcctggattcgtcttaccgcaaggaagagagctctatttgtccctcgctatcaattggcgccaaagatggtgaacactcgtagcaatgggaatggtcccaacaaccccaataacaacaacaatggagagaatcccactctggcccaagttcttgctcaacagactcagcttatgaacatgatgatgcagcaatttcagaatcagcaaaaccaagggaataatcatgcacctccacagaacaagttagcagaatttcttcgtgtaaggccgcctgttttctctagtaccactaatcctgttgaagctagtgattggctgcatgccatagagaagaagttggatttacttcagtgtactgatcaggagaaggtctcatttgcatcacatcagttgcatggccctgcctctgaatggtgggatcacttccgccttaacaggactactgatgaacctatcacttggcttgaattcaccgctgctttccgaaagacgcatataccatcgggagtagtgtctctcaagaagaaggagttcaggtcgcttactcagggatctcgctctgttacggagtatctgcacgagttcaatcgtcttgctcgttatgctccggaagatgtgcgcaatgatgaagagcgccaggagaagtttttgggaggacttaatgatgagctttcttacccactcatggttggagattatcctgatttccagaaattagtggataaggctattcgtcaggaggacaagtataatcgcatggagcagaagaaacgtcggattgctcaattcaagacacaacagggaaataatcagaagccgcgtcttactttaggaccccagcccatgtcacagggaggttcttcgtctgttgttcgtccgcagcgtcagttcttcaacaacaatgctggcaacaacatccgtaatcaagctccacgtcctgttgcagctccagcacagcaacaacctgccaagagggagcaaggcaacaagcccgtggtgtgtttcaactgtggagatccaggacattatgctgacaagtgtccgaagccccgacgcgtgaaggttgtccctacccagaataactctgctgtaccagcatcaaaggctcgtgtaaatcatgtcgctgctgcagaagctcaagatgctccagatgtgattttgggtacgttccttgttaactcagttcctgcaacagtacttttcgattctggtgctacacattcattcttatctatgagttttgcgggaaatcatgggatggaagtagaagatcttagacgtcctttgatggttagtaccccaagtaatcaagcactctctttgcaacgtagcccctctgtcagaatagaaattcaaggagtaccatttctggccaatcttatcttgttaaaatccaaagaccttgatgtcatcctagggatggactggttagccagacataaaggtgtgatagactgtgccaacaaaaaagtaactctcaacaggctatgatggtcgagttgtaactgttcatgcattgtcatctgagtctttaaggtcaagactgaaccagataactttggaagagattcctatagtccgggagtatcctgatgtgttcccagatgatttacctggtatgccgcctaaaagggatatagagttcagaatagatttggtacctggaacaactccgatccataagagaccttatcgaatggcagccaatgagttggcagaagttaagaggcaagtagatgatttgctacagaaaggatacatcagaccgagttcatcaccatggggagctccggttatttttgtggaaaagaaagaccatactcagagaatgtgtgtggactatcgtgcactaaacgatgtgactattaagaataagtatccactacccaggattgatgatttgtttgatcaacttaaaggtgccactgttttctccaagatagatcttcgatcagggtatcatcagttgagaatcaaagaggaagatatacctaagacagcttttaccactaggtatgggttgttcgaatgtaccgttatgtcttttggacttaccaatgcccctgctttcttcatgaatttgatgaataaggtgtttatggaatacctagacaagttcgtggtggtctttattgatgatattcttatctactctcgaaccaaagaagagcatgaggaacatcttcgtcttgcattggagaagctacgagaacatcaactgtatgctaagtttagcaagtgtgaattttggttgtccgaagtgaaattccttggtcacgtcatctcagccggaggagttgccgtcgatcctagtaacgtggaatccgtaaccaattggaagcaaccaaagacagtttcagagattcgcagtttcctaggccttgcaggatattatcggaggtttatagagaatttttccaagattgctaagcccatgacacgactgcttcagaaagatgtgaagtacaagtggtcggaagaatgtgagcggagttttcaagagttgaaaagtcgcttaatatccgctcctattttgattttgcctgatccaaagaagggttttcaagtgtattgtgatgcatccaaacttgggttaggttgtgttctgatgcaagatgggaaggtggttgcctatgcctctcgacagttacgtccgcatgagaagaactaccctactcatgatattgagttagctgcagtcgttcatgcattgaagatttggcgtcattatcttttcggtactcgtacagaagtgtacaccgatcacaagagtttaaagtatatctttactcagccggatctgaacatgagacaacggagatggttggaattaattaaggattatgacatgggaattcattatcatccgggaaaggctaatgttgtagcagacgctcttagcagaaaaggctattgcaatgctacagaaggacgacagttgccattggaattatgcaaggaatttgaaagattaaatttgggaattgtcggtagaggtttcgttgcaaccttaaaagccaagcccactctaattgatcaagttagagaagcccaaattaatgatcctgatattcaaaagatcaagaagaatatgagaagaggaaaagctattggtttcttggacgatgagcacggaactgtatggttgggtgagagaatctgtgtccccgacaacaaagatttaaaggatgcaattctgaaagaagctcatgatactttatactccattcatcctggtagtactaagatgtaccaggatcttaaggaaagattttggtgggcaagtatgaagcgtgaaatcgcagaatacgtagcagtatgtgatgtttgtcagcgagtcaaggcagaacatcagaaacccgccggtttgttgcaacctttgaagattcctgaatggaaatgggaagaaattggtatggattttattactggtttacccagaacgtcatcaggccatgactctatttgggtgatagtcgacagacttaccaaagtggctcatttcattccggtaaagacaacttattccggaagtcgcttagcagaattgtatatggcaaggattgtgtgtttgcatggcgtccctaagaagatagtgtctgatcgaggcagtcagtttacttcaaatttttggaagaaacttcaggaagagatgggttctaagctgaactttagtactgcttatcatccgcagacagatggacaaaccgaaagggtgaatcaaattttggaagacatgttgagagcttgtgctctagatttcggtggaagttgggataagaatctaccctatgcagaattttcgtacaacaacagttatcaagctagtctacagatggctccgtacgaagcactgtatggtcggaagtgccgcactccgcttttgtgggatcaaacgggagaacgtcaggttttcggaacggatatcctaagggaagcagaagaaaaggtaaagatcattcaagaaagattgcgtgtggctcagtctcgtcataagagttatgccgacaatcgccgcagagatttgagttttgaagagggagattatgtgtatcttcgtgtcacgccttttcgaggagttcatcgttttcgtaccaaaggaaaattggcaccgcgttttgtgggaccttataagattgtcagtagaagaggagaggttgcttatcagttggagttacctcaatctttggcaggagtacataatgtgttccatgtgtcgcaattgaaaaagtgtttaagggtacctaccgaagaagctaatattgagcagatagaagtccaagaagatttgacttatgttgagaaaccaatccgtatcctggaaacaagtgagagaagaaccaggaatcgagttatccgtttttgcaaagtccaatggagtaatcactcggaagaagaatcaacttgggaacgagaagatgaattggagtcagctcatccgcaattgttcgccagttcttccgaatctcgaggacgagattctgtt

SEQ ID NO: 15190 - DNA, 1824 bp, Oryza sativa
  Clone ID: TFbOSC6318j.C1.o1.fg
atgccgcgctacaagcctgagtacttgtttggtgttgagggatttgtccaagagttgcgtacgatgtcctttgccataggatttgggactgcccctttttatgcccagattcctcatgatcgtcacgaagaaaagtgccgagtcaaagtcaccttgaacagtaatagtgaagatatcccctcagagatgttcgaagctggaggaagaaactacatccatgcatgtcaggaggtggcaaggatcgccataggggagctccgcgatagctacagtgatcagttggccgacactgagtatcgctaccatcctcgccaaccacagggaagtgaccgtggcagctaccttgagactgagggaattgagaatgatgctaccacaaggcatttggttgagatgctgtgggctatggatgaaacccgtgcggagactatgttagcagttcaagatcgtgaagatcggaatcgtggtaagatttgcaagctagaggacaaggtggatcgtttggagaaggaactagccgcgttgaagggagaagcaccaccgcagaaggccaggattcgtcttaccgcaaggaagagagctctatttgtccctcgctaccaattggcgccaaaggtccgtgtggtggaaaaagaagttaccccagccctagcggatcctccggtcgttaacatggtgctcactcgcagcaacgggaatggccccaacaacaacaataacaacaacaatggagagaatcccacacttgcccaagtcctggctcaacaggcacagcttatgaacatgatgatgcagcaactccagaaccagcagaaccagctcaaccaaggaaacaacaatgctccgccgccgcagaacaagttagcagaatttcttcgtctgcatgccatagagaagaagttggatttgctccagtgcactgatcaggagaaggtctcatttgcatcacaccagctgcatggcccagcctctgaatggtgggatcacttccgccttaataggactactgctgaacctatcacttggcttgagttcaccgctgctttccggaagacacatataccatcgggagtggtgtttctcaagaagaaggaattcaggtcgctcacccagggatctcgctctgtcaccgagtatctgcacgagttcaatcgtctggctcgttatgctccagaagatgttcgcaatgatgaagagcgccaggagaagttcttggaaggacttaatgatgagctttcttaccccctcatgactggagattatcctgatttccagaagttggtggataaggctattcgtcaggaggacaagtacaatcgcatggaacaaaagaaacgccggattgctcacttcaaggcacaacaggggaatacttcgacacagcaacaacctgccaagaaggagcaaggcagcaagcccgtagtgtgtttcaactgtggagacccaggacattatgctgacaagtgtccgaagccccgacgcgtgaaagttgtccctgcccagagcaactctaccgcaccagcatccaaggctcgtgtcaatcatgttgctgctgcagaagctaaagatgctccagatgtgattttgggtacgttctttgttaactcagttcctgcaacagtgcttttcgattctggtgctacacattcattattatctatgagttttgcgggaaatcatgggatggaagtagaagatcttagacgtcctttgatggttagtaccccaagtaatcaagcactctctttgcaacgtagcccctctgtcagaatagaaattcaagaagtaccatttctggccaatcttattctgttagaatcctag

SEQ ID NO: 15191 - DNA, 859 bp, Oryza sativa
  Clone ID: TFbOSC6410j.C1.o3.np
gtgacatcaccgacagcggcggcggctcggtggaggagacggctcgaacggcgcacgctcgccggcgaacggcggcgcgaggacgcaaacggagggcaccaagatgaagcgggcggcacggcgaactcaccggcgaccaaaacgacggcggaaggtcaacggacggcgacggcgacgaggaggaagcggcgaagctcttcggcttgacgacggcgacgaagctccgacgatctctggcgacggcgaaggggcggacgaggacggcgacgacttggcgagcacgacggtggtcttcccgagcgacggcgacggctgaaacgacggcggcgcacggctggagcggcggcggcgacggcaaagctagggcacacggcgctagggcttttccgacgacgagaggcgaaggcgaaggtggcgacgggtagaggagacaccgggggtccttttaaaggggctcagaggcggcggcgaaggcccatggcggcggcaacggcgaaggaaagctcggcttggagagagggaaaccgatccgaaacgaactcgattccacgaacttccaaaacgatttagccaaagattccaaaggagaaaaggtagaggagatcccggagattgttttccctcaaacaattcggccggagaaggaaaggaacggccggatttggaaaggaacggcggcggcggcgcgctagggtttcgggcggcggcggacgaaggtagacgatgggtccgacaggtgggacccacctgtcagcgaccgaacgcgcgcgcgcggcggctgcggactgggccgaactgggccgaggagagagagagcggttttgggccgactttcggcccaaagccaaaagagactttt

SEQ ID NO: 15192 - DNA, 3951 bp, Oryza sativa
  Clone ID: TFbOSC7927j.C1.o1.fg
atggtgaacactcgcagcaatgggaatggtcccaacaaccccaataacaacaatggagagaatcctactctggcccaagttcttgctcaacagacacagcttatgaacatgatgatgcagcaatttcagaatcagcaaaaccagggaataatcatgcacctccccaaaacaaagaagaagttggatttacttcagtgtactgatcaggagaaggtttcatttgcatcacatcagttgcatggccctgcctctgaatggtgggatcacttccgccttaacaggactactgctgaacctatcacttggcttgaattcaccgctgctttccggaagacgcatataccatcgggagtagtgtctctcaagaagaaggagttcaggtcgcttactcagggatctcgctctgttacggagtatctgcacgagttcaatcgtcttgctcgttatgctccagaagatgtgcgcaatgatgaagagcgccaggagaagtttttgggaggacttaatgatgagctttcttacccactcatggttggagattaccctgatttccagaaattagtggataaggctattcgtcaggaggacaagtacaatcgcatggagcagaagaaacgtcggattgctcaattcaagacacaacaggggaataatcagaagccgcgtcttactttaggaccccagtccatgccacagggaggttcttcgtctgttgttcgtccgcaacgtcagttcttcaacaacaatgctggcaacaacatccgtaatcaagctccacgtcctgttgcagctccagcacagcaacaacctgccaagagggagcaaggcagcaagcccgtggtgtgtttcaactgtggagatccaggacattatgctgacaagtgtccgaagccccgacgcgtgaaggttgtccctacccagaataactctgctgtaccagcatccaaggctcgtgtaaatcatgtcgctgctgcagaagctcaagatgctccagatgtgattttggggatggactggttagccagacataaaggtgtgatagactgtgccaacagaaaagtaactctcaacagctatgatggtcgagttgtaactgttcatgcattgtcatctgagtctttaaggtcaagactgaaccagataactttggaagagattcctatagtccgggagtatcctgatgtgttcccagatgatttacctggtatgccgcctaaaagggatatagagttcagaatagatttggtacctggaacaactccgatccataagagaccttatcgaatggcagccaatgagttggcagaagttaagaggcaagtagatgatttgctacagaaaggatacattagaccgagttcatcaccatggggagctccggtgccactgtttttttccaagatagatcttcgatcagggtatcatcagttgagaatcaaagaggaagatatacctaagacagcttttaccactaggtatgggttgttcgaatgtactgttatgtcttttggacttaccaatgcccctgctttcttcatgaacttgatgaataaggtgtttatggaatacttagacaagttcgtggtggtctttattgatgatattcttatctactctcgaaccaaagaagagcatgaggaacatcttcgccttgcattggagaagctacgagaacatcaactgtatgctaagtttagcaagtgtgaattttggttgtctgaagtgaaattccttggtcacgtcatctcagcaggaggagttgccgtcgatcctagtaatgtggaatccgtaaccaattggaagcaaccaaagacagtttcagagattcgcagtttcctaggccttgccggatattatcggaggtttatagagaatttttccaagattgctaagcccatgacacgactgcttcagaaagatgtgaagtacaagtggtcggaagaatgtgagcagagttttcaagagttgaagaatcgcttagtatcagctcctattttgactttgcctgatccaaagaagggtttccaagtgtattgcgatgcatccaaacttgggttaggttgtgttttgatgcaagatgggaaggtggttgcctatgcctctcgacagttacgtccgcatgagaagaactaccctactcatgatattgagttagctgcagtcgttcatgcattgaagatttggcgtcattatcttttcggtactcgtacagaagtgtacaccgatcacaagagtttaaagtatatctttactcagccagatctgaacatgagacaacggagatggttggaattaattaaggattatgacatgggaattcattatcatccgggaaaggctaatgttgtagcagacgctcttagcagaaaaggctattgcaatgctacagaaggacgacagttgccattggaattatgcaaggaatttgaaagattaaatttgggaattgtcggtagaggtttcgttgcagccttagaagcgaagcccactctaattgatcaagttagagaagcccaaattaatgatcctgatattcaagagatcaagaagaatatgagaagaggaaaagctattggtttcttggaggatgagcacggaactgtatggttgggtgagagaatctgtgtccccgacaacaaagatttaaaggatgcaattctgaaagaagctcatgatactttatactccattcaccctggtagtactaagatgtaccaggatcttaaggaaagattttggtgggcaagtatgaagcgtgaaatcgcagaatacgtagcagtatgtgatgtttgtcagcgagtcaaggcagaacatcagaaaccagccggtttgttgcagcctttgaagattcctgaatggaaatgggaagaaatcggtatggattttatcactggtttacccagaacgtcatcgggccatgattctatttgggtgatagtcgacagacttaccaaagtggctcatttcattccggtaaagacaacttattccggaagtcgcttagcggaattgtatatggcaaggattgtgtgtttgcatggtgtccctaagaaaatagtgtctgatcgaggcagtcaatttacttcaaatttttggaagaaacttcaggaagagatgggttctaagctgaactttagtactgcttatcatccacagacagacggacaaaccgaaagggtgaatcagattttggaagacatgttgagagcttgtgctttagatttcggtggaagttgggataagaatttaccttatgcagaattttcatacaacaacagttatcaagctagtctacagatggctccgtacgaagcactgtatggtcggaagtgccgcactccgcttttgtgggatcaaacgggagaacgtcaggttttcggaacggatatcctaagggaagcagaagaaaaggtaaagatcattcaagaaagattgcgagtggctcagtctcgacataagagttatgccgacaatcgccgcagagatttgagttttgaagagggagattatgtgtatcttcgtgtcacgcctcttcgaggagttcatcgttttcataccaagggaaaattggcaccgcgttttgtgggaccttataagattgtcagtagaagaggagaggtcgcttatcagttggagttacctcaatctttggcaggagtccataatgtgttccatgtgtcgcaattgaaaaagtgtttaagggtacctaccgaaggagctaatattgaccagatagaagtccaagaggatttgacttatgttgagaaaccaatccgtatcctggaaacaagtgagagaagaaccaggaatcgagttatccgtttttgcaaagtccaatggagtaatcactcggaagaagaatcaacttgggaacgagaagatgaattgaagtcagctcatccgcttctgttcgccagttcttccgaatctcgaggacgagattctgtttaa

SEQ ID NO: 15193 - DNA, 3240 bp, Oryza sativa
  Clone ID: TFbOSC900039j.C1.o20.fg
atggagcagaagaaacgccggattgctcaattcaagacacaacaggggaataatcagaagccgcgtcttactttaggaccccagaccatgccacatggaggttcttcgtctgttgttcgtccgcagcgtcagttcttcaacaacaatgctggcaataacaaccgcaatcaagctccacgtcctgttgcagctccaacacagcaacagcctgccaagagggagcaaggcagcaagcccgtggtgtgtttcaactgtggagacccggggcattatgctgacaagtgtccgaagccccgacgcgtgaaggttgtccctgcccagagcaactctaccgtaccagcatcaaaggcccgtgtcaatcatgttgctgctgcggaagctcaagatgctccagatgtgattttgggtacgtttcttgttaacttagttcctgcagcagtgcttttcgattctggtgctacacattcattcttatctatgagttttgcgggaaatcatgggatggaagtagaagatcttagacgtcctttgatggttagtaccccaagtaatcaagcactctctttgcaacgtagcccctctgtcagaatagaaattaaaggagtattatttctggccaatcttatcctgttagaatccaaagaccttgatgtcatcctagggatggactggttagccagacataaaggtgtgatagactgtgccaacagaaaagtaactctcaccagtcatgatggtcgagttgtgattgttcatgcattgtcttctgagtctttaaggtcaagactgaaccagataactttggaagagattcctatagtccgggagtatcccgatgtgttcccagatgatttacctggtatgccgcctaaaagggatatagagttcggaatagatttggtacctggaacaactccgatccataagagaccttatagaatggcagccaatgagttggcagaagtcaagaggcaagtagatgatttgcttcagaaaggaaacatcagaccgagttcgtctccatggggagctccggttatttttggtggaaaagaaagatcatacccagaggatcttaaaggtgctactgttttctccaagatagatcttcgatcagggtatcaccagttgagaatcaaagaggaagatatacctaagacagcttttaccactaggtatgggttgtttgaatgtactgttatgtcttttggacttaccaatgcccctgctttcttcatgaacttgatgaataaggtgtttatggaatacctagacaagttcgtggtggtctttattgatgatattcttatctactcccgaactaaagaagagcatgaagaacatcttcgccttgcattagagaagctacgagaacatcaactgtatgctaagtttagcaagtgtgaattttggttgtctgaagtgaagttccttggtcacaaacaaccgaagacagtttcagagatctgcagtttcttaggcctcgcaggatattatcggaggtttatagagaatttttccaagattgctaagcccatgacacgactgcttcagaaagatgtgaagtacaagtggtcggaagaatgtgagcagagttttcaagagttgaagaatcgcttgatatcagctcctattttgattttacctgatccaaagaagggtttccaggacgggaaggtggttgcctatgcatctcgtcagttacgtccgcatgaaaagaactaccctactcatgatcttgaattggccgcagtagttcatgcgttgaaaatttggcgtcattatcttttcggtactcgtacagaggtatataccgatcacaagagtttaaagtatatctttactcagccggatctgaacatgagacaaaggagatggttggaattaattaaggactatgacatgggaatctgtgtccccgataacaaagatttaaaagatgcaattctgaaagaagcccatgataccttatactccattcaccctggtagtacaaaaatgtaccaggatctcaaggaaagattttggtgggcaagtatgaagcgtgaaatcgcagaatacgtagcagtatgtgatgtttgtcagcgagtcaaggcagaacatcagaaacccgccggtttgttgcagcctttgaagattcctgaatggaaatgggaagaaatcggtatggattttatcactggtttacccagaacgtcatcaggccacgactctatttgggtgatagtcgatagacttaccaaagtggctcatttcatcccggtaaagacaacctattccggaagtcggttggcggaattgtatatggcaaggatcgtgtgtttgcatggcgtccctaagaaaatagtgtctgatcgaggcagtcagtttacttcaaatttttggaagaagcttcaggaagagatgggttctaaattgaactttagtactgcttatcatccgcagacagacggacaaaccgaaagggtgaatcagattttggaagatatgttgagagcttgtgctttagatttcggtggaagttgggataagaatctaccttatgcagaattttcgtacaacaacagttatcaagctagtcttcagatggctccttacgaagcactgtatggtcggaagtgccgcactccgcttttgtgggatcgaacgggagaacgtcaggttttcgggacggatatcctaagggaagcagaagaaaaggtgaaaatcattcaagaaagattgcgtgtggcccagtcgcattataagagttatgccgacaatcgccgcagagatttgagttttgaagaaggggattatgtgtatcttcgtgtcacgcctcttcgaggagttcatcgttttcacaccaaaggaaaattggcaccgcgttttgtgggaccttatatgattgtcagtagaagaggagaggttgcttatcagttggagttacctcaatctttggcaggagtccataatgtgttccatgtgtcgcaattgaagaagtgtttaagggtacctaccgaagaagctaatcttgaacagatagaagtccaagaggatctgacctatgttgagaaaccaatccgtatcttggaaacaaatgagagaagaaccaggaatcgagttatccggttttgtaaagtccaatggagtaatcactcggaagaagaatcaacttgggaacgagaagatgaattgaagtcagctcatccgcatctgttcgccagttcttccgaatctcgaggacgagattctgtttaa

SEQ ID NO: 15194 - DNA, 2442 bp, Oryza sativa
  Clone ID: TFbOSC900061j.C1.o6.gm
atggtgaacactcgtagcaacgggaatggccccagtaacaataacaacaacaatggagagaatcccacacttgctcaagttcttgctcaacagactcagttaatgaacatgatgatgcagcaacttcagaaccagcagaaccaaggaaataaccatgcacttccccagaacacgttagcagaatttcttcgtgtgaggccgcctattttttctagtaccacaaatcctgttgaagctggtgattggctgcataccatagagaagaagttggatttgcttcagtgcaccgatcaggagaaggtctcatttgcatcacacaagttgcatggccctgcctctgaatggtgggatcacttccgcctgaataggactaccgctgaacctatcacttggcttgagttcaccgctgctttccggaagacgcatataccatcgggagtggtgtctctcaagaagaaggagttcaggttgctcacccagggatctcgctctgttacggagtatctgcacgagttcaatcgtcttactcgttatgctccggaagatgtgcgcaatgatgaagagcgccaggagaagttcttggaaggacttaatgatgagctttcttacccactcatgactggagattattatgatttccagaagttagtggataaggctattcgccaggaggacaagtacaatcgcatggagcaaaagaaacgccggattgctcaattcaagacacaacaggggaataatcagaagccacgtcttactttaggaccccagtctatgccacagggaggttcttcgtctgttgttcgtccgcagcgtcagttcttcaacaacaatgctggcaacaacatccgcaatcaagctctacgtcctgttgcagtttcgacacagcaacaacctgccaagaaggagcaaggcagcaagcccgtggtgtgtttcaattgtggagacccaggacattacgctgacaagtgtccgaagccccgacgcgtgaaggttgtccctgcccagagcaactctaccgcaccagcatcaaaggcccgtgtcaatcatgttgctgctgcagaagctcaagatgctccagatgtgattttggtgaagttccttggtcacgtcatctcagcgggaggagttgccgttgatcctagtaatgtggaatccgtaaccaactggaaacaaccgaagacagtttcagagattcgcagtttcctaggcctcgcaggatattaccggaggtttatagagaatttttccaagattgctaagcccatgacacgactgcttcagaaagatgtgaagtacaagtggtcagaagaatccttagaagcgaagcccactctaattgatcaagttagagaagcccaaattaatgatcctgatattcaagagatcaagaagaatatgagaagaggaaaagctatcagtttcttggaagatgagcaaggaactgtatggttgggtgaaagaatctgcgtccccgacaacaaagatttaaaagatgcaattctgaaagaagctcatgataccttatactccattcaccctggtagtaccaagatgtaccaggatctcaaggaaagattttggtgggcaatcatcgtcgtcgctcgggaagaccgccatcgtgctcgccaagtcgtcgccgtcctcgtctgccgcttcgccaccgtcggagaccgccggagcatcgtcgccgtcatcaagccgaagagcgccgccatttcaacctcgtcgccgtcgccgtccgttggtcttccgccgtcgctttggtcgccggaaggtgcgctgcggtggattgtgttatgcaaggggtattgtcacaactcctttccgaggtaccgtggtggtattgaggcacatggtgacatgataggcaagcgagtggtgcggcagttggcaagcgtgacgaggggtgtgcagcgagggcagtgcagcagccacggcggccggcgagtgcccgatgagcgcattgagctggcaaccacgatgaggggatcggagcactactacagaaggcctaaatggtgccggttgagaaaccccctaagaaaaacaacacatcaagaacacatccatcaagaatacaacaagaagaatacattcatcaagaaccggatggagaggaggagggcgccactgccttctccaccgccacagacgtctccactgccaccgccgtcgtcggatggagaggaggagggcgccgctgtcttctccaccaccaccactaccactgtcgcgggaagccgctgtcgccacctcccgggctatcggaccaccgccgcctcccctcccatcgccaagccgccacagccacctcccctcccgccagatctggcggaggggagggcgccgccgctgggccatcggaccaccgccgcctccgctcccgccgtcgagccgccgcagagccaccgccgccacctcctctcccgccagatctag

SEQ ID NO: 15195 - DNA, 5127 bp, Oryza sativa
  Clone ID: TFbOSC900076j.C1.o12.fg
atgccgcgctacaagcctgagtacttgtttggtgtcgatggttttgtccaggagttgcgtacgatgtcctttgtcattggatttgagactgcccctttttatgctcagattcgtcatgatcgtcatgaagagaagtgccgagtcaaagtcaccttgaacagtaatagtgaagatattccctcagtgatgttcgaagctggaggaagaaactacatccatgcatgtcaggaggtggcaaggatcgccataggagagctccgtgatcgctacagtgatcagttggccgacactgagtatcgctaccatcctcgccaaccccagggaagtgaccgtggcagctaccttgagactgaaggaattgagaatgatgctaccacaaggcatttggttgagatgctgtgggctatggatgaaagtcgtgcggagactgtgttagcggctcaagatcgtgaagaccggaatcgtggtaagatttgcaagttagaagacaaggtggatcgtttggagaaggaattagctgagttgaagggagaagcaccgccgcagaaggccaggattcgtcttaccgcaaggaagagagctttatttgtccctcgctatcaattggcgccaaagattcgtgtggtggagaaagaagttgccccaactttagcagatcctccggttatcatcataagtgatgatgaagaagaagaatccaagcgcaacaattccaagattgagtggttttccccggtttctcttcttgtgccctgcccatgcctgatggtgaacactcgcagcaacgggaatggccccagtaacaataacaatggagagaatcccactcttgctcaagttcttgctcaacagactcagcttatgaatatgatgatgcagcaacttcagaatcaaggaaataaccatgcatctcctcagaataagttagcagaatttcttcgtgtgaggccgcctattttctctagcaccactaatcctgttgaagctggtgattggttgcatgccatagataagaagttggatttgcttcaatgcactgatcaggagaaggtctcatttgcatcacatcagttgcatggccctgcctctgaatggtgggatcacttccgccttaacaggactactgctgaacctatcacttggcttgaattcaccgctgctttccggaagacgcatataccatcgggagtggtgtctctcaagaagaaggaattcaggtcgctcacccagggatctcgctctgttacggagtatttgcacgagttcaatcgtctggctcgttatgctccagaagatgtgcgcaatgatgaagagcgccaggagaagttcttggaaggacttaatgatgagctttcttacccactcatgactggagattatgctgatttccagaagttggtggataaggctattcgtcaggaggacaaatacaatcgcatggagcagaagaaacgccggattgctcaattcaagacacaacaggggaataatcagaggccgcgtcttactttaggaccccagtctatgccacagggaggttcttcgtctgttgttcgtccgcagcgtcagttcttcaacaacaatgctggcaacaatatccgtaatcaagctccacgccctgttgcagctccaacacagcaacaacctgccaagagggagcaaggcagcaagtccgtggtgtgtttcaactgtggagacccaggacattatgctgataagtgtccgaagccccgacgcgtgaaggcccgtgtcaatcatgttgctgctgcagaagctcaagatgctccagatgtgattttgggtacgttccttgttaactcagttcatgcaacagtgcttttcgattctggtgctacacattcattcttatctatgagttttgcgggaaatcatgggatggaagtagaagatcttagacgtcctttgatggttagtaccccaagtaatcaagcactctctttgcaacgtagcccctctgtcagaatagaaattcaaggaataccatttctggccaatcttatcttgttagaatccaaagaccttgatgtcatcttagggatggactggttagccagatataaaggtgtgatagactgtgctaacagaaaagtaactctcaccagcaatgatggtcgagttgtgactgttcatgcattgtcttctgagactttaaggtcaagactgaaccaaataactttggaagagattcctgtagtccgggagtattccgatgtgttcccagatgatttacctggtatgccgcctaaaagggatatagagttcagaatagatttggtaccaggaacaactccgatccataagagaccttatagaatggcagccaatgagttggcagaagtcaagaggcaagtagacgatttgcttcagaaaggatacatcagaccaagttcatctccatggggagctccggttatttttgtggaaaagaaagatcatacccagaggatgtgtgtggactatcgagccctaaacgatgtgactatcaagaataagtatccgctacctagaattgatgatttgtttgatcagcttaaaggtgctactgttttctccaagatagatcttcgatcagggtatcaccagttgagaatcaaagaggaagatatacctaagacagcatttaccactaggtatgggttgttcgaatgtactgttatgtcttttggacttaccaatgcccctgctttcttcgtgaacttgatgaataaggtgtttatggaatacttagacaagttcgtggtggtctttattgatgatattcttatctattctcgaaccaaagaagagcatgaagaacatctttgccttgcactagagaagctacgagaacatcaactgtatgctaagtttagcaagtgtgaattttggttgtctgaagtgaagttccttggtcacgtcatctcagcaggaggagttgccatcgatcctagtaatgtggaatccgtaaccaactggaagcaaccaaagacagtttcagagattcgcagtttcttaggcctcgcaggatattatcgaaggtttatagagaatttttccaagattgctaagcccatgacacgattacttcgaaaggatgtgaagtacaagtggtcagaagaatgtgagcggagttttcaagagttgaagaatcgcttaatatcagctcctattttgattttacctgatccaaagaagggtttccaagtgtattgcgatgcatccaaacttgggttaggttgtgttctgatgcaaaatgggaaggtggttgcctatgcatctcgtcagttacgtccgcatgagaagaactaccctactcatgatattgagttagccgtagtagttcatgcgttgaaaatttggcgtcattatcttttcggtactcgtacagaggtatataccgatcacaagagtttgaagtatatctttactcagccggatctgaacatgagacaaaggagatggttggaattaattaaggattatgacatgggaattcattatcacccggggaaggctaatgttgtagcagacgctcttagcagaaaaggctattgcaatgctacggaaggacgacagttgccgttggaattatgcaaggaatttgaaagattaaatttgggaattgtcagtagaggtttcgttgcagccctagaagcgaagcccactctaattgatcaagttagagaagcccaaattaatgatcctgatattcaagaaatcaagaagaatatgagaagaggaaaagctattggtttcttggaagatgagcaaggaactgtatggttgggtgagagaatctgtgtccccgacaacaaagatttaaaagatgcaattctgcaagaagctcatgatactttatactccattcaccctggtagtaccaagatgtaccaggatctcaaggaaagattttggtgggcaagtatgaagcgtgaaatcgcagaatacgtagtagtatgtgatgtttgtcagcgagtcaaggcagaacatcagaaacccgccggtttgttgcagcctttgaagattcctgaatggaaatgggaagaaatcggtatggattttatcactggtttgcccagaacgtcatcaggccatgactctatttgggtaatagtcgacagacttaccaaagtggcacatttcattccggtaaagacaacttattctagaagtcgattggcggaattgtatatggcaaggattgtgtgtttgcatggtgtccctaagaagatagtgtctgatcgaggcagtcagtttacttcaaatttttggaagaaacttcaggaagagatgggttctaagctgaactttagtactgcttatcatccgcagacagacggacaaaccgaaagggtgaatcagattttggaagacatgttgagagcttgtgctttagatttcggtggaagttgggataagaatctaccttatgcagaattttcgtacaacaacagttatcaagctagtctacagatggctccttacgaagcactgtatggtcggaagtgccgcactccgcttttgtgggatcaaacgggagaacgtcaggttttcgggacggatatcctaagggaagcagaagaaaaggtgaaaatcattcaagaaagattgcgagtggctcagtctcgacataagagttatgccgacaatcgctgcagagatttgagttttgaagaaggagattatgtgtatcttcgtgtcacgcctcttcgaggtgttcatcgttttcacaccaaaggaaaattggcaccgcgttttgtgggaccttataagattgtcagtagaagaggagaggttgcttatcaattggaattacctcaatccttggcaggagtccataatgtgttccatgtgtcgcaattgaagaagtgtttaagggtacctaccgaagaagctaatcttgaacagatagaagtccaagaggatctgacctatgttgagaaaccaatccgtatcttggaaacgaatgagagaagaaccaggaatcgagttatccgtttttgcaaagtccaatggagtaatcactcggaagaggagtcaacttgggaacgagaagatgaattgaagtcagctcatccacatctgttcgccagttcttccgaatctcgaggacgagattctgtttaa

SEQ ID NO: 15196 - DNA, 5478 bp, Oryza sativa
  Clone ID: TFbOSC900077j.C1.o11.gm
atggctgaccgcgatgaggaacagatattgtacgatacaatcgcggagggaagcagccagtactggaatgaagaagaggggaacgaggatccaaaccagtacttgaacgaggaagggaacatggagtgggatgcggaggggaaccagcaggggcacgtggaaagggatgtggaggggaaccaggaggaggaggctagtggtagtcaaccctccgttggacagaagagggcacgcgggcaacgaggtgcagcgaagaagcttgagggtcggcacatcataacggaagtggaagaagatggacgtcctagtgccccggccgaagccgccaagaactatgtacgtcacagcggttgggttgtgcgggataacatgcctgtcagtacggtgtactggcgaagaacaagggcacgcggagatcatgagagctttgtcccagattcggagaaagagatgctgtggaccacaatgctcgagacattcacccttcctgcgggtacagaggacaaagtgaaaaggtggattctgaagaaaatggcagaacagtttcagagcttcaagggagatctgtaccagaagtatatactgaaggggcagacaccgaacttcgacacattcccaaagctaagggatcactgggacgagttcgttgcatataagacaagtgaacaagggcaggcgatgatggaaagaaacaaagaaaatgccgccaagaagaagtaccatcaccacttggggtcaggaggctatagcgtcgcgatgccgaagtgggagcagatggaggctaccttgattgagaggggtatcgaaccggcaacagccaattggccggaacgatcgaagttctggtactatgctcacggtggaacgctcaacccagctgatggctcactggtcttcggcgatcagatacgagaggttgcgcgacgactaacagatgcagtggaagcctcctctcagagcacgttccgaccagacagagatagggacgagctgacactcgccctgcagactccagagcatccaggacgaacacgagggaaaggggtgattccttggaagattggtttcaaggaggacatccacacgtacaggagtcggatgaggagcaagagagataccgaggcgaagattgcagacctagagttccgggtatcgagctacgaactcaacatgcaagacgaggtggcaaggaaggttgatgaacgcatggccgcacatcggtcccatgatccccagccgaccattcctcctgcaatgccgtgcgccgccgccgtctcggtcgtcgtcatcgctcgggaaggccaccgtcgtgatcgccaagtcaccgccgttctcgtccgctccttcgccgccgccgaagaccgccggaacaccgtcgccgccgtcgacccgaagtttgccgccgcttcctcctcgtcgccgtcgccgtccgttgatcttccgccgctcttttggtcaccgatgccgcgctacaagcctgagtacttgtttggtgttgagggatttgtccaggagttgcgtacgatgtcctttgtcattggatttgggactgcccctttttatgcccagattcctcatgatcgtcacgaagagaagtgccgagtcaaagtcaccttgaacagtaatagtgaagatatcccctcagtgatgttcgaagctggaggaagaaactacatccatgcatgtcaggaggtggcaagaatcgccataggagagctccgtgatcgctacagtgatcagttggccgacactgagtatcgctatcatcctcgccaaccacagggaagtgaccgtggcagttaccttgagactgaaggaatcgagaatgatgctaccacaaggcatttggttgaaatgctgtgggctgtggatgaaactcgtgcagagactgtgttagcagctcaagatcgtgaagatcagaatcgtggtaagatttgcaagttaaaggacaaggtggatcgtttggagaaggaactagccgcattaaagggagaagcatcgccgcagaaggccaggattcgtcttaccgcaaggaagagagctctatttgtccctcgctatcaattggcgccaaatgttcgtgtggtggagaaagaagttgccccagcagatcctccggtcatcatcataagtgatgatgaagaagaagaatccaagcgcaatcattccaagattgagtgggtagcaactcaagatgatgaaaatgagccgaacgagccttcaatcgacctccgatgctcggaagaactagacaacgggaatggccccaataacaataacaatgaagggaacccaactcttgctcaagttctgtctcaacagactcagcttatgaacatgatgatgcagcaactccagaaccagcagaaccaaggaaataaccatgcacctccccataacaagttagcagaatttcttcgtgtgaggccgcctattttctctagtaccactaatactgttgaagctggtgattggttgcatgccatagagaagaagttggatttgcttcattgcactgatcaggagaaggtctcatttgcatcacaccagttgcatggccctgcctctgaatggtgggatcacttccgcctgaataggactactgctgaacctatcacttggcttgaattcaccgctgcttttcggaagacgcatataccatcgggagtggtgtctctcaagaagaaggaattcaggtcgctcacccagggatctcactctgttacggagtatctgcacgagttcaatcgtctggctcgttatgctccggaagatgtgcgcaatgatgaagagcgtcaggagaagttcttggaaggacttaatgatgagctttcttacccactcatgactggagattattctgatctccagaagttagtggataaggctattcgtcaggaggacaaatacaaccgcatggagcagaagaaacgccggattgctcaattcaagacacaacaggggaataatcagaagccgcgtcttactttagaaccccagtccatgccacagggaggttcttcgtcggttgttcgtccgcagcgtcagttcttcaacaacaatgctggcaacaacatccgcaatcaagctccacgtcctgttgcagctccagcacagcaacaacctgccaagagggagcaaggcagcaagcccgtggtgtgtttcaactgtggagacccaggacattatgctgacaagtgtccgaagccccgacgtgtgaaggttgtccctgcccagagcaactctaccgtaccagcatcaaaggcccgtgtcaatcatgttgctgctgcagaagctcaagatgctccagatgtgattttggtccggaagtatcccgatgtgttccctgatgatttgcctgccaatgagttggcagaagtcaagaggcaagtagatgatttgcttcagaaaggatacatcagaccgagttcatctccatggggagctccggttatttttgtggaaaagaaagatcatacccagaggatagctctagcgccgtgcaacctagcgccgctgtcgccgccgtcgctccagccgtgcgccgccgccgtctcggtcgtcgtcatcgctcgggaaggccaccgtcgtgatcgccaagtcgccgccattctcgtctgctccttcgccgcgaccgaagaccgccggaacgccgtcgccgctgtcgacccgaagtttgccgccgcttcctcctcgtcgccgtcgccgtccgttgatcttccgccgctcttttggtcaccggtggcgtcgggcatggccatcccaacggacccttcaggtacttaccactgcaggccgattccagcaggatactcgaaggtcgaagttgagttggtcgaaggcgcgtacgaggacctcgagctggattaccctggaggagacggcggtacatcatcctccctgggcgacaagcggcgtcttgtgcaccatctcctccggctccgccatctcctcctcaggatcctgcaccgtctcctcctcatgctccaccagcaccgtctccacctcaggctccagcatcgactcctcctcaggatcctgcaccgactcctcctcgtgctcctacacctactcccccgcaagctcctcttccggcaccttcaaaaagtcaagagacaattcaagcctcgaagtccagaaaagaagattcctatagaccccagtgtcaggaacttcttcaggggtatgtctgcatctgccaaggaggccatcaagctatcggactatgagcgaacgctaaagaaagcatcttctggaaagtccaaaccagtccctcaacttggagagcaaccaaaccaggagatcgagccattggtgaccggtaaagaaatgacgatagaacaatttattactgacaccggtctaactacgtatcaattgctaggagtcgcaccaatcgaaaaggcggaagtgaaatacatgtacgaactcggtaaaccgcttgtcaagcctgagctactgcagtccctacccacacaaatgtacaagttccgtcagctgtacatggagatgagcgccaccggtagagagatgatcggagcgaggatcagggacacggacttcttgcaaggagatgacattctctggatcaatttcaggggaatctacgaactataccagctggacgccctcgacgtctctattatgagttgctggattttaatggagattcaaagggcccgacggcggagggttttcgatactggattcatcgaccctcggaaagtaaacgtcgcaatgctcgaccaatatccacaagaaacagaggacaatctcgtccatctcttgaaggcgcagcattacaagacgttcatactgttgccatacaacacagaattccactgggtgcttttactcttcgacctggaggcctgcaccgtcaacgacgatatcacgatggactttgtcaagggattaccgtctgtccgcggcaaatcagtcatcctcaccatcgtcaatctactgtcgaaatacgtccacttcattccgttgggctacccatacacaatgatatcggtggcgcaggcgttctttatcgaggtggtcaggctacattacatccccaattcaatcgtcgttgcccacgatccggtgaccaggagcatgttctggccagagctctttcacttggcaagggtaaagctgaatctcagctcagcctttcacccccagagcggcggccaattggaggcagctaaccacgtcatcggggaacgtctcctccaagctcgggactactcaaagctatactgtaacgacagtcatcgcgacatggtcttcagcgtgggcgattctccagccggcgcacgcattcacagcgtgttcatcgttgttgtgtcaaagtcgttccatggtgcaccactggcgtccactatggccttgctagcaatcaccgatggtcttgtgttactggtgccggccaaagcatatccgtggtcgtgtggccctaggtgctcgggaactgctgatttagtgtga

SEQ ID NO: 15197 - DNA, 4365 bp, Oryza sativa
  Clone ID: TFbOSC900086j.C1.o14.fg
atgtcggtttggggagggagggaaaccgaccttggtggcggtcaaggagagcgagctggcgctcctggtttggaatggtacattcctggtttggagatagaactgtgcagccgggatggttgttcagaatggttgggcctatacaacaggatgccgcgttacaagcctgagtacctgtttggtgttgagggttttgtccaggagttgcgtacgatgtcctttgtcattggattcgggactgcccctttttatgcccagattcctcatgatcgtcatgaagaaaagtgccgagtcaaagtcactttgaacagtaatagtgaagatatcccctcagtgatgtttgaagctggaggaagaaattacatccatgcatgtcaggaggtggcaaggatcgccataggagagctccgtgatcgctacagtgatcaattggccgacactgagtatcgttaccatcctcgtcaaccacagggaagtgaccgtggcagttatcttgagactgaaggaattgagaatgatgctaccacaaggcatttggttgagatgctgtgggctatggatgaaagtcgtgcggagactgtactagcagctcaagatcgtgaagaccggaatcgtggtaagatttgcaagttagaagacaaggtggatcgtttggagaaggaattagccgcattgaagggagaagcaccgccgcagaaggccaggattcgtcttaccgcaaggaagagagctttatttgtccctcgctatcaactggcgccaaagatggtgaacactcgcagcaatgggaatggtcccaacaaccccaataacaacaacaatggagagaatcccactctggcccaagttcttgctcaacagacacagcttatgaacatgatgatgcagcaatttcagaatcagcaaaaccaaggaaataatcatgcacctccccagaacaagttagcagaatttcttcgtgtgaggccgcctgttttctctagtaccactaatcctgttgaagctagtgattggctgcatgccatagagaagaagttggatttgcttcagtgtactgatcaggagaaggtctcatttgcatcacatcagttgcatggccctgcctctgaatggtgggatcacttccgcctgaataggattactgctgaacctatcacttggcttgaattcaccgctgctttccggaagacgcatataccatcaggagtagtgtctctcgagaagaaggagttcagcgccaggagaagttttttgggaggacttaatgatgagctttcttacccactcatggttggagattatcctgatttccagaaattagtggataaggctatacgtcaggaggacaagtacaattgcatggagcagaggaaacgtcggattgctcacttcaaggcacaacaggggagtaatcagaagccgcgtcttactttaggaccccagcccatgtcacagggaggttcttcgtctgttgttcgtccgcagcgtcagttcttcaacaacaatgctggcaacaacatccgtaatcaagctccacgtcctgttgcagctccagtacagcaacaacctgccaagagggagcaaggcagcaagcccgtggtgtgtttcaactgtggagacccaggacattatgctgacaagtgtccgaagccccgtcgcgtgaaggttgtccctgcccagagtaactctgctgtaccagcatcaaaggcccgtgtcaatcatgtcgctgctgcagaagctcaagatgctccagatgtgattttgggtacgttccttgttaactcagttcctgcaacagtgcttttcgattctggtgctacacattcattcttatctatgagttttgcgggaaatcatgggatggaagtggaagatcttagacgtcctttgatggttagtaccccaagtaatcaagcactctctttgcaacgtagcccctctgtcagaatagaaattaaaggagtaccatttctggccaatcttatcttgttagaatccaaagaccttgatgtcatcctagggatggactggttagccagacataaagatgatttacctggtatgccgcctaaaagggatatagagttcagaatagatttggtacctggaacaactccgatccataagagaccttatcgaatggcagccaatgagttggcagaagttaagaggcaagtagatgatttgctacagaaaggatacatcagaccgagttcatcaccatggggagctccggttatttttgtggaaaagaaagaccatactcagagaatgtgtgtggactatcgtgcactaaacgatgtgactattaagaataagtatccactacccaggattgatgatttgtttgatcaactgaaaggtgccactgttttctccaagatagatcttcgatcagggtatcatcagttgagaatcaaagaggaggatatacctaagacagcttttaccactaggtatgggttgttcgaaggttgtgttctgatgcaagatgggaaggtggttgcctatgcatctcgacagttacgtccgcatgaaaagaactaccctactcatgatcttgagttagctgcagtagttcatgcgttgaagatttggcgtcattatcttttcggtactcgtacagaggtatataccgatcacaagagtttaaagtatatctttactcagccggatctgaacatgagacaacggagatggttggaattaattaaggattatgacatgggaattcattatcatccgggaaaggctaatgttgtagcagacgctcttagcagaaaaggctattgcaatgctacaaaaggacgacagttgccattggaattatgcaaggaatttgaaagattaaatttgggaattgtcggtagaggtttcgttgcagccttagaagcgaagcccactctaattgatcaagttagagaagcccaaattaatgatcctgatattcaagagatcaagaagaatatgagaagaggaaaagctattggtttcttggaggatgagcaaggaactgtatggttgggtgaaagaatttgtgtccctgacaacaaagatttgaaagatgcaattctgaaagaagctcatgatactttatactccattcaccctggtagtactaagatgtaccaggatctcaaggaaagattttggtgggcaagtatgaagcgtgaaatcgcagaatatgtagcagtatgtgatgtttgtcagcgagtcaaggcagaacatcagaaacccgccggtttgttgcagcctttgaagattcctgaatggaaatgggaagaaataggtatggattttatcactggtttacccagaacgtcatcaggccatgattctatttgggtgatagtcgacagacttaccaaagtggctcattttattccggtaaagacaacctattccggaagtcgcttggcggaattgtatatggcaaggattgtgtgtttgcatggcgtccctaagaagatagtgtctgatcgaggcagtcagtttacttcaaatttttggaagaaacttcaggaagagatgggttctaagctgaactttagcactgcttatcatccgcagacagacggacaaaccgaaagggtgaatcagattttggaagacatgttgagagcttgtgctctagatttcggtggaagttgggataagaatctaccttatgcagaattttcatacaacaacagttatcaagctagtcttcagatggctccttacgaagcactgtatggtcggaagtgtcgcactccacttttgtgggatcaaacgggagaacgtcaggttttcgggatggatatcctaagggaagcagaagaaaaggtaaagatcattcaagaaagattgcgtgtggctcagtctcgtcataagagttatgccgacaatcgccgtagggatttgagttttgaagaaggagattatgtgtatcttcgtgtcacgccttttcgaggagttcatcgttttcataccaagggaaaattggcaccgcgttttgtgggaccttataagattgtcagtagaagaggagaggtcgcttatcagttggagttacctcaatctttggcaggagtccataatgtgttccatgtttcgcaattgaaaaagtgtttaagggtacctaccgaagaagctaatcttgaccagatagaagtccaagaggatctgacctatgttgaaaaaccaatccgtatcctggaaacaagtgagagaagaaccaggaatcgagttatccgtttttgcaaagtccagtggagtaatcactcggaagaagaatcaacttgggaacgagaagatgaattgaagtcagctcatccgcacctgttcgccagttcttccgaatctcgaggacgagattctgtttaa

SEQ ID NO: 15198 - DNA, 3141 bp, Oryza sativa
  Clone ID: TFbOSC900094j.C1.o9.gm
atgccgcgttacaagcctgagtacctgtttggtgttgagggttttgtccaggagttgcgtacgatgtcctttgtcattggatttgggactgcccctttttatgcccagattcctcatgatcgtcatgaagagaagtgccgagtcaaagtcaccttgaacagtaatagtgaagatatcccctcagtgatgttcgaagctggaggaagaaactacatccatgcatgtcaggaggtggcaaggatcgccataggagagctccgtgatcgctacagtgatcaattggccgacactgagtatcgctaccatcctcgccaaccccagggaagtgaccgtggcagttaccttgagactgaaggaattgagaatgatgctaccacgaagcatttggttgagatgctgtgggctatggatgaaagtcgtgcggagattgtgttagccgctcaagatcgtgaagaccggaatcgtggtaagatttgcaagttagaagacaaggtggatcgtttggaaaaggaattagccgcattaaagggagaagcaccgccgcagaaggccaggattcgtcttaccgcaaggaagagagctctatttgtccctcgctatcaactggcgccaaaggttcgtgtggtggagaaagaagttgccccagctcaagcggatcctccggtcatcatcataagtgatgaagaagaagaatccaagcgcaaccattccaagattgagtgggtagcaacccaagatgatgaagacgagccgaacgagccttcaattgacctccgatgcttggaagaactagataccactaatcctgttgaagctagtgattggctgcatgccatagagaagaagttggatttgcttcagtgtactgatcaggagaaggtctcatttgcatcacatcagttgcatggccttgcctctgaatggtgggatcacttccgcctgaataggattactgctgaacctatcacttggcttgaattcaccgctgctttccggaagacgcatataccatcaggagtagtgtctctcaagaagaaggagttcaggtcgcttactcagggatctcgctctgttacggagtatctgcacgagttcaatcgtcttgctcgttatgctccggaagatgtgcgcaatgatgaagagcgccaggagaagtttttgggaggacttaatgatgagctttcttacccactcatggttggagattatcctgatttccagaaattagtggataaggctattcgtcaggaggacaagtacaatcgcatggagcagaagaaacgtcggattgctcaattcaagacacaacagggaaataatcagaagccgcgtcttactttaggaccccagcccatgccacatggaggttcttcgtctgttgttcgtccgcagcgtcagttcttcaacaacaatgctggcaacaacatccgtaatcaagctccacgtcctgttgcagctccagcacagcaacaacctgccaagagggagcaaggcagcaagcccgtggtgtgtttcaactgtggagatccaggacattatgctgacaagtgtccgaagccccgacgcgtgaaggttgtccctgtccagaataactctgctgtaccagcatccaaggctcgtgtaaatcatgtcgctgctgcagaagctcaagatgctccagatgtgattttggtccgggagtatcctgatgtgttcccagatgatttacctgccaatgagttggcagaagttaagaggcaagtagatgatttgctacagaaaggatacatcagaccgagttcatcaccatggggagctccggttatttttgtggaaaagaaagaccatactcagagaatgtgtgtggactatcgtgcactaaacgatgtgactatcaagaataagtatctactacccaggattgatgatttgtttgatcagctcaaaggtgccactgttttctccaagatagatcttcgatcagggtatcatcagttgagaatcaaagaggaagatatacctaagacagcttttaccactaggtatgggttgttcgaatgtactgttatgtcttttggacttaccaatgcccctgctttcttcatgaacttgatgaataaggtgtttatggaatacctagacaagttcgtggtggtctttattgatgatattcttatctactctcgaaccaaagaagagcatgaggaacatcttcgccttgcattggagaagctacgagaacatcaactgtatgctaagtttagcaagtgtgaattttggttgtctgaagtgaaattccatggtcacgtcatctcagccggaggagttgccgtcgatcctagtaacgtggaatccgtaaccaattggaagcaaccaaagacagtttcagagattcgcagtttcctaggcctcgcaggatattaccggaggtttatagagaatttttccaagattgctaagcccatgacacgactgcttcagaaagatgtaaagtacaagtggtcagaagaatccttagaagcgaagcccactctaattgatcaagttagagaagcccaaattaatgatcctgatattcaagagatcaagaagaatatgagaagaggaaaagctattggtttcttggaagatgagcaaggaactgtatggttgggtgagagaatctgtgtccccgacaacaaagatctaaaagatgcagttctgaaagaagctcatgatactttatactccattcaccctgcgccgtgtgccctagcttcgccgtcgccgccgccgctccagccgtgcgccgccgtcgtttcagccgtcgccatcgctcgggaagaccaccgtcgtgctcgccaagtcgtcgccgtcctcgtccgccccttcgccgtcgccggagatcaccggagcagcttcgccgtcgtcgacccgaaggttcccgccgcttcctcctcgtcgccgtcgccgtccgttggtcttccgccgccgtttaggtcaccgtgccgccgttcgccggcgagcgtgcgccgcccgagccgtctgctccgccgagccgccgccgctgtcggtgacgtcaccgctgacgtcatcggggtcgtccgccgtgagccggtcgtggaccgttcgatctcggccgtccgttttggatggatcgatctcggccgtccgttcgcgtga

SEQ ID NO: 15199 - DNA, 4605 bp, Oryza sativa
  Clone ID: TFbOSC900137j.C1.o1.fg
atgtcctttgtcataggatttgggactgcccctttttatgcccagattcctcatgatcgtcatgaagagaagtgccgagtcaaagtcaccttgaacagtaatagtgaagatatcccctcagtgatgttcgaagctggaggaagaaactacatccatgcatgtcaggagggaagtgaccgtggcagctaccttgagactgagggaattgagaatgatgctaccacaaggcatttggttgagatgctgtgggctatggatgaaacccgtgcagagactgtgttagcggctcaagatcgtgaagatcggaatcgtggtaagatttgcaagctagaagacaaggtggatcgtttggagaaggaattagccgcattaaagggagaagcaccgccgcagaaggccaggattcgtctcaccgcaaggaagagagctctatttgtccctcgctaccaattggcgccaaaggtccgtgtggtggagaaagaagttaccccagccctagcggatcctccggtcgtcaatatggtgaatactcgcagcaacgggaatggccccaacaacaacaatggagagaatcctacacttgcccaagttctggctcaacagactcagttaatgaacatgatgatgcagcaacttcagaaccagcagaaccaaggaaataactatgcacctcctcagaataagttagcagaatttcttcgtgtaaggccgcctactttctctagcaccactaatcctgttgaagctggtgattggctgcatgccatagagaagaagttggatttgcttcaatgcactgatcaggagaaggtctcatttgcatcccatcagttgcatggccctgccactgaatggtgggatcacttccgtctgaacaggactactgctgaacctatcacttggcttgagttcaccgctgctttccggaagacgcatataccatcgggagtggtgtctctcaagaagaaggaattcaggtcgctcactcaggggtctcgctctattacggagtatctgcacgagttcaatcgtctgactcgttatgctccggaagatgtgcgcaatgatgaagagcgtcaggagaagttcttggaaggacttaatgatgagctttcttacccactcatgactggggattatcctgattttcagaagttagtggataaggctattcgtcaggaagacaaatacaatcgcatggagcagaagaaacgtcggatcgctcaattcaagacacaacaggggaataatcaaaggccacgtcttactttaggaccccagtccatgccacagggaggttcttcgtctattgttcgtccgcagcgtcagttcttcaacaacaatgctggcaacaacatccgcaatcaagctccacgtcctgttgcagcttcgacacagcaacagcctgccaagagggagcaaggcagcaagcccgtggtgtgtttcaactgtggagacccaggacattatgctgacaagtgtccgaagccccgacgcatgaaggttgtccctacccggagcaactctaccgtaccagcatcaaaggcccgtgtcaatcatgttgctgctgcagaagctcaagatgctccagatgtgattttgggtacgttccttgttaacttagttcctgcaacaatgcttttcgattctggtgctacacattcattcttatctatgagttttgcaggaaatcatgggatggaagtaaaagatcttagacgtcctttgatggttagtaccccaagtaatcaagcactctctttgcaacgtagcccctctgtcagaatagaaattcaaggagtaccatttctggccaatcttatcctgttagaatccaaagaccttgatgtcatcccagggatggattggttagccagacataaaggtgtgatagactgtgctaacagaaaagtaactctcaccagcaatgatggtcgagttgtaactgttcatgcattgtctcctgagtctttaaggtcaagactgaaccaaatcactttggaagagattcctgtagtccgggagtattccgatgtgttcccagatgatttacctggtatgccgcctaaaagggatatagagttcagaatagatttggtacgaggaacaactccgatccataagagaccttatagaatggcagccaatgagttggcagaagtcaaaaggcaagtagatgatttgcttcagagaggatacatcagaccgagttcatcaccatggggagctccagttattttcgtggaaaagaaagatcatacccagaggatgtgtgtggactatcgtgcactaaatgatgtgactatcaagaataagtatccgctgcccaggattgatgatttgtttgatcagcttaaaggtgccactgttttctccaagatagatcttcgatcagggtatcaccagttgagaatcaaagaggaagatatacctaagacagcttttaccactaggtatgggttgttcgaatgtactgttatgtcttttggacttaccaatgcccccgctttcttcatgaacttgatgaataaggtgtttatggaatacctagacaagttcgtggtggtctttattgatgatattcttatctattcccgaaccaaagaagagcatgaagaacatcttcgccttgcattggagaagctacgagaacatcagttgtatgctaagtttagcaagtgtgaattttggttgtctgaagtgaagtttcttggtcacgtcatctcagccggaggagttgccatcgatcctagtaatgtggaatccgtaaccaactggaaacaaccaaagacagtttcagagattcacagtttcttaggcctcgcaggatattatcggaggtttatagagaatttttccaagattgctaagcccatgacacgattgcttcagaaagatgtgaagtacaagtggtcagaagaatgtgagcagagttttcaagagttgaagaatcacttgatatcagctcctattttgattttgcctgatccaaagaagggtttccaagtatattgcgatgcatccaaacttgggttaggttgtgttctgatgcaagatgggaaggtggttgcctatgcatctcgtcagttacgtccgcatgagaagaactaccctactcatgatcttgagttagctgcagtagttcatgcgttgaaaatttggcgtcattatcttttcggtactcgtacagaggtatataccgatcacaagagtttaaagtatatctttactcagccggatctgaacatgagacaaaggagatggttggaattaattaaggattatgacatgggaattcattatcacccgggaaaggctaatgttgtagcagacgctcttagcaggaaaggctattgcaatgctacggaaggacgacagttgccattggaattatgcaaggaatttgaaagattaaatttgggaattgtcagtagaggtttcgtggcagccttagaagtgaagtccactctaattgatcatgttagagaagcccaaattaatgatcctgatattcaagaaatcaagaagaatatgagaagaggaaaagctattggtttcttggaagatgagcaaggaactcgagtcaaggcagaacaccagaaacccgccggtttgttgcagcctttgaagattcctgaatggaaatgggaagaaatcggtatggattttatcactggtttacccagaacgtcatcaggtcatgactctatttgggtgatagtcgacagacttaccaaagtggctcatttcatcccagtaaagacaacctattctggaagtcggttagcggaattgtatatggccaggattacagacggacaaaccgaaagggtaaatcagattttggaagacatgttgagagcttgtgctttagatttcggtggaagttgggataagaatctaccttatgcagaattttcgtataacaacagttatcaagctagtcttcagatggctccttacgaagcactgtatggtcggaagtgccgcactccgcttttgtgggatcaaacgggagaacgtcaggttttcgggacggatatcctaagggaagcagaagaaaaggtgaaaatcattcaagaaagattgcgagtggctcagtatcgacataagagttatgccgacaatcgccgcagagatttgagttttgaagaaggagattatgtgtatcttcgtgtcacgccttttcgaggggttcatcgttttcataccaaaggaaaattggcaccacgttttgtgggaccttataagattgtcagtagaagaggagaggttgcttatcagttggaattacctcaatctttggcaggagtccataatgtgttccatgtgtcgcaactgaaaaagtgtttaagggtacctaccgaagaagctaatcttgaacagatagaagtccaagaggatctgacctatgttgagaaaccaatccgtattttggaaatagatgagagaagaaccagaaatcgagttatccgtttttgcaaagtccaatggagtaatcactcggaagaagaatcaacttgggaacgagaagatgaattgaagtcagctcatccgcatctgttcgccagttcttccgaatctcgaggacgagattctgtttaa

SEQ ID NO: 15200 - DNA, 1716 bp, Oryza sativa
  Clone ID: TFbOSC900177j.C1.o14.gm
atgatgatgcagcaactccagaaccagcagaaccagggaaataaccatgcacctccccagaacaagttagcagaatttcttcgtgtgaggccgcctattttctctagtaccactaatcctgttgaagctggtgattggttgcacgccatagaaaagaagttggatttgcttcagtgcactgatcaggagaaggtctcatttgcatcacaccagctgcatggccctgcctctgaatggtgggatcactcccgccttaataggattactgctgaacctatcacttggcttgagttcaccgctgctttccggaagacgcatataccatcgggagtggtgtctctcaagaagaaggaattcaggtcgctcacccagggatctcgctctgttaccgagtatctgcacgagttcaatcgtctggctcgttatgctctggaagatgtacgcactgatgaagagcgccaggagaagttcttggaaggacttaatgatgagctttcttatccactcatgactggggattatcctgatttccagaagttagtagataaggctattcgccaggaggacaagtacaatcgcatggaacagaagaaacgccggattgctcaattcaagacacaacaggggaataatcagaggccgcgtcttactttaggaccccagtccatgccacagggaggttcttcgtctgttgttcgtccgcagcgtcagttcttcaacaacaatgctggcaacaacatccgcaatcaagctccacgccctgttgcagctccaacacagcaacagcctgccaagagggagcaaggcagcaagcccgtagtgtgtttcaactgtggagacccaggacattatgctgacaagtgtccgaagccccgacgcgtgaaggctgtccctgcccagagcaactctaccgcaccagcgccaaaggcccgtgtcaatcatgttgctgctacagaagctcaagtccgggagtatcctgatgtgttcccagacgatttacctgaaaggatacatcagaccgagttcatctccatggggagctccagtaatttttgtggaaaagaaagaccatacccagaggatcttaaaggtgccaccgttttctccaagatagatcttcgatcagggtatcatcagttgagaatcaaagaggaagatatacctaagacagcttttaccactagcctcgcgccgccgttgtcgccgccgctccagccgtgctccgccgtcgctccagtcgtcgccgtcgctcggggaggtcgccatcgtggtcgccgtcgcgtcgccgtcctcgtccgccccttcgccgtcgctgaagaccgccggagcatcgtcgccgtcgtcaagccgaaggtcgacgccgcttcttcctcgacgccgtcgccgtccgttgatcttccgccgccgttttggtcgctggtgagttcgccgcgtcgccctctacgtcctggtgccctccgttcgcgccgccgcgccatcgttcgccggcgagcttgtgctcccgagccgccgcaggtggtgacgtcaccgctgacgtcatcgtcgtcgtctctcgtggtccggccgtggatcggagaagagtttgaagagttccaagggggtgattatgatccaggaaaggtgcgctgtagtggattgtgttgtgcaaggggtattgtcacagctcctttccgagaggaagagttctacagtgaagctgatggtgtggaggattag

SEQ ID NO: 15201 - DNA, 3738 bp, Oryza sativa
  Clone ID: TFbOSC900195j.C1.o4.gm
atggcgcagacgtgccagccctgcaccagctcgcttgctagcgcgcacgccgtgcgggctggcgcattaacacccccgtccaaaacggaaagagaaatattggttaaagacaagtttgcccatgggcccacttgtcaatccctctttctctctctctttctctgctcatcttcctcccgcgtccccggggtgtggcgctgcgacgaggcgtggaagctgtacgaggctgaggacgagaacgacccgttcgacgtcatacactcggagagcgtgccgtgttccaccgctgggacctcacccggcccgcggcgacgacgagcgcatgtcgccggcgtccaaccacaacctggcccagtcggtgaactggtgctgtctgaggtgcgcttcttccggagctatgcgcaccacgtggccatcagcgacgtcgcgagggagatgttgcgcgacatgtaccagatccccaaccgcgtgcacgtcatcctcaacagcgtcgacgaggcgcagttcgagcccgacggcgctgggccgcgcgttccgggaggacctcacgctgctcaagggcgccaacctggtgctcgcgccctagcgtcgtgtgcccttgcgccgccgtcgccgccgtcgctccagccgtgcgccgccgccgttccagacgtcgccgtcgctcgggaagaccgtcgtcgtggtcgccaagtcgtcgccgtcctcgtccgccccttcgccgtcgctgtagaccgccggagcaccgtcgccgtcgtcaagccgaagagcgccgccgcttcttcttcgtcgccgtcgccgttcgttcctcttccgccgtcgctttggtcgccgatgcggcgttacaagcctgagtacttgtttggtgttgagggatttatccaggagttgcgtacgatgtcctttgtcattggatttgggactgcccctttttatgcccagattcctcatgatcgtcacgaagagaagtgccgagtcaaagtcaccttgaacagtaatagtgaagatatcccctcagtgatgttcgaagctggaggaagaaactacatccatgcatgtcaggaggtggcaaggatcgccataagagagctccgcgatcgctacagtgatcagttggccgacactgagtatcgctaccatcctcgccaatcccaaggaagtgaccgtggcagctaccttgagactgaaggaattgagaatgatgctaccacaaggcatttggttgagatgctgtgggctatggatgaaagtcgtgcggagactgtgttagcggctcaagatcgtgaagaccggaatcgtggtaagatttgcaagctagaagacaaagtggatcgtttggagaaggagctagctacgttgaagggagaagcaccgccgcagaaggccaggattcgtcttaccgcaaggaagagagctctatttgtccctcgctaccaattggcgccaaaggtccgtgtggtggagaaagaagttgccccaaccctagcagatcctccggtcatcatcataagtgatgatgaagaagaagaatccaagcgcaaccattccaagattgagtgggtagctacccaagatgatgaagacgagccgaacgagccttcaatcgacctccgatgctcggaagaactagagactactgctgaacctatcacttggcttgagtttaccgttgctttccggaagacgcatataccatcgggagtggtgtctctcaagaagaaggagttcaggtcgctcacccagggatctcgctctgttacggagtatctgcacgagttcaatcgtctggctcgttatgctccggaagataagttagtggataaggctattcgtcaggaagacaagtacaaccgcatggagcagaagaaacgtcggattgctcaattcaagacacaacaggggaataatcagaagccgcgtcttactttaggaccccagtccatgccacagggaggttctttgtctgttgttcgtccgcagcgccagttcttcaacaacaatgctggcaacaacatccgcaatcaagctccacgtcctgttgcagcctcgacacagcaacaacctgccaagagggagcacggaagtaagcccgtggtgtgtttcaactgtggagacccaggacattacgctgacaagtgtccgaagccccgacgtgtgaaggttgtccctacccagagcaactctaccgtaccagcgtcaaaggctcgtgtcaatcatgtcgctgctgcagaagctcaagatgctccagatgtgattttggtccgggagtatcccgatgtgttcccagatgatttacctgccaatgagttggcagaagtcaagaggcaagtagacgatttgcttcagaaaggatacatcagaccgagttcatcaccatggggagctccagttatttttgtggaaaagaaagaccatacccagaggatgtgtgtggactatcgtgccctaaatgatgtgactatcaagaataagtatctgctacccagaattgatgatttgtttgatcagcttaaaggtgccactgttttctccaagatagatcttcgatcaggatatcaccagttgagaatcaaagaggaagatatacctaagacagcttttaccactaggtatggattgttcaaatgtactgttatgtcttttggacttaccaatgcccctgctttcttcatgaacttgatgaataaggtgtttatggaatacctagacaagttcgtggtggtctttattgatgatattcttatctactcccgaaccaaagaagagcatgaagaacatcttcgccttgcattagagaagctacgagaacatcaactgtatgctaagtttagcaagtgtgaattttggttgtctgaagtgaagttccttggtcacgtcatctcagccggaggagttgccgtcgatcctagtaatgtggaatccgtaaccaactggaagcaaccaaagacagtttcagagattcgcagtttcctaggcctcgcagctttagaagcgaagcccactctaattgatcaagttagagaagcccaaattaatgatcctgatattcaagagatcaagaagaatatgagaagaggaaaagctattggtttcttggaggatgagcaaggaactgtatggttaggtgagagaagctgtgtccccgacaacaaagatttaaaggatgcaattctgaaagaagctcatgatactttatactccattcaccctggtagtactaagatgtaccaggatctcaaggaaagattttggtgggcaaccgtcgccgttgctcgggaaggacgtcatcgtggtcgccaagtcgtcgccgtcctcgtccgtcccttcgccgtcgccggagatcgccggagcatcgtcgccgtcgtcaacccgaaggtttccgccgtttcctcctcgtcgccgtcgtcgtccgttgttcttccgccgccgttttggtcaccggtgtgttcgccgcgtcgtcctctacgtgctggtgtcctccgtttgcgtccttgtgccgccgttcgccggcgagcgtgcgccgcccgagccgttcgctctgccgagccgccgccgctgtcggtgacgtcaccgctgaagtcatcggggtcgtccgccggggcgattacgatccaggaaggtgcgctgcagtggattgtgttatgcgaggggtattgtcacaactcctttccgaggtaccgtggtggtattgaggcacatgaggaagagttctacaatgaggctgatggtgtggaggattag

SEQ ID NO: 15202 - DNA, 5577 bp, Oryza sativa
  Clone ID: TFbOSC900231j.C1.o16.fg
atgccgcatcccagcctccaccacgcttccctgaaccatcgccgaaaccctgctctcaccgctagcctgagccaccactgcctcctaccgctccagccgcgcatagccgcctgtccggtcgaccccgtggtgctctgtcgccctcctcgataccgcggccattgtccgcagcccgtccacccctccatcttcgcgaatcgccgccgaaaatccctcccctctgctcaagctcccttccataccttccccatgtcctaccagtcctcggccgcgctgcggtcttcaccgggaatcgccggagcgccgtcccaccgtcatcctgaggcgcccgccgtcaccttgctcgccgccggccgcctccttccgccgtttggcctctcgattccgtcgtttctggagagtccgttttcgcggaagaagagtttgaagagttccaaggccagcaaggcagctcctggtttggaatggtacattcctggtttggagatagaactgtgcagccggggtggttgttcagaatggttgggcctatacaacaggatgccgcgttacaagcctgagtacctgtttggtgttgagggttttgtccaggagttgcgtacgatgtcctttgtcattggatttgggactgcccctttttatgcccagattcctcatgatcgtcatgaagagaagtgccgagtcaaagtcaccttaaacagcaatagtgaagatgtcccctcagtgatgtttgaagctggaggaagaaactacatccatgcatgtcaggaagtggcaaggatcgccataggagagctccgtgatcgctacagtgatcaattggccgacactgagtatcgctaccatcctcgccaacctcagggaagtgaccgtggcagttaccttgagactgaaggaattgagaatgatgttaccacgaaacatttggttgagatgttgtgggctatggatgaaagtcgtgcggggactgtgttagcagctcaagatcgtgaagatcggaatcgtggtaagatttgcaagctagaagacaaggtggatcgtttggagaaggaattagccgcattgaagggagaagcaccgccgcagaaggccaggattcgtcttaccgcaaggaagagagccctatttgtccctcgctatcaattggcgccaaagatggtgaatactcgcagcaatgggaatggccctaacaaccccaataacaacaacaatggagagaatcctactctggcccaagttcttgctcaacagacacagcttatgaacatgatgatgcagcaatttcagaatcagcaaaaccaagggaataatcatgcacctccacagaacaagttagcagaatttcttcgtgtgaggccgcctgttttctctagtaccactaatcctgttgaagctagtgattggctgcatgccatagagaagaagttggatttacttcagtgtactgatcaggagaaggtctcatttgcatcacatcagttgcatggccctgcctctgaatggtgggatcacttccgccttaacaggactactgctgaacctatcacttggcttgaattcaccgctgctttccggaagacgcatataccatcaggagtagtgtctctcaagaagaaggagttcaggtcgctttcccagggatctcgctctgttacggagtacctacacgagttcaatcgtcttgctcgttatgctccggaagatgtgcgcaatgatgaagagcgccaggagaagtttttgggaggacttaatgatgagctttcttacccactcatggttggagattatcctgatttccagaaattagtggataaggctattcgtcaggaggacaagtacaatcgcatggagcagaagaaacgtcggattgctcaattcaagacacaacagggaaataatcagaagccgcgtcttactttaggaccccagcccatgccacagggaggttcatcgtctgttgttcgtccgcaacgtcagttcttcaacaacaatgctggcaacaacatccgtaatcaagctccacgtcctgttgcagctccaacacagcaacaacctgccaagagagagcaaggcaacaagcccgtggtgtgtttcaactgtggagacccaggacattacgctgacaagtgtccgaagccccgacgcgtgaaggttgtccctgcccagagcaattctaccgtatcagcatcaaaggcccgtgtaaatcatgtcgctgctgcagaagctcaagatgctccagatgtgattttgggtacgttccttgttaactcagttcctgcaacagtacttttcgattctggtgctacacattcattcttatctatgagttttgcgggaaatcatgggatggaagtagaagatcttagacgtcctttgatggttagtaccccaagtaatcaagcactctctttgcaacgtagcccctctgtcagaatagaaattcaaggagtaccatttctggccaatcttatcttgttagaatccaaagaccttgatgtcatcctagggatggactggttagccagacataaaggtgtgatagactgtgccaacagaaaagtaactctcaacagctatgatggtcgagttgtaactgttcatgcattgtcatctgagtttttaaggtcaagactgaaccagataactttggaagagattcctatagtccgggagtatcctgatgtgttcccagatgatttacctggtatgccgcctaaaagggatatagagttcagaatagatttggtacctggaacaactccgatccatacgagaccttatcgaatggcagccaatgagttggcagaagttaagaggcaagtagatgatttgctacagaaaggatacatcagaccgagttcatcaccatggggagctccggttatttttgtggaaaagaaagaccatactcagagaatgtgtgtggactatcgtgcactaaacgatgtgactatcaagaatgagtatccactacccaggattgatgatttgtttgatcaacttaaaggtgccactgttttctccaagatagatcttcgatcagggtatcatcagttgagaatcaaagaggaagatatacctaagacagctttcaccactaggtatgggttgttcgaatgtactgttatgtcttttggacttaccaatgcccctgctttcttcatgaacttgatgaataaggtgtttatggaatacttagacaagttcgtggtggtctttattgatgatattcttatctactctcgaaccaaagaagagcatgaggaacatcttcgccttgcattggagaagctacgagaacatcaactatatgctaagtttagcaagtgtgaattttggttgtccgaagtgaaattccttggtcacgtcatctcagccggaggagttgccgtcgatcctagtaacgtggaatccgtaaccaattggaagcaaccaaagacagtttcagagattcgcagtttcctaggccttgcaggatattatcggaggtttatagagaatttttccaagattgctaagcccatgacacgactgcttcagaaagatgtaaagtacaagtggtcggaagaatgtgaacagagttttcaagaattgaaaagtcgcttaatatcagctccaattttgattttgcctgatccaaagaagggttttcaagtgtattgtgatgcatccaaatttgggttaggttgtgttctgatgcaagaagggaaggtggttgcctatgcatctcgtcagttacgtccgcatgagaagaactaccctactcatgatattgagttagctgcagtcgttcatgcattgaagatttggcgtcattatcttttcggtactcgtacagaagtgtacaccgatcacaagagtttaaagtatatctttactcagccggatctgaacatgagacagcggagatggttggaattaattaaggattatgacatgggaattcattatcatccgggaaaggctaatgtggtagcagacgctcttagcagaaaaggctattgcaatgctacagaaggacgacagttgccattggaattatgcaaggaatttgaaagattaaatttgggaattgtcggtagaggtttcgttgcagccttagaagcgaagcccactctaattgatcaagttagagaagcccaaattaatgatcctgatattcaagagatcaagaagaaaatgagaagaggaaaagctattggtttcttggaggatgagcacggaactgtatggttgggtgagagaatctgtgtccccgacaacaaagatttaaaggatgcaattctgaaagaagctcatgatactttatactccattcaccctggtagtactaagatgtaccaggatcttaaggaaagattttggtgggcaagtatgaagcgtgaaatcgcagaatacgtagcagtatgtgatgtttgtcaacgagtcaaggcagaacatcagaaacccgccggtttgttgcaacctttgaagattcctgaatggaaatgggaagaaattggtatggattttattactggtttacccagaacgtcatcaggccatgactctatttgggtgatagtcgacagacttaccaaagtggctcatttcattccggtaaagacaacttattccggaagtcgcttagcggaattgtatatggcaaggattgtgtgtttgcatggcgtccctaagaagatagtgtctgatcgaggcagtcagtttacttcaaatttttggaagaaacttcaggaagagatgggttctaagctgaactttagtactgcttatcatccgcagacagacggacaaaccgaaagggtgaatcagattttggaagacatgttgagagcttgtgctctagatttcggtggaagttgggataagaatctaccctatgcagaatttttgtacaacaacagttatcaagctagtctacagatggctccgtacgaagcactgtatggtcggaagtgccgcactccgcttttgtgggatcaaacgggagaacgtcaggttttcggaacggatatcctaagggaagcagaagaaaaggtaaagatcattcaagaaagattgcgtgtggctcagtctcgtcataagagttatgccgacaatcgccgcagagatttgagttttgaagagggagattatgtgtatcttcgtgtcacgcctcttcgaggagttcatcgttttcataccaagggaaaattggcaccgcgttttgtgggaccttataagattgtcagtagaagaggagaggttgcttatcagttggagttacctcaatctttggcaggagtacataatgtgttccatgtgtcgcaattgaaaaagtgtttaagggtacctaccgaagaagctaatattgagcagatagaagtccaagaggatttgacttatgttgagaaaccaatccgtatcctagaaacaagtgagagaagaaccaggaatcgagttatccgtttttgcaaagtccagtggagtaatcactcggaagaagaatcaacttgggaacgagaagatgaattgaaatcagctcatccgtacctgttcgccagttcttccgaatctcgaggacgagattctgtttaa

SEQ ID NO: 15203 - DNA, 1899 bp, Oryza sativa
  Clone ID: TFbOSC900259j.C1.o5.gm
atggtgaacactcgcagcaacgggaatggccccaacaacaacaacaacaataacaacaacaatgaagggaacccaacccttgctcaagttcttgctcaacagactcagttaatgaacatgatgatgcagcaacttcagaatcagcaaaaccagggaaataaccatgcacctccccagaacaagttagcagaatttcttcgtgtgaggccgcctattttctctagtaccactaatcctgttgaagctggtgattggttgcatgccatagagaagaagttggatttgcttcagtgcactgatcaggagaaggtctcatttgcatcacaccagttgcatggccctgcctctgaatggtgggatcacttccgcctgaataggactactgctgaacctatcacttggcttgaattcaccgctgctttccggaagacgcatataccatcgggagtggtgtctctcaagaagaaggagttcaggtcgctcacccagggatctcgctctgttacggagtatttgcacgagttcaatcgtctggctcgttatgctccggaagatgttcgcaatgatgaagagcgccaggagaagttcttggaaggacttaatgatgagctttcttacccactcatgactggagattattctgatttccagaagttggtggataaggctattcgtcaggaggacaaatacaatcgcatggagcagaagaaacgccggattgctcaattcaagacacaacaggggaataatcagaagccgcgtcttactttaggaccccagtctgtgccacaggggggttcttcgtctgttgttcgtccgcagcgtcagttcttcaacaacaatgctggcaacaacatccgcaatcaagctccacgtcctgttgcagctccaacacagcaacagcctgccaagagggagcaaggcaacaagcccgtggtgtgtttcaactgtggagacccaggacattatgctgacaagtgtccgaagccccgacgtgtgaaggttgtccctgtccagagcagctctaccgcactagcattaaaggcccgtgtcaatcatgttgctgctgcagaagctcaagatgctccagatgtgattttggtccgggagtatcccgatgtgttcccagatgatttacctgccaatgagttggcagaagttaagaggcaagtagacgatttgcttcagaaaggatacatcagaccgagttcatctccatggggagctccagttatttttgtggaaaagaaagaccatacccagaggatgtgtgtggactatcgtgccctaaatgatgtgactatcaagaataagtacccgctacccagaattgatgatttgtttgatcagcttaaaggtgccaccgttttctccaagatcgatcttcgatcaggccacgaagtttcctcctcgtcgccggccgccgtgggccttcgtcgccgcctccgagcccctttaaaaggaccccgagctcttctctacccgccgccacccttgccttcgcctctcgtcgtcggaaatgccctagcgccgtgtgccctagcgccgtcgtcgccgccgtcgctccagccgtgcgccgccgccgttccagacgtcgccgtcgctcgggaaggacgtcatcgtggtcgccaagtcgtcgccgtcctcgtctgccgcttcgccaccgtcggagaccgccggagcatcgtcgccgccgtcgacccgaagagcttcgccgcttcctcctcgtcgccgtcgccgtccgttgatcttccgccgtcgctttggtcgccggaaggtgcgctgcagtggattgtgttatgcaaggggtattgtcacaactcctttccgaggtaccgtggtggtattgaggcacatgaggaagagttctacagtgaagctgatggtgtggaggattag

SEQ ID NO: 15204 - DNA, 3372 bp, Oryza sativa
  Clone ID: TFbOSC900307j.C1.o3.gm
atggaggtattggtccaagttggctcagtgtcaaatctggcaacaacatgctcaatgtcatcatcatttgtggtctctgctagaatcatcatggtagatgccggcccagtcagccgcgcgcgcgcgccctcgctgtcgctgacagtcgccgtcgctcgggaaggacgtcaacgtggtcgccaagtcgtcgccgtcctcgtccgtcccttcgccgccgtcggagaccaccggagcgtcatcgccgccgtcgacccgaagagcttcgccgcttcctcctcgtcgccgtcgcccgtcctcgcgccgccgttcgccggcgagcgtgcgccgcctgagccgtcccagccgccgagccgccgccgccggggtgacgtcatcgctgacgccatcaagtccgtccgccgtgagccgctgtggacccgatcgatctcggccgtccatcttggatcgatgccgcgttacaagcctgagtacctgtttggtgttgagggttttgtccaggagttgcgtacgatgtcctttgccataggatttgggactgcccctttttatgcccagattcctcatgatcgtcatgaagagaagtgccgagtcaaagtcaccttgaacagtaatagtgaagatatcccctcagtgatgtttgaagctggaggaagaaactacatccatgcatgtcaggaggtggcaaggatcgccataggagagctccgtgatcgctacagtgatcaattggccgacactgagtatcgctaccatcctcgccaaccccagggaagtgaccgtggcagttaccttgagactgaaggaattgagaatgatgctaccacgaagcatttggttgagatgttgtgggctatggatgaaagtcgtgcggagactgtgttagccgctcaagatcgtgaagaccggaatcgtggtaagatttgcaagctagaagacaaggtggatcgtttggagaaggaattagccgcattgaagggagaagcaccgcctcagaaggccaggattcgtcttaccgcaaggaagagagctttatttgtccctcgctatcaactggcgccaaaggttcgtgtggtggagaaagaagttgccccagctcaagcggatcctccggagaaggtctcatttgcatcacatcagttgcatggccctgcctctgaatggtgggatcacttccgcctgaataggattactgctgaacctatcacttggcttgaattcaccgctgctttccggaagacgcatataccatcaggagtagtgtctctcaagaagaaggagttcaggtcgcttactcagggatctcgctctgttacggagtatctgcacgagttcaatcgtcttgctcgttatgctccggaagatgtgcgcaatgatgaagagcgccaggagaagtttttgggaggacttaatgatgagctttcttacccactcatggttggagattatcctgatttccagaaattagtggataaggctattcgtcaggaggacaagtacaatcgcatggagcagaagaaacgtcggattgctcaattcaagacacaacagggaaataatcagaagccgcgtcttactttaggaccccagtccatgccacatggaggttcttcgtctgttgttcgtccgcagcgtcagttcttcaacaacaatgctggcaacaacatccgtaatcaagctccacgtcctgttgcagctccagtacagcaacaacctgccaagagggagcaaggcagcaagcccgtggtgtgtttcaactgtggagacccaggacattatgctgacaagtgtccgaagccccgtcgcgtgaaggttgtccctgcccagagtaactctgctgtaccagcatccaaggcccgtgtcaatcatgtcgctgctgcagaagctcaagatgctccagatgtgattttggtccgggagtatcctgatgtgttcccagatgatttacctgccaatgagttggcagaagtcaagaggcaagtagacgatttgctacagaaaggatacatcagaccgagttcatcaccttggggagctccggttatttttgtggaaaagaaagatcatacccagaggatgtgtgtggactatcgtgcactaaacgatgtgactatcaagaataagtatccgctacccagaattgatgatttgtttgatcagcttaaaggtgccactgttttctccaagatagatcttcgatcagggtatcaccagttgagaatcaaagaggaagatatacctaagacagcttttaccactaggtatgggttgttcgaatgtactgttatgtcttttggacttaccaatgcccctgctttcttcatgaacttgatgaataaggtgtttatggaatacctagacaagttcgtggcggtctttattgatgatattcttatctactctcgaaccaaagaagagcatgaggaacatcttcgccttgcattggagaagctacgagaacatcaactgtatgctaagtttagcaagtgtgaattttggttgtctgaagtgaaattccttggtcacgtcatctcagccggaggagttgccgtcgatcctagtaacgtggaatccgtaaccaattggaagcaaccaaagacagtttcagagattcgcagtttcctaggcctcgcaggatattaccggaggtttatagagaatttttccaagattgctaagcccatgacacgactgcttcagaaagatgtgaagtacaagtggtcggaagaattggctcaaggggaggcgagggaggcgccggccgggctcggctcggcctcaaagccgaccggcggccatggcgaccggcggcggcacgcgcggtcaccggcggtgaccggcagcgcgggagacggcggcggccgagcaaggcatggcgatgctagcggcggcggcggcgcgacgcggcggtggctagggcagagaggagcgacggccggagctcgccggaaagcggcggcgcccgggctcgcggtgcgagcgcgatttgtggcacgggagagctcggggaaattggggaaaagagagaagggagcccgtggatgctttttatgggctcgggaaggcgggatcgaggccggacgtggcggaatcggccggcgaagtggggaggtgaagtggagctcgtggggaggtcaaaccggcgccgtttcttgcggggtgagtgggggaaatggtggaggacgtggagggggtcgtgtccacgtcgttggatgcgagctcgggtgcgggagggcgccggattttgcggcgacgtggggaggctcgggcggccatggcggcggttggagccggaggaaggggatgacaggaatctcgtcccgagattctgggatggctagaaagaaagccggtgctgatggacggtctgactga

SEQ ID NO: 15205 - DNA, 4341 bp, Oryza sativa
  Clone ID: TFbOSC900312j.C1.o15.fg
atgtccgcatcgttttggtgtcctccgttcgcgtcctcgcgccgtcgttcgccggcgagcatgcgcgcccgagccgccgagccgccgccggtggtgacgtcgtcactgacgtcatcgtcgtcgtccctcgtgattccgacgtttccggagagtccgttttcgcaggagaagaatttgaagagttccaaggccagcaaggcaactcctggtttggaatggtatattcctggtttgaagatagaactgtgcagccgggatggttgttcagaatggttgggcctatgcaacaggattcctcatgatcgtcatgaagagaagtgccgagtcaaagtcactttgaacagtaatagtgaagatatcccctcagtgatgttcgaagctggaggaagaaactacatccatgcatgtcaggaggtagcaaggatcgccataggcgagctccgcgatcgctacagtgatcagttggccgacactgagtatcgctaccattctcgtcaaccccagggaagtgaccgtggcagctaccttgagactgagggaattgagaatgatgctaccacaaggcatttggttgagatgctgtgggctatggatgaaacccgtgcagagactgtgttagcagctcaagatcgtgaagatcggaatcgaggtaagatttgcaagctagaggacaaagtggatcgattggagaaggaactagccgcgttgaagggagaagcaccaccgcagaaggccaggatttgtcttaccgcaaggaagagagctctatttgtccctcgctatcaattggcaccaaagatgcatataccatcgggagtggtgtctctcaagaagaaggaatttaggtcgctcacccagggatcccgctctgttacggagtatctacacgagttcaatcgtctggctcgttatgctccggaagatgtgcgcactgatgaagagcaccaggagaagttcttggaaggacttaatgatgagctttcttacccactcatgactggggattatcatgatttccagaagttagtggataaggctattcgtcaggaggacaagtacaatcgcatggagcagaagaaacgccggattgctcaattcaagacacaacaggggaataatcagaggccgcatcttactttaggaccccagtccatgccacagggaggttattcgtctgttgttcgtccgcagcgtcagttcttcaacaacaatgctggcaacaacatccgcaatcaagttccacgtcctgttgcagcctcgacacagcaacaacctgccaagagggagcaaggcagcaagcccgtggtgtgtttcaactgtggagacccaggacattacgctgacaagtgtccgaagccccgatgcgtgaaggttgtccctgcccagagcaactctaccgtatcagcatcaaaggcccgtgtcaatcatgttgctgctgcagaagctcaaggtgctccagatgtgattttgggtacgtttcttgttaactcagttcctgcaacagtgcttttcgattctggtgctacacattcattcttatctatgagttttgcgggaaatcatgggatggaagtagaagatcttagatgtcctttgatggttagtaccccaagtaatcaagcactctctttgcaacgtagcccctctgtcagaatagaaattcaaggagtaccatttctggccaatcttatcttgttagagtccaaagaccttgatgttatcctagggatggactggttagccaggcataagggtgtgatagactgtgctaacagaaaagtaactctcaccagcaatgatggtcgagttgtaactgttcatgcattgtcttctgagtctttaaggtcaatactgaaccaaataactttggaagagattcctatagtccgggagtatcccgatgtgttctcagatgatttacctggtatgccgcctaaaagggatatagagttcagaatagatttggtaccaggaacaactccgatccataagagaccttatcgaatggcagccaacgagttggcagaagtcaagaggcaagtggacgatttgcttcagaaaggaattgatgatttgtttgatcagcttaaaggtgccactgttttctccaagatagatcttcgatcagggtatcatcagttgagaatcaaagaggaagatatacctaagacagcttttaccactaggtatgggttgttcgaatgtactgttatgtcttttggacttaccaatgcccctgctttcttcatgaacttgatgaataaggtgtttatggaatacctagacaagttcgtggtagtctttattgatgatattcttatctactcccgaaccaaagaagagcatgaagaacaccttcgccttgcattggagaagctacgagagcatcaactgtatgctaagtttagcaagtgtgaattttggttgtctgaagtgaagttccttggtcacgtcatctcagcaggaggagttgccgtcgatcctagtaatgtagaatccgtaaccaactggaaacaaccaaagaccgtttcagagattcgcagtttcctaggcctcgcaggatattatcggaggtttatagagaatttttccaagattgctaagcccatgacacggctgcttcagaaagatgtgaagtacaagtggtcagaagaatgtgagcagagttttcaagagttgaagaatcgcttaatatcagctcctattttgatcttacctgatccaaagaagggattccaagtgtattgcgatgcatccaaacttgggttaggttgtgttctgatgcaagatgggaaggtggttgcctatgcatctcgtcagttacgtccgcatgagaagaactaccctactcatgatcttgaattagctgcagtagttcgtgcgttgaagatttggcgtcattatcttttcggtactcgtacagaggtgtataccgatcacaagagtttaaagtatatctttactcagccggatctgaacatgagacaaaggagatggttggaattaattaaggattatgacatgggaattcattaccacccaggaaaggttaatgttgtagcagacgctcttaggaggaaaggctattgcaatgctacggaaggacgacagttgccattggaattatgcaaggaatttgaaagattaaatttgggaattgtcagtagaggtttcgttgcagccttagaagcgaagcccactctaattgatcaaattagagaagcccaaattaatgatcctgatattcaagaaatcaaaaagaatatgagaagaggaagagctatcggtttcttggaggatgagcaaggaacagtatggttgggcgagagaatctgtgttcctgacaacaaagatttaaaagatgcaattctgaaagaagctcatgatactttatattccattcaccctggtagtaccaaaatgtaccaggatctcaaggaaagattttggtgggcaagtatgaagcgtgaaatcgcagagtacgtagcagtatgtgatgtttgtcagcgagtcaaggcagaacatcagaaacctgccggtttgttgcagcctttgaagattcctgaatggaaatgggaggaaatcggtatggatttcatcactggtctacccagaacgtcatcaggccatgactctatttgggtgatagtcgacagacttaccaaagtggctcatttcatcccagtaaagacaacctattccggaagtcggttggcggaattgtatatggcaaggattgtgtgtttgcatggcgtccctaagaaaatagtgtctaatcgaggcagtcagtttacctcaaatttttggaagaagcttcaggaagagatgggttctaagctgaactttagtactgcttatcatccgcagacagacggacaaaccgaaagggtgaatcagattttggaagacatgttgagagcttgtgctttagacttcggtggaagttgggataagaatctaccttatgcggaattctcgtacaacaacagttatcaagctagtcttcagatggctccgtacgaagcactgtatggtcgaaagtgccgcactccacttttgtgggatcaaacgggagaacgtcaggttttcgggacggatatcctgagggaagcagaagaaaaggtgaaaatcattcaagaaagattgcgtgtggcccagtctcgtcataagagttatgccgacaatcgccgcagagatttgagtttcgacgaaagagattatgtgtatcttcgtgtcacgcctcttcgaggagttcatcgttttcacaccaaaggaaaattggcaccgcgttttgtgggaccttataagattgtcagtagaagaggagaggttgcttattag

SEQ ID NO: 15206 - DNA, 1702 bp, Oryza sativa
  Clone ID: TFbOSC900321j.C1.o1.gm
gtcgctcacccagggatctcgctctgtcacggagtatctgcatgagttcaattgtctggctcgttatgctccagaagatgtgcgcaatgatgaagagtgccaggagaagttcttggaaggacttaatgatgagctttcttatccactcatggctggagattatcctgatttccagaagttagtggataaggctattcgtcaggaggacaaatacaatcgcatggaacagaagaaacgccggattgctcaattcaagacacaaccgggaaataatcaaaggccgcgtcttactttaggaccccagtccatgccacatggaggttcttcgtctgttgttcgtccgcggcgtcagttcttcaacaacaatgctggcaacaacatccgcaatctagctccacgccctgttgcagtttcgacacagcaacagcctgccaagagggagcaaggcagcaagcccgtagtgtgcttcaactgtggagacccaggacattatgctgacaagtgtccgaagccccgacgcgtgaaggttgtccctgcccagagcaactctaccgcaccagcatcaaaggcccgtatcaatcatgttgctgctgcagaagctcaagacgctccagatgtgattttggtccgggagtatcccgatgtgttcccagatgatttacctgaaaggatacatcagaccgagttcatcaccatggggagctccggatattaccggaggtttatagagaatttttccaagattgctaagcccatgacacgactgcttcagaaagatgtgaagtacaagtggtcggaagaatccttagaaacgaagcccactctaattgatcaagttagagaagctcaaattaatgatcctgatattcaagagatcaagaagaatatgagaagaggaaaagctatcggtttcttggaagatgagcaaggaactgctccccggtgtctcctctacccgccgccaccctcgccttcgcctctcgtcgcccgtagagctctagcgccgtgtgccctagcgccgccgtcgccgccgtcgctccagcagtgcgccgccgccgttccagacgtcgccgtcactcgggaaggtcgtcgtcgtggtcgccaagtcgtcgccgtccttgtccgccgcttcgtcaccgtcggaaaccgccggagcatcgtcgccgtcgtcaagccgcagtccgccgccgttccttcgtcgtcgccgtcgccgtctgttgtgccgccgttcgccggcgagcttgcgccgtccgagctgtcgagccgccgagccgccgccgccggtggtgacgtcatcgctgacgtcatcgtccccgtttcccacgacgacgccggccggaacggacggcggacaacagcggcgagcggcggagcgaaccacggcgatacaggcaaaagcgagcacaccgggtggttgcacgagaagaggggagacgagccaatggctccgattcgccggagggagcttgacggcggcgaatcgcggcggcggcaaccggcggcgggagaagggggaaacgacgacgaggtcacgaggggccgattcccggcggcaagagcatctacacggctacgggaatccgatgctagcgtcggattgggcggagctacgccgagcgaggccggcgacgagcgggtgctacggagcacgggcggtgagcacatggcgagcggcggcaacggtcggggcggtgccggctag

SEQ ID NO: 15207 - DNA, 1254 bp, Oryza sativa
  Clone ID: TFbOSC900373j.C1.o13.fg
atgtcatggcagagggttggtgccctgctgctaggggctcagtctcgcctgcctgtcccgggggttccggccgtaggcgggattgggtcggtactcttgtctatggctaggatgggttggaaactatgtcacgtcttccgtctgtataccgtggtgatgtttaacagagaaaaaggaaagaatgtcagcaggcatgcctccagtaactcaagttttcaactccatccaccactagcctcaagagagttaacaagggtacacccttggtccattccaagcatgctgcttggttcacagctaccattggttggaagtcaagaccaaaatcagtatgtgtttgatcgagcatttgccacccaggtcaatgagcttccaatgccagaagaggatgtccccttttgtcaggattgtagagagcaaggacactatgccctgaattgtccatgggtatataccaaagaagctccttcctttggtttagcagggcaggcatcgctaaaccagcctcctcgcaccaagtcaagcttgcagcctagtgtgcaaagcagagagcccaatgaagagaatccattgaatcccgggaattgctttcctcctagcctttcgtaccacgtggggtcacgtactaagcacgccaaaggcaagaagagtaagaatcagaagagaaaagcgccgatgcgaactgaagaagaagtacgtaagatgactattaccagcaccgaatggcctccagcagggataactattcctagacgtcaaagaggaaataccttccgaggtgcacggcagttgacccagcacctcctaagccatggtggcagagtatctgatagtgaagggtcagatcaagtctcctcggattatgaatatgagtccccccgacgtctcggcgaggaagagatggaattaaaagcatgcacccgttgcggagaaattggacacattgctagcatgtgtctcacactctgccctcattgtgaagaagaccatccaccaggggagtgtcccacccgcaaggtcacatgttttctatgcgaaggtacaaaccatgtgcccaaggattgccaactcagtgtgttgttgaccaagaccgcagaaatccaacgaacaaccctacgattgtctcatcagctagtcagctccaacagcaacctcgacgatatcatccacagcaccaatgctcctcctgctgcacctgactctgcaataaatcatagcaataataccttcagcaccaaccattctctgcactga

SEQ ID NO: 15208 - DNA, 6117 bp, Oryza sativa
  Clone ID: TFbOSC900373j.C1.o2.fg
atgggattaccgaccctagcccttacccaagcatcggcatcgctccgtggtttcggcggtgagtcagtccaagttctaggccaagcgcaattgctggtagctttcggcacaggcaaaaacagacgcgaagagaaaataatgtttgacgttgtcgacatcccgtacaactacaatgccatcttcggctgtgcgaccttcaataagttcgaagccatttcccaccacaattatctcaagctcaagatgcctggcccggtaggagtgatcgtggtcaaggggctccagccttcggccgcttcaaagggcgatttggccataatcaacagagctgtgcataatgttgaggccgaaccacatgatccggcgaagcacgcgccaaagcccgcccctcacggcaaggtaatcaagatacagattgatgataccgatcccacaaagcttgtatcgctggggggcgacatgggcgaagaagaggttgagaacatcctagaggtgctcaagaaaaacattgataacttcgcctggggccctgatgaggtgggaagtgtttcgacagatctcatcatgcatcacctggcagtcatgccggatgccaagccaaggaaacagaagctacgcaagatgtccgttgatctccaagaagcagcaaaagccgaagtccaaaaattgctcaaggctagggtcattcaagagatcgaccaccccgagtggctggcgaatccggtgctggtgcggaaatcaaacgacaaatatcgcatgtgcgtcgatttcacaaacctaaacaaggcatggccgaaggatgatttccccttgccacggatcgaccaactcgtggattcgacagctggctacgaactcatgagcttcttggatgcgtactccggttaccaccagatccacatgaacccggccgacatccccaagacatccttcatcacaccattcggcaccttttgccacctcaggatgcctttcggcctgaggaatgccggggcaaccttcgccaggcaggtgtacaagccgtgcttcgccgtcgttccagtcgtcgccgtcgctcggggagaccgccatcgtggtcgtcatcgcgtcgccgtcctcgtccgccccttcgccgtcgctgtagaccgccggagcatcgccgtcgtcgtcaagccgaaggaccccgccgccttttcctcgacgccgccgccgtctgttcatcttccgccgtcgttttggtcatcgattccgacgtttccggagagtccgttttcgcaggagaagaatttgaagagttccaaggccactcctggtttggaatggtatattcctggtttggagatagaactgtacagccgggatggttgttcagaatggttgggcctatacaacaggatgccgtgctacaagcctgagtacttgtttggtgttgagggatttgtccaggagttgcgtacgatgtcctttgccataggatttgggactacccctttttatgcccagattcctcatgatcgtcacgaagagaagtgccgagtcaaagtcaccttgaacagtaatagtgaagatatcccctcagtgatgttcgaagctggaggaagaaactacatccatgcatgtcaggagggaagtgaccgtggcagctaccttgagactgaaggaattgagaatgatgctaccacaaagcatttggttgagatgctgtgggctatggatgaaacccgtgcagagactgtgttagcagctcaagatcgtgaagaccggaatcatgagaaggaactagccgcattgaagggagaagcaccaccgcagaaggccaggattcgtcttaccgcaaggaagagagctctatttgtccctcgctaccaattggcgccaaaggtccgtgtggtggagaaagaagttaccccagccctagcgaatcctccggtcgtcaacatggtgctcactcgcagcaacgggaatggccccaacaacaacaataacaacaacaatggagagaatcccacacttgcccaagtcctggctcaacaggtacagcttatgaacataatgatgcagcaacttcagaaccagcagaaccagggaaataatcatgcacctcctcagaacaagttagcagaatttcttcatgtgaggccgcctactttctctagtaccactaatcctgttgaagctggcgattggctgcatgccatagaaaagaagttggatttgcttcagtgcaccgatcaggagaaggtctcatttgcatcacatcagttgcatggccttgcctctgaatggtgggatcacttccgcctgaacaggactactactgaacctatcacttggcttgaattcaccgctgctttccggaagacgcatataccatcgggagtggtgtctctcaagaagaaggaattcaggtcgctcactcaggggtctcgctctgttactgagtatctgcacgaattcaatcgtctggctcgttatgctccggaagatgtgcgcactgatgaagagcgacatgagaggttcttggaaggacttaatgatgagctttcttacccactcatgactggggattatcatgatttccagaagttagtggataaggctattcgccaggagggcaagtacaaccgcatggagcagaagaaacgccggattgctcaattcaaggcacaacaagggaatagtcagaggccgcgtcttactttaggaccccagtccatgcgacagggaggttcttcgtctgttgttcgtccgcagcgtcagttcttcaacaacaatgcgggcaacaacatccgcaatcaagctccacgccctgttgcagcttcgacacagcaacagcctgccaagaaggagcaaggcagcaagcccgtggtgtgcttcaactgtggagacccaggacattacgctgacaagtgtccgaagccccgacgcgtgaaggttgtccctgcccagagcaactctactgtaccagcatcaaaggcccgtgtcaatcatgttgctgctgcagaagcccaaggtgctccggatgtgattttgggtacgttccttgttaacttagttcctgcaacagtgcttttcgattctggtgctacacattcattcttatctatgagttttgcgggaaatcatgggatggaagtagaagatcttagacgtcctttgatggttagtaccccaagtaatcaagcactctctttgcaacgtagcccctctgtcagaatagaaattcaaggagtaccatttctggccaatcttatcctgttagaatccaaagaccttgatgtcatcttagggatggactggttagccagatataaaggtgtgatagactgtgccaacagaaaagtaactatcaccagtaatgatggtcgagttgtaactgttcatgcattgtcttctgagcctttaaggtcaagactgaaccaaataactttggaagagattcctatagtccgggagtatcccgatgtgttcccagacgatttacctggtatgccgcctaaaagggatatagagttcagaatagatttggtaccaggaacgactccgatccataagagaccttatagaatggcagccaatgagttggcagaagtcaagaggcaagtagacgatttgcttcagaaaggatacatcagaccgagttcatctccatggggagctccggttatttttgtggaaaagaaagatcatacccagaggatgtgtgtagactatcgtgcactaaatgatgtgactatcaagaataagtatccgctgcccagaattgatgatttgtttgatcagcttaaaggtgccatcgttttctccaagatagatcttcgatcagggtatcaccagttgaggatcaaagaggaagatatacctaagacagcttttaccactaggtatggattgttcgaatgtactgttatgtcttttggacttaccaatgcccccgctttcttcataaacttgatgaataaggtgtttatggaatacctagacaagttcgtggtggtctttattgatgacattcttatctactcccgaaccaaagaagagcatgaagaacatcttcgccttgcactagagaagctacgagaacatcaactgtatgctaagtttagcaagtgtgaattttggttgtctgaagtgaagttccttggtcacgtcatctcagcaggaggagttgccgtcgatcctagtaatgtggaatccataaccaattggaaacaaccaaagacagtttcagagattcgcagtttcctaggccttgcaggatattatcggaggtttatagagaatttttccaagattgctaagcccatgacacgattgcttcaaaaggatgtgaagtacaagtggtcagaagaatgtaagcagagttttcaagagttgaagaatcgcttaatatcagctcctattttgattttacctgatccaaagaagggtttccaagtgtattgtgatgcatcccaacttgggttaggttgtgttctgatgcaagatgggaaggtggttgcatatgcatctcgtcagttacgtccgcatgagaagaactaccctactcatgatcttgagttagctgcagtaattcatgcgttgaagatttggcgccattatcttttcggtacttgtatagaggtgtataccgatcacaagagtttaaagtatatttttactcagccggatctgaacatgagacaacggagatggttggaattaattaaggattatgacatgggaattcagtatcacccgggaaaggctaatgttgtagcagatgctcttagcaggaaaggctattgcaatgctacggaaggacgacagttgccattggaattatgcaaggaatttgaaagattaaatttgggaattgtcagaagaggtttcgttgcagccttagaagcaaagcccactctaattgatcaagttagagaagcccaaattaatgatcctgatattcaagaaatcaagaagaatatgagaagagggaaagctatcggtttcttggaggatgagcaaggaactgtatggttgggtgagagaatctgcgtccccgacaacaaagatttaaaagatgcaattctgaaagaagctcatgatactttatactccattcaccctggtagtaccaaaatgtaccaggatctcgaggaaagattttggtgggcaagtatgaagcgtgaaatcgcagaatacgtagcagtatgtgatgtttgtcagcgagtcaaggcagaacatcagaaacccgccggtttgctgcagcctttgaagattcctgaatggaaatgggaggaaatcggtatggatttcatcactggtctacccagaacgtcatcaggccatgactctatttgggtgacagacggacaaaccgaaagggtgaatcagattttggaagatatgttgagagcttgtgctttagacttcggtggaagttgggataggaatctaccttatgcagaattttcgtacaacaacagttatcaagctagtcttcagatggctccttacgaagcactgtatggtcggaagtgccgcactccgcttttgtgggatcaaacaggagaacgtcaggttttcgggacggacatcctaagggaagcagaagagaaggtgaaaatcattcaagaaaggttgcgtgtggcccagtctcgtcataagagttatgccgacaatcgtcgtagagatctaagttttgacgaaggagattatgtgtatcttcgtgtcacgcctcttcgaggagttcatcgttttcacaccaaaggaaaattggtaccgcattttgtgggaccttataagattgtcaatagaagaggagaggttgcttatcagttggagttacctcaatctttggcaggagttcataatgtgttccatgtgtcgcaattgaaaaagtgtttaagggtacctaccgaagaagctaatcttgaacagatagaagtccaagaggatctgacctatgttcagaaaccaatccgtatcttggaaatagaagagagaagaaccagaaatcgagttatccgtttttacaaagtccaatggagtaatcactcggaagaagaatcaacttgggaacgagaagatgaattgaagtcagctcatccgcatctgttcgccagttcttccgaatctcgaggacgagattctgtttaa

SEQ ID NO: 15209 - DNA, 5064 bp, Oryza sativa
  Clone ID: TFbOSC900382j.C1.o28.gm
atggtgaatactcgtagcaatgggaatggtcccaacaaccccaataacaacaacaatggagagaatcccactctggcccaagttcttgctcaacagactcagcttatgaacatgatgatgcagcaatttcagaatcagcaaaaccaagggaataatcatgcacctccacagaacaagttagcagaatttcttcgtgtgaggccgcctgttttctctagtaccactaatcctgttgaagctagtgattggctgcatgccatagagaagaagttggatttacttcagtgtactgatcaggagaaggtctcatttgcatcacatcagttgcatggccctgcctctgaatggtgggatcacttccgccttaacaggactactgatgaacctatcacttggcttgaattcaccgctgctttccgaaagacgcatataccatcgggagtagtgtctctcaagaagaaggagttcaggtcgcttactcagggatctcgctctgttacggagtatctgcacgagttcaatcgtcttgctcgttatgctccggaagatgtgtgcaatgatgaagagcgccaggagaagtttttgggaggacttaatgatgagctttcttacccactcatggttggagattatcctgatttccagaaattagtggataaggctattcgtcaggaggacaagtataatcgcatggagcagaagaaacgtcggattgctcaattcaagacacaacagggaaataatcagaagccgcgtcttactttaggaccccagcccatgtcacagggaggttcttcgtctgttgttcgtccgcagcgtcagttcttcaacaacaatgctggcaacaacatccgtaatcaagctccacgtcctgttgcagctccagcacagcaacaacctgccaagagggagcaaggcagcaagcccgtggtgtgtttcaactgtggagatccaggacattatgctgacaagtgtccgaagccccgacgtgtgaaggttgtccctacccagaataactctgctgtaccagcatcaaaggcccgtgtcaatcatgttgctgctgcagaagctcaagatgctccagatgtgattttggtccgggagtatcctgatgtgttcccagatgatttacctgccaatgagttggcagaagttaagaggcaagtagatgatttgctacagaaaggatacatcagaccaagttcatcaccatggggagctccgcttaaaggtgccactgttttctccaagatagatcttcgatcagggtatcaccagttgagaatcaaagaggaagatatacctaagacagcttttaccactagtttcctaggcctcgcaggatattaccggaggtttatagagaatttttccaagattgctaagcccatgacacgactgcttcagaaagatgtaaagtacaagtggtcggaagaatccttagaagcgaagcccactctaattgatcaagttagagaagcccaaattaatgatcctgatattcaagagatcaagaagaatatgagaagaggaaaagctattggtttcttggaggatgagcacggaactccgtgcgccgccgtcgttccagccgtcgccgtcgctcgggaagaccgccgtcgtcatcgccaagtcgccgccgtcctcgtccgccccttcgcagccgtcggaacccgccggagcttcgtcgccgtcgacaacccgaaggtagccgccgcttccttctcgtcgccgtcgtcgtccgttccttctccgccgccgttttggtcaccggtgtgttcgccgcgttgtcctctacgtgctggtgccctccgttggtgccgtggtgccgccgttcgccggcgagtgtccgccgcccgagccgtcttcttcgccgagccgccgccgtcgtcggtgatgaccaacgtgccatctccaggagctagcacgctggctccggctagggacgagtgcctagagactctcatcctgacaggacggggcgaggccgtgctgccgccttcccgcatcgtgagcgagagacaggccgggctgccgcgccgcttcatgccggaatctgccactgaccgggagatagtctcgctgggcgagggatgcccggcgccacgctacccggggcggtccgtcttcttcctcccttttgctatggcagggctggttccgccattttcttctttcttcatggatgttctggagttttacgatctccagatggcgcacctcacccccaacgcggtaatgacattggccatcttcgcgcacctgtgcgagatgttcatcggggtgcgcccatcccttcggctgttccggtggttcttcaccgtacagccggtgtcgccgccgtcggtggttggtggttgctacttccagccgcgagggccggtgctgaaccgctacattccctgcgtcctccgcaagaagtgggatgactggaagagcgactggttctacacccccctcgccgacgaagcgcgcctccgacttccgagccagcctccaacgcaggcctccaactggcgggcgccggtagatctgggagatggctacgacgccgtcctcgaccgcctggcgggcctgcgatcccaggggctcacaggggccatggtgttcggcgactatcttcgtcgccggatcgcgccactccagcggcgcgcccggggcgcctgggagtacaccgggtccgaggactgtatgaggacccaccagggggtcagatgggaccgggctcctgaggacttcaagatagtggtccaacgggtgctgaatctcagctccgtggaggcatccctcattcctcaaggagtcctccccctctgcagcgatccagaccgcgcctccatcctgaccatcatgcaggcggtcggggcgtcggaggagcgggctcctcgaggccacgatggcgcgggcgggagccgcaggggggaacaatctaccccgggagggggtcgtgcttctgggccccgcgacgggggcccggggagcggccgccctgccgacgcccgggggaagaggaagcaggaaggaacccctcccccatctcctccccgagggggcggggcggcgcgtgccagcagcaggcgcccggagggggccacgccgacgtcgcagcccgagggggagcggaagaagaaacggctccgcaagatgggggggacagaaccatcccggggaaaccttatttcccctccaagcgagatcccgtcgcgtccctcccgccattccaagtccggccagtctgaggccgaggacccggcgaccacagaggctcggaggcgggaatctgaccggcgagaagccgcggatcgcctacgggaagccggggaggccgcccaggtggccgtccgagctcgccaagctgaagaagccgctcgggaggaggccagacttcgccaggccgaggcggcgacgacttccgaggcagctcgcgacgaggccgcgggcgtatcgcttgggcccactccctcgggcgacgctcaggacaagccaggtccgggggacatccctgagtccggcatgtccatcggcgggccgagccgcgcggcatcctcaccgaggcggctcttccccacgccttccgttgctccactgagcgcagaaccccttctgcaggccttggccgtcgcaaacaccacggtgttggacgggttaagtgcccaagtggaggccctgcaagcagagcgggcggagcttgacgccgcatgggcgcgtgtcgaagaggggcgacgctcggtggaggccatggtggaggtgggccgcaaggcacaccgccggcacgtctcagagctcgaagcccgtcggaaggtgctgggggagatcgccaaggaggtggaggaggagcggggggctgccctcatcgccaccaccgtgatgaacgaggcgcaggacaccctccgccttcaatacgggagctgggaggcggagctagggaaaaagctcgacgccgcccggggggtccttgacgctgccgctgcccgagaacggcgggcggcggagaccgaggtggcatcccggcggcgcgaagaagcccttgaggcccgtgccatggcgctggaagagcgtgcctgcgccgtggagagggacctggcggatcgcgaggccgccgttgctattcgggaggtcacactggcggtgcacgaagccgcctgtgccgaagaagagtccgcgctccgcctccgcgaggacgcgctcaccgagcgggagcgagctctcaaggaggccgaggccgcggcgcaacggctggcggacagcctgtccctccgcgaggctgcgcaagaggaacaagcgcgtcgcaatctggaaagtgcccgcgccgagagggccgcactgaaccagcgggccgctgaactcgaggcgcaggcaagggagctggatgcaagggcgcgtagcggcggggcggccacgggcgacagcgacttagccgcccgcctcgcagctgccgaacacaccatcgcggatctgcagggcgcgctggattcgtccaccggggaggtcgaggcccttcgcctggcaggcgagatagggcccagcatgcttcgcgatgccgtgtcccgtttagaccgcgccgggcggcaggcgggtctctggggcgggcggactgtgaagtacgccgccaaccaggggggcctcgcccagcgcctctcggagatggccgggactctccagcggctccccgaggagctcgaggggacgattaactcatcctcgagggacctcgcccgaggagcggtggagctcgtactggcgagttaccaggccagggaccccgacttctccccatggacggcgctggacgagttccctcccgggaccgaggacggcgcgcgcgtgcaggtccgggatgccgccgaccatatcgtccacagcttcgagggttcggcccctcggctcgcgttcgccctcaactccgacgaggagggcgatgacggcggtgtgggcgacagtggcgacgaggctggcgacccgggttctagtcctcaaatggctcgggtcggggctagtgcctggggagatccacatgtcgagactggccaggccgggagcgtggtgaccgagggttatgggtga

SEQ ID NO: 15210 - DNA, 4968 bp, Oryza sativa
  unsure (1)..(4968): unsure at all n locations
  Clone ID: TFbOSC900382j.C1.o32.gm
atggtgaatactcggagcaattggaatggtcccaaccccccagataacaacaacaggggatccttggtatcngaccgcacgcagcaagaatttcttcgtgtgaggccgcctgttttctctagtaccactaatcctgttgaagctagtgattggctgcatgccatagagaagaagttggatttacttcagtgtactgatcaggagaaggtctcatttgcatcacatcagttgcatggccctgcctctgaatggtgggatcacttccgccttaacaggactactgatgaacctatcacttggcttgaattcaccgctgctttccgaaagacgcatataccatcgggagtagtgtctctcaagaagaaggagttcaggtcgcttactcagggatctcgctctgttacggagtatctgcacgagttcaatcgtcttgctcgttatgctccggaagatgtgtgcaatgatgaagagcgccaggagaagtttttgggaggacttaatgatgagctttcttacccactcatggttggagattatcctgatttccagaaattagtggataaggctattcgtcaggaggacaagtataatcgcatggagcagaagaaacgtcggattgctcaattcaagacacaacagggaaataatcagaagccgcgtcttactttaggaccccagcccatgtcacagggaggttcttcgtctgttgttcgtccgcagcgtcagttcttcaacaacaatgctggcaacaacatccgtaatcaagctccacgtcctgttgcagctccagcacagcaacaacctgccaagagggagcaaggcagcaagcccgtggtgtgtttcaactgtggagatccaggacattatgctgacaagtgtccgaagccccgacgtgtgaaggttgtccctacccagaataactctgctgtaccagcatcaaaggcccgtgtcaatcatgttgctgctgcagaagctcaagatgctccagatgtgattttggtccgggagtatcctgatgtgttcccagatgatttacctgccaatgagttggcagaagttaagaggcaagtagatgatttgctacagaaaggatacatcagaccaagttcatcaccatggggagctccgcttaaaggtgccactgttttctccaagatagatcttcgatcagggtatcaccagttgagaatcaaagaggaagatatacctaagacagcttttaccactagtttcctaggcctcgcaggatattaccggaggtttatagagaatttttccaagattgctaagcccatgacacgactgcttcagaaagatgtaaagtacaagtggtcggaagaatccttagaagcgaagcccactctaattgatcaagttagagaagcccaaattaatgatcctgatattcaagagatcaagaagaatatgagaagaggaaaagctattggtttcttggaggatgagcacggaactccgtgcgccgccgtcgttccagccgtcgccgtcgctcgggaagaccgccgtcgtcatcgccaagtcgccgccgtcctcgtccgccccttcgcagccgtcggaacccgccggagcttcgtcgccgtcgacaacccgaaggtagccgccgcttccttctcgtcgccgtcgtcgtccgttccttctccgccgccgttttggtcaccggtgtgttcgccgcgttgtcctctacgtgctggtgccctccgttggtgccgtggtgccgccgttcgccggcgagtgtccgccgcccgagccgtcttcttcgccgagccgccgccgtcgtcggtgatgaccaacgtgccatctccaggagctagcacgctggctccggctagggacgagtgcctagagactctcatcctgacaggacggggcgaggccgtgctgccgccttcccgcatcgtgagcgagagacaggccgggctgccgcgccgcttcatgccggaatctgccactgaccgggagatagtctcgctgggcgagggatgcccggcgccacgctacccggggcggtccgtcttcttcctcccttttgctatggcagggctggttccgccattttcttctttcttcatggatgttctggagttttacgatctccagatggcgcacctcacccccaacgcggtaatgacattggccatcttcgcgcacctgtgcgagatgttcatcggggtgcgcccatcccttcggctgttccggtggttcttcaccgtacagccggtgtcgccgccgtcggtggttggtggttgctacttccagccgcgagggccggtgctgaaccgctacattccctgcgtcctccgcaagaagtgggatgactggaagagcgactggttctacacccccctcgccgacgaagcgcgcctccgacttccgagccagcctccaacgcaggcctccaactggcgggcgccggtagatctgggagatggctacgacgccgtcctcgaccgcctggcgggcctgcgatcccaggggctcacaggggccatggtgttcggcgactatcttcgtcgccggatcgcgccactccagcggcgcgcccggggcgcctgggagtacaccgggtccgaggactgtatgaggacccaccagggggtcagatgggaccgggctcctgaggacttcaagatagtggtccaacgggtgctgaatctcagctccgtggaggcatccctcattcctcaaggagtcctccccctctgcagcgatccagaccgcgcctccatcctgaccatcatgcaggcggtcggggcgtcggaggagcgggctcctcgaggccacgatggcgcgggcgggagccgcaggggggaacaatctaccccgggagggggtcgtgcttctgggccccgcgacgggggcccggggagcggccgccctgccgacgcccgggggaagaggaagcaggaaggaacccctcccccatctcctccccgagggggcggggcggcgcgtgccagcagcaggcgcccggagggggccacgccgacgtcgcagcccgagggggagcggaagaagaaacggctccgcaagatgggggggacagaaccatcccggggaaaccttatttcccctccaagcgagatcccgtcgcgtccctcccgccattccaagtccggccagtctgaggccgaggacccggcgaccacagaggctcggaggcgggaatctgaccggcgagaagccgcggatcgcctacgggaagccggggaggccgcccaggtggccgtccgagctcgccaagctgaagaagccgctcgggaggaggccagacttcgccaggccgaggcggcgacgacttccgaggcagctcgcgacgaggccgcgggcgtatcgcttgggcccactccctcgggcgacgctcaggacaagccaggtccgggggacatccctgagtccggcatgtccatcggcgggccgagccgcgcggcatcctcaccgaggcggctcttccccacgccttccgttgctccactgagcgcagaaccccttctgcaggccttggccgtcgcaaacaccacggtgttggacgggttaagtgcccaagtggaggccctgcaagcagagcgggcggagcttgacgccgcatgggcgcgtgtcgaagaggggcgacgctcggtggaggccatggtggaggtgggccgcaaggcacaccgccggcacgtctcagagctcgaagcccgtcggaaggtgctgggggagatcgccaaggaggtggaggaggagcggggggctgccctcatcgccaccaccgtgatgaacgaggcgcaggacaccctccgccttcaatacgggagctgggaggcggagctagggaaaaagctcgacgccgcccggggggtccttgacgctgccgctgcccgagaacggcgggcggcggagaccgaggtggcatcccggcggcgcgaagaagcccttgaggcccgtgccatggcgctggaagagcgtgcctgcgccgtggagagggacctggcggatcgcgaggccgccgttgctattcgggaggtcacactggcggtgcacgaagccgcctgtgccgaagaagagtccgcgctccgcctccgcgaggacgcgctcaccgagcgggagcgagctctcaaggaggccgaggccgcggcgcaacggctggcggacagcctgtccctccgcgaggctgcgcaagaggaacaagcgcgtcgcaatctggaaagtgcccgcgccgagagggccgcactgaaccagcgggccgctgaactcgaggcgcaggcaagggagctggatgcaagggcgcgtagcggcggggcggccacgggcgacagcgacttagccgcccgcctcgcagctgccgaacacaccatcgcggatctgcagggcgcgctggattcgtccaccggggaggtcgaggcccttcgcctggcaggcgagatagggcccagcatgcttcgcgatgccgtgtcccgtttagaccgcgccgggcggcaggcgggtctctggggcgggcggactgtgaagtacgccgccaaccaggggggcctcgcccagcgcctctcggagatggccgggactctccagcggctccccgaggagctcgaggggacgattaactcatcctcgagggacctcgcccgaggagcggtggagctcgtactggcgagttaccaggccagggaccccgacttctccccatggacggcgctggacgagttccctcccgggaccgaggacggcgcgcgcgtgcaggtccgggatgccgccgaccatatcgtccacagcttcgagggttcggcccctcggctcgcgttcgccctcaactccgacgaggagggcgatgacggcggtgtgggcgacagtggcgacgaggctggcgacccgggttctagtcctcaaatggctcgggtcggggctagtgcctggggagatccacatgtcgagactggccaggccgggagcgtggtgaccgagggttatgggtga

SEQ ID NO: 15211 - DNA, 5229 bp, Oryza sativa
  Clone ID: TFbOSC900394j.C1.o6.fg
atgtcaccgctgacgtcatcggggtcgtccgccattccgtcgtttccggagagtccgttttcgcagaagaagagtttgaagagttccaaggccagcaaggcaactcctggtttggaatggtatattcctggtttggagatagaactgtgcagccggggtggttgttcagaatggttgggcctatacaacaggatgccgcgttacaagcctgagtacctgtttggtgttgagggttttgtccaggagttgcgtacgatgtcctttgtcattggatttgggactgcccctttttatgcccagattcctcatgatcgtcatgaagagaagtgccgagtcaaagtcaccttgaacagtaatagtgaagatatcccctcagtgatgtttgaagctggaggaagaaactacatccatgcatgtcaggaggtggcaaggatcgccataggagagctccgtgatcgctacagtgatcaattggccgacactgagtatcgctaccatcctcgccaaccccagggaagtgaccgtggcagttaccttgagactgaaggaattgagaatgatgctaccacgaagcatttggttgagatgttgtgggctatggatgaaagtcgtgcggagactgtgttagccgctcaagatcgtgaagaccggaatcgtggtaagatttgcaagttagaagacaaggtggatcgtttggagaaggaattagccgcattgaagggagaagcaccgccgcagaaggccaggattcgtcttaccgcaaggaagagagctctatttgtccctcgctatcaactggcgccaaagatggtgaacactcgcagcaatgggaatggtcccaacaaccccaataacaacaacaatggagagaatcccactcttgctcaagttcttgctcaacagacacagcttatgaacatgatgatgcagcaatttcagaatcagcaaaaccaaggaaataatcatgcacctccacagaacaagttagcagaatttcttcgtgtgaggccgcctgttttctctagtaccactaatcctgttgaagctagtgattggctgcatgccatagagaagaagttggatttacttcagtgtactgatcaggagaaggtctcatttgcatcacatcagttgcatggccctgcctctgaatggtgggatcacttccgccttaacaggactactgctgaacctatcacttggcttgaattcaccgctgctttccggaagacgcatataccatcaggagtagtgtctctcaagaagaaggagttcaggtcgcttacccagggatctcgctctgttacggagtatctgcacgagttcaatcgtcttgctcgttatgctccggaagatgtgcgcaatgatgaagagcgccaggagaagtttttgggaggacttaatgatgagctttcttacccactcatggttggagattatcctgatttccagaaattagtggataaggctattcgtcaggaggacaagtacaatcgcatggagcagaagaaacgtcggattgctcaattcaagacacaacaggggaataatcagaagccgcgtcttactttaggaccccagcccatgccacagggaggttcttcgtctgttgttcgtccgcagcgtcatttcttcaacaacaatgctggcaacaacatccgtaatcaagctccacgtcctgttgcagctccagcacagcaacaacctgccaagagggagcaaggcagcaagcccgtggtgtgtttcaactgtggagatccaggacattatgctgacaagtgtccgaagccccgacgcgtgaaggttgtccctgcccagaataactctgctgtaccagcatccaaggctcgtgtaaatcatgtcgctgctgcagaagctcaagatgctccagatgtgattttgggtacgttccttgttaactcagttcctgcaacagtacttttcgattctggtgctacacattcattcttatctatgagttttgcgggaaatcatgggatggaagtagaagatcttagacgtcctttgatggttagtaccccaagtaatcaagcactctctttgcaacgtagcccctctgtcagaatagaaattcaaggagtaccatttctggccaatcttatcttgttagaatccaaagaccttgatgtcatcctagggatggactggttagccagacataaaggtgtgatagactgtgccaacaaaaaagtaactctcaccagctatgatggtcgagttgtaactgttcatgcattgtcatctgagtctttaaggtcaagactgaaccaaataactttggaagagattcctatagtccgggagtatcccgatgtgttcccagatgatttacctggtatgccgcctaaaagggatatagagttcacaatagatttggtacctggaacaactccgatccataagagaccttatcgaatggcagccaatgagttggcagaagttaagaggcaagtagatgatttgctacagaaaggatacatcagaccgagttcatcaccatggggagctccggttatttttgtggaaaagaaagaccatactcagagaatgtgtgtggactatcgtgcactaaacgatgtgactatcaagaataagtatccactacccaggattgatgatttgtttgatcagcttaaaggtgccactgttttctccatgatagatcttcgatcagggtatcatcagttgagaatcaaagaggaagatatacctaagacagcttttaccactaggtatgggttgttcgaatgtactgttatgtcttttggacttaccaatgcccctgctttcttcatgaacttgatgaataaggtgtttatggaatacctagacaagttcgtggtggtctttattgatgatattcttatctactctcggaccaaagaagagcatgaggaacatcttcgccttgcattggagaagctacgagaacatcaactgtatgctaagtttagcaagtgtgaattttggttgtctgaagtgaaattccttggtcacgtcatctcagccggaggagttgccgtcgatcctagtaacgtggaatccgtaaccaattggaagcaaccaaagacagtttcagagattcgcagtttcctaggcctcgcaggatattatcggaggtttatagagaatttttctaagattgctaagcccatgacacgactgcttcagaaagatgtgaagtacaagtggtcggaagaatgtgagcagagttttcaagagttgaaaagtcgcttaatatcagctcctattttgattttgcctgatccaaagaagggttttcaagtgtattgcgatgcatccaaacttgggttaggttgtgttctgatgcaagatgggaaggtggttgcctatgcctctcgacagttacgtccgcatgagaagaactaccctactcatgatattgagttagctgcagtcgttcatgcattgaagatttggcgtcattatcttttcggtactcgtacagaagtgtacaccgatcacaagagtttaaagtatatctttactcagccggatctgaacatgagacaacggagatggttggaattaattaaggattatgacatgggaattcattatcatccgggaaaggctaatgttgtagcagacgctcttagcagaaaaggctattgcaatgctacagaaggacgacagttgccattggaattatgcaaggaatttgaaagattaaatttgggaattgtcggtagaggtttcgttgcagccttagaagcgaagcccactctaattgatcaagttagagaagcccaaattaatgatcctgatattcaagagatcaagaagaatatgagaagaggaaaagctattggtttcttggaggatgagcaaggaactgtatggttgggtgagagaatttgtgtccccgacaacaaagatctaaaagatgcagttctgaaagaagctcatgatactttatactccattcaccctggtagtactaagatgtaccaggatctcaaggaaagattttggtgggcaagtatgaagcgtgaaatcgcggaatatgtagcagtatgtgatgtttgtcagcgagtcaaggcagaacatcagaaacccgccggtttgttgcagccattgaagattcctgaatggaaatgggaagaaataggtatggattttattactggtttacccagaacgtcatcaggccatgactctatttgggtgatagtcgacagacttaccaaagtggctcattttattccggtaaagacaacctattccggaagtcgcttggcggaattgtacatggcaaggattgtgtgtttgcatggcgtccctaagaagatagtgtctgatcgaggcagtcagtttacttcaaatttttggaagaaacttcaggaagagatgggttctaagctgaactttagtactgcttatcatccacagacagacggacaaaccgaaagggtgaatcagattttggaagacatgttgagagcttgtgctttagatttcggtggaagttgggataagaatctaccttatgcagaattttcatacaacaacagttatcaagctagtttacagatggctccttacgaagcactgtatggtcggaagtgccgcactccgcttttgtgggatcaaacgggagaacgtcaggttttcgggacggatatcctaagggaagcagaagaaaaggtaaaggtcattcaagaaagattgcgagtggctcagtctcgacataagagttatgccgacaatcgccgtagagatttgagttttgaagaaggagattatgtgtatcttcgtgtcacgcctcttcgaggagttcatcgttttcacaccaaaggaaaattggcaccgcgttatgtgggaccttataagattgtcagtagaagaggagaggttgcttatcagttagaattacctcaatctttggcaggagtccataatgtgttccatgtgtcgcaattgaagaagtgtttaagagtacctaccgaagaagctaatcttgaacagatagaagtccaagaggatttgacttatgttgagaaaccaatccgtatcttggaaacaaatgagagaagaaccaggaatcgagttatccgtttttgcaaactccaatggagtaatcactcggaagaagaatcaacttgggaacgagaagatgaattgaagtcagctcatccgcacctatttgccagttcttccgaatctcgaggacgagattctgtttaa

SEQ ID NO: 15212 - DNA, 4803 bp, Oryza sativa
  Clone ID: TFbOSC900403j.C1.o10.fg
atgtctttcgtgattagtctcacacttctcaccatagtaaatgatgctataattggtaataatttgattagctcctggtttggaatgatgccacgctacaagcctgagtacttgtttggtgtggagggttttgtccaggagttgcgtacgatgtcctttgtcataggatttgagactgcccctttttatgcccagattcctcatgatcgtcatgaagagaagtgccgagtcaaagtcaccttgaacagtaatagtgaagatatcccctcagtgatgttcgaagctggaggaagaaactacaaccatgcatgtcaggaggtggcaaggatcgccataggagagcttcgcgatcgctacagtgatcagttggccgacactgagtatcgctatcatcctcgccaaccccagggaagtgaccgtggcagctaccttgagactgagggaattgagaatgatgctaccacaaggcatttggttgagatgctgtgggctatggatgaaacccgtgcagagactgtgttagcggctcaagatcgtgaagatcggaattgtggtaagatttgcaagctagaagacaaggtggatcgtttggagaaggaattagccgcattaaagggagaagcaccgccgcagaaggccaggattcgtctcaccgcaaggaagagagctctatttgtccctcgctaccaattggcgccaaaggtccgtgtggtggagaaagaagttaccccagccctagcggatcctccggtcgtcaatatggtgaatactcgcagcaacgggaatggccccaacaacaacaataacaacaacaatggagagaatcccacacttgcccaagttctggctcaacagactcagttaatgaacatgatgatgcagcaacttcagaaccagcagaaccaaggaaataaccatgcacctcctcagaataagttagcagaatttcttcgtgtaaggccgcctactttctctagcaccactaatcctgttgaagctggtgattggctgcatgccatagagaagaagttggatttgcttcaatgcactgatcaggagaaggtctcatttgcatcccatcagttgcatggccctgcctctgaatggtgggatcacttccgtctgaacaggactactgctgaacctatcacttggcttgagttcaccgctgctttccggaagacgcatataccatcgggagtggtgtctctcaagaagaaggaattcaggtcgctcactcaagggtctcgctctgttacgaagtatctgcacgagttcaatcgtctggctcgttatgctccggaagatgtgcgcaatgatgaagagcgtcaggagaagttcttggaaggacttaatgatgagctttcttacccactcatgactggggattatcctgatttccagaagttagtggataaggctattcgtcaggaagacaaatacaatcgcatgaagcagaagaaacgtcggatcgctcaattcaagacacaacaggggaataatcaaaggccgcgtcttactttaggaccccagtccatgccacagggaggttcttcgtctgttgttcgtccgcagcgtcagttcttcaacaacaatgctggcaacaacatccgcaatcaagctccacgtcctgttgcagcttcgacacagcaacagcctgccaagagggagcaaggcagcaagcccgtggtgtgtttcaactgtggagacccaggacattatgctgacaagtgtccgaagctccgacgcgtgaaggttgtccctacccagagaaactctaccgtaccagcatcaaaggcccgtgtcaatcatgttgctgctgcagaagctcaagatgctccagatgtgattttgggtacgttccttgttaacttagttcctgcaacagtgcttttcgattctggtgctacacattcattcttatctatgagttttgcgggaaatcatgggatggaagtaaaagatcttagacgtcctttgatggttagtaccccaagtaatcaagcactctctttgcaatgtagcccctctgtcagaatagaaattcaaggagtaccatttctggccaatcttatcctgttagaatccaaagaccttgatgtcatcctagggatggactggttagccagacataaaggtgtgatagactgtgctaacagaaaagtaactctcaccagcaatgatggtcgagttgtaactgttcatgcattgtctcctgagtctttaaggtcaagactgaaccaaataactttggaagagattccggtagtccgggagtattccgaggtgttcccagatgatttacctggtatgccgcctaaaagggatatagagttcagaatagatttggtaccaggaacaactccgatccataagagaccttatagaatggcggccaatgagttggcagaagtcaaaaggcaagtagatgatttgcttcagagaggatacatcagaccgagttcatcaccatggggagctccagttattttcgtggaaaagaaagatcatacccagaggatgtgtgtggactatcgtgcactaaatgatgtgactatcaagaataagtatccgctgctcaggattgatgatttgtttgatcagcttaaaggtgccactgttttctccaagatagatcttcgatcagggtatcaccagttgagaatcaaagaggaagatatacctaagatagcttttaccactaggtatgggttgttcgaatgtactgttatgtcttttggacttaccaatgcccccgctttcttcatgaatttgatgaataaggtgtttatggaatacctagacaagttcgtggtggtctttattgatgatattcttatctattcccgaaccaaagaagagcatgaagaacatcttcgccttgcattggagaagctacgagaacatcagttgtatgctaagtttagcaagtgtgaattttggttgtctgaagtgaagtttcttggtcacgtcatctcagccggaggagttgccgtcgattctagtaatgtggaatccgtaaccaactggaaacaaccaaagacagtttcagagattcgcagtttcttaggcctcgcaggatattatcggaggtttatagagaatttttccaagattgctaagcccatgacacgattgcttcagaaagatgtgaagtacaagtggtcagaagaatgtgagcagagttttcaagagttgaagaatcgcttgatatcagctcctattttgattttgcctgatccaaagaagggtttccaagtatattgcgatgcatccaaacttgggttaggttgtgttctgatgcaagatgggaaggtggttgcctatgcatctcgtcagttacgtccgcataagaagaactaccctactcatgatcttgagttagctgcagtagttcatgcgttgaaaatttggcgtcattatctttttggtactcgtacagaggtatataccgatcacaagagtttaaagtatatctttactcagccggatctgaacatgagacaaaggagatggttggaattaattaaggattatgacatgggaattcattatcacccgggaaaggctaatgttgtagcagacgctcttagcaggaaaggctattgcaatgctacggaaggacgacagttgccattggaattatgcaaggaatttgaaagattaaatttgggaattgtcagtagaggtttcgtggcagccttagaagtgaagcccactctaattgatcaagttagagaagcccaaattaatgatcctgatattcaagaaatcaagaagaatatgagaagaggaaaagctattggtttcttggaagatgagcaaggaactgtatggttgggtgagagaatctgcgtccccgacaacaaagatttaaaagatgcaattctgaaagaggctcatgatactttatactccattcaccctggtagtaccaaaatgtaccaggatctcaaggaaagattttggtgggcaagtatgaagcgtgaaatcgcagaatacgtagcaacagacggacaaaccgaaagggtaaatcagattttggaagacatgttgagagcttgtgctttagatttcggtggaagttgggataagaatctaccttatgcagaattttcgtataacaacagttatcaagctagtcttcagatggctccttacgaagcactgtatggtcggaagtgccgcactccgcttttgtgggatcaaacgggagaacgtcaggttttcgggacgaatatcctaagggaagcagaagaaaaggtgaaaatcattcaagaaagattgcgagtggctcagtctcgacataagagttatgccgacaatcgccacagagatttgagttttgaagaaggagattatgtgtattttcgtgtcacgccttttcgaggggttcatcgttttcataccaaaggaaaattggcaccacgttttgtgggaccttataagattgtcagtagaagaggagaggttgcttatcagttggaattacctcaatatttggcaggagtccataatgtgttccatgtgtcgcaactgaaaaagtgtttaagggtacctaccgaagaagctaatcttgaacagatagaagtccaagaggatctgacctatgttgagaaaccaatccgtattttggaaatagatgagagaagaaccagaaatcgagttatccgtttttgcaaagtccaatggagtaatcactcggaagaagaatcaacttgggaacgagaagatgaattgaagtcagctcatccgcatctgttcgccagttcttccgaatctcgaggacgagattctgtttaa

SEQ ID NO: 15213 - DNA, 4905 bp, Oryza sativa
  Clone ID: TFbOSC900406j.C1.o9.fg
atgccgcgctacaagcttgagtacctgtttggtgttgagggttttgtccaggagttgcgtacgatgtcctttgccattggatttgggactgcccctttttatgcccagattcctcatgatcgtcatgaagagaagtgccgagtcaaagtcaccttgaacagcaatagtgaagagatcccctcagtgatgttcgaagctggaggaagaaactacatccatgcatgtcaggaagtggcaaggattgccataggagagctccgtgatcgctatagtgatcagttggccgacactgagtatcgctaccatcctcgtcaaccccagggaagtgaccgtggcagctaccttgagactgaaggaattgagaatgatgctaccacaaggcatttggttgagatgctgtgggctatggatgaaggtcgtgcggagactgtgttagcggctcaagatcgtgaagaccggaatcgtggtaagatttgcaagttagaagacaaggtggatcgtttggaaaaggaattagccgcgttaaagggagaagcaccgccgcagaaggccaggattcgtcttaccgcaaggaagagagctttatttgtccctcgctatcaattggcgccaaagatggtgaacactcgcagcaatgggaatggccccaacaaccccaataacaataacaatggagagaacccaactctggcccaagttcttgctcaacagacacaactcatgaacatgatgatgcagcaatttcagaatcagcagaaccaaggaaataactatgcacctcctcagaataagttagcagaatttcttcgtgtgaggccgcctattttctctagtaccactaatcctgttgaagctggtgattggctgcatgccatagagaagaagttggatttacttcagtgcactgatcaggagaaggtatcttttgcatcacatcagttgcatggctctgcctctgaatggtgggatcacttccgcctgaataggactactgctgaacctatcacttggcttgaattcactgctgctttccggaagacgcatataccatcaggagtagtgtctctcaagaagaaggagttcaggtcgcttactcagggatctcgctctgttacggagtatctgcacgagttcaatcgtcttgctcgttatgctccggaagatgtgcgtaatgatgaagagcgtcaggagaagtttttgggaggacttaatgatgagctttcttacccactcatggaggacaagtacaattgcatggagcagaggaaacgtcggattgctcacttcaaggcacaacaggggagtaatcagaagccgcgccttactttaggaccccagtctatgccacagggaggttcttcatctgttgttcgtccgcagcgtcagttcttcaacaacaatgctggcaacaacatccgcaatcaagctccacgtcctgttgcagctccaacacagcaacaacctgccaagagggagcaaggcagcaagcccgtggtatgtttcaactgtggagacccaggacattatgctgacaagtgtccgaagccccgtcgcgtgaaggttgtccctgctcagaataactctgctgtaccagcatcaaaggcccgtgtcaatcatgtcgctgctgcagaagctcaagatgctcccgatgtgattttgggtacgttccctgttaactcagttcctgcaacagtacttttcgattctggcgctacacattcattcttatctatgagttttgcgggaaataatgggatggaagtagaagatcttagacgtcctttgatggttagtaccccaagtgatcaagcactctctttgcaacgtagcccctcggtcagaatagaaattaagggagtaccatttctggccaatcttatcttgttagaatccaaagaccttgatgtcatcctagggatggactggttagccagacataaaggtgtgatagactgtgctaacagaaaagtaactctcaccagcaatgatggtcgagttgtaactgttcatgcattgtcatctgagtctttaaggtcaagactgaaccaaataactttggaagagattcctatagttcgggagtattccgatgtgttcccagatgatttacctggaatgccgcccaaaagggatatagagttcagaatagatctggtaccaggaacaactccaatccataagagaccttatcgaatggcagccaatgagttggcagaagtcaagaggcaagtggacgatttgcaacagaaaggatacatcagaccgagttcatcaccatggggagctccggttatttttgtggaaaagaaagaccatacccagagaatgtgtgtggattatcgtgcactaaatgatgtgactatcaagaataagtatccgctgcccagaattgatgatttgtttgatcagcttaaaggtgccactgttttctccaagatagatcttcgatcaggatatcaccagttgagaatcaaagaggaagatatacctaagacagcttttaccactaggtatgggttgttcgaatgtactgttatgtcttttggacttaccaatgcccctgctttcttcatgaacttgatgaataaggtgtttatggaatacctagacaagttcgtagtggtctttatagatgacattcttatctactctcgaaccaaagaagagcatgaagaacatctttgccttgcattggagaagctacgagagcatcaactgtatgctaagtttagcaagtgtgaattttggttgtctgaagtgaagttccttggtcacgtcatctcagccggaggagttgccgttgatcctagtaatgtggaatccgtaaccaactggaaacaaccaaagacagtttcagagattcgcagtttcctaggcctcgcaggatattaccggaggtttatagagaatttttccaagattgctaagcccatgacacgactgcttcagaaagatgtgaagtacaagtggtcggaagaatgtgagcagagttttcaagagttgaaaagtcgcttaatatcagctcctattttgattttacctgatccaaagaagggtttccaagtgtattgcgatgcatccaaacttgggttaggttgtgttttgatgcaagatggcaaggtggttgcctatgcatctcgtcagttacgtccgcatgagaagaactaccctactcatgatattgagttagccgcagtagttcatgcgttgaagatttggcgtcattatcttttcggtactcgtacggagatgtacaccgatcacaagagtttaaagtatatttttactcagccggatctgaacatgagacaacggagatggttggaattaattaaggattatgacatgggaattcattatcacccaggaaaggctaatgttgtagcagatgctcttagcaggaaaggttattgcaatgctacagaaggacgacagttgccattggagttatgcaaggaatttgaaagattaaatttgggaattgtcaatagaggtttcgttgcagccttagaagcgaagcccactctaattgatcaagttagagaagcccaaattaatgatcctgatattcaagaaatcaagaagaatatgagaagaggaaaagctatcggtttcttggaggatgagcaaggaactgtatggttgggtgaaagaatctgtgtccccgataacaaagatttgaaagatgcaattctgaaagaagctcatgatactttatactccatgcaccctggtagtactaagatgtaccaggatctcaaggaaagattttggtgggcaagtatgaagcgtgaaatcgcagagtacgtaccagtatgtgatgtttgtcagcgagtcaaggcggaacatcagaaacccgccggtttgttgcagcctttgaagattcctgaatggaaatgggaagaaattggtatggattttattactggtttacctagaacgtcatcaggccatgactctatttgggtaatagtcgacagacttaccaaagtggctcatttcattccggtaaagacaacctattctggaagtcgattggcggaattgtatatggcaaggattgtgtgtttgcatggcgtccctaagaagatagtgtctgatcgaggcagtcagtttacttcaaatttttggaagaaacttcaggaagagatgggttctaagctgaattttagtactgcttatcatccgcagacagacggacaaaccgaaagggtaaatcagattttggaagacatgttgagagcttgtgctttagacttcggtggaagttgggataagaatctaccctatgcagaattttcgtacaacaacagttatcaagctagtctacagatggctccttacgaagcactgtatggtcggaagtgtcgcactccgcttttgtgggatcaaacgggagaacgtcaggttttcgggacggatatcctaagggaagcagaagaaaaggtgaaaatcattcaggaaagattgcgagtggctcaatctcgtcataagagttatgccgacaatcgccgtagggatttgagttttgaagaaggagattatgtgtatcttcgtgtcacgccttttcgaggagttcatcgttttcgtaccaaaggaaaattggcaccgcgttttgtgggaccctataagattgtcagtagaagaggagaagtcgcttatcagttggagttacctcaatctttggcaggagtccataatgtgttccatgtttcgcaattgaagaagtgtttaagggtacctaccgaagaagctaatcttgaacagataggagtccaagaggatctgacctatgttgagaaaccaatccgtatcttggaaacaagtgagagaagaaccaggaatcgagttatccgtttttataaagtccaatggagtaatcactcggaagaagaatcaacttga

SEQ ID NO: 15214 - DNA, 1908 bp, Oryza sativa
  Clone ID: TFbOSC900410j.C1.o5.gm
atgccgcgttacaagcctgagtacctgtttggtgttgagggttttgtccaggagttgcgtacgatgtcctttgtcattggatttggaactgcccctttttatgcccagattgctcatgatcgtcatgaagagaagtgccgagtcaaagtcaccttgaacagtaatagtgaagatatcccctcagtgatgtttgaagctggaggaagaaactacatccatgcatgtcaggaggtggcaaggatcgccataggagagctccgtgatcgctacagtgatcaattggccgacactgagtatcgctaccatcctcgccaaccacagggaagtgaccgtggcagttaccttgagactgaaggaattgagaatgatgttaccacaaagcatttggttgagatgttgtgggctatggatgaaagtcgtgcggagactgtgttagcagcccaagatcgtgaagattggaatcgtggtaagatttgcaagttagaagacaaggtggatcgtttggagaaggaattagccgcattaaagggagaagcaccgccgcagaaggccaggattcgtcttaccgcaaggaagagagctctatttgttcctcgctatcaattggcgccaaaggttcgtgtggtggagaaagaagttgccccagctcaagcggatcctccggtcatcatcataagtagtgatgaagaagaagaatccaagcgcaacaattccaagattgagtgggtagcaacccaagttgataaagacgagccttcaatcgacctccgatgcttggaagaactagagactactgctgaacctatcacttggcttgaattcaccgctgctttccggaagacgcatataccatcaggagtagtgtctctcaagaagaaggagttcaggtcgcttacccagggatctcgctctgttacggagtatctgcacgagttcaatcgtcttgctcgttatgctccggaagatgtgcgcaatgatgaagagcgccaggagaagtttttgggaggacttaatgatgagctttcttacccactcatggttggagattatcctgatttccagaaattagtggataaggctatacgtcaggaggacaagtacaatcacatggagcagaagaaacgtcggattgctcacttcaaggcacaacagggaaataatcagaagccgcgtcttactttaggaccccagtccatgccacagggaggttcttcgtctgttgttcgtccgcagcgtcagttcttcaacaacaatgctggcaacaacatccgtaatcaagctccacgtcctgttgcagctccagcacagcaacaacctgccaagagagagcaaggcagcaagcccgtggtgtgtttcaactgtggagacccaggacattatgctgacaagtgtccgaagccccgacgcgtgaaggttgtccctgcccagaataactctgctgtaccagcatccaaggctcgtgtaaatcatgtcgctgctgcagaagctcaagatgctccagatgtgattttccttgttaactcagttcctgcaacagtacttttcgattctgccaatgagttggcagaagttaagaggcaagtagatgatttgcttcagaagggatacatcagacctagttcatctccatggggagctccgccgtcgccgtcgctcgggaagaccaccgtcgtgctcgccaagtcgtcgccgtcctcgttcgccccttcgccgtcgccggagatcaccggagcagcttcgccgtcgtcgacccgaaggttcccgccgcttcctccttgtcgccgtcgccgtccgttggtcttccgccgcccgttaggtcaccggtggtacacctctgatcagagtaaaactattcgaatagccgtgcccgcggttatgggcgggtctaacaatgtctttcgtgattag

SEQ ID NO: 15215 - DNA, 2862 bp, Oryza sativa
  Clone ID: TFbOSC9341j.C1.o1.fg
catttgcatcacatcagttgcatggccctgcctctgaatggtgggatcacttccgccttaacaggactactgctgaacctatcacttggcttgaattcaccgctgctttccgaaagacgcatataccatcgggagtagtgtctctcaagaagaaggagttcaggtcgctttcccagggatctcgctctgttacggagtatctgcacgagttcaatcgtcttgctcgttatgctccggaagatgtgcgcaatgatgaagagcgccaggagaagtttttgggaggacttaatgatgagctttcttacccactcatggttggagattatcctgatttccagaaattagtggataaggctattcgtcaggaggacaagtacaatcgcatggagcagaagaaacgtcggattgctcaattcaagacacaacagggaaataatcagaagccgcgtcttactttaggaccccagcccatgccacagggaggttcttcgtctgttgttcgtccgcaacgtcagttcttcaacaacaatgctggcaacaacatccgtaatctagctccacgtcctgttgcagttccagcacagcaacaacctgccaagagggagcaaggcaacaagcccgtggtgtgtttcaactgtggagatccaggacattatgctgacaaatgtccgaagccccgacgcgtgaaggttgtccctgcccagaataactctgctgtaccaacatccaaggctcgtgtaaatcatgtcgctgctgcagaagctcaagatgctccagatgtgattttgggtatgttccttgttaactcagttcctgcaacagtgcttttcgattctggtgctacacattcattcttatctatgagttttgcgggaaatcatgggatggaagtagaagaccttagatgtcctttgatggttagtaccccaagtaatcaagcactctctttgcaacgtagcccctctgtcagaatagaaattcaaggagtaccatttctggccaatcttatcttgttagaatccaaagaccttgatgtcatcctagggatggactggttagccagacataaaggtgtgatagactgtgccaacagaaaagtaactctcaacagctatgatggtcgagttgtaactgttcatgcattgtcatctgagtctttaaggtcaagactgaaccagataactttggaagagattcctatagtccgggagtatcctgatgtgttcccagatgatttacctggtatgccgcctaaaagggatatagagttcagaatagatttggtacctggaacaactccgatccataagagaccttatcgaatggcagccaatgagttggcagaagttaagaggcaagtagatgatttgctacagaaaggatacatcagaccgagttcatcaccatggggagctccggttatttttgtggaaaagaaagaccatactcagagaatgtgtgtggactatcgtgcactaaacgatgtgactattaagaataagtatccactacccaggattgatgatttgtttgatcaacttaaaggtgccactgttttctccaagatagatcttcgatcagggtatcatcagttgagaatcaaagaggaagatatacctaagacagcttttaccactaggtatgggttgttcgaatgtactgttatgtcttttggacttaccaatgcccctgctttcttcatgaacttgatgaataaggtgtttatggaatacttagacaagttcgtggtggtctttatagatgatattcttatctactctcgaaccaaagaagagcatgaagaacatcttcgccttgcattggagaagctacgagaacatcaactgtatgctaagtttagcaagtgtgaattttggttgtccgaagtgaaattccttggtcacatcatctcagccggaggagttgccgtcgatcctagtaacgtggaatccgtaaccaattggaagcaaccaaagacagtttcagagattcgcagtttcctaggccttgcaggatattatcggaggtttatagagaatttttccaagattgctaagcccatgacacgactgcttcagaaagatgtgaagtacaagtggtcggaagaatgtgagcagagttttcaagagttgaaaagtcgcttaatatcagctcctattttgattttgcctgatccaaagaagggttttcaagtgtattgtgatgcatccaaacttgggttaggttgtgttctgatgcaagatgggaaggtggttgcctatgcctctcgacagttacgtccgcatgagaagaactaccctactcatgatattgagttagctgcagtcgttcatgcattgaagatttggcgtcattatcttttcggtactcgtacagaagtgtacaccgatcacaagagtttaaagtatatctttactcagtcggatctgaacatgagacaacggagatggttggaattaattaaggattatgacatgggaattcattatcatccgggaaaggctaatgttgtagcagacgctcttagcagaaaaggctattgcaatgctacagaaggacgacagttgccattggaattatgcaaggaatttgaaagattaaatttgggaattgtcggtagaggtttcgttgcagccttagaagcgaagcccactctaattgatcaagttagagaagcccaaattaatgatcctgatattcaagagatcaagaagaatatgagaagaggaaaagctattggtttcttggaggatgagcacggaactgtatggttgggtgagagaatctgtgtccccgacaacaaagatttaaaggatgcaattctgaaagaagctcatgatactttatactccattcaccctg

SEQ ID NO: 15216 - DNA, 3186 bp, Oryza sativa
  Clone ID: TFbOSC26384j.C1.o3.fg
atggggaaaaatcagggacttgaacaagtgatgggtaaattggtggacatgcttgcaaagaaacttagtgaggccccaactacaagtaatgcagtggttcctcatactgaaacaatgcaaaaaattgagttgatgcaaaatgacattaagttggagggtgttaaaaattatttgagttggtcaaaaagagctttattgatcttgaaaacaaagggattagaagaatatgttacaagggagataaaggagcctgagagcacttcaaatgttgagtggaagacttggagtactaccaactcttcagtagtagcgtggttgttgacttcacttattcctgctattgctacaactgttgagaccatatctagtgcaagtgagatgtggaaaactctcaccaatctctactcaggagaaggaaatgtaatgctaatggtggaggcacaagagaagataagtgctatgagacagggggagcgttctgttgcagaatatgttgcagaactgaagcatctatggtctgatttggatcattatgatcctcttggaagggtcattgagttcttgaagggcctaaattcagagtttgaagggagaagggatgcaatgtttcatcaaaccactcttcctaccttggatgaggctattgcagctatggcacaggaggagcttaagaagaaagtattgcctagtgtcacaccatcttcaccaagtgccacatatgtagttgcacaaagtaaagagactagggagtgcttcaattgtggtgaaatggggcaccttatgcgtgattgccgtgctcctcgcaagcctagttatgggagaggaagatttggtgacaggggtggagcaagaggtggaagaagttatgcaggtagaggtaacagaggtaggggttatgagtatagaggtgatcacagagctaatgtggtcactcttgaagagggttcttctggacctacaaatgttgatgttgccaaccttgttcattctacctcagctctcattcaaattggatacttgactcgggtgcatctagacatgtcacggatctcccttgatcgtgagaattgtttaattcaggagaggcaaatagggaagaaacttgggattggcgtcaggcgtgatggactttggtatttggatcaaaaggagacaagtgaagatgtatgtcttgcattgatggcttctacaagtgaagaagaggctaagtttattagaactgataatggaggggagtatatgaacaatgaatttagtagctttctttcatcagaaggaatattgcatcaaacttcttgtcctgatactcctccacaaaatggagtagctgagaggaaaaaccgtcatcttttggagacagctcgatcattgatgtatactatgaatgtacctaaattcttgtggagtgaggcagtaatgacagcaacttatcttatcaaccgcacaccatcaaggatactcggaatgaagacaccatgtgagatgatatttggaaagaataaatttggtgttccaccaaaagtgtttggttgcacttgttttgttagagatcatagaccttccattggaaaacttgatcctcgggctgtcaaatgcatctttgtaggctattcatcttgccagaaggggtataagtgttggagtccattagaacgacgaacctttgtaagtatggatgttacttttagagaatatgtcccattctatggtgagaagacagatttaagttctttattcattgatcttgatgattcaactagtggttatgatggtcaacaaatggaaggtgaaatattgggtccaaagggagatgaacaatcaaagaaggaaaagcttgtgattggttcaattccatgtcctataggtggtcctgttgcacaggagcaagaatggaggaagccacatgaagaggaaaatcttcaagtatacacaaggagagcaaggtgtccagtaatacaacaagttgaagaggataatcaggtagaggaagatgtaagtcatgagcaagggtctttggagtcagggggagaagatgaagaagttagagaaaaaggatctgacatgccaattgctgtcagaaaaggtgtaaggagcaatgcagggaagaaagttgtcaattgtaagtgggtatacacaataaagcaaaaccctgatggaaaggtggaaagatacaaagcaaggcttgtggttaagggatatagtcaaacatatggaattgattatgatgaaacttttgcaccagtagcaaagatgagcacgctagatgtcaagaatgcctttttacatggagaccttcaggaagagggatgtcacactactattcttgctgtgtatgtggatgatatgattatcacatgggatgattctatagagatagcaagattgaaagaaaatctaagtaaggaatttgaagtcaaggatttgggtatgcttagttgtcgaccggcctctacaccaattgagcaaaatcttaagctttgtgctgagtcgggagatccagtgaataaggagagatatcaaagacttgtagggcggctgatatatttatgtcacacaaggccggatataacttatgcagtaagtgtggtaagtcgatacatgcatgaccctagaagtggtcacatggatgccgtgtataggatcttgagatatttgaaaggtagtcctggcaaaggcttgtggtttaagagaagtggtcatcttagtttggaaggctattgtgatgcagattgggctagcagtcttgatgatagaaggtcaacctctgggtattgtgtatttgttggtggcaatttggtgtcttggaggagtaaaaaacaacctgtggtttctcgctcaacagctgaagcagaatatagggcaatgtcggtgggtctgagtgagatgttatggttgaggaatcttctatgtgagttgaagttgttgaagaatacttgcatgaagctatggtgtgacaataagtcagctatcaatattgccaacaatcctgttcaacatgatcgaacaaaacatatagagatagatcgtttctttataaaggaaaaactagatgagggaatgttgaagctagactttgtaatatctggagaacaaatagcggattgtctaacaaaggctttaggtgttgcagagtgtttgtctatgtgtaacaagatgggcatgatagatatctatcgcccatcttga

SEQ ID NO: 15217 - DNA, 4692 bp, Oryza sativa
  Clone ID: TFbOSC400682j.C1.o3.fg
atggagaagggcataattgtctcaatattagctctagctagaggcccatctactcatgtatatgtaaataacgatagcaatactgaaggggtgaagcttccagagaaaaattcacaaactacatggcatcagagccatgctcctggcggccggcggcgacgaaccctagctgagggagcaagcgctgaggttggagttcttggtggtggtgtaggacgacaaggagagtttgctttgttacagcagttagttgagtgctgcttgattaaaatgggggaaaatcagggacttgaacaagtgatgggtaaattggtggacatgcttgcaaagaaatttagtgaggtcccaactacaagtaatgcagtgattcctcatactgaaacaatgcaaaaaattgagttgatgcaaaatgatattaagttggagggtgtcaaaaattatttaagttggtcaaggagagcattgttgattttgaagactaagggattagaaggatatgtcaccggagaagtgaaggagcctgagagtgctagtgcagaatggaggacttggagcactaccaactctttagtagtagcatggttgttgacttcacttatccctgctattgctacaactgttgagaccatctcaagtgcaagtgagatgtggaaaactctcactaatctctactcaggagaaggaaatgtgatgctaatggtggaggcacaggagaagataagtgttttgagacagggggagcgttctattgcagaatatgttgcagaattgaagcatctatggtctgatttggatcattatgatcctcttgggttagagcaccccgattgtatagcaaaaatgaggaaatggattgagcgcagaagggttattgaattcttgaaaggcctaaatccagagtttgaagggagaaaagatgctatgttccatcagactactcttcctaccttggatgaggctatagcagctatggctcaagatgagcttaagaggaaagtattgcctaaggctacaccaccttcatcaagtcccacctatgcaatgctacaaggtaaagagactagagagtgttttaattgtggtgaaatggggcatctcatgcgtgattgtcgtgctcctcgcaagcctagttatggaagaggaagaagtggtgatagaggtggagcaagaggtggaagaggttatgcaggtagagctaacagaggtagaggctatgagtatagaggtgatcacagagctaatgtggtcactcttgaagagggttgttctggacctacaaatgttgatgttgccaaccttgttcattctatctcaggtaactcaaaccaagcatttatgtcaatcaatagttctcattcaaattggatacttgactcgggtgcatccagacatgtcacgggtatgtgtggagaatttgcatcatataaaccatacccatttacacgaaaagaaacaattgaaactgcagatggaacatcatgcccagttaagggagagggaacagtacaatgtactccttcaatcactttatcatcagtgttatatgtcccttcttttccagtgaatttgatttcaataagttctcttgttgatcatatggattgtcgggtatcccttgatcgtgagaattgtttaattcaggagaggcaaacagggaagaaacttgggactggcgtcaggcgtgatggactttggtatttggatagaaaggagacaagtgaagatgtatgtcttgcattgatggcttctacaagtaaagaagaggctaaggtattacttttgcattgtcgattggggcatatatcttttgaaactatgagtaagatgtttccagcagaactaagtagagtgaataaacataagttagtatgtgatgcatgtgagtatggaaaacatacaagaacatcatatgtgagtagaggactccgaagtatgttaccatttatgctaattcactcagatgtttggacttcacctatggtctctatgagtggaatgaagtattttgttacctttattgattgctactctcgcatgacatggttatatcttatgaggcataaggatgaggtgtttaaatgcttccagaatttctatgcatacattaaaaatcattttaatgctcgagttcagtttattagaactgataatggcggggagtatataaacaatgaatttagtagctttctttcatcagaaggaatattgcatcaaacttcttgtcctgatactcctccacaaaatggggtggctgagagaaaaaaccgtcatcttttggagacagctcgctcattgatgtatgctatgaatgtacctaaattcttgtggagtgaagcagtaatgacagcaacttatcttatcaaccgcacgccatcaaggatacttggaatgcagacaccatgtgagatgatatttggaaagaatgaatttgttgttccaccaaaagtgtttggttgcacttgttttgttagagatcatagaccttccgttggaaaacttgatccttgggctgtcaaatgcatctttataggctatccatctggccagaaggggtataagtgttggagtccatcagaacgacgaacctttgttagtatggatgttacttttagagaatctgtcccattctacggtgagaagacagatttaagttctttattcgttgatcttgataattcaactagtggtcatgatggtcaacagatggaaggtgaaatattgggtccaaagggagatgaacaatcaaagaaggaaaagtttgtggttggttcaattccatgtcctatgggtggtcctgttgcacaggagcaagaatggaggaagccacatgaagaggaaaatcttcaagtatacacaaggagaacaaggtgtccagtaatccaacaagttgaagaggataatcaggtagagaaagatgtaagtcatgagcaagggtctttggagtcaaggggagaagaagaggaagttagagaagaatctgacttaccaattgctgtcagaaagagtgtgagaagcaatgcaggtaaacctccactaaggtatggttttgaagatcaagatgagggtgatgaagaaaataatatatccaactttgtttcctatgactccttgtcatccacatataaagcctttgtagcatcactagattcaatggaaatcccaaaggattggagagaagcaaagcaagatccaaggtggcatcaagctatgttagatgaactagaggctcttgaaaagaacaaaacatgggatcttgtaccatttcctgaaggaaagaaagttgtcaactgtaagtgggtttatacagtaaagcaaaatcctaatggaaaggtggaaagatacaaagcaaggctggtggctaagggatatagtcaaacatatggaattgattatgatgaaacttttgcaccagtagcaaagatgagcacggtaagaactctcatatcttgtgcagctaattttgattggccattgcatcagctagatgtcaagaatgcatttttacatggagatcttcaagaagaggtgtatatggatatcccaccgggatttgctacttcacaaactgaaggaaaggtgctgagattgaagaaatctttgtatggtcttaaacaatcaccaagagcatggtttgatcggtttaggcgtgcaatgtgtgctatggactataagcaatgtaatggagatcatacagttttttatcatcatagtggagatcatataaccatccttgctgtctatgttgatgatatgattatcactgggaatgattgcttggagataactaggttgaaacagaatctaagcaaagaatttgaagttaaggacctaggccagttgaaatattttctgggtattgaaattgcaagatctcctagagggatagttctgtcacaacggaaatatgcattggatttgctcagtgacacaggtatgcttggatgtcgcccagcctctacaccaattgatcaaaatcataaattatgtgcacagtctggaaatccagtgaataaggaaagataccaaagattggtgggaagactgatatatttgtgtcatacacgacctgacataacttatgctgtcagtatggtgagtcgatatatgcatgatccaaggagtggtcatatggatgcggtctataggatcttgagatatttgaagggaagcccaggtaaaggcctatggtttaagaaaaatggacacttggaggttgaaggctattgtgatgcagattgggcaagttgtcctgatgatagaagatcaacttcaggctattgtgtgtttgttggtggcaatttagtatcttggaggagcaagaagcaaccggtggtgtctcgctcaactgctgaggcagaatatcgggcaatgtcagtgagtttgagtgagttgttatggctaaggaatcttctttctgagttaaagttgtcggtggatactcccatgaaattgtggtgtgacaacaagtcagcaatcaacattgctaacaacccagttcagcatgatcgaacaaagcatgtggagttggatcgtttctttatcaaggaaaaactggatgagggagttttggaattagaatttgtaacgtctagtggacaagttgctgattgtttaacaaagggtttaggtgttaaagagtgtaatcgttcgtgtgacaagatgggtatgatagatatctatcacccatcttga

SEQ ID NO: 15218 - DNA, 1239 bp, Oryza sativa
  Clone ID: TFbOSC400773j.C1.o32.fg
atggcacatggggagcttaagaagaaagtattgcctagtgtcacaccatcttcaccaaatcccacatatgtagttgcacaaagtaaaaagatcagggagtgcttcaattgtggtgagatgggacaccttatgcgtgattgtcgtgctccacacaagcctagttatgggagaggaagatatggtgataagggcggggcaagaggtggaagaggtcatgcgggtagaggtaacagaggtagaggctatgagtatagaggtgatcacaaagctaatgtagtcactcttgaagagggttcttctagacctacaaatgttgatgttgccaaccttgttcattccacttcacataactcaaaccaagcatttatgtccatcaatagatctctttcaaattggatactagactcgggtgtatccagacatgtcacggctgcacttgctttgttagagatcatagaccttctgttggaaaacttgatcctcgagctgtcaaatgcttctttatatgctattcatctggccagaaggggtataagtgttggagtccatcagaacgacgaaccttttggtcatgatagtcaacaaatggaaggtgaaatcttgggtccaaagggacataaactatcaaagaaagaaaagtttgtggttggttcaattccatgtcctatgagtagtcctattgcacaagagcaagaatggagtaagccatatgaagaggaaaatcttcaagtttacacaagtataacaaggtctccaataatccaacaagttgaagaggataatcaggtagtggaagatgtaagtcatgatgactccattctaaggtcatacaacttttcggtgctttctgtcttgccaatctattcgaagctcatcaaagcaggactcagaatttggctctacagtggagatgccgacggtagggtcccagtgatcgggtcaaggtactgcgtggaagcgcttgggctgcatatcaagagggactggcaaccttggtacctgaacagacaggttgcaggaagatttgtggagtacgatggcatgaccatggtgacgattagaggtgctggacatttggtaccccttaataaacctgaagaagggctcactctgattgacacatttcttcttggcctgaagctcttggtaacttttgttggtaaagcatctcaagtctcaagcaattacattgataagattgtgctaaacattcaaagaattaacaagggcaagttctag

SEQ ID NO: 15219 - DNA, 3186 bp, Oryza sativa
  Clone ID: TFbOSC403824j.C1.o5.fg
atggggaaaaatcagggacttgaacaagtgatgggtaaattggtggacatgcttgcaaagaaacttagtgaggccccaactacaagtaatgcagtggttcctcatactgaaacaatgcaaaaaattgagttgatgcaaaatgacattaagttggagggtgttaaaaattatttgagttggtcaaaaagagctttattgatcttgaaaacaaagggattagaagaatatgttacaagggagataaaggagcctgagagcacttcaaatgttgagtggaagacttggagtactaccaactcttcagtagtagcgtggttgttgacttcacttattcctgctattgctacaactgttgagaccatatctagtgcaagtgagatgtggaaaactctcaccaatctctactcaggagaaggaaatgtaatgctaatggtggaggcacaagagaagataagtgctatgagacagggggagcgttctgttgcagaatatgttgcagaactgaagcatctatggtctgatttggatcattatgatcctcttggaagggtcattgagttcttgaagggcctaaattcagagtttgaagggagaagggatgcaatgtttcatcaaaccactcttcctaccttggatgaggctattgcagctatggcacaggaggagcttaagaagaaagtattgcctagtgtcacaccatcttcaccaagtgccacatatgtagttgcacaaagtaaagagactagggagtgcttcaattgtggtgaaatggggcaccttatgcgtgattgccgtgctcctcgcaagcctagttatgggagaggaagatttggtgacaggggtggagcaagaggtggaagaggttatgcaggtagaggtaacagaggtaggggttatgagtatagaggtgatcacagagctaatgtggtcactcttgaagagggttcttctggacctacaaatgttgatgttgccaaccttgttcattctacctcagctctcattcaaattggatacttgactcgggtgcatctagacatgtcacggatctcccttgatcgtgagaattgtttaattcaggagaggcaaatagggaagaaacttgggattggcgtcaggcgtgatggactttggtatttggatcaaaaggagacaagtgaagatgtatgtcttgcattgatggcttctacaagtgaagaagaggctaagtttattagaactgataatggaggggagtatatgaacaatgaatttagtagctttctttcatcagaaggaatattgcatcaaacttcttgtcctgatactcctccacaaaatggagtagctgagaggaaaaaccgtcatcttttggagacagctcgatcattgatgtatactatgaatgtacctaaattcttgtggagtgaggcagtaatgacagcaacttatcttatcaaccgcacaccatcaaggatactcggaatgaagacaccatgtgagatgatatttggaaagaataaatttggtgttccaccaaaagtgtttggttgcacttgttttgttagagatcatagaccttccattggaaaacttgatcctcgggctgtcaaatgcatctttgtaggctattcatcttgccagaaggggtataagtgttggagtccattagaacgacgaacctttgtaagtatggatgttacttttagagaatatgtcccattctatggtgagaagacagatttaagttctttattcattgatcttgatgattcaactagtggttatgatggtcaacaaatggaaggtgaaatattgggtccaaagggagatgaacaatcaaagaaggaaaagcttgtgattggttcaattccatgtcctataggtggtcctgttgcacaggagcaagaatggaggaagccacatgaagaggaaaatcttcaagtatacacaaggagagcaaggtgtccagtaatacaacaagttgaagaggataatcaggtagaggaagatgtaagtcatgagcaagggtctttggagtcagggggagaagatgaagaagttagagaaaaaggatctgacatgccaattgctgtcagaaaaggtgtaaggagcaatgcagggaagaaagttgtcaattgtaagtgggtatacacaataaagcaaaaccctgatggaaaggtggaaagatacaaagcaaggcttgtggttaagggatatagtcaaacatatggaattgattatgatgaaacttttgcaccagtagcaaagatgagcacgctagatgtcaagaatgcctttttacatggagaccttcaggaagagggatgtcacactactattcttgctgtgtatgtggatgatatgattatcacatgggatgattctatagagatagcaagattgaaagaaaatctaagtaaggaatttgaagtcaaggatttgggtatgcttagttgtcgaccggcctctacaccaattgagcaaaatcttaagctttgtgctgagtcgggagatccagtgaataaggagagatatcaaagacttgtagggcggctgatatatttatgtcacacaaggccggatataacttatgcagtaagtgtggtaagtcgatacatgcatgaccctagaagtggtcacatggatgccgtgtataggatcttgagatatttgaaaggtagtcctggcaaaggcttgtggtttaagagaagtggtcatcttagtttggaaggctattgtgatgcagattgggctagcagtcttgatgatagaaggtcaacctctgggtattgtgtatttgttggtggcaatttggtgtcttggaggagtaaaaaacaacctgtggtttctcgctcaacagctgaagcagaatatagggcaatgtcggtgggtctgagtgagatgttatggttgaggaatcttctatgtgagttgaagttgttgaagaatacttgcatgaagctatggtgtgacaataagtcagctatcaatattgccaacaatcctgttcaacatgatcgaacaaaacatatagagatagatcgtttctttataaaggaaaaactagatgagggaatgttgaagctagactttgtaatatctggagaacaaatagcggattgtctaacaaaggctttaggtgttgcagagtgtttgtctatgtgtaacaagatgggcatgatagatatctatcgcccatcttga

SEQ ID NO: 15220 - DNA, 4362 bp, Oryza sativa
  Clone ID: TFbOSC422802j.C1.o10.fg
atgggggaaaatcagggacttgaacaagtgatgggtaaattggtggacatgcttgcaaagaaatttagtgaggccccaactacaagtaatgcagtgattcctcatactgaaacaatgcaaaaaattgacttgatgcaaaatgatattaagttggagggtgtcaaaaattatttaagttggtcaaggagagcattgttgattttgaagactaagggattagaaggatatgtcaccggagaagtgaaggagcctgagagtgctagtgcagaatggaggacttggagcactaccaactctttagtagtagcatggttgttgacttcacttatccctgctattgctacaactgttgagaccatctcaagtgcaagtgagatgtggaaaactctcactaatctctactcaggagaaggaaatgtgatgctaatggtggaggcacgggagaagataagtgctttgagacagggggagcgttctattgcagaatatgttgcagaattgaagcatctatggtctgatttggatcattatgatcctcttgggttagagcaccccgattgtatagcaaaaatgaggaaatggattgagcgcagaagggttattgaattcttgaaaggcctaaatccagagtttgaagggagaaaagatgctatgttccatcagactactcttcctaccttggatgaggctatagcagctatggctcaagatgagcttaagaggaaagtattgcctaaggctacaccaccttcatcaagtcccacctatgcaatgctacaaggtaaagagactagagagtgttttaattgtggtgaaatggggcatctcatgcgtgattgtcgtgctcctcgcaagcctagttatggaagaggaagaagtggtgatagaggtggagcaagaggtggaagaggttatgcaggtagagctaacagaggtagaggctatgagtatagaggtgatcacagagctaatgtggtcactcttgaagagggttgttctggacctacaaatgttgatgttgccaaccttgttcattctatctcaggtaactcaaaccaagcatttatgtcaatcaatagttctcattcaaattggatacttgactcgggtgcatccagacatgtcacgggtatgtgtggagaatttgcatcatataaaccatacccatttacacgaaaagaaacaattgaaactgctgatggaacatcatgcccagttaagggagagggaacagtacaatgtactccttcaatcactttatcatcagtgttatatatcccttcttttccagtgaatttgatttcaataagttctcttgttgatcatatggattgtcgggtatcccttgatcgtgagaattgtttaattcaggagaggcaaacagggaagaaacttgggactggcatcaggcgtgatggactttggtatttggatcgaaaggagacaagtgaagatgtatgtcttgcattgatggcttctacaagtaaagaagaggctaaggtattacttttgcattgtcgattggggcatatatcttttgaaactatgagcaagatgtttccagcagaactaagtagagtggataaacataagttagtatgtgatgcatgtgagtatggaaaacatacaagaacatcatatgtgagtagaggactccgaagtatgttaccatttatgctaattcactcagatgtttggacttcacctatggtctctatgagtggaatgaagtattttgttacctttattgattgctactctcgcatgacatggttatatcttatgaggcataaggatgaggtgtttaaatgcttccagaatttctatgcatacattaaaaatcattttaatgctcgagttcagtttattaaaactgataatggcggggagtatataaacaatgaatttagtagctttctttcatcagaaggaatattgcatcaaacttcttatcctgatactcctccacaaaatggggtggctgagagaaaaaaccgtcatcttttggagacagctcgctcattgatgtatgctatgaatgtacctaaattcttgtggagtgaggcagtaatgacagcaacttatcttatcaaccgcacgccatcaaggatacttggaatgcagacaccatgtgagatgatatttggaaagaatgaatttgttgttccaccaaaagtgtttggttgcacttgttttgttagagatcatagaccttccgttggaaaacttgatcctcgggctgtcaaatgcatctttataggctatccatctggccagaaggggtataagtgttggagtccatcagaacgacgaacttttgttagtatggatgttacttttagagaatctgtcccattctacggtgagaagacagatttaagttctttattcgttgatcttgataattcaactagtggtcatgatggtcaacagatggaaggtgaaatattgggtccaaagggagatgaacaatcaaagaaggaaaagtttgtggttggttcaattccatatcctatgggtggtcctgttgcacaggagcaagaatggaggaagccacatgaagaggaaaatcttcaagtatacacaaggagaacaaggtgtccagtaatccaacaagttgaagaggataatcaggtagagaaagatgtaagtcatgagcaagggtctttggagtcagggggagaagaagaggaagttagagaagaatctgacttaccaattgctgtcagaaagagtgtgagaagcaatgcaggtaaacctccactaaggtatggttttgaagatcaagatgagggtgatgaagaaaataatatatccaactttgtttcctatgactccttgtcatccacatataaagcctttgtagcatcactagattcaatggaaatcccaaaggattggagagaagcaaagcaagatccaaggtggcatcaagctatgttagatgaactagaggctcttgaaaagaacaaaacatgggatcttgtaccatttcctgaaggaaagaaagttgtcaactgtaagtgggtttatacagtaaagcaaaatcctaatggaaaggtggaaagatacaaagcaaggctggtggctaagggatatagtcaaacatatggaattgattatgatgaaacttttgcaccagtagcaaagatgagcacggtaagaactctcatatcttgtgcagctaattttgattggccattgcatcagctagatgtcaagaatgcatttttacatggagatcttcaagaagaggtgtatatggatatcccaccgggatttgctacttcacaaactgaaggaaaggtgctgagattgaagaaatctttgtatggtcttaaacaatcaccaagagcatggtttgatcggtttaggcgtgcaatgtgtgctatggactataagcaatgtaatggagatcatacagttttttatcatcatagtggagatcatataaccatccttgctgtctatgttgatgatatgattatcactgggaatgattgcttggagatcactaggttgaaacagaatctaagcaaagaatttgaagttaaggacctaggccagttgaaatattttctgggtattgaaattgcaagatctcctagagggatagttctgtcacaacggaaatatgcattggatttgctcagtgacacagagtctggaaatccagtgaataaggaaagataccaaagattggtgggaagactgatatatttgtgtcatacacgacctgacataacttatgctgtcagtatggtgagtcgatatatgcatgatccaaggagtggtcatatggatgcggtctataggatcttgagatatttgaagggaagcccaggtaaaggcctatggtttaagaaaaatggacacttggaggttgaaggctattgtgatgcagattgggcaagttgtcctgatgatagaagatcaacttcaggctattgtgtgtttgttggtggcaatttagtatcttggaggagcaagaagcaaccggtggtgtctcgctcaactgctgaggcagaatatcgggcaatgtcagtgagtttgagtgagttgttatggctaaggaatcttctttctgagttaaagttgtcggtggatactcccatgaaattgtggtgtgacaacaagtcagcaatcaacattgctaacaacccagttcagcatgatcgaacaaagcatgtggagttggatcgtttctttatcaaggaaaaactggatgagggagttttggaattagaatttgtaacgtctagtggacaagttgctgattgtttaacaaagggtttaggtgttaaagagtgtaatcgttcgtgtgacaagatgggtatgatagatatctatcacccatcttga

SEQ ID NO: 15221 - DNA, 2241 bp, Oryza sativa
  Clone ID: TFbOSC401006j.C1.o31.fg
atgggtcctcaaatagagcgagttgtagatgtgagcgtttctcctcctaatgataaagagctatcatctgaagaggaagagaaatgcatacatctcaatgctcaagctactaatgttttatttagtgttttgagtgaagatgtatttaaaaccatcatgccgcttaaagatgctcatctcatttggaccacactcaaggagagatatgacaagtccaaatgtgatgatgtactctttttggaagaaccatttgaggaatgttcaacttcatcaccaaattgcgaagaacctcaagtgactaccttcgatgatccagataatcatcccacgtccaccttatcaacacatgactacattgaaggcaatgaattggtgagtaaggttgacgatcgtccaattctcccattggattccaacaacactgataatgaaattgtcatattgcattgtgttgttgactcatgcatctcacctagccccaagtatatgtgtgaggatgatatggataaatgctctacttcctatagtacttgtggaactaaccttttgaagggagaagtaaatgagccccaatggacaagtgaagaatccacctcaccaagatgctcatcttctatttccaaagatcatgctttctttatgggaaaagatggtgacttcgagtttgatcacttgagcaagaaggacataacaattgtgataaagctcatggagatcattaagaagcaacaagcatgcctcattaagaagaatgaagaaatcatgagtctaaccaaagaacacaagaaacttaaggattttcgttcttcattgattatgaggtataaaaaattggaaagtgaatttgcttgtgccactaattctattgtgtgtgtagcatctttggagaagcaaaatcaagagcttaaatctcaacttgaggagatcactatcaagtatgtggatttacaagaaagacatgatgaacttttgtgttctcatgataatcttgtagattctcatgccatgctagaggtagctcatgaggcgataattacaacggtgaaatcctatgagcctcatgttcaagttgatcttattacttgtactaacacttgttgctccaaagaaaatctttccccgagcactacatgtgacttggattgtgtaggcaaaggggagaagcaaatgtattatggacttgtgtgcattgctcaaccttctcaagataaccgtgagggcatggtgaataagcttgagaagggatcaaccgtggtgtgcaccaagatccatcaaagggatatcaagtccatcaatgctcataccaagggacgaaatcaaaagatgatcaagagttccattacttgcttcaagtacaagaaagtgggacatcatgttagagattgcccttggaagaaaggaaataagttgagcaagaaggacattcctcgcatcaagtgcttcaagtgcaccgaagcgggacactttgcctcaaggtctccttgcacattggatgaacaatgcaaaacatcaagtgagaggcaaaccggcaacaagcaaaccgaaaagcaatatagaagcaaaagtcgactttgctataattgctgggcaaagggacatattggtaaaaattgtcccaagggtaacattcctaagccaagtctctcatttgattataatttgcttaggaatgccaaaaatgacatttgtgctactagggtgatttgttcaccacacactagcccacaggccatttgggtgcctaagtctcttgtgactaacctttatggacccaatgttgttggggaccaaaatgtgctaaaattttattgtggaaccaaaggcttcggtaagaccgctcgatttgcaatcaagctcatctatcaccatgccatcgagcccggaggctctaggtggataccccgaagactccaggaagattccttggtcacccgaaggatcaaggccgaaggctccaagctcacaagaacatgcatacttaaaggttatccttctgtgcaagaatcacgggtgagaccacaagaagtccatgatgaccaaggtggactactcgatcaacctcaatcaactcaagtcaacctgccgcaattgactatgaagaacatgaagaacatgcttccgaaggaagatggtgtaaatgctaaaccagatcgggtcatggccttacaagaagagcacaagcactatcaggacgtagactgtgatcaaggagttaaacatgttcatgatgagaaagcttaa

SEQ ID NO: 15222 - DNA, 1134 bp, Oryza sativa
  Clone ID: TFbOSC27738j.C1.o1.fg
atggctgacaatgagaaaggcaataaggtcagaagtcaggatattggtacctcaagctcccgagtgaatgaagcaccagacaccagtcgtgtgacactggtccaacacctgattaaccagaaccgattgcttatagagatactacagcagcatcagacgccaatgctgaacctgaatcaaatacaacctcaagtgcagttggaggcagtccaagcactcaccccacaagtcagcatgccgccagcatcccgaaggacccatgatgacgtgccacctgttgacccaaaagaagcaagtaacatttgctttacgtgtgatgagcaagtgcactatgcaagggagcgtcctcagcagaaaagaaaaacaccaatgcgaaccgaagatgaagtccgtaagatgatcattaccagcacagaatggcctccaccaggaatgacaagacgtcagagaagaaataccttccgaggtgcaccacagttgacagagcatcttttagctaatggaggtagagtatctgatagtgaagattcagatcaagtctcctcagatgatgaagatgaaatggaacgtaaggcatgctctcgttgtggagaaatcggtcatgtcgccagctcgtgtgccactatatgcgttcattgcgaggaagaccatccacccgacaggtgtccaacgagcaggatcacttgtttcttttgtgaaggaactgatcatgtaccaaaagattgtcaattcagttttctgctgacgaagaagatggctaaccaacccgccagttccaacggagagaagcatcaaggcaacaccaatcctcgccaagattacagtttcagcctaactccagtgccaggacagaggaatcgaaatgagaaaagaaaatgccgagtccgggaagacatctgttgcttcaattgtcaaggaatgggtcatttcgccgacaagtgcccaaaaccgagaaacatagctgccggcacgtcagtccacgcaactccctgcaatcagaagcttgctcctcaacgaattgtcatccatgcatccccgaagcagtcctatagcccgcgttgcaacagctccaattccaatgaatgcactaccacaaggtgtcaatgctcaatttcagccccagccaccagctga

SEQ ID NO: 15223 - DNA, 1128 bp, Oryza sativa
  Clone ID: TFbOSC15261j.C1.o1.fg
atggctgacaatgagaaaggcaataaggtcagaagtcaggacattggtacctcaagctcccgagtgaatgaagcaccagacaccagttgtgtgacactggtccaacacctgattaaccagaaccgattgcttatagagatactacagcagcatcagacgccaattctgaacctgagtcaaatacaacctcaagtgcagttggaggcagtccaagcactcacaccacaagtcagcatgccgccagcatcccgaaggactcatggtgacgtgccacatgttgacccaaaagaagcaagtaacatttgctttatgtgtgatgagcaagggcactatgcaagggagcgtcctcagcagaaaagaaaaacaccaatgcgaaccgaagatgaagtccgtaagatgatcattaccagcacagaatggcctccaccaggaatgacaagacgtcagagaagaaataccttccgaggtgcaccacagttgacagagcatcttttagctagtggaggtagagtgtctgatagtgaagattcagatcaagtctcctcagatgatgaagatgaaatggaacgtaaggcatgctctcgttgtggagaagtcggtcatgttgccagctcgtgtgccactacatgcgttcattgtgaggaagaccatccacccgacaggtgtccaacgagcaggatcacttgtttcttttgtgaaggaactgatcatgtaccaaaagattgtcaattcagttttctgctgacgaagaagatggccaaccaacccgccagttccaacggagagaagcatcaaggcaacacaaatccccgccaagattaccgtttcagcctaactccagtgccaggacagaggaatcgaaatgagaaaagaaaatgccgagtccgggaagacatctgttgcttcaattgtcaaggaatgggtcatttcgccgacaagtgcccaaaaccgagaaacatagctgccggcacgtcagtccacgcaactccctgcaatcagaagcttgctcctcagcaaattgtcatccatgcatcccgaagcagtcctatagcccgcgttgcaacagctctaactccagcgagtgcattactgtcgcgaccgggaaaattgccttttcccgaacgctag

SEQ ID NO: 15224 - DNA, 1618 bp, Oryza sativa
  Clone ID: TFbOSC900373j.C1.o11.np
atggctgacaatgagaaaggcaataaggtcagaagtcaggacattggtacctcaagctcccgagtgaatgaagcaccagacaccagttgtgtgacactggtccaacacctgattaaccagaaccgattgcttatagagatactacagcagcatcagacgccaattctgaacctgagtcaaatacaacctcaagtgcagttggaggcagtccaagcactcacaccacaagtcagcatgccgccagcatcccgaaggactcatggtgacgtgccacatgttgacccaaaagaagcaagtaacatttgctttatgtgtgatgagcaagggcactatgcaagggagcgtcctcagcagaaaagaaaaacaccaatgcgaaccgaagatgaagtccgtaagatgatcattaccagcacagaatggcctccaccaggaatgacaagacgtcagagaagaaataccttccgaggtgcaccacagttgacagagcatcttttagctagtggaggtagagtgtctgatagtgaagattcagatcaagtctcctcagatgatgaagatgaaatggaacgtaaggcatgctctcgttgtggagaagtcggtcatgttgccagctcgtgtgccactacatgcgttcattgtgaggaagaccatccacccgacaggtgtccaacgagcaggatcacttgtttcttttgtgaaggaactgatcatgtaccaaaagattgtcaattcagttttctgctgacgaagaagatggccaaccaacccgccagttccaacggagagaagcatcaaggcaacacaaatccccgccaagattaccgtttcagcctaactccagtgccaggacagaggaatcgaaatgagaaaagaaaatgccgagtccgggaagacatctgttgcttcaattgtcaaggaatgggtcatttcgccgacaagtgcccaaaaccgagaaacatagctgccggcacgtcagtccacgcaactccctgcaatcagaagcttgctcctcagcaaattgtcatccatgcatcccgaagcagtcctatagcccgcgttgcaacagctctaactccagcgagtgcattaccacaaggtgtcaatgctcactttcagccccagccatcagttgacaagacagaggccagtatcggcattgtacctttggatgttccagcacagcagccaagaaatcaagtaccagatggagaacccgagcataagaaagttattgtctgttacaactgtggtacctgttaaggaagcggacatgcccatcgccaagtggtcactggagcaaatgcagtaccaaagagtgaaatcttcaactcggtatcagatgctacacggagtgaaaagtacaagcaccggttaccaggttgactccgaagatatgaatcatgagaagttcgggaacggaagcatcattgaactaccgcaacctagtctgagtcagccaaaaggtgcaccctggtccaagtcaggtgaagagaagattccatccgcaacaggaggtcaagccaagcagttccgagtggtgaagttttgctggaagtttgtcaagacgcaacggaagaagtcagacaagaagagaagaccgcccaacctatcttcttgc

SEQ ID NO: 15225 - DNA, 1185 bp, Oryza sativa
  Clone ID: TFbOSC6672j.C1.o1.fg
atgctgaacctgaatcaaatacaacctcaagtgcagttggaggcagtccaagcactcaccccacaagtcagcatgccgccagcatcccgaaggacccatgatgacgtgccacctgttgacccaaaagaagcaagtaacatttgctttacgtgtgatgagcaagtgcactatgcaagggagcgtcctcagcagaaaagaaaaacaccaatgggaaccgaagatgaagtccgtaagatgatcattaccagcacagaatggcctccaccaggaatgacaagacgtcagagaagaaataccttccgaggtgcaccacagttgacagagcatcttttagctaatggaggtagagtatctgatagtgcagattcagatcaagtctcgtcagatgatgaagatgaaatggaacgtaaggcatgctctcgttgtggagaaatcggtcatgtcgccagctcgtgtgccactatatgcgttcattgcgaggaaggccatccacccgacagattgtcaattcagttttctgccgacgaagaagatggccaaccaacccgccagttccaacggagagaagcatcaaggcaacaccaatcctcgccaagattacagtttcagcctaactccagtgtcaggacagaggaatcaaatgagaaaagaaaatgccgagtccgggaagatatctgttgcttcaattgtcaaggaatgggtcatttcgccgacaagtgcccaaaaccgagaaacatagctgccggcatgtcagtccacgcaaccccctgcaatcagaagcttgctcctcaacgaattgtcatccatgcatccagaagcagtcctatagcccgcgttgcaacagctccaattccaatgaatgcactaccacaaggtgtcaatgctcaatttcagccccagccaccagctgacaagacagaggtcagtatctgtgttgtacctttggaagttccaatacagcagctgagaaatcaagtacaagatgaagaacccgagtgtaagaaagttattgtttgttacaactgcagtgaagaagggcattactccaaaaactgtccccaaccaaggcaaaatcggcctccacattttcgccaatttacaggaagcaaccatgccaatcaccaagtagtcagtggagcaaatgcagtacctgttaagcctagtgctagtcagaagcaaccataa

SEQ ID NO: 15226 - DNA, 3051 bp, Oryza sativa
  Clone ID: TFbOSC415629j.C1.o16.fg
atggagccgcagctgacgccgggggcggtgcaggcgatagcggagcacccggacgggacggggacgatccagccggtgctgcaggtggtggacgtgcggcccgtcaccaccaagaacgcgccgcccacgcccaagcccgccgagcgcttccggatgatgctctccgacggcgtcaacacgcagcagtccatgctcgccaccgccctcaaccccctcgtcaaggacgccacgctccgccccggcaccgtcgtccagctcaccgacttcatgtgcaacaccatccagggtaaaagatctaattcgcacagtagtctttatgtcaacatgggggacagtgagaaggttctaaggaagatgcgcttttatctttgtcatgtttcatccaacgagattttatcactttggggttctattgttagcagttgtccaatgtcgacaaatattcaacctgcaaatatgtttcaacttgcaactaatttgctggctaggattattattgttgtgaaacttgatgttctgcaaaatgactgcattgtaattgggaaccctaaacactatgaaccaaagagtctaactaaggagcaagaccctaacttacaggccagtgtggctcaaaccaataatggaacctattctggtggcgcaagcatgctgggcccctccgttgcgccaagggcagagcaggctgctagcaacagttcatatggtggaccttataatagtgctcaaggaatgttgggttcttctattggcaggacagttgaacctggtcctgcaaatgtttctgctgttggctcttacggtgcaatatcagcacagaacacaacgaatgccaacatgatgcagcctacatctcagctgaacataatgaatgccaacacgatgcagcctacatctcagctgaacacaatgaatgccaacacgatgcagcctacatctcagctgtcctcgttgaaccctaatcaaaaccaaaggtttgcagctcctgcttcgggtggagtctttggccctcctggcaatgcttatgggcagccttcacgtccttcatatcagcagccacctccagtgtatatgaatagagggcctgcctctaggaatgactctgcaactcgtatcatcccaattaccgcgttgaatccataccagcctaagtggacaatcaaggcaagggtgacagcaaagtctgatatcaggcattggagcaatgccaggagttcaggaacagttttctcgtttgatcttcttgatgcacaaggtggagaaattcgtgcacaatgctggaaagaatcggctgataagttttttggccaaattgaggttggtagggtgtatttgatatctagaggatcactgaagcccgcccagaagaagtataacactttgaaccatgattatgaaataactctggatatcgggttatcaactgtcgaggtttgctctgatgatgataacagcatccccaggctgcagtacaatttccggcagatcagcgaactagagaatatggctaacgagaccattgttgatttacttggtgttgttacatcagttagcccttctgcaacaataatgaggaagatcggcactgaaacccggaaaaggtctattcaactgaaggacttgtctggccggagcattgaagtaacattatggggaaacttctgtgatgctgagggtcagcagttgcagttgcagtgtgattctggttcgaaccctataattgcttttaaaggtgcccgtgtgggtgattttaatggcaaatcagtgagcacaattggttcaacccagttaattataaatccagactttcctgaggtggaaaggctgaggcagtggtacatgacagaaggaaaaactgctccttgcatttctttatctcgagaaatgcttaatatgggccggactgatgcccgcaaaacaattgcacagatcaaggatgaaaatttgggacgattagagaagccagactggatcactgttaaggctgcaatctcccatgtgactactgagagtttttgttatccagcttgcccaaagctcttgcccgtcgggaggcagtgtaataaaaaggcaataaataatggtgatgggatgtggcattgtgaccgatgtgatgagagttttcaaaatcctgaatataggtacatgcttaggttccagatccaagaccacactggtagtacctatgctagtgcgttcgatgaggcaggtgagcagatttttggtcgcaaggcaggagaacttttctcgataagaaatgtcgaccaagatgatgcacaatttgcagagatcatagaaggggtccggtggcatctatatctattcaaactgaaggtcaaggaagaaacctacaatgatgagcaaagcttgaaatgcaccgctgtcaaggttgaaaaactggacccatcaaaagagagcaacgtcctacttggagcgattgacaaccttttactggacccaaaggggcaaagtgatcttgcccctaatgctggtttcaccgatccggtaggcggtcacggtgcgcctacatctagcaatgcctatgccatgaatactggtggcgtgaatcagtttgggcagcaagcgagtataagcgccgggatgtctactccactagcagcaacacgaaacttgcagacatgcagcatttgtggagcaaatgggcacagcgcccagatctgccatgtgggtgcagatatggatatgcaggaaacatcagccggtggaagctccatgggtaactacaactccatcgctggcaacggcagctcggagtgttacaaatgtaaacagcccgggcactatgctagagactgtccagggcagtccactggtggcttggagtgtttcaaatgtaaacagcctgggcacttttctagagactgtccagtgcagtctactggtggctcggagtgtttcaaatgtaaacagcctgggcacttcgctagagattgtccagggcagtctactggcgcccagcaccagacatatgggaataatgttgcagcatcaaggggttacaataggcaatcctttgttggtggctactga

SEQ ID NO: 15227 - DNA, 5271 bp, Oryza sativa
  Clone ID: TFbOSC900135j.C1.o1.fg
atgtcggacttagggggaaagaacggggaaaatggaaatgaagatggagcgagcagcaagggaactccatcacccaagggagctactataccttttgattacagcaaacttaccattcccccacacaacttcgtctctgtgccttccgggcgtgctcctcaatttgatgggacacattacgccgcttggaagcacaagatgaagttgcatctaatctctttgcatccaagtatttggaaagttgtttgtacaagtgttgatgtaccccatgatgacatggagctcacttcggagcaagaacaactcatccaccgcaatgctcaagcttctaatgcaattctctctgccttgagtccagaggagttcaacaaggttgatggacttgaggaggccaaggagatatgggatactttgcaattggctcatgagggatcacccgccgttcgtgaggccaagattgaattattggaaggaaggcttggaagatttgtgatggatgacaaggagacaccacaagagatgtatgataggatgatgatccttgtcaacaagattaaaggacttgggagtgaggacatgacaaatcactttgtggtcaagagacttctctgtgcatttggtccaagaaatcccactcttgtatcaatgatacgggaaaggaaagacttcaagagactcaccccaagtgacattcttggaagaattgtgtctcatgagatgcaagaagaggaagctcgtgaagtgaggcaaatggtgaagaatgccgccatgatcaaaaatcaagaagttgctttgaaggcaaaacaagaagaagagtcaagttgtgaagaaagtgaagatgaagagatggcttttattgtcaagagattcaagcactttcttcgcaagagtggctatggcaaagggaggaaggatgatgataagggaaagaggcaatcaaagagagcttgcttcaattgtggcgaatatggccacttcattgccaattgtcccaagtcaaatgaagctaaggctaagggaggcaagaagaagccggagcgtgctcatgtggcggaggcacacatggcggaggtgtggtactccggagatgaagaagatcctgaggtcaagcccaagcccgagccaaaagacaaggttgaaggagaaggtggtgttgctaccgtcgccttcaagtcatcctcttcaagcaaggagcgtctcttcaacaacttgagtgatgacgacgacgactcctaccactactcatgcttcatggcccaaggccgcaaggtgatgactcaaaagccctctcacacttctcttgatgttgattctagtgatgaggaaagtgataatgaattagatgatgtgcttaagagctttagcaaacccgctatgcaacatttggctaagttaatgagagctttggatagtaaagaacaatcactcgaaaggcaagaagaattgcttattcttgagaagaaaagaaaccttaccttagaggagagcctagctaaagaatgtgctaaaaatgaacaattagctaatgagcttaatttggcaaatggttctctagctagccttacggatgtcaatgaaactcttcaagataaatttgctaatttagacaaaagtcataaatatcttgaagttcaatttgacattctttggaatagcacttataaaccaaatgtggtttctaattcttccaacccatctactagcaatggttgtgctaggtgttacaatgttgatttgaactcttatgctactaatgttgatgctatgcaagctcttaagaaagagaatgagaggttgggcacattggtgaaatatggatgcatgaagacataccattcaaaagatgccctttacaagaccatcaccgctcatcctaacaaggatggacacgggctcgggctttctggtggaagtcctgtgtctaagcgtgtgatggtaaatgggaaagaatgcttgatgtttgtgagagaaggtaaagctccacaagcaagtgaggtgacttgccccttcactagtcagacacctgaaagttccaggaaaaatgaccggaagttcctgccctgtaagacaggaagttccagacattttgtcaggaagttccgggcttctgataagccgaaggggctgaccggaagttccgggtataatgccaggaagttccagccagagggtctttactatgattcatatgtaatttctaaaaattcagaaggcaaagtggttgcttattttaatgggaattacaatgatgagtaccgcacttgtgtgtgggtgccaaaggctttggcatactcctccggtggctcaagatgggttgtggacagtggttgcaccaatcatatgacgggagagaggagtatgtttacaagtcttgatgaggagggtggaagtcgtgcaaatattgtctttggagatgatggtaaaggaaaggtaatgggtctcggggaatacattcttggtctatctaatgtttcttttgagaaagatcgtgtgtgtagtgcttgccaagccgggaagcaagttgggagtccacatcctataaaaaacatcatgactacaacaagaccactcgagcttcttcatatggatttatttgggcccgtggcctacgtaagcattggaggtaataagtatggttttgttattgttgatgatttttcacgcttcacttgggtgtactttctccatgacaaaagcaaagctcaagatgtcttcaagcgcttcgtaaagaaggcccaaaacctctatgttctcactatcaagagggtgcgaaccgacaatggaggagaattcaagaacactcaagtggaggaatttcttgatgaagaaggaatcaagcacgagttctccgccccctatgatcctccccaaaacggcattgttgagaggaagaaccgaacccttattgaagccgcaagggcaatgcttgatgagtacaagatttcggatgtcttttgggtggaggccgtgagtaccgcatgtcatgccatcaaccgcttgtacctccacaaaatcctaaagaaaacttcatatgagctcttgagtggtaagaagcctaatgtttcatattttcatgtctttgggagcaaatgttttattttaagtaagaggcctcgctcatctaagttctcacctaaggtggatgagggattcttacttggctatgaatcaaatgcacatgcctatcgtgtcttcaacaaaacctccggtattgttgaagtcactagggatgtgacatttgatgaatctaatggctcccaaggagagcaagttgttgtacatgttgtaggtgatgtggatccaagtcaagctataggtactaaggctattggagacatacgaccagtcgagacgcaggatgaccaagaagatagggatcaacctccgtcattgacatccaatagccttacaagtgctgtgtctgctgagccggaagttctgggtcctattgaccagaacctccggacatctccaggcccagaagttccgggttctacaatccggaacctccggaccagtggcagtgaagacgtgccaacggcacaagtggatgggatcaatgctgcgggcactttagagcatactgatcaggctcaggtccccccaatgcaccatccaaggatacatgacagtgtccaaagagatcatcccgtcgacaacatacttggtgacataagaaaagaggtaactactcgctctcgtgtcgcaagtttttgtcaacacttctcgtttgtctcttctttggaaccaaccagggtggaagatgcgcttggtgatccggattgggtgatggccatacaagaggagttaaataacttcactcgcaaccaagtatggactttggtggagagacccaagcaaaatgtcatcggtaccaactggatctttcgcaacaagcaagataaacatggtgtggttgtaaggaacaaagcccggttagtttcgcaagggttcacccaagtcgagggtctcgattttggtgaaactttcgcacttgtcgctcgccttgagtcaattagaattcttttagcctatgccgctcaccatgatttcaggttattccaaatggatgtcaagagtgcctttctcaatggacctatcttggagttggtctatgtggagcaaccactggggttcgaggatccaaagttgccaaaccatgtgtacaagctccacaaggcgctctacgggctcaagcaagcccctagagtttggtatgaatgtctccgagattttcttttgaagaatggttttgaaattggaaaggcggatactactctcttcactaaaaaatttaagagtgatttattcatatgccaaatttatgtcgatgacataatatttggttctactaatgcctctttttgtgaagaatttagtagtatcatgactaaaaggtttgagatgtctatgatgggcgagttgaccttcttcctcgggctacaagtgaagcaagcacaagagggcaccttcatctctcaaaccaagtacgtgaaagacatactcaagaagtttgggatggaggatgccaaacctatcaagacgcccatgcctactaatggccacctagacctcgacgataatggtaaatgtgtggaccaaaaggtatatcgctccatggtaggatctttactttatttatgtgcatctcgtcccgacatcatgcttagtgtttgtatgtgtgcccgttttcaagcggagcctaaagagtgccatttgattgccgtcaagagaattctaaaatatttagttcaaactcctaatcttggcttgtggtatcctaagggttgtgagcttttgggctattctgattcggattatgccgggtgtaaggttgatagaaaaagcacagccgggacttgtcaatttcttgggcggtcccttgtttcttggtcctccaagaagcaaaattccattgctttatccaccgccgaagccaaatatgtcgccgccggttcttgttgtgcccaactcctttggatgaaacaaaccctaaaagactttggctacaacttcaccaagatcccactcctatgtgacaatgagagtgccatcaaaatagccaacaatcccatccaacactcaagaaccaagcacatagatattcgccatcactttttgagagatcatgagactaaaggagacacatgccttacccatgtgagaaccaaaacccaattagccaacattttcaccaagcctttagatgagaaaagattttgtgagctttggagtgagctcaatatcttagactctcgtaacattaggtga

SEQ ID NO: 15228 - DNA, 3963 bp, Oryza sativa
  Clone ID: TFbOSC400798j.C1.o18.fg
atggctggttttgccgatgcactgaggccggataaattcaccggtgtgcattttaagagatggcagatcagggtcactctgtggctgacagctatgaaatgcttctgggtgagtactggcaaacctgaaggagttcttactgctgaacagcagaagcaattcgaggaagccactactctctttgtgggatgcattcttagcgttcttggcgatcgtctggtcgaggtgtatatgcatatgaccgacgctaaggagttgtgggatgcactgaatactaaattcggtgctactgatgctagcaatgatctgtatatcatggagcagtttcatgactacaagatggctgacaaccgttctgtagtcgaacaggctcatgagatacaaaccatggctaaggaactcgaactccttaagtgtgtcttacccgacaaatttgtggctgggtgcattattgcgaaactacctccatcttggagaagtttcggtactgcactcaaacacaagagacaggaatactccgttgaggggttgatagcgtctcttgatgttgaggagaaagctcgggaaaaagatgccgcgtctaagggcgatggtgggcagtccagcgccaatgttgtgcacaaggcccagaacaagagcaaggggaaatacaaagctcagcagaccaccaacttcaagaagcagaagaagaacaacaacaatcctaatcaggatgagaggacttgctttgtgtgtggccaaattggtcatctggctaggaagtgtccacagcgcaaggggatgaaggcacctgcagggcagacttctaagtctgctaatgtgaccattggcaacactggagatggaagcgggtatggtaatttacctactgttttttcagttaatcaatctactaattggtgggttgatactggggccaatgtacatgtttgtgctgacatctcattgttttcttcttatcaggtcgcacggggttccaccgtcctaatgggaaatgggtcacatgcttctgttcatggtgttggcacggtagatctgaagtttacttcgggaaagatcgtgcagctgaagaacgtgcagcatgtcccttctatcgacaggaatcttgttagtggctcccgtctgactagagacggatttaagttggtttttgagtctaataaagtagtcgtgtctaaacatggatattttattggtaaaggttatgagtgcggaggcctgttccgcttttccctttctgatttctgcaataagtctgtgaaccatatttgtggcagtgtggatgatgaggctaatgtttggcattcacgtttatgtcatattaattttggcttgatgtctcggctttccagcatgtgtttaattcctaagttttccattgtcaaaggttctaagtgccatagttgtgtgcaatcgaagcaacctcgcaagcctcacaaggctgccgaggagagaaacttggcaccactagaactcctacattcagatctttgtgaaatgaatggggtgttgacgaagggtggaaaacgatatttcatgacattcattgatgatgctactagattttgctatgtgtacttgttgaaaacgaaagacgaggctctagactattttaaaatttataaggcagaagttgaaaatcaacttgacagaaagataaaaaggcttaggtctgatcgtggtggagagtttttctcgaacgagtttgacttattctgtgaggaacatggcatcatacatgagaggacgcctccctattctcccgagtctaatgggattgctgaaaggaagaaccgcacactgactgacttggtgaatgccatgttggacaccgcgggactgcctaaggcatggtggggggaggcattgttgacctcaaatcatgtgttaaacagagttcctaacagaaataaggacaaaacaccatatgagatatggattggtagaaaaccatcactttcttatttgcgcatatgggggtgcttggcgaaagtcaatgtaccaataacgaagaaacgcaaacttggacctaagactgtggactgtgtctttctgggatatgctcatcatagcattgcctatagatttttaatagttaaatccgaggtactggacatgcatgttggtacaattatagagtctcgtgatgctaccttctttgagagctttttcccaatgaaggatacacatagtggttcgaaccaaccctctgaaataattcccagttcaatcacaccaccagaacaaactgaacatacacatgaacttgtctctgaggaggatgtcagtgaagctcctcgaaggagtaagagacaaaggacggctaagtcttttggtgatgatttcactgtgtacctcgtggatgacactcctaagtcaatttcagaagcatatgcatctcctgatgcagactactggaaggaggctgtccgtagtgaaatggattccattatcgctaacgggacttgggaggtgacagagcgaccctatgggtgtaaacctgtggggtgcaagtgggtgttcaagaagaagcttaggcctgacggtactattgaaaagtacaaggctcggcttgttgctaagggctatactcagaaagaaggcgaagatttctttgacacttactcacctgttgctagattgaccacaattcgtgtgctactttccctagcagcctcacatggtcttctcgttcatcaaatggacgttaagacagcttttcttaatggagagctggatgaggagatctatatggatcaacctgatgggtttgtagttgaaggtcaagaaggcaaagtgtgcaaattgttgaagtctttgtatggtctgaaacaagctcctaagcaatggcatgagaaatttgacaaaacattgatatctgcaggctttgcagttaatgaggcagataaatgtgtgtactatcgccatggtgggggtgagggagttattttgtgcttgtatgttgacgacatactgatatttggaacaaaccttgaggtgataaatgaggttaaatcattcttgtctaaaaattttgatatgaaggatttgggagtagctgatgttatcttaaacattaagctaattagaggtgagaatgagattacactcttgcagtcccattatgtggaaaagatcttgaatcgctttggctacattgatagtaagccttctccaacaccttatgatcctagcttgttgcttcgcaagaacaagagaattgctaggaatcaactggaatactcccaaatcattggctcgttgatgtacctggctagtgcaactaggcctgatatctcctttgctgtgagcaagttgagccgatttacctctaatccgggagatgatcactggcgtgcgcttgagcgagtaatgcgctatctgaaaggtactgtggaattggggcttcactatactgggtatcctgcggtactggagggttatagtgattctaactggatctctgatgtggatgagatcaaagccactagtggatatgttttcacactgggtggtggtgctgtttcatggaggtcttgcaaacagaccattttgacgaggtcaaccatggaagcagagctaacggcactggatactgctacagttgaggcagaatggctgcgtgatctattaatggatctgcctgttgttgaaaaaccggtgccggctatccttatgaactgtgacaatcaaacgacatgtgaaaagacgattgaagtctgtcaggaaattaagaaactccggagttataacgttggattacatccaaacagcgagaaacctggcagatcccttcacgaagggactatcacgaaatgtgatagacaatgcatcgaaggagatgggtttgagacccatagcattcttgaaagaactcacctttgtgagcttgactgttggtcgcagtctatgaagattttgggtgaatcttctaggaagcttactaaagacctaggagtatga

SEQ ID NO: 15229 - DNA, 890 bp, Oryza sativa
  Clone ID: TFbOSC27732j.C1.o1.np
gtcgtgtgtttccttgcttgtataacagcaaaagacttagatctgttaaggtcctatccttagtttctaatctgtctctcccctttgttttccctctctccctctccaaacctttgcaaagatggctgacaatgagaaaggcaataaggtcagaagtcaggacattggtacctcaagctcccgagtgaatgaagcaccagacaccagttgtgcggcagtggtccaacacctgattaaccagaacaaattgcttatagagatactacagcagcatcggatgccgattttgaacccgagtcagatgcaaccctcaagtgcagttggaggcagtccaagcattcacaccacaagtcagcgcaccgccaacatcccagaaggcccctcatgccataccacatgttgacccaaaagaagcaagtatcatctgttttatgtgtgatgagcaagggcactatgcaaggaactgtcctcagcagaaaagaaaagcaccaatgcgaaccgaagatgaagtccgtaagatgatcattaccagcacagaatggcctacaccaggaatgacaagacgtcagagaagaaataccttccgaggtgcaccacagttgacagagcatcttttagctaatggaggtagagtgtctgatagtgaagattcagatcaagtctcctcagatgatgaaggtgcgaagtctccccaaggttttaaccagaataaaatagaacttaaggcatgctctcgttgtggagaaatcggtcatgttgccagctcgtgtgcctctgcatgcgttcatggtgaggaaggccatccacccgacaggtgtccaacgagcaggatcacttgtttcttttgtgaaggaactgatcacgtaccaaaagattgtcaattcagtttt

SEQ ID NO: 15230 - DNA, 1336 bp, Oryza sativa
  Clone ID: TFbOSC474j.C1.o1.fg
tgtgcatggcgacaaggctcccgttgacggcaaaggagaggcagcgactctggcgaaacgcgccgacgtatcaggtggccaagaatgcggcgtggtccgcgtggaggatgtacagcgggtggagacgccagctgcagagatcacgaatgccatgaaggacacgaagatcgtgaagaataaggaccaggagagaggaggcagcgagagggaagaagaggagaccgtcgccatggccggcacggggagcagggaggaagcattgctgaatcccaggaaccaagcgcttcgtccccaatcccaagggcgcccggggtttgaggcggagcggggaggaggaggtcctccgaagatcaagtgcttcaagtgtggccgcgaaggccatcaccaggcaacatgccctaaccctcctctctgttactcttgtcacaacactgggcacatctctgctcattgtcctatgaatctgatgaagagaggtgttaaactctgtggatttggaatcccagggcatggtttctatagccttcaagttgagatatctgatgcagaggttgctagagctcctgtgagaggtattctaacagtaatccttggtgagggttcagtggtaaaaatagttactgaattgaaacatttgtttgtgggactaaactgggaatggaaagtgaagcaactaaatgacaaagagtttttaatcaatttcccttttgatgaggttagaagcaaaatctcaacatgcaagtgttttgactttgagacctctttgattaaggcaagtgtggtagagactggaatgactgaggaagccgtggatgaattggttgctgtgtgggtgaaaatatttgggattccaaaaattgctaaaacagtcaattggttgcttcactcaattgctgccattgttgaactggtgggggagtttgaaactatggatggagctagcttaaggagagatggtcctgtgagagtcagggtggcgtgcaaggatcctagggagttacatttctcagttcatgtttacatcaacaaggtgggttacatgactaagtgggaaccagagggctacccaccatatgaaaacagacagatgccccctgatgatgatggtggtgatgataaagatgataaaaatgatgaagagttgcaagaagacatgaaccttgatgatgaatttaagaatcaaaatagccctagagggagacaactcagagatgctgacagtaatcaggggaataggtttggggcctattctgcccccctgcatacaaagggaaatcacatgggacacaggggtgtagtatcaagaagctggtatctaagaaaagttccctactga

SEQ ID NO: 15231 - DNA, 1869 bp, Oryza sativa
  Clone ID: TFbOSC411214j.C1.o1.fg
atgtcatggcagagggttggtgccctgctgctaggggctcagtcctgcctgcctgtcccggaggttccggccgtaggtgggattgggtcggtactcttgtttatggctaggatgggttgggaactatgtcacgtcttccgtccgtataccgtggtgaataagcctaacatacatcataacagcaaaagacttagatctgttaaggtcctatccttagtttctaatctgtctctcccctttgctttccctctctccctctccaaacctttgcaacagatggctgacaatgagaaagacaataaggtcagaagtcaggacattggtacctcaagcccccgagtgaatgaagcaccagacaccagttgtgtgacactggttcaacacctgattaaccagaatcgattgcttatagagatactacagcagcatcagacgccaattctgaacctgagtcaaatacaacctcaagtgcagttggaggcagtccaagcactcacaccacaagtcagcatgccgccagcatcccgaaggacccatggtgacgtgccacatgttgactcaaaagaagcaagtatcatttgttttaggtgtgatgagcaagggcactatgcaagggagtgtcctcagcagaaaagaaaaacacccatgcgaaccgaagatgaagtccgtaagatgatcattaccagcacagaatggcctccactaggaatgacaaaacgtcaaagaagaaataccttccgaggtgcaccacagttgacagagcatcttttagctaatggaggtagagtgtctgatagtgaagattcagatcaagtctcctcagatgatgaagatgaaatggaacgtaaggcatgctctcgttgtggagaaatcggtcatgttgccagctcgtgtgccactacatgcgttcattgtgaggaagaccatccacccgacaggtgtccaacgagcaggatcacttgtttcttttgtgaaggaactgatcatgtaccaaaagattgtcaattcagttttctgctgacgaagaagatggccaaccaacccgccagttccaatggagagaagcatcaaggcaacacaaatcctcgccaagattacagtttcagcctaactccagtgccaggacagaggaatcaaaatgagaaaagaaaatgccgagtccgggaagatatctgttgcttcaattgtcaaggaatgggtcatttcgccgacaagtgcccaaaaccgagaaacatagctgccggcacgtcagtccacgcaactccctgcaatcagaagcttgctcctcagcgaattgtcatccatgtatcccgaagcagtcctatagcccgcgttgcaacagctccaactccagcgagtgcattaccacaaggtgtcaatgctcaatttcagccccagccatcagttgacaagacagaggccagtatcggcattgtacctttggatgctccagcacagcagccaaggaatcaagtacaagatgaagaacctgagcgtgagaaagttattgtctgttacaacgcactaacccttctctgcaccgacggcctcagcaaagaattgtcgtcgatggaagaagttgtgtctctccccgacctactccaggccaagcgaagggcaatcaacctccggagggcgataccaagcagaagaccgttattcgcctcaaacagcactcagaaggaagcttctccggtgaataatagcaatatgcagtcctatcacatcatcacagaaccaatcaaggatgatgcagtcactagaacaatgcccgctatatctctccagaatcaaaatgagcagccacgcttgtggttttcagttcgctacctatcattgtgcagtcgaaagtttgcagcaatcatgtaa

SEQ ID NO: 15232 - DNA, 2583 bp, Oryza sativa
  Clone ID: TFbOSC400055j.C1.o6.gm
atggctgacaatgagaaaggcaataaggtcagaagtcaggacattggtacctcaagctcccgagtgaatgaagcaccagacaccagttgtgtgacactggtccaacacctgattaaccagaaccgattgcttatagagatactacagcagcatcagacgccaattctgaacctgagtcagatacaacctcaagtgcagttggaggcagtccaagcactcacaccacaagtcagcatgccgccagcatcccgaaggacccatggtgacgtgccacatgttgactcaaaagaagcaagtatcatttgttttatgtgtgatgagcaagggcactatgcaagggagtgtcctcagcagaaaagaaaaacaccaatgcgaaccgaagatgaagtccgtaagatgatcattaccagcacagaatggcctccaccaggaatgacaaaacgtcagagaagaaataccttccgaggtgcaccacagttgacagagcatcttttagctaatggaggtagagtgtctgatagtgaagattcagatcaagtctcctcagatgatgaagatgagaagtctccccaaggtttcaaccagaataaaatggaacataaggcatgctctcgttgtggagaaatcggaactgatcatgtaccaaaagattgtcaattcagttttctgctgacgaagaagatggccaaccaacccgccagttccaacggagagaagcatcaaggcaacacaaatcctcgccaagattacagtttcagcctaactccagtgccaggacagaggaatcaaaatgagaaaagaaaatgccgagtccgggaagatatctgttgcttcaattgtcaaggaatgggtcatttcgccgacaagtgcccaaaaccgagaaacatagctgccagcacgtcagtccacgcaactccctgcaatcagaagcttgctcctcagcgaattgtcatccatgcatcccgaagcagtcctatagcccgcgttgcaatagctcaaactccagcgagtgcattaccacaaggtgtcaatgctcaatttcagccccagccaccagttgacaagatagaggccaatatcggcattgtacctttggatgttccagcacagcagccaagaaatcaaaattggaaccacccagcaggggcaaccaacgttcaagtacctacagtccagcaacagtgcaagttatcagaatttctcaaaactgagcctccaacctttgccattgccgtcgatcctatggaagccagtgattggttgcgcatagtcgagaagaagctggggttgattcagtgcacagaccaggagcgggttgtcttcgcaactcatcagttggttgcactggcttcagaatggtgggatagctacgaagcatcacggccagaaggacataccatcacctgggacgagttttcatctgtattcaagagatcacatgttcccgcaggaatgatcacactgagaaaacgagagttccgctacctgaagcaagaagatttgaccgtcacagagtacctgcacgagttccatcgtttggctcactatgcaccagaagatgtggaaaatgatgaagaccaacaagagaagtttctccaggggttaaaagatgagatcgcagtgcaactactcctagaggaatatgaagattttgagaaacttgtggacaaagccatacaactcgaaagtgagcataatcggatgaagaactgtaagagaaggattgtcagcatcccagtatttccatgtggtaaccaaagacagcgcactgagccacttcagatcaccggatcttctattgcgcatcaagagtttccgccccaagaagatggacccaatgcagacaacaacattagcaatactaatgatgatgatgataccaccaacaaccatgcttcttgccccattagtgaccactcgaatcgagcgtgcaatgtcaacatcattcaccaagatgtcgacgatagtatcaatgatggcacccaaaatgacaaccctagcagttgtgactctgagaaagactccgatggtgatagcaactatggtaccactgatgccaatgttagcaaggatttccagccaccaattccaactccaagtcagaatgatcgtccccagacggatagctcagcaaagaagacgttgatttgctacaattgcaaagaactagggcattactcgagggactgcctgcaaccaaggcaaagtcgacctccacattaccgccaatttacacgaagcagacatcccaatcgtattgtggtcactggagcaaacgccgtacccgtgaggcctcgtgcaacaaccgtcagtctagcttttgatgaaccacttgaaggttctctgaaaggcagcaggctcaagtaccacattgtcaccagaagcatccacaactcttggagtgaagagtacttggttgacaaagttcaaaaggtgattgatagaagataccagcaaagcgaccatcggggcgcgggcgcgccgcctcccatcggctgtgccggcgtggccgccttcgggcgcgccctgcggctgccatgtggggcccggccgtcagccgcccgcgccctcgggtgcggctga

SEQ ID NO: 15233 - DNA, 4806 bp, Oryza sativa
  Clone ID: TFbOSC100891j.C1.o11.fg
atgtccgacgctcggtctcggcgttcggtcgcctcgagcactcggcgtcagcaggacgccgagctcgccgcagcagaagagcgcaggcgagcaacggctcagaccgctgcagcagcagcgagggcggccagactggcggcagcggagttggcagcagccagggcggaggcggaggcggaggcggcggaagatgcggcacgtgcggcggaggtagaggttgagaccttgcgcagcagcatcaacggctccatcgccggcgacatcaccgctgacagggagcttgaggagctggcaagaggaagggcacgggagcgagcagagcggtgggcagcagcccacctccacggcggcggcggcggcccaagggatcgtgcgcccgccgacgggaacccagacgggcgcgggcgtgccggcggcagcccggagcccgcacgcggccctcgcaggcggcacggctccctctcccctgaccggcgccatggtcaccacggcgtccagacggtggtcagggattttggtcccggcggtgggtggcctaccctcaccaaaaccaactacatcgagtgggccgcggtgatgagggtgaggctccaggtgcggcacatgtgggaggcagtccggtacggtgacgtcgactacgacgaggatcggcgggcactggatgccctcatcgctgcagttccgcccgagatgcagttctcgctttcccagaagcggactgccaaggaggcctgggacgccatcgctgcggcacgcatcggcagcgaccgcgcccgcaagtccacactgcaggcactccgcaaggagtgggagaacctggccttcaagccaggtgaggatgttgatgactttgctctccgtctcaacactctcttgcagaaaatggtgcagtacggcgacgacacctacgacgaggagagagctgtcgagaagctcttccgctgcgtccctgagaagtacaggcagatcgctcgctcgattgaatctctgctggacctctccacgatgtcgatcgaggaggcgttaggtcgcctcaaggtcgtcgatggtgatgagccacggcctctctcggggcccatcaccatcggcgggaagctccatctcactcgggagcagtgggaggcctctcagggtgacaggaggaagggggagtcatcttccccgacaggcggccataagccgcgcaaggcgcggggaggtgtccagctacggtgggcgcgaagacgtgccgagggtggcgcccgcagaggcgcccagggcgttgccaccggcaaccacaagccggcacgagacgacacctgccgcaactgtggcaagcttggccattgggccaaagactgtcgacagccacgacgcggccaggcccacgtcgcacgggtggaggaggaagagccggctctgctcctagctcacgcaagcatcgagctacctccagcggcaccggccgcagcggctttcctccaccttgatgagccgaaggtactcgtctccctctgtgacggctccagcaacgacaaggctgatgggtggtacctcgacaccggcgccacccatcacatgaccggccgacgggagttcttcaccgagttcgactccagcgtccgaggcaccgtcaagttcggggacgcctccggcgtggagatcaagggtgttggctccgtcaccttcaccgccaagtccggtgagcacaggctgctcaccggagtctactacatccccgcgttgaggaattctatcatcagcgtgggacagctggatgagaacggctcacgcgtgttggtcgaggacggactcatgaggatttgggatcgccgtcgtcgccttcttgccaaggtaaccagaggcactaatcgactctacatcctcagcgcgcaggtcgcacatccagtttgcctcgccgctcgtcgggacgacgaggcgtggcagtggcacgagcgcttcgggcacctccacttcgaggccctgaagcagctcagtgccaaggagatggtgcgaggcatgccgtgccttgaccacgtggagcagctctgcgacgtctgcgtggtgacaaagcagcggcggctcccctttccccagcagacgagcttccgagccaaggagcggctcgggctcgtgcacggggacttgtgtggcccagtgacaccggccacaccaggaggacgacgttatttcctgctgctcgtcgacgacctctcccgctacatgtgggtgatggtcctcggcagcaagggagaggctgcggacgccatcaggcatgcgcaggctgctgcagaggcggagtgcggccgcaagctgcgcgtgctgcgcaccgacaacggcggcgaattcacggcagctgaattcgcgtcgtactgcgctgatgagggcattcagcgccactacaccgcgccgtacagcccacagcagaacggcgtcgtcgagcggcgcaaccagacggttgtggggatggctcgggccctcctcaagcagagggggatgccggccatcttctggggggaggcggtggtgacggccgcctacatcctcaaccgctcgcctaccaaggccctcgatggcaggacaccgtacgaggcttggcatgggcgcaagccggcggtctcccacctgcgggtcttcggctgcctcgcgttcgccaaggagcttggccacatcggcaagctcgacgacaggagcaccccaggggtgttcatcggctacgcggagggctcgaaggcctaccgcatcctcgacccggagacacagcgtgtgcgcattacgcgcgatgttgtgttcgacgaagggcgagggtgggtatgggacaaggcggtggatgatggttcgactccgacgtacgacgacttcaccatcgagtacgtccacttcgagggagctgggggagtaggcagctcttcttcaccgagcgtgtctaccccagtccccgagcctccaccgactccaacaccaacacaccctcgggccacgacttcgactacgacgagctcttcgtcgacaccaccccagccggtgtccccacacgctccagcaccaacagccactcctccgggcacgtctactccgacgccagctcgtgttgagcgcagcccggtggagttcgttactccgctctcccacgacggggagcgcatcgacgcgtaccatgacggcgagcagctacggtaccgtacgatggaggatcttctcggcgaccagccggtgccgggactggtgcctcgcaacctggaggcgcagttgcaccttgcgtgcgacgacggtgagcctcggtcttttgcagaggccgagaaacacgcggcatggcgtgccgcgatgcagtcggagatggacgcggttcaggagaaccgcacctgggagcttgctgacctccctcgtggtcaccgcgcgatcacccttaagtgggtgttcaagctgaagagggatgaagccggagccatcgtcaagcacaaggctcgcttggtggcacgcggtttcgtgcagcaggaggggatcgactacgacgatgccttcgctcccgtggcacggatggagtccgtgcgactccttcttgcgctggctgctcaggaaggctggggcgtccatcacatggacgtcaagtcggcgtttctaaacggcgacttgaaggaggaggtctacgtgcaccagccgccgggatttgtgatccccggcaaggagggcaaggtgctacgcctgcacaaggccctctacggcttgcggcaggcaccgagggcgtggaatgccaagttggattccacgctcaaggggatgggcttcgagcaaagcccgcacgaggcggccatctaccggcggggcaatggaggaaatgccttgctggtgggtgtctacgtcgacgacttagtgatcaccggcaccaaggatgcagaggtcgcggcgttcaaggaggagatgaaggccaccttccagatgagtgatctggggcctctctccttctacctggggatcgaagtgcaccaggacaactccgggatcacgcttcgacagaccgcctacgccaagcgcgtcgttgagctggctgggctcaccgattgcaacccagctctcactccgatggaggagagactgaagctgagccgcgacagcacagcggaggaggtggatgctacacagtaccgacgtcttgtggggagccttcgctacctcacccacacacggccggacttggccttctccgtcggctacgtcagtcggttcatgcagcgaccgacgacggagcaccagcaggctgtgaagaggatcatccgctacgttgcggggactctcgaccacggtctctactacccgaggtgtcctggcaaggcacacttcgtcgggtacagcgacagcgaccacgccggcgacatcgacaccagcaagagcacgagcgggattctctttttcctcgacgagtgcctcgttagctggcagtcaatcaagcagcaggtggtggccctgtccagctgcgaggccgagtacatggcagcatccgccgcttcgacccaggcgctctggcttgctcgactgcttagtgatctcctcggcagagatactggagcggtggagctcagggtggatagcaagtccgctctggccctggcaaaaaaccccgtttttcacgaacggagcaagcacatccgagtgaggtaccatttcatccgaagctacttggaggaagggagcatcaaggcgagctacatcaacaccaaggaccagcttgcggatttgctcaccaaaccccttgggaggatcaagttccttgagctttgctcccggatcgggatggctcaactctcccacaagacggcgcacaagacttag

SEQ ID NO: 15234 - DNA, 681 bp, Oryza sativa
  Clone ID: TFbOSC100891j.C1.o14.gm
atggcgccggtcaggggagagggagccgtgccgcctgcgagggccgcgtgcgggctccgggctgccgccggcacgcccgcgcccgtctgggttcccgtcggcgggcgcacgatcccttgggccgccgccgccgccgtggaggtgggctgctgcccaccgctctgctcgctcccgtgcccttcctcttgccagctcctcaagctccctgtcagcggtgatgtcgccggcgatggagccgttgatgctgctgcgcaaggtctcaacctctacctccgccgcacgtgccgcatcttccgccgcctccgcctccgcctccgccctggctgctgccaactccgctgccgccagtctggccgccctcgctgctgctgcagcggtctgagccgttgctcgcctgcgctcttctgctgcggcgagctcggcgtcctgctgacgccgagtgctcgaggcgaccgaacgccgagaccgagcgtcggacatggcgcacctccggggggctgctgtgtggagagggggaagggaaaggggaaggaggggcaaccggtgctgctgctgctgctgctggctgagagctcaaccgagcttgggaaggggtggaacaagagatgcatgaaggacgactttttgtcgaaagtgcagattccaaagaatggggttactacagcactaaggaagaggtga

SEQ ID NO: 15235 - DNA, 676 bp, Oryza sativa
  Clone ID: TFbOSC1462j.C1.o1.fg
ttccccgacaggcggccgtaagccgcgcaaggcgcggggaggtgtccagctacggtgggcgcgaagacgtgccgagggtggcgcccgcagaggcgcccagggcgttgccaccggcaaccacaagccggcacgagacgacacctgccgcaactgtggcaagcttggccattgggccaaagactgtcgacagccacgacgcggccaggcccacgtcgcacgggtggaggaggaagagccggctctgctcctagctcacgcaagcatcgagctacctccagcggcaccggccgcagcggctttcctccaccttgatgagccgaaggtactcgtctccctctgcgacggctccagcaacgacaaggctgatgggtggtacctcgacaccggcgccacccatcacatgaccggccgacgggagttcttcaccgagttcgactccagcgtccgaggcaccgtcaagttcggggacgcctccggcgtggagatcaagggtgttggctccgtcaccttcaccgccaagtccggtgagcacaggctgctcaccggagtctactacatccccgcgttgaggaattctatcatcagcgtgggacagctggatgagaacggctcacgcgtgttggtcgaggacggactcatgacgattcgggatcgccgtcgtcgccttcttgccaag

SEQ ID NO: 15236 - DNA, 713 bp, Oryza sativa
  Clone ID: TFbOSC1462j.C1.o1.gp
cgctgaggatgtagagtcgattagtgcctctggttaccttggcaagaaggcgacgacggcgatcccgaatcgtcatgagtccgtcctcgaccaacacgcgtgagccgttctcatccagctgtcccacgctgatgatagaattcctcaacgcggggatgtagtagactccggtgagcagcctgtgctcaccggacttggcggtgaaggtgacggagccaacacccttgatctccacgccggaggcgtccccgaacttgacggtgcctcggacgctggagtcgaactcggtgaagaactcccgtcggccggtcatgtgatgggtggcgccggtgtcgaggtaccacccatcagccttgtcgttgctggagccgtcgcagagggagacgagtaccttcggctcatcaaggtggaggaaagccgctgcggccggtgccgctggaggtagctcgatgcttgcgtgagctaggagcagagccggctcttcctcctccacccgtgcgacgtgggcctggccgcgtcgtggctgtcgacagtctttggcccaatggccaagcttgccacagttgcggcaggtgtcgtctcgtgccggcttgtggttgccggtggcaacgccctgggcgcctctgcgggcgccaccctcggcacgtcttcgcgcccaccgtagctggacacctccccgcgccttgcgcggcttacggccgcctgtcggggaa

SEQ ID NO: 15237 - DNA, 4761 bp, Oryza sativa
  Clone ID: TFbOSC19433j.C1.o2.fg
atgtccgacgctcggtctcagcgttcggtcgcctcgagcactcggcgtcagcaggacgccaagctcgccgcagcagaagagcgcaggcgagcaacggctcagaccgctgcagcagcagcgaaggcggccagactggcggcagcggagttggcagcagccagggcggaggcggaggcggaggcggcggaagatgcggcacgtgcggcggaggtagaggttgagaccttgcgcagcagcatcaacggctccatcgccggcgacatcaccgctgacagggagcttgaggagctggcaagaggaagggcacgggagcgagcagagcggtgggcagcagcccacctccacggcggcggcggcggcccaagggaccgcgcgcccgccgacgggaacccagacgggcgcgggcgtgccggcggcagcccggagcccgcacgcggccctcgcaggcggcacggctccctctcccctgaccggcgccatggtcaccacggcgtccagacggtggtcagggattttggtcccggcggtgggtggcctaccctcaccaaaaccaactacatcgagtgggccgcggtgatgagggtgaggctccaggtgcggcacatgtgggaggcagtccggtacggtgacgtcgactacgacgaggatcggcgggcactggatgccctcatcgctgcagttccgcccgagatgcagttctcgctttcccagaagcggactgccaaggaggcctgggacgccatcgctgcggcacgcatcggcagcgaccgcgcccgcaagtccacactgcaggcactccgcaaggagtgggagaacctggccttcaagccaggtgaggatgttgatgactttgctctccgtctcaacactctcttgcaaaaaatggtgcagtacggcgacgacacctacgacgaggagagagctgtcgagaagctcttccgctgcgtccctgagaagtacaggcagatcgctcgctcgattgaatctctgctggacctctccacgatgtcgatcgaggaggcgttaggtcgcctcaaggtcgtcgatggtgatgagccacggcctctctcggggcccatcaccatcggcgggaagctccatctcactcgggagcagtgggaggcctctcagggtgacgggaggaagggggagtcatcttccccgacaggcggccgtaagccgcgcaaggcgcggggaggtgtccagctacggtgggcgcgaagacgtgccgagggtggcgcccgcagaggcgcccagggcgttgccaccggcaaccacaagccggcacgagacgacacctgccgcaactgtggcaagcttggccattgggccaaagactgtcgacagccacgacgcggccaggcccacgtcgcacgggtggaggaggaagagccggctctgctcctagctcacgcaagcatcgagctacctccagcggcaccggccgcagcggctttcctccaccttgatgagccgaaggtactcgtctccctctgcgacggctccagcaacgacaaggctgatgggtggtacctcgacaccggcgccacccatcacatgaccggccgacgggagttcttcaccgagttcgactccagcgtccgaggcaccgtcaagttcggggacgcctccggcgtggagatcaagggtgttggctccgtcaccttcaccgccaagtccggtgagcacaggctgctcaccggagtctactacatccccgcgttgaggaattctatcatcagtgtgggacagctggatgagaacggctcacgcgtgttggtcgaggacggactcatgaggatttgggatcgccgtcgtcgccttcttgccaaggtaaccagaggcactaatcgactctacatcctcagcgcgcaagtcgcacatccagtttgcctcgccgctcgtcgggacgacgaggcgtggcagtggcacgagcgcttcgggcacctccactttgaggccctgaagcagctcagtgccaaggagatggtgcgaggcatgccgtgccttgaccacgtggagcagctctgcgacgtctgcgtggtgacaaagcagcggcggctcccctttccccagcagacgagcttccgagccaaggagcggctcgggctcgtgcacggggacttgtgtggcccagtgacaccggccacaccaggaggacgacgttatttcctgctgctcgtcgacgacctctcccgctacatgtgggtgatggtcctcggcagcaagggagaggctgcggacgccatcaggcatgcgcaggctgcagcagaggcggagtgcggccgcaagctgcgcgtgctgcgcaccgacaacggcggcgaattcacggcggctgaattcgcgtcgtactgcgctgatgagggcattcagcgccactacaccgcgccgtacagcccacagcagaacggcgtcgtcgagcggcgcaaccagacggttgtggggatggctcgggccctcctcaagcagagggggatgccggccatcttctggggggaggcggtggtgacggccgcctacatcctcaaccgctcgcctaccaaggccctcgatggcaggacaccgtacgaggcttggcatgggcgcaagccggcggtctcccacctgcgggtcttcggctgcctcgcgttcgccaaggagcttggccacatcggcaagctcgacgacaggagcaccccaggggtgttcatcggctacgcggagggctcgaaggcctaccgcatcctcgacccggagacacagcgtgtgcgcattacgcgcgatgttgtgttcgacgaagggcgagggtgggtatgggacaaggcggtggatgatggttcgactccgacgtacgacgacttcaccatcgagtacgtccacttcgagggagctgggggagtaggcagctcttcttcaccgagcgtgtctaccccagtccccgagcctccaccgactccaacaccaacacaccctcgggccacgacttcgactacgacgagctcttcgtcgacaccaccccagccggtgtccccacacgctccagcaccaacagccactcctccgggcacgtctactccgacgccagctcgtgttgagcgcagcccggtggagttcgttactccgctctcccacgacggggagcgcatcgacgcgtaccatgacggcgagcagctacggtaccgtacgatggaggatcttctcggcgaccagccggtgccgggactggtgcctcgcaacctggaggcgcagttgcaccttgcgtgcgacgacggtgagcctcggtcttttgcagaggccgagaaacacgcggcatggcgtgccgcgatgcagtcggagatggacgcggttcaggagaaccgcacctgggagcttgctgacctccctcgtggtcaccgcgcgatcacccttaagtgggtgttcaagctgaagagggatgaagccggagccatcgtcaagcacaaggctcgcttggtggcacgcggtttcgtgcagcaggaggggatcgactacgacgatgccttcgctcccgtggcacggatggagtccgtgcgactccttgcgctggctgctcaggaaggctggggcgtccatcacatggacgtcaagtcggcgtttctaaacggcgacttgaaggaggaggtctacgtgcaccagccgccgggatttgtgatccccggcaaggagggcaaggtgctacgcctgcacaaggccctctacggcttgcggcaggcaccgagggcgtggaatgccaagttggattccacgctcaaggggatgggcttcgagcaaagcccgcacgaggcggccatctaccggcggggcaatggaggaaatgccttgctggtgggtgtctacgtcgacgacttagtgatcaccggcaccaaggatgcagaggtcgcggcgttcaaggaggagatgaaggccaccttccagatgagtgatctggggcctctctccttctacctggggatcgaagtgcaccaggacaactccgggatcacgcttcgacagaccgcctacgccaagcgcgtcgttgagctggctgggctcaccgattgcaacccagctctcactccgatggaggagagactgaagctgagccgcgacagcacagcggaggaggtggatgctacacagtaccgacgtcttgtggggagccttcgctacctcacccacacacggccggacttggccttctccgtcggctacgctgtgaagaggatcatccgctacgttgcggggactctcgaccacggtctctactacccgaggtgtcctggcaaggcacacttcgtcgggtacagcgacagcgaccacgccggcgacatcgacaccagcaagagcacgagcgggattctcttcttcctcggcgagtgcctcgttagctggcagtcaatcaagcagcaggtggtggccctgtccagctgcgaggccgagtacatggcggcatccgccgcttcgacccaggcgctctggcttgctcgactgcttagtgatctcctcggcagagatactggagcggtggagctcagggtggatagcaagtccgctctggccctggcaaaaaaccccgtttttcacgaacggagcaagcacatccgagtgaggtatcatttcatccgaagctacttggaggaagggagcatcaaggcgagctacatcaacaccaaggaccagcttgcggatttgctcaccaaaccccttaggaggatcaagttccttgagctttgctcccggatcgggatggctcaactctcccacaagacagcgcacaagacttag

SEQ ID NO: 15238 - DNA, 792 bp, Oryza sativa
  unsure (1)..(792): unsure at all n locations
  Clone ID: TFbOSC20233j.C1.o1.fg
atgtcgatcgaggaggcgttaggtcgcctcaaggtcgtcgatggtgatgagccacggcctctctcggggcccatcaccatcggcgggaagctccatctcactcgggagcagtgggaggcctctcanggtgacgggaggaagggggagtcatcttccccgacaggcggccataagccgcgcaaggcgcggggaggtgtccagctacgaggcgcccagggcgttgccaccggcaaccacaagccggcacgagatgacacctgccgcaactgtggcaagcttggccattgggccaaagactgtcgacagccacgacgcggccaggcccacgtcgcacgggtggaggaggaagagccggctctgctcctagctcacgcaagcatcgagctacctccagcggcaccggccgcagcggctttcctccaccttgatgagccgaaggtactcgtctccctctgcgacggctccagcaacgacaaggctgatgggtggtacctcgacaccggcgccacccatcacatgaccggccgacgggagttcttcaccgagttcgactccagcgtccgaggcaccgtcaagttcggggacgcctccggcgtggagatcaagggtgttggctccgtcaccttcaccgccaagtccggtgagcacaggctgctcaccggagtctactacatccccgcgttgaggaattctatcatcagcgtgggacagctggatgagaacggctcacgcgtgttggtcgaggacggactcatgaggatttgggatcgccgtcgtcgccttcttgccaag

SEQ ID NO: 15239 - DNA, 971 bp, Oryza sativa
  unsure (1)..(971): unsure at all n locations
  Clone ID: TFbOSC20233j.C1.o1.gp
cctctggttaccttggcaagaaggcgacgacggcgatcccaaatcctcatgagtccgtcctcgaccaacacgcgtgagccgttctcatccagctgtcccacgctgatgatagaattcctcaacgcggggatgtagtagactccggtgagcagcctgtgctcaccggacttggcggtgaaggtgacggagccaacacccttgatctccacgccggaggcgtccccgaacttgacggtgcctcggacgctggagtcgaactcggtgaagaactcccgtcggccggtcatgtgatgggtggcgccggtgtcgaggtaccacccatcagccttgtcgttgctggagccgtcgcagagggagacgagtaccttcggctcatcaaggtggaggaaagccgctgcggccggtgccgctggaggtagctcgatgcttgcgtgagctaggagcagagccggctcttcctcctccacccgtgcgacgtgggcctggccgcgtcgtggctgtcgacagtctttggcccaatggccaagcttgccacagttgcggcaggtgtcatctcgtgccggcttgtggttgccggtggcaacgccctgggcgcctctgcgggcgccaccctcggcacgtcttcacgcccaccgtagctggacacctccccgcgccttgcgcggcttatggccgcctgtcggggaagatgactcccccttcctcccgtcaccntgagaggcctcccactgctcccgagtgagatggagcttcccgccgatggtgatgggccccgagagaggccgtggctcatcaccatcgacgaccttgaggcgacctaacgcctcctcgatcgacatcgtggagaggtccagcagagattcaatcgagcgagcgatctcctgtacttctcagggacgcagcggaagagcttctcgacagctctctcctcgtcgtaggtgtcgtcgccgtactgcaccattttctgcaag

SEQ ID NO: 15240 - DNA, 4806 bp, Oryza sativa
  Clone ID: TFbOSC28279j.C1.o1.fg
atgtccgacgctcggtctcagcgttcggtcgcctcgagcactcggcgtcagcaggacgccgagctcgccgcagcagaagagcgcaggcgagcaacggctcagaccgctgcagcagcagcgagggcggccagactggcggcagcggagttggcagcagccagggcggaggcggaggcggaggcggcggaagatgcggcacgtgcggcggaggtagaggttgagaccttgcgcagcagcatcaacggctccatcgccggcgacatcaccgctgacagggagcttgaggagctggcaagaggaagggcacgggagcgagcagagcggtgggcagcagcccacctccacggcggcggcggcggcccaagggaccgcgcgcccgccgacgggaacccagacgggcgcgggcgtgccggcggcagcccggagcccgcacgcggccctcgcaggcggcacggctccctctcccctgaccggcgccatggtcaccacggcgtccagacggtggtcagggattttggtcccggcggtgggtggcctaccctcaccaaaaccaactacatcgagtgggccgcggtgatgagggtgaggctccaggtgcggcacatgtgggaggcagtccggtacggtgacgtcgactacgacgaggatcggcgggcactggatgccctcatcgctgcagttccgcccgagatgcagttctcgctttcccagaagcggactgccaaggaggcctgggacgccatcgctgcggcacgcatcggcagcgaccgcgcccgcaagtccacactgcaggcactccgcaaggagtgggagaacctggccttcaagccaggtgaggatgttgatgactttgctctccgtctcaacactctcttgcaaaaaatggtgcagtacggcgacgacacctacgacgaggagagagctgtcgagaagctcttccgctgcgtccctgagaagtacaggcagatcgctcgctcgattgaatctctgctggacctctccacgatgtcgatcgaggaggcgttaggtcgcctcaaggtcgtcgatggtgatgagccacggcctctctcggggcccatcaccatcggcgggaagctccatctcactcgggagcagtgggaggcctctcagggtgacgggaggaagggggagtcatcttccccgacaggcggccgtaagccgcgcaaggcgcggggaggtgtccagctacggtgggcgcgaagacgtgccgagggtggcgcccgcagaggcgcccagggcgttgccaccggcaaccacaagccggcacgagacgacacctgccgcaactgtggcaagcttggccattgggccaaagactgtcgacagccacgacgcggccaggcccacgtcgcacgggtggaggaggaagagccggctctgctcctagctcacgcaagcatcgagctacctccagcggcaccggccgcagcggctttcctccaccttgatgagccgaaggtactcgtctccctctgcgacggctccagcaacgacaaggctgatgggtggtacctcgacaccggcgccacccatcacatgaccggccgacgggagttcttcaccgagttcgactccagcgtccgaggcaccgtcaagttcggggacgcctccggcgtggagatcaagggtgttggctccgtcaccttcaccgccaagtccggtgagcacaggctgctcaccggagtctactacatccccgcgttgaggaattctatcatcagcgtgggacagctggatgagaacggctcacgcgtgttggtcgaggacggactcatgaggatttgggatcgccgttgtcgccttcttgccaaggtaaccagaggcactaatcgactctacatcctcagcgcgcaagtcgcacatccagtttgcctcgccgctcgtcgggacgacgaggcgtggcagtggcacgagcgcttcgggcacctccacttcgaggccctgaagcagctcagtgccaaggagatggtgcgaggcatgccgtgccttgaccacgtggagcagctctgcgacgtctgcgtggtgacaaagcagcggcggctcccctttccccagcagacgagcttccgagccaaggagcggctcgggctcgtgcacggggacttgtgtggcccagtgacaccggccacaccaggaggacgacgttatttcctgctgctcgtcgacgacctctcccgctacatgtgggtgatggtcctcggcagcaagggagaggctgcggacgccatcaggcatgcgcaggctgcagcagaggcggagtgcggccgcaagctgcgcgtgctgcgcaccgacaacggcggcgaattcacggcggctgaattcgcgtcgtactgcgctgatgagggcattcagcgccactacaccgcgccgtacagcccacagcagaacggcgtcgtcgagcggcgcaaccagacggttgtggagatggctcgggccctcctcaagcagagggggatgccggccatcttctggggggaggcggtggtgacggccgcctacatcctcaaccgctcgcctaccaaggccctcgatggcaggacaccgtacgaggcttggcatgggcgcaagccggcggtctcccacctgcgggtcttcggctgcctcgcgttcaccaaggagcttggccacatcggcaagctcgacgacaggagcaccccaggggtgttcatcggctacgcggagggctcgaaggcctaccgcatcctcgacccggagacacagcgtgtgcgcattacgcgcgatgttgtgttcgacgaagggcgagggtgggtatgggacaaggcggtggatgatggttcgactccgacgtacgacgacttcaccatcgagtacgtccacttcgagggagctgggggagtaggcagctcttcttcaccgagcgtgtctaccccagtccccgagcctccaccgactccaacaccaacacaccctcgggccacgacttcgactacgacgagctcttcgtcgacaccaccccagccggtgtccccacacgctccagcaccaacagccactcctccgggcacgtctactccgacgccagctcgtgttgagcgcagcccggtggagttcgttactccgctctcccacgacggggagcgcatcgacgcgtaccatgacggcgagcagctacggtaccgtacgatggaggatcttctcggcgaccagccggtgccgggactggtgcctcgcaacctggaggcgcagttgcaccttgcgtgcgacgacggtgagcctcggtcttttgcagaggccgagaaacacgcggcatggcgtgccgcgatgcagtcggagatggacgcggttcaggagaaccgcacctgggagcttgctgacctccctcgtggtcaccgcgcgatcacccttaagtgggtgttcaagctgaagagggatgaagccggagccatcgtcaagcacaaggctcgcttggtggcacgcggtttcgtgcagcaggaggggatcgactacgacgatgccttcgctcccgtggcacggatggagtccgtgcgactccttcttgcgctggctgctcaggaaggctggggcgtccatcacatggacgtcaagtcggcgtttctaaacggcgacttgaaggaggaggtctacgtgcaccagccgccgggatttgtgatccccggcaaggagggcaaggtgctacgcctgcacaaggccctctacggcttgcggcaggcaccgaggacgtggaatgccaagttggattccacgctcaaggggatgggcttcgagcaaagcccgcacgaggcggccatctaccggcggggcaatggaggaaatgccttgctggtgggtgtctacgtcgacgacttagtgatcaccggcaccaaggatgcagaggtcgcggcgttcaaggaggagatgaaggccaccttccagatgagtgatctggggcctctctccttctacctggggatcgaagtgcaccaggacaactccgggatcacgcttcgacagaccgcctacgccaagcgcgtcgttgagctggctgggctcaccgattgcaacccagctctcactccgatggaggagagactgaagctgagccgcgacagcacagcggaggaggtggatgctacacagtaccgacgtcttgtggggagccttcgctacctcacccacacacggccggacttggccttctccgtcggctacgtcagtcggttcatgcagcgaccgacgacggagcaccagcaggctgtgaagaggatcatccgctacgttgcggggactctcgaccacggtctctactacccgaggtgtcctggcaaggcacacttcgtcgggtacagcgacagcgaccacgccggcgacatcgacaccagcaagagcacgagcgggattctcttcttcctcggcgagtgcctcgttagctggcagtcaatcaagcagcaggtggtggccctgtccagctgcgaggccgagtacatggcggcatccgccgcttcgacccaggcgctctggcttgctcgactgcttagtgatctcctcggcagagatactggagcggtggagctcagggtggatagcaagtccgctctggccctggcaaaaaaccccgtttttcacgaacggagcaagcacatccgagtgaggtaccatttcatcagaagctacttggaggaagggagcatcaaggcgagctacatcaacaccaaggaccagcttgcggatttgctcaccaaaccccttgggaggatcaagttccttgagctttgctcccggatcgggatggctcaactctcccacaagacggcgcacaagacttag

SEQ ID NO: 15241 - DNA, 4806 bp, Oryza sativa
  Clone ID: TFbOSC400946j.C1.o15.fg
atgtccgacgctcggtctcggcgttcggtcgcctcgagcactcggcgtcagcaggacgccgagctcgccgcagcagaagagcgcaggcgagcaacggctcagaccgctgcagcagcagcgagggcggccagactggcggcagcggagttggcagcagccagggcggaggcggaggcggaggcggcggaagatgcggcacgtgcggcggaggtagaggttgagaccttgcgcagcagcatcaacggctccatcgccggcgacatcaccgctgacagggagcttgaggagctggcaagaggaagggcacgggagcgagcagagcggtgggcagcagcccacctccacggcggcggcggcggcccaagggaccgtgcgcccgccgacgggaacccagacgggcgcgggcgtgccggcggcagcccggagcccgcacgcggccctcgcaggcggcacggctccctctcccctgaccggcgccatggtcaccacggcgtccagacggtggtcagggattttggtcccggcggtgggtggcctaccctcaccaaaaccaactacatcgagtgggccgcggtgatgagggtgaggctccaggtgcggcacatgtgggaggcagtccggtacggtgacgtcgactacgacgaggatcggcgggcactggatgccctcatcgctgcagttccgcccgagatgcagttctcgctttcccagaagcggactgccaaggaggcctgggacgccatcgctgcggcacgcatcggcagcgaccgcgcccgcaagtccacactgcaggcactccgcaaggagtgggagaacctggccttcaagccaggtgaggatgttgatgactttgctctccgtctcaacactctcttgcagaaaatggtgcagtacggcgacgacacctacgacgaggagagagctgtcgagaagctcttccgctgcgtccctgagaagtacaggcagatcgctcgctcgattgaatctctgctggacctctccacgatgtcgatcgaggaggcgttaggtcgcctcaaggtcgtcgatggtgatgagccacggcctctctcggggcccatcaccatcggcgggaagctccatctcactcgggagcagtgggaggcctctcagggtgacgggaggaagggggagtcatcttccccgacaggcggccataagccgcgcaaggcgcggggaggtgtccagctacggtgggcgcgaagacgtgccgagggtggcgcccgcagaggcgcccagggcgttgccaccggcaaccacaagccggcacgagacgacacctgccgcaactgtggcaagcttggccattgggccaaagactgtcgacagccacgacgcggccaggcccacgtcgcacgggtggaggaggaagagccggctctgctcctagctcacgcaagcatcgagctacctccagcggcaccggccgcagcggctttcctccaccttgatgagccgaaggtactcgtctccctctgtgacggctccagcaacgacaaggctgatgggtggtacctcgacaccggcgccacccatcacatgaccggccgacgggagttcttcaccgagttcgactccagcgtccgaggcaccgtcaagttcggggacgcctccggcgtggagatcaagggtgttggctccgtcaccttcaccgccaagtccggtgagcacaggctgctcaccggagtctactacatccccgcgttgaggaattctatcatcagcgtgggacagctggatgagaacggctcacgcgtgttggtcgaggacggactcatgaggatttgggatcgccgtcgtcgccttcttgccaaggtaaccagaggcactaatcgactctacatcctcagcgcgcaggtcgcacatccagtttgcctcgccgctcgtcgggacgacgaggcgtggcagtggcacgagcgcttcgggcacctccacttcgaggccctgaagcagctcagtgccaaggagatggtgcgaggcatgccgtgccttgaccacgtggagcagctctgcgacgtctgcgtggtgacaaagcagcggcggctcccctttccccagcagacgagcttccgagccaaggagcggctcgggctcgtgcacggggacttgtgtggcccagtgacaccggccacaccaggaggacgacgttatttcctgctgctcgtcgacgacctctcccgctacatgtgggtgatggtcctcggcagcaagggagaggctgcggacgccatcaggcatgcgcaggctgctgcagaggcggagtgcggccgcaagctgcgcgtgctgcgcaccgacaacggcggcgaattcacggcagctgaattcgcgtcgtactgcgctgatgagggcattcagcgccactacaccgcgccgtacagcccacagcagaacggcgtcgtcgagcggcgcaaccagacggttgtggggatggctcgggccctcctcaagcagagggggatgccggccatcttctggggggaggcggtggtgacggccgcctacatcctcaaccgctcgcctaccaaggccctcgatggcaggacaccgtacgaggcttggcatgggcgcaagccggcggtctcccacctgcgggtcttcggctgcctcgcgttcgccaaggagcttggccacatcggcaagctcgacgacaggagcaccccaggggtgttcatcggctacgcggagggctcgaaggcctaccgcatcctcgacccggagacacagcgtgtgcgcattacgcgcgatgttgtgttcgacgaagggcgagggtgggtatgggacaaggcggtggatgatggttcgactccgacgtacgacgacttcaccatcgagtacgtccacttcgagggagctgggggagtaggcagctcttcttcaccgagcgtgtctaccccagtccccgagcctccaccgactccaacaccaacacaccctcgggccacgacttcgactacgacgagctcttcgtcgacaccaccccagccggtgtccccacacgctccagcaccaacagccactcctccgggcacgtctactccgacgccagctcgtgttgagcgcagcccggtggagttcgttactccgctctcccacgacggggagcgcatcgacgcgtaccatgacggcgagcagctacggtaccgtacgatggaggatcttctcggcgaccagccggtgccgggactggtgcctcgcaacctggaggcgcagttgcaccttgcgtgcgacgacggtgagcctcggtcttttgcagaggccgagaaacacgcggcatggcgtgccgcgatgcagtcggagatggacgcggttcaggagaaccgcacctgggagcttgctgacctccctcgtggtcaccgcgcgatcacccttaagtgggtgttcaagctgaagagggatgaagccggagccatcgtcaagcacaaggctcgcttggtggcacgcggtttcgtgcagcaggaggggatcgactacgacgatgccttcgctcccgtggcacggatggagtccgtgcgactccttcttgcgctggctgctcaggaaggctggggcgtccatcacatggacgtcaagtcggcgtttctaaacggcgacttgaaggaggaggtctacgtgcaccagccgccgagatttgtgatccccggcaaggagggcaaggtgctacgcctgcacaaggccctctacggcttgcggcaggcaccgagggcgtggaatgccaagttggattccacgctcaaggggatgggcttcgagcaaagcccgcacgaggcggccatctaccggcggggcaatggaggaaatgccttgctggtgggtgtctacgtcgacgacttagtgatcaccggcaccaaggatgcagaggtcgcggcgttcaaggaggagatgaaggccaccttccagatgagtgatctggggcctctctccttctacctggggatcgaagtgcaccaggacaactccgggatcacgcttcgacagaccgcctacgccaagcgcgtcgttgagctggctgggctcaccgattgcaacccagctctcactccgatggaggagagactgaagctgagccgcgacagcacagcggaggaggtggatgctacacagtaccgacgtcttgtggggagccttcgctacctcacccacacacggccggacttggccttctccgtcggctacgtcagtcggttcatgcagcgaccgacgacggagcaccagcaggctgtgaagaggatcatccgctacgttgcggggactctcgaccacggtctctactacccgaggtgtcctggcaaggcacacttcgtcgggtacagcgacagcgaccacgccggcgacatcgacaccagcaagagcacgagcgggattctctttttcctcggcgagtgcctcgttagctggcagtcaatcaagcagcaggtggtggccctgtccagctgcgaggccgagtacatggcagcatccgccgcttcgacccaggcgctctggcttgctcgactgcttagtgatctcctcggcagagatactggagcggtggagctcagggtggatagcaagtccgctctggccctggcaaaaaaccccgtttttcacgaacggagcaagcacatccgagtgaggtaccatttcatccgaagctacttggaggaagggagcatcaaggcgagctacatcaacaccaaggaccagcttgcggatttgctcaccaaaccccttgggaggatcaagttccttgagctttgctcccggatcgggatggctcaactctcccacaagacggcgcacaagacttag

SEQ ID NO: 15242 - DNA, 4629 bp, Oryza sativa
  Clone ID: TFbOSC401408j.C1.o1.fg
atgtccgacgctcggtctcggcgttcggtcgcctcgagcactcggcgtcagcaggacgccgagctcgccgcagcagaagagcgcaggcgagcaacggctcagaccgctgcagcagcagcgagggcggccagactggcggcagcggagttggcagcagccagggcggaggcggaggcggaggcggcggaagatgcggcacgtgcggcggaggtagaggttgagaccttgcgcagcagcatcaacggctccatcgccggcgacatcaccgccgacagggagcttgaggagctggcaagaggaagggcacgggagcgagcagagcggtgggcagcagcccacctccacggcggcggcggcggcccaagggaccgcgcgcccgccgacgggaacccagacgggcgcgggcgtgccggcggcagcccggagcccgcacgcggccctcgcaggcggcacggctctctctcccctgaccggcgctatggtcaccacggcgtccagacggtggtcagggactttggtcccggcggtgggtggcctaccctcaccaaaaccaactacatcgagtgggccgcggtgatgagggtgaggctccaggtgcggcacatgtgggaggcagtccggtacggcgacgtcgactacgacgaggatcggcgggcactggatgccctcatcgttgcagtcccgcccgagatgcagttctcgctttcccagaagcggactgccaaggaggcctgggacgccatcgctgcggcacgcatcggcagcgaccgcgcccgcaagtccacactgcaggcactccgcaaggagtgggagaacctggccttcaagccaggtgaggatgttgatgactttgctctccgtctcaacactctcttgcagaagatggtgcagtacggcgacgacacctacgacgaggagagagctgtcgagaagctcttccgctgcgtccctgagaagtacagacggatcgctcgctcgatcgaatctctgctggacctctccacgatgtcgatcgaggaggcgttaggtcgcctcaaggtcgtcgatggtgatgagccacagcctctctcggggcccatcaccatcggcgggaagctccacctcactcgggagcagtgggaggcctctcagggtgacgggaggaagggggagtcatcttccccgacaggcggccgtaagccgcgcaaggcgcggggaggtgtccagctacggtgggcgcgaagacgtgccgagggtggcgcccgcagaggcgcccagggcgttgccaccggcaaccacaagccggcacgagacgacacctgccgcaactgtggcaagcttggccattgggccaaagactgtcgacagccacgacgcggccaggcccacgtcgcacgggtggaggaggaagagccggctctgctcctagctcacgcaagcatcgagctacctccagcggcaccggccgcagcggctttcctccaccttgatgagccgaaggtactcgtctccctctgcgacggctccagcaacgacaaggctgatgggtggtacctcgacaccggcgccacccatcacatgaccggccgacgggagttcttcaccgagttcgactccagcgtccgaggctccgtcaagttcggggacacctccggcgtggagatcaagggtgttggctccgtcaccttcaccgccaagtccggtgagcacaggctgctcaccagagtctactacatccccgcgttgaggaattctatcatcagcgtgggacagctggatgagaacggctcacgcgtgttggtcgaggacggactcatgaggatttgggatcgccgccgtcgccttcttgccaaggtaaccagaggcactaatcgactctacatcctcagcgcgcaggtcgcacaaccagtttgcctcgccgctcgtcgggacgacgaggcgtggcagtggcacgagcgcttcgggcacctccacttcgaggccctgaagcagctcagtgccaaggagatggtgcgaggcatgccgtgcctcgaccacgtggagcagctctgcgacgtctgcgtggtgacgaagcagcggcggctcccctttccccagcagacgagcttccgagccaaggagcggctcgagctcgtgcacggggacttgtgtggcccagtgacaccggccacaccaggaggacgacgttacttcctgctgctcgtcgacgacctctcccgctacatgtgggtgatggtcctcggcagcaagggagaggctgcggacgccatcaggcatgcgcaggctgctgcagaggcggagtgcggccgcaagctgcgcgtgctgcgcaccgacaacggcggcgaattcacggcggctgaattcgtgtcgtactgcgctgatgagggcattcagcgccactacaccgcgccgtacagcccacagcagaacggcgtcgtcgagcggcgcaaccagacggttgtggggatggctcgggccctcctcaagcagagggggatgctggccatcttctggggggaggcggtggacaccgtacgaggcttggcatggcgcaagccggcggtctcccacctgcgggtcttcggctgcctcgcgttcgccaaggagcttggccacatcggcaagctcgacgacaggagcaccccaggggtgttcatcggctacgcggagggctcgaagacctaccgcatcctcgacccggagacacagcgtgtgcgcattgcgcgcgatgttgtgttcgacgaagggcgagggtgggtatgggacaaggcggtggatgatggttcgactccgacgtacgacgacttcaccatcgagtacgtccacttcgagggagctgggggaccggtgtccccacacgctccagcaccaacagccactcctccgggcacgtctactccgacgccagctcgtgttgagcgcagcccggtggggttcgttactccgctctcccacgacgaggagcgcatcgacgcgtaccatgatggcgagcagctacggtaccgtacgatggaggatcttctcggcgaccagccggtgccgggactggtgcctcgcaacctggaggcgcagttgcaccttgcgtgcgacgacggtgagcctcggtcctttgcaaaggccgagaaacacgcggcatggcgtgccacgatgcagtcggagatggacgcggttcaggagaaccgcacctgggagcttgctgacctccctcgtggtcaccgcgcgatcacccttaagtgggtgttcaagctgaagagggatgaagccggagccatcgtcaagcacaaggctcgcttggtggcacgcggtttcgtgcagcaggaggggatcgactacgacgatgccttcgctcccgtggcacggatggagtctgtgcgactcctccttgcgctggctgctcaggaaggctggggcgtccatcacatggacgtcaagtcggcgttcctaaacggcgacttgaaggaggaggtctacgtgcaccagccgccgggatttgtgattctcggcaaggagggcaaggtgctacgcctgcacaaggccctctacggcttgcggcaggcaccgagggcgtggaatgccaagttggattccacgctcaaggggatgggcttcgagcaaagcccgcacgaggcggccatctaccggcggggcaatggaggaaatgccttgctggtgggtgtctacgtcgacgacttagtgatcaccggcaccaaggatgcagaggtcgcggcattcaaggaggagatgaaggccaccttccagatgagtgatctggggcctctctccttctacctggggatcgaagtgcaccaggacaactccgggatcacgcttcgacagaccgcctacgccaagcgcgtcgttgagctggctgggctcaccgattgcaacccagctctcactccgatggaggagagactgaagctgagccgcgacagcacggcggaggaagtggatgctacacagtaccggcgtcttgtggggagccttcgctacctcacccacacacggccggacttggccttctccgtcggctacgtcagtcggttcatgcagcgaccgacgacggagcaccagcaggctgtgaagaggatcatccgctacgttgcggggactctcgaccacggtctctactacccgaggtgtcctgacaaggcacacttcgtcgggtacagcgacagcgaccacgccggcgacattgacaccagcaagagcacgagcgggattctcttcttcctcggcgagtgcctcgttagctggcagtcaatcaagcagcaagtggtggccctgtccagctgcgaggccgagtacatggcggcatccgccgcttcgacccaggcgctatggcttgctcgactgcttagtgatctcctcggcagagatactggagcggtggagctcagggtggataacaagtccgctctggccctggcaaagaaccccgtttttcacgaacggagcaagcacatccgggtgaggtaccatttcatccgaagctacctggaggaagggagcatcaaggcgagctacatcaacaccaaggaccagcttgcggatttgctcaccaaaccccttgggaggatcaagttccttgagctttgctcccggatcgggatggctcaactttcccacaagacggcgcacaagacttag

SEQ ID NO: 15243 - DNA, 3861 bp, Oryza sativa
  Clone ID: TFbOSC401589j.C1.o7.fg
atgtgggaggcagtctggtacggcgacgtcgactacgacaaagatcgacgggcgctggatgccctcatcactgcagtcccgcccgagatgcagttctcgctttcccagaagcggactgccaaggaggcctgggacgctatcgctgcggcacgcatcggcagcgaccgcgcccgcaagtccacgctgcaggcactccgcaaggagtgggagaacctggccttcaagccaggtaaggatgttgatgactttgccctccgtctcaacaatcttttgcagaagatggtgcagtgcgacgacgacacctacgacgaggagagagctgtcgagaagctcttccactgcgtcccagagaagtacaggcagatcgctcgctcgatcgagtctctgctggacctctccacgatgtcgattgaggaggcgttgggtcgcctcaaggtcgtcgacgatgatgagccacagcctctctcggggcctatcaccattggcgggaagctccatctcactcgggagcagtgggaggcctctcagagtgacggaagaaagggggagtcttctccctcgataggcggccgcaagccgcgcaaggcatgcggaggtgtccagctgcggtgggcgcgaagacgcgccgagggtggcgctcgcagaggtgcccagggcggcgccgccagcaaccacaagccggcacgagacgacacctgccgcaactgtggcaagcttggccattgggccaaagactgtcgacagccacgacgtggccaggcccacgtcgcacaggtggaggaggaagagccggctctgctcctggcacacgcaagcatcgagcttcctccagcggcaccggccgcagcggctttcctccaccttgatgagccgaaggtactcgtctctctctgcaacagctccagcaacaacaaggctgatgggtggtacctcgacaccggcgccacccatcacatgaccggccgacgggagttcttcaccgagttcgaccccggcgtccgaggctccatcaagtttggggacgcctccggcgtggagatcaagggcgttggctccgtcaccttcaccgccaagtccggtgagcacaggctgctcaccggagtttactacatccccgcgttgaggaattctatcatcagcgtgggacagctggatgagaacggctcacgcgtgttggtcgaggacagactcatgaggatttgggatcgccgtcgtcgccttcttgccaaggtaaccagaggcactaatcgactctacatcctcggcgcgcaggtcgcacaaccagtttgcctcaccgctcgtcgggacgacgaggcatggcagtggcacgagcgcttcgggcacctccacttcgaggccctgaagcacctcagtgccaaggagatggtgcgaggcatgccgtgccttgaccatgtggagcagctctgcgacgtcttcatgacgagcttccgagccaaggagcggctcgagctcgtgcacggggacttgtgtggcccagtgacaccggccacaccaggaggacgatgttacttcctgctgctcgtcgacgacctctcccgctacatgtgggtgatggtcctcggcagcaagggagaggctgcggatgccatcaggcgcgcgcaggccgctgcagaggtggagtgcggccgcaagctgcgcgtgctgcgcaccgacaacggcagcgaattcacggcggctgaattcgcgttgtactgcgttgatgagggcattcagcgccactacaccgcgccgtacagcccgcagcagaacggcgtcgttgagcggcacaaccagacggttgtggggatggctcgggctctcctcaagcagagggggatgccggccatcttctggggggaggcggtggtgacagccgtctacatcctcaaccgctcgcctaccaaggccctcgatggcaggacaccgtacgaggcttggcatggacgcaagccggcggtctcccacctacgggtctttggctgcctcgcgttcgccaaggagcttggccacatcggcaagcttgacgacaagagcaccccaggggtgctcatcagctacgcggagggctcgaaggcctaccacatcctcgacccggagacacagcgtgtgcgcacagcgcgcgacgtagtgttcgacgaagggcgagggtgggtatgggacaaggcggtggatgatggtttgactccgacgtacgacgacttcaccatcgagtacgtccacttcgagggagctgggggatcggtgtccccacgtgctccagcaccaacagccactcctccgggcacgtctactccgacgccagctcgtgttgagcgcagcccggtggagttcgctactccactctcccacgacggggagcgcatcgacgcgtaccacgacggcgagcagctacggtaccgtacgatggaagatcttctcagcgaccagccggtgccgggactggtgcctcgcgacctagaggcgcagttgcaccttgcgtgtgatgacggtgagcctgggtcttttgcagaggccgagaaacatgcggcatggcgtgccacgatgcagtcggagatggacgcggttcaggagaaccgcacctgggagtttgctgacctccctcgtggtcaccgcgcgatcacccttaagtgggtgttcaagctgaagagggatgaagccggagccatcgtcaagcacaaggctcgcttggtggcacgcggcttcgtgcagcaggaggggatcgactacgacgatgccttcgctcccgtggcacggatggagtcctcggcatttctgaacggcgacttgaaggaggaggtctacgtgcaccagccgccgggattcgtgctccccagcaaggagggcaaggtgctacgcctgcacaaggccctctacggcttgcggcaggcaccgagggcgtggaatgccaagttggattccacgctcaaggggatgggcttcgagcaaagcccgcacgaggcggccatctaccggcggggcaatggaggaaatgccttgctggtgggtgtctacgtcgacgacttggtgatcactggcaccaaggatgcggaggtggcggcattcaaggaggagatgaaggccaccttccagatgagtgatctggggcctctcttcttctacctggggatcgaagtgcaccaggacaacttcgggatcacgcttcgacagaccgcctacgccaagcgcgtcgttgagctggctgggctcaccgattgcaacccagctctcactccgatggaggagagactgaagctgagccacgacagcacggcggaggaggtggatgctacacagtaccggcgccttgtggggagccttcgctacctcacccacacacggccggacttggccttctccgtcggctacgtcagtcggtgtcctggcaaagcacacttcctcaggtacagcgacagcgaccacgccggcgacatcgacaccagcaagagcacgagcgggattctcttcttcctcggcgagtgcctcgttagctggcagtcggtcaagcagcaggtggtggccctgtccagctgcgaggctgagtaccaggcgctctggcttgctcgactgcttggtgatctcctcggcagagacactggagcggtagagctcagggtggacagcaagtccgctctggccctggcaaagacccccgttttccacgaacggagcaagcacatccgggtgaggtaccacttcatccgaagctacttggaggaagggagcatcaaggcgagctacatcaacaccaaggaccagcttgcggacttgctcaccaagcctcttgggaggatcaagttcctcgagctctgctccaggatcgggatggcccaactttcccacaagacgacacacaagacttag

SEQ ID NO: 15244 - DNA, 4806 bp, Oryza sativa
  Clone ID: TFbOSC401648j.C1.o6.fg
atgtccgacgctcggtctcggcgttcggtcgcctcgagcactcggcgtcagcaggacgccgagctcgccgcagcagaagagcgcaggcgagcaacggctcagaccgctgcagcagcagcgagggcggccagactggcggcagcggagttggcagcagccagggcggaggcggaggcggaggcggcggaagatgcggcacgtgcggcggaggtagaggttgagaccttgcgcagcagcatcaacggctccatcgccggcgacatcaccgctgacagggagcttgaggagctggcaagaggaagggcacgggagcgagcagagcggtgggcagcagcccacctccacggcggcggcggcggcccaagggaccgtgcgcccgccgacgggaacccagacgggcgcgggcgtgccggcggcagcccggagcccgcacgcggccctcgcaggcggcacggctccctctcccctgaccggcgccatggtcaccacggcgtccagacggtggtcagggattttggtcccggcggtgggtggcctaccctcaccaaaaccaactacatcgagtgggccgcggtgatgagggtgaggctccaggtgcggcacatgtgggaggcagtccggtacggtgacgtcgactacgacgaggatcggcgggcactggatgccctcatcgctgcagttccgcccgagatgcagttctcgctttcccagaagcggactgccaaggaggcctgggacgccatcgctgcggcacgcatcggcagcgaccgcgcccgcaagtccacactgcaggcactccgcaaggagtgggagaacctggccttcaagccaggtgaggatgttgatgactttgctctccgtctcaacactctcttgcagaaaatggtgcagtacggcgacgacacctacgacgaggagagagctgtcgagaagctcttccgctgcgtccctgagaagtacaggcagatcgctcgctcgattgaatctctgctggacctctccacgatgtcgatcgaggaggcgttaggtcgcctcaaggtcgtcgatggtgatgagccacggcctctctcggggcccatcaccatcggcgggaagctccatctcactcgggagcagtgggaggcctctcagggtgacgggaggaagggggagtcatcttccccgacaggcggccataagccgcgcaaggcgcggggaggtgtccagctacggtgggcgcgaagacgtgccgagggtggcgcccgcagaggcgcccagggcgttgccaccggcaaccacaagccggcacgagacgacacctgccgcaactgtggcaagcttggccattgggccaaagactgtcgacagccacgacgcggccaggcccacgtcgcacaggtggaggaggaagagccggctctgctcctagctcacgcaagcatcgagctacctccagcggcaccggccgcagcggctttcctccaccttgatgagccgaaggtactcgtctccctctgtgacggctccagcaacgacaaggctgatgggtggtacctcgacaccggcgccacccatcacatgaccggccgacgggagttcttcaccgagttcgactccagcgtccgaggcaccgtcaagttcggggacgcctccggcgtggagatcaagggtgttggctccgtcaccttcaccgccaagtccggtgagcacaggctgctcaccggagtctactacatccccgcgttgaggaattctatcatcagcgtgggacagctggatgagaacggctcacgcgtgttggtcgaggacggactcatgaggatttgggatcgccgtcgtcgccttcttgccaaggtaaccagaggcactaatcgactttacatcctcagcgcgcaggtcgcacatccagtttgcctcgccgctcgtcgggacgacgaggcgtggcagtggcacgagcgcttcgggcacctccacttcgaggccctgaagcagctcagtgccaaggagatggtgcgaggcatgccgtgccttgaccacgtggagcagctctgcgacgtctgcgtggtgacaaagcagcggcggctcccctttccccagcagacgagcttccgagccaaggagcggctcgggctcgtgcacggggacttgtgtggcccagtgacaccggccacaccaggaggacgacgttatttcctgctgctcgtcgacgacctctcccgctacatgtgggtgatggtcctcggcagcaagggagaggctgcggacgccatcaggcatgcgcaggctgctgcagaggcggagtgcggccgcaagctgcgcgtgctgcgcaccgacaacggcggcgaattcacggcagctgaattcgcgtcgtactgcgctgatgagggcattcagcgccactacaccgcgccgtacagcccacagcagaacggcgtcgtcgagcggcgcaaccagacggttgtggggatggctcgggccctcctcaagcagagggggatgccggccatcttctggggggaggcggtggtgacggccgcctacatcctcaaccgctcgcctaccaaggccctcgatggcaggacaccgtacgaggcttggcatgggcgcaagccggcggtctcccacctgcgggtcttcggctgcctcgcgttcgccaaggagcttggccacatcggcaagctcgacgacaggagcaccccaggggtgttcatcggctacgcggagggctcgaaggcctaccgcatcctcgacccggagacacagcgtgtgcgcattacgcgcgatgttgtgttcgacgaagggcgagggtgggtatgggacaaggcggtggatgatggttcgactccgacgtacgacgacttcaccatcgagtacgtccacttcgagggagctgggggagtaggcagctcttcttcaccgagcgtgtctaccccagtccccgagcctccaccgactccaacaccaacacaccctcgggccacgacttcgactacgacgagctcttcgtcgacaccaccccagccggtgtccccacacgctccagcaccaacagccactcctccgggcacgtctactccgacgccagctcgtgttgagcgcagcccggtggagttcgttactccgctctcccacgacggggagcgcatcgacgcgtaccatgacggcgagcagctacggtaccgtacgatggaggatcttctcggcgaccagccggtgccgggactggtgcctcgcaacctggaggcgcagttgcaccttgcgtgcgacgacggtgagcctcggtcttttgcagaggccgagaaacacgcggcatggcgtgccgcgatgcagtcggagatggacgcggttcaggagaaccgcacctgggagcttgctgacctccctcgtggtcaccgcgcgatcacccttaagtgggtgttcaagctgaagagggatgaagccggagccatcgtcaagcacaaggctcgcttggtggcacgcggtttcgtgcagcaggaggggatcgactacgacgatgccttcgctcccgtggcacggatggagtccgtgcgactccttcttgcgctggctgctcaggaaggctggggcgtccatcacatggacgtcaagtcggcgtttctaaacggcgacttgaaggaggaggtctacgtgcaccagccgccgggatttgtgatccccggcaaggagggcaaggtgctacgcctgcacaaggccctctacggcttgcggcaggcaccgagggcgtggaatgccaagttggattccacgctcaaggggatgggcttcgagcaaagcccgcacgaggcggccatctaccggcggggcaatggaggaaatgccttgctggtgggtgtctacgtcgacgacttagtgatcaccggcaccaaggatgcagaggtcgcggcgttcaaggaggagatgaaggccaccttccagatgagtgatctggggcctctctccttctacctggggatcgaagtgcaccaggacaactccgggatcacgcttcgacagaccgcctacgccaagcgcgtcgttgagctggctgggctcaccgattgcaacccagctctcactccgatggaggagagactgaagctgagccgcgacagcacagcggaggaggtggatgctacacagtaccgacgtcttgtggggagccttcgctacctcacccacacacggccggacttggccttctccgtcggctacgtcagtcggttcatgcagcgaccgacgacggagcaccagcaggctgtgaagaggatcatccgctacgttgcggggactctcgaccacggtctctactacccgaggtgtcctggcaaggcacacttcgtcgggtacagcgacagcgaccacgccggcgacatcgacaccagcaagagcacgagcgggattctctttttcctcggcgagtgcctcgttagctggcagtcaatcaagcagcaggtggtggccctgtccagctgcgaggccgagtacatggcagcatccgccgcttcgacccaggcgctctggcttgctcgactgcttagtgatctcctcggcagagatactggagcggtggagctcagggtggatagcaagtccgctctggccctggcaaaaaaccccgtttttcacgaacggagcaagcacatccgagtgaggtaccatttcatccgaagctacttggaggaagggagcatcaaggcgagctacatcaacaccaaggaccagcttgcggatttgctcaccaaaccccttgggaggatcaagttccttgagctttgctcccggatcgggatggctcaactctcccacaagacggcgcacaagacttag

SEQ ID NO: 15245 - DNA, 5376 bp, Oryza sativa
  Clone ID: TFbOSC409503j.C1.o9.fg
atggacaacctgtcagagccactgctcgcagagatcatcaagaggattgccaagacaagtgatcgtaactctctttcccttgtgtcgaagcagctctacactatcgacgcggagcaaagggatgctatccatgttggctgtggtcttcacccggcaactgaagctttggcatcactatgctcccggttccctaatttgtggaaagtagtgattgattactctggttggatatctatccacgggaagcagttggacaaccaagggctccttgtgctttcgtctcactgctcttcactgaccgatctcacattaaacttctgctcctatatcgatgattctggtattggctatctggcttattgcaagaaactaaggtctttcaggctgaactttgcaccagcaataagttcaagagggcttctctcggtggcagttggttgcaagagtctttgtactttccaccttgttgattgcatgaaagtaggaagtgtggagtggctggagtaccttggcagggccggatcattggaagaacttgtggtaaaggattcagccccccggaggtgcgccatgtccgacgctcggtctcggcgttcggtcgcctcgagcactcggcgtcagcaggacgccgagctcgccgcagcagaagagcgcaggcgagcaacggctcagaccgctgcagcagcagcgagggcggccagactggcggcagcggagttggcagcagccagggcggaggcggaggcggaggcggcggaagatgcggcacgtgcggcggaggtagaggttgagaccttgcgcagcagcatcaacggctccatcgccggcgacatcaccgctgacagggagcttgaggagctggcaagaggaagggcacgggagcgagcagagcggtgggcagcagcccacctccacggcggcggcggcggcccaagggaccgtgcgcccgccgacgggaacccagacgggcgcgggcgtgccggcggcagcccggagcccgcacgcggccctcgcaggcggcacggctccctctcccctgaccggcgccatggtcaccacggcgtccagacggtggtcagggattttggtcccggcggtgggtggcctaccctcaccaaaaccaactacatcgagtgggccgcggtgatgagggtgaggctccaggtgcggcacatgtgggaggcagtccggtacggtgacgtcgactacgacgaggatcggcgggcactggatgccctcatcgctgcagttccgcccgagatgcagttctcgctttcccagaagcggactgccaaggaggcctgggacgccatcgctgcggcacgcatcggcagcgaccgcgcccgcaagtccacactgcaggcactccgcaaggagtgggagaacctggccttcaagccaggtgaggatgttgatgactttgctctccgtctcaacactctcttgcagaaaatggtgcagtacggcgacgacacctacgacgaggagagagctgtcgagaagctcttccgctgcgtccctgagaagtacaggcagatcgctcgctcgattgaatctctgctggacctctccacgatgtcgatcgaggaggcgttaggtcgcctcaaggtcgtcgatggtgatgagccacggcctctctcggggcccatcaccatcggcgggaagctccatctcactcgggagcagtgggaggcctctcagggtgacgggaggaagggggagtcatcttccccgacaggcggccataagccgcgcaaggcgcggggaggtgtccagctacggtgggcgcgaagacgtgccgagggtggcgcccgcagaggcgcccagggcgttgccaccggcaaccacaagccggcacgagacgacacctgccgcaactgtggcaagcttggccattgggccaaagactgtcgacagccacgacgcggccaggcccacgtcgcacgggtggaggaggaagagccggctctgctcctagctcacgcaagcatcgagctacctccagcggcaccggccgcagcggctttcctccaccttgatgagccgaaggtactcgtctccctctgcgacggctccagcaacgacaaggctgatgggtggtacctcgacaccggcgccacccatcacatgaccggccgacgggagttcttcaccgagttcgactccagcgtccgaggcaccgtcaagttcggggacgcctccggcgtggagatcaagggtgttggctccgtcaccttcaccgccaagtccggtgagcacaggctgctcaccggagtctactacatccccgcgttgaggaattctatcatcagcgtgggacagctggatgagaacggctcacgcgtgttggtcgaggacggactcatgaggatttgggatcgccgtcgtcgccttcttgccaaggtaaccagaggcactaatcgactctacatcctcagcgcgcaggtcgcacatccagtttgcctcgccgctcgtcgggacgacgaggcgtggcagtggcacgagcgcttcgagcacctccacttcgaggccctgaagcagctcagtgccaaggagatggtgcgaggcatgccgtgccttgaccacgtggagcagctctgcgacgtctgcgtggtgacaaagcagcggcggctcccctttccccagcagacgagcttccgagccaaggagcggctcgggctcgtgcacggggacttgtgtggcccagtgacaccggccacaccaggaggacgacgttatttcctgctgctcgtcgacgacctctcccgctacatgtgggtgatggtcctcggcagcaagggagaggctgcggacgccatcaggcatgcgcaggctgctgcagaggcggagtgcggccgcaagctgcgcgtgctgcgcaccgacaacggcggcgaattcacggcggctgaattcgcgtcgtactgcgctgatgagggcattcagcgccactacaccgcgccgtacagcccacagcagaacggcgtcgtcgagcggcgcaaccagacggttgtggggatggctcgggccctcctcaagcagagggggatgccggccatcttctggggggaggcggtggtgacggccgcctacatcctcaaccgctcgcctaccaaggccctcgatggcaggacaccgtacgaggcttggcatgggcgcaagccggcggtctcccacctgcgggtcttcggctgcctcgcgttcgccaaggagcttggccacatcggcaagctcgacgacaggagcaccccaggggtgttcatcggctacgcggagggctcgaaggcctaccgcatcctcgacccggagacacagcgtgtgcgcattacgcgcgatgttgtgttcgacgaagggcgagggtgggtatgggacaaggcggtggatgatggttcgactccgacgtacgacgacttcaccatcgagtacgtccacttcgagggagctgggggagtaggcagctcttcttcaccgagcgtgtctaccccagtccccgagcctccaccgactccaacaccaacacaccctcgggccacgacttcgactacgacgagctcttcgtcgacaccaccccagccggtgtccccacacgctccagcaccaacagccactcctccgggcacgtctactccgacgccagctcgtgttgagcgcagcccggtggagttcgttactccgctctcccacgacggggagcgcatcgacgcgtaccatgacggcgagcagctacggtaccgtacgatggaggatcttctcggcgaccagccggtgccgggactggtgcctcgcaacctggaggcgcagttgcaccttgcgtgcgacgacggtgagcctcggtcttttgcagaggccgagaaacacgcggcatggcgtgccgcgatgcagtcggagatggacgcggttcaggagaaccgcacctgggagcttgctgacctccctcgtggtcaccgcgcgatcacccttaagtgggtgttcaagctgaagagggatgaagccggagccatcgtcaagcacaaggctcgcttggtggcacgcggtttcgtgcagcaggaggggatcgactacgacgatgccttcgctcccgtggcacggatggagtccgtgcgactccttcttgcgctggctgctcaggaaggctggggcgtccatcacatggacgtcaagtcggcgtttctaaacggcgacttgaaggaggaggtctacgtgcaccagccgccgggatttgtgatccccggcaaggagggcaaggtgctacgcctgcacaaggccctctacggcttgcggcaggcaccgagggcgtggaatgccaagttggattccacgctcaaggggatgggcttcgagcaaagcccgcacgaggcggccatctaccggcggggcaatggaggaaatgccttgctggtgggtgtctacgtcgacgacttagtgatcaccggcaccaaggatgcagaggtcgcggcgttcaaggaggagatgaaggccaccttccagatgagtgatctggggcctctctccttctacctggggatcgaagtgcaccaggacaactccgggatcacgcttcgacagaccgcctacgccaagcgcgtcgttgagctggctgggctcaccgattgcaacccagctctcactccgatggaggagagactgaagctgagccgcgacagcacagcggaggaggtggatgctacacagtaccgacgtcttgtggggagccttcgctacctcacccacacacggccggacttggccttctccgtcggctacgtcagtcggttcatgcagcgaccgacgacggagcaccagcaggctgtgaagaggatcatccgctacgttgcggggactctcgaccacggtctctactacccgaggtgtcctggcaaggcacacttcgtcgggtacagcgacagcgaccacgccggcgacatcgacaccagcaagagcacgagcgggattctctttttcctcggcgagtgcctcgttagctggcagtcaatcaagcagcaggtggtggccctgtccagctgcgaggccgagtacatggcagcatccgccgcttcgacccaggcgctctggcttgctcgactgcttagtgatctcctcggcagagatactggagcggtggagctcagggtggatagcaagtccgctctggccctggcaaaaaaccccgtttttcacgaacggagcaagcacatccgagtgaggtaccatttcatccgaagctacttggaggaagggagcatcaaggcgagctacatcaacaccaaggaccagcttgcggatttgctcaccaaaccccttgggaggatcaagttccttgagctttgctcccggatcgggatggctcaactctcccacaagacggcgcacaagacttag

SEQ ID NO: 15246 - DNA, 4284 bp, Oryza sativa
  Clone ID: TFbOSC416913j.C1.o26.fg
atggtcaccacggcgtccagacggtggtcagggattgtggttccggcggtgggtgggcctaccctcaccaaaaccaactacatcgagtgggccgcggtgatgagggtgaggctccaggtgcggcacatgtgggaggcagtccggtacggtgacgtcgactacgacgaggatcggcgggcactggatgccctcatcgctgcagttccgcccgagatgcagttctcgctttcccagaagcggactgccaaggaggcctgggacgccatcgctgcggcacgcatcggcagcgaccgcgcccgcaagtccacactgcaggcactccgcaaggagtgggagaacctggccttcaagccaggtgaggatgttgatgactttgctctccgtctcaacactctcttgcaaaaaatggtgcagtacggcgacgacacctacgacgaggagagagctgtcgagaagctcttccgctgcgtccctgagaagtacaggcagatcgctcgctcgattgaatctctgctggacctctccacgatgtcgatcgaggaggcgttaggtcgcctcaaggtcgtcgatggtgatgagccacggcctctctcggggcccatcaccatcggcgggaagctccatctcactcgggagcagtgggaggcctctcagggtgacgggaggaagggggagtcatcttccccgacaggcggccgtaagccgcgcaaggcgcggggaggtgtccagctacggtgggcgcgaagacgtgccgagggtggcgcccgcagaggcgcccagggcgttgccaccggcaaccacaagccggcacgagacgacacctgccgcaactgtggcaagcttggccattgggccaaagactgtcgacagccacgacgcggccaggcccacgtcgcacgggtggaggaggaagagccggctctgctcctagctcacgcaagcatcgagctacctccagcggcaccggccgcagcggctttcctccaccttgatgagccgaaggtactcgtctccctctgcgacggctccagcaacgacaaggctgatgggtggtacctcgacaccggcgccacccatcacatgaccggccgacgggagttcttcaccgagttcgactccagcgtccgaggcaccgtcaagttcggggacgcctccggcgtggagatcaagggtgttggctccgtcaccttcaccgccaagtccggtgagcacaggctgctcaccggagtctactacatccccgcgttgaggaattctatcatcagtgtgggacagctggatgagaacggctcacgcgtgttggtcgaggacggactcatgaggatttgggatcgccgtcgtcgccttcttgccaaggtaaccagaggcactaatcgactctacatcctcagcgcgcaagtcgcacatccagtttgcctcgccgctcgtcgggacgacgaggcgtggcagtggcacgagcgcttcgggcacctccactttgaggccctgaagcagctcagtgccaaggagatggtgcgaggcatgccgtgccttgaccacgtggagcagctctgcgacgtctgcgtggtgacaaagcagcggcggctcccctttccccagcagacgagcttccgagccaaggagcggctcgggctcgtgcacggggacttgtgtggcccagtgacaccggccacaccaggaggacgacgttatttcctgctgctcgtcgacgacctctcccgctacatgtgggtgatggtcctcggcagcaagggagaggctgcggacgccatcaggcatgcgcaggctgcagcagaggcggagtgcggccgcaagctgcgcgtgctgcgcaccgacaacggcggcgaattcacggcggctgaattcgcgtcgtactgcgctgatgagggcattcagcgccactacaccgcgccgtacagcccacagcagaacggcgtcgtcgagcggcgcaaccagacggttgtggggatggctcgggccctcctcaagcagagggggatgccggccatcttctggggggaggcggtggtgacggccgcctacatcctcaaccgctcgcctaccaaggccctcgatggcaggacaccgtacgaggcttggcatgggcgcaagccggcggtctcccacctgcgggtcttcggctgcctcgcgttcgccaaggagcttggccacatcggcaagctcgacgacaggagcaccccaggggtgttcatcggctacgcggagggctcgaaggcctaccgcatcctcgacccggagacacagcgtgtgcgcattacgcgcgatgttgtgttcgacgaagggcgagggtgggtatgggacaaggcggtggatgatggttcgactccgacgtacgacgacttcaccatcgagtacgtccacttcgagggagctgggggagtaggcagctcttcttcaccgagcgtgtctaccccagtccccgagcctccaccgactccaacaccaacacaccctcgggccacgacttcgactacgacgagctcttcgtcgacaccaccccagccggtgtccccacacgctccagcaccaacagccactcctccgggcacgtctactccgacgccagctcgtgttgagcgcagcccggtggagttcgttactccgctctcccacgacggggagcgcatcgacgcgtaccatgacggcgagcagctacggtaccgtacgatggaggatcttctcggcgaccagccggtgccgggactggtgcctcgcaacctggaggcgcagttgcaccttgcgtgcgacgacggtgagcctcggtcttttgcagaggccgagaaacacgcggcatggcgtgccgcgatgcagtcggagatggacgcggttcaggagaaccgcacctgggagcttgctgacctccctcgtggtcaccgcgcgatcacccttaagtgggtgttcaagctgaagagggatgaagccggagccatcgtcaagcacaaggctcgcttggtggcacgcggtttcgtgcagcaggaggggatcgactacgacgatgccttcgctcccgtggcacggatggagtccgtgcgactccttgcgctggctgctcaggaaggctggggcgtccatcacatggacgtcaagtcggcgtttctaaacggcgacttgaaggaggaggtctacgtgcaccagccgccgggatttgtgatccccggcaaggagggcaaggtgctacgcctgcacaaggccctctacggcttgcggcaggcaccgagggcgtggaatgccaagttggattccacgctcaaggggatgggcttcgagcaaagcccgcacgaggcggccatctaccggcggggcaatggaggaaatgccttgctggtgggtgtctacgtcgacgacttagtgatcaccggcaccaaggatgcagaggtcgcggcgttcaaggaggagatgaaggccaccttccagatgagtgatctggggcctctctccttctacctggggatcgaagtgcaccaggacaactccgggatcacgcttcgacagaccgcctacgccaagcgcgtcgttgagctggctgggctcaccgattgcaacccagctctcactccgatggaggagagactgaagctgagccgcgacagcacagcggaggaggtggatgctacacagtaccgacgtcttgtggggagccttcgctacctcacccacacacggccggacttggccttctccgtcggctacgctgtgaagaggatcatccgctacgttgcggggactctcgaccacggtctctactacccgaggtgtcctggcaaggcacacttcgtcgggtacagcgacagcgaccacgccggcgacatcgacaccagcaagagcacgagcgggattctcttcttcctcggcgagtgcctcgttagctggcagtcaatcaagcagcaggtggtggccctgtccagctgcgaggccgagtacatggcggcatccgccgcttcgacccaggcgctctggcttgctcgactgcttagtgatctcctcggcagagatactggagcggtggagctcagggtggatagcaagtccgctctggccctggcaaaaaaccccgtttttcacgaacggagcaagcacatccgagtgaggtatcatttcatccgaagctacttggaggaagggagcatcaaggcgagctacatcaacaccaaggaccagcttgcggatttgctcaccaaaccccttaggaggatcaagttccttgagctttgctcccggatcgggatggctcaactctcccacaagacagcgcacaagacttag

SEQ ID NO: 15247 - DNA, 5484 bp, Oryza sativa
  Clone ID: TFbOSC419638j.C1.o10.fg
atgtccgacgctcggtctcggcgttcggtcgcctcgagcactcggcgtcagcaggacgccgagctcgccgcagcagaagagcgcaggcgagcaacggctcagaccgctgcagcagcagcgagggcggccagactggcggcagcggagttggcagcagccagggcggaggcggaggcggaggcggcggaagatgcggcacgtgcggcggaggtagaggttgagaccttgcgcagcagcatcaacggctccatcgccggcgacatcaccgctgacagggagcttgaggagctggcaagaggaagggcacgggagcgagcagagcggtgggcagcagcccacctccacggcggcggcggcggcccaagggatcgtgcgcccgccgacgggaacccagacgggcgcgggcgtgccggcggcagcccggagcccgcacgcggccctcgcaggcggcacggctccctctcccctgaccggcgccatggtcaccacggcgtccagacggtggtcagggattttggtcccggcggtgggtggcctaccctcaccaaaaccaactacatcgagtgggccgcggtgatgagggtgaggctccaggtgcggcacatgtgggaggcagtccggtacggtgacgtcgactacgacgaggatcggcgggcactggatgccctcatcgctgcagttccgcccgagatgcagttctcgctttcccagaagcggactgccaaggaggcctgggacgccatcgctgcggcacgcatcggcagcgaccgcgcccgcaagtccacactgcaggcactccgcaaggagtgggagaacctggccttcaagccaggtgaggatgttgatgactttgctctccgtctcaacactctcttgcagaaaatggtgcagtacggcgacgacacctacgacgaggagagagctgtcgagaagctcttccgctgcgtccctgagaagtacaggcagatcgctcgctcgattgaatctctgctggacctctccacgatgtcgatcgaggaggcgttaggtcgcctcaaggtcgtcgatggtgatgagccacggcctctctcggggcccatcaccatcggcgggaagctccatctcactcgggagcagtgggaggcctctcagggtgacgggaggaagggggagtcatcttccccgacaggcggccataagccgcgcaaggcgcggggaggtgtccagctacggtgggcgcgaagacgtgccgagggtggcgcccgcagaggcgcccagggcgttgccaccggcaaccacaagccggcacgagacgacacctgccgcaactgtggcaagcttggccattgggccaaagactgtcgacagccacgacgcggccaggcccacgtcgcacgggtggaggaggaagagccggctctgctcctagctcacgcaagcatcgagctacctccagcggcaccggccgcagcggctttcctccaccttgatgagccgaaggtactcgtctccctctgtgacggctccagcaacgacaaggctgatgggtggtacctcgacaccggcgccacccatcacatgaccggccgacgggagttcttcaccgagttcgactccagcgtccgaggcaccgtcaagttcggggacgcctccggcgtggagatcaagggtgttggctccgtcaccttcaccgccaagtccggtgagcacaggctgctcaccggagtctactacatccccgcgttgaggaattctatcatcagcgtgggacagctggatgagaacggctcacgcgtgttggtcgaggacggactcatgaggatttgggatcgccgtcgtcgccttcttgccaaggtaaccagaggcactaatcgactctacatcctcagcgcgcaggtcgcacatccagtttgcctcgccgctcgtcgggacgacgaggcgtggcagtggcacgagcgcttcgggcacctccacttcgaggccctgaagcagctcagtgccaaggagatggtgcgaggcatgccgtgccttgaccacgtggagcagctctgcgacgtctgcgtggtgacaaagcagcggcggctcccctttccccagcagacgagcttccgagccaaggagcggctcgggctcgtgcacggggacttgtgtggcccagtgacaccggccacaccaggaggacgacgttatttcctgctgctcgtcgacgacctctcccgctacatgtgggtgatggtcctcggcagcaagggagaggctgcggacgccatcaggcatgcgcaggctgctgcagaggcggagtgcggccgcaagctgcgcatgctgcgcaccgacaacggcggcgaattcacggcagctgaattcgcgtcgtactgcgctgatgagggcattcagcgccactacaccgcgccgtacagcccacagcagaacggcgtcgtcgagcggcgcaaccagacggttgtggggatggctcgggccctcctcaagcagagggggatgccggccatcttctggggggaggcggtggtgacggccgcctacatcctcaaccgctcgcctaccaaggccctcgatggcaggacaccgtacgaggcttggcatgggcgcaagccggcggtctcccacctgcgggtcttcggctgcctcgcgttcgccaaggagcttggccacatcggcaagctcgacgacaggagcaccccaggggtgttcatcggctacgcggagggctcgaaggcctaccgcatcctcgacccggagacacagcgtgtgcgcattacgcgcgatgttgtgttcgacgaagggcgagggtgggtatgggacaaggcggtggatgatggttcgactccgacgtacgacgacttcaccatcgagtacgtccacttcgagggagctgggggagtaggcagctcttcttcaccgagcgtgtctaccccagtccccgagcctccaccgactccaacaccaacacaccctcgggccacgacttcgactacgacgagctcttcgtcgacaccaccccagccggtgtccccacacgctccagcaccaacagccactcctccgggcacgtctactccgacgccagctcgtgttgagcgcagcccggtggagttcgttactccgctctcccacgacggggagcgcatcgacgcgtaccatgacggcgagcagctacggtaccgtacgatggaggatcttctcggcgaccagccggtgccgggactggtgcctcgcaacctggaggcgcagttgcaccttgcgtgcgacgacggtgagcctcggtcttttgcagaggccgagaaacacgcggcatggcgtgccgcgatgcagtcggagatggacgcggttcaggagaaccgcacctgggagcttgctgacctccctcgtggtcaccgcgcgatcacccttaagtgggtgttcaagctgaagagggatgaagccggagccatcgtcaagcacaaggctcgcttggtggcacgcggtttcgtgcagcaggaggggatcgactacgacgatgccttcgctcccgtggcacggatggagtccgtgcgactccttcttgcgctggctgctcaggaaggctggggcgtccatcacatggacgtcaagtcggcgtttctaaacggcgacttgaaggaggaggtctacgtgcaccagccgccgggatttgtgatccccggcaaggagggcaaggtgctacgcctgcacaaggccctctacggcttgcggcaggcaccgagggcgtggaatgccaagttggattccacgctcaaggggatgggcttcgagcaaagcccgcacgaggcggccatctaccggcggggcaatggaggaaatgccttgctggtgggtgtctacgtcgacgacttagtgatcaccggcaccaaggatgcagaggtcgcggcgttcaaggaggagatgaaggccaccttccagatgagtgatctggggcctctctccttctacctggggatcgaagtgcaccaggacaactccgggatcacgcttcgacagaccgcctacgccaagcgcgtcgttgagctggctgggctcaccgattgcaacccagctctcactccgatggaggagagactgaagctgagccgcgacagcacagcggaggaggtggatgctacacagtaccgacgtcttgtggggagccttcgctacctcacccacacacggccggacttggccttctccgtcggctacgtcagtcggttcatgcagcgaccgacgacggagcaccagcaggctgtgaagaggatcatccgctacgttgcggggactctcgaccacggtctctactacccgaggtgtcctggcaaggcacacttcgtcgggtacagcgacagcgaccacgccggcgacatcgacaccagcaagagcacgagcgggattctctttttcctcggcgagtgcctcgttagctggcagtcaatcaagcagcaggtggtggccctgtccagctgcgaggccgagtacatggcagcatccgccgcttcgacccaggcgctctggcttgctcgactgcttagtgatctcctcggcagagatactggagcggtggagctcagggtggatagcaagtccgctctggccctggcaaaaaaaccccgtttttcacgaacggagcaagcacatccgagtgaggttgatgtcattacatacagtacactcatcgatggatattgcttggcaggtaagatggatgaagcaatgaagttactttctgacatggtctcagttgggttgaaacctgatactgttacttatagcactttgattaatggctactgtaaaattagtaggatggagaatgcattatctcttttcaggcagatggtgtgcaatggtgttagtcctaatattatcacgtataacatagttcttcaaggtttatttcagactggacaaactcgtgctgctaaagaaatctatgtcaggattatcaaaaggggaatacagcttgaaattagcacatgcaacatagtccttcaaggactttgcaaaaataatctcactggtgaggcacttcagatgtttcagaatctatgtttgatggatgtaaagcttgagactagaactttcaatataatgattggttccttgcttagaagtggcagaaaggatgaatcaaaggatttgtttgctgctctctcggcaaatggtttagcaccggatgttgtgacctataccttaatgattgaaaatctcatagaagatggcttgctcgaagagtctgataatctatttctttcaatggagaagaatggctgtgttcctaactcccgtatgcttaattgcatcgtcagaaagttacttcagaaaggggagataggcagggctggtgtttatctgtccaaaattgataaaaatgacttctcccttgaagcttccactgctgagttactgattttgctggtttcaagtgggaagtacaatcaacatatgaagggtctccctgagaagtaccactcctttgtgaaatccagggctgtttga

SEQ ID NO: 15248 - DNA, 3744 bp, Oryza sativa
  Clone ID: TFbOSC421987j.C1.o2.fg
atggagttggcagcagccagggcggaggcggaagcagaggcggcggaagatgcggcacgtgtggcggaggtagaggttgaaaccttgcgcagtagcatcaacggttccatcaccggcgacagcaccgccgacagggagcttgaggagctggcaagaggaaggacggtggtcagggactttggtcccggctgtgggtggcctaccctcaccaaaaccaactacattgagtgggccgcgatgatgagggtgaggctccaggtgcagcacatgtgggaggcagtccggtacggcgacgtcgactacgacgaggatcggcgggcactggatgccctcatcgctgcagtcttgcccgagatgcagttctcgctttcccagaagcggactgccaaggaggcctgggacgccatcgttgcggcacgcatcggcagcgaccgcgcccgcaagtccacactgcaggcactccgcaaggagtgggagaacctggccttcaagccaggtgaggatgttgatgactttgccctccgtctcaacactcttttgcagaagatggtgcagtacggtgacgacacctacgacgaggagagagctgtcgagatgctcttccgctgcgtcccagagaagtacaggcagatcgctcgctcgatcgagtctctgctggacctctccacgatgtcgatcgaggaggcgttaggtcgcctcaaggtcgtcgacggtgatgagccacagcccctctcggggcctatcaccattggcgggaagctccatttcactcgggagcagtgggaggcctctcaaggtgacgggatgaagggggagtcttctccctcgacaggcggccgcaagccgcgcaaggcgtgtggaggtgtccagctgcggtgggcgcgaagacgcgccgagggtggcgctcgcagaggcgcccagggcggcgccgccggcaaccacaagccggcacgagacgacacctgccgcaactgtggcaagcttggccattgggccaaagactgtcgacagccacgacatggccaggcccacgtcgcacaggtagaggaggaagagccggctctgctcctggcatacgcaagcatcgagctacccccagcgacaccggccacagcggctttcctccaccttgatgagccgaaggtgctcgtctccctctgcaacagctccagcaatgacaaggctgatgggtggtacctcgacaccggtgccacccatcacatgaccggccgacgggagttcttcaccgagcttgaccccagcgtccgaggctccatcaagtttggggacgcctccggcgtggagatcaagggcgttggctccgtcaccttcatcgccaagtccggtaagcacaggctgctcaccggagtctactacatccccgcgttaaggaactctatcatcagcgtggggcagctggatgagaacggctcacacgtgttggtcaagcacggagtcatgaggatttgggatcgccgccgtcgccttcttgccaagcgcgcaggtcgcacaaccagtttgctcgccgctcgtcgggacgacgaggcgtggcagtggcacgagcgtttcgggcacctccactttgaggccctgaagcagctcagcgccaaggagatggtgcgaggcctgccatgccttgaccacgtggagcagctctgcgacgtttgcgtggtgacgaagcagaggcggctccccttgccccagcagacgagcttccgagccaaggagcggctcgagctcgtgcacggggacttgtgtggcctagtgacaccggccacaccaggaggacgacgttacttcctactgctcgtcgacgacctctcccgctacatgtgggtgatggtcctcggcagcaagggagaagctgcggacgccatcaggcgcgcggggatgccggccatcttctggggagaggcggtggtaacggccgtctacatcctcaaccgctcgcccacgaaggccctagacggcaggacaccgtatgaggcctggcatgggcgcaagccggcggtctcccacctgcgggtcttcggctgcctcgcgttcgccaaggagcttggccacatcggcaagctcgacgataggagcaccccaggggtgttcatcggctacgcggagggctcgaagacctaccgcattctcgacccggagacacagcgtgtgcgcacggcgcgcgacgtagtgttcgacgaagggcgagggtgggtatgggacaaggcggtggacgatggttcgactctgacgtacgacttcactgtcgagtacgtccacttcgagggagctgggggagtaggcagctcttcctcaccgagcgtgcctaccccagtccccgagcctccaccaactccggcagcgacacattctcgagcttcgacttcggctgcgacgacttcttcgccagcaccaccacagccggcgaccccacgcactccagcaccaacagccactcccctgggcatgtctactccgacgccagctcgtgttgagcgcagcccggtggagttagctactccgctctccacgacggggagcgcatcgacgcgtaccacgacggcgagcagctccggtaccgtacgatggaggaccttctcggcgaccagccggtgccgagactggtgccccgcgacctggaggcgcagttgcaccttgcgtgcgacgacgtcggagatggacgcggttcaggagaactgcacctgggagcttgctaacctccctcgtggtcaccgcgcgatcacccttaaatgggtgttcaagctgaagagggatgaagccggagccatcgtcaagcacaaggctcgcttggtggcacgcggtttcgtgcaacaggaggggatcgactacgacgatgccttcgctcccgtcgcacggatggagtccgtgcgactccttgcgctggctgctcaggaaggctggggcgtccatcacatggacgtcaaatcggcgtttctgaacggcgacttgaaggaggtctacgtacaccagccaccgggatttgtgatccccggcaaggagggcaatgtgctacgcttgcacaaggccctctacggcttgcggcaggcaccgagggcgtggaatgccaagttggattccacgctcaaggggatgggcttcgagcaaagcccgcacgaggcggccatctaccagcggggtaatggaggaaatgccttgctggtgggtgtctacgtcgacgacttgatcaccggcaccaagaatgcggaggtgtaccaggatgactccgggatcacgcttcgacagaccgcatacgccaagcgcgtcgttgagctggctgggctcaccgattgcaacccagctctcactccgatggagagactgaagctgagccgcgatagcacgacggaggaagtggatgctacacagtaccggcgtcttgtggggagccttcgctacctcacccacacacggccggacttggccttctccgtcggctacgtcagtcggttcatgcagcgaccgacaacggagcaccagcaggctgtgaagaggatcatctgctacgttgcggggactctcgaccacggtctctactacccaaggtgtcctggcaaggcacacttcgtcgggtacagcgaccacgccggcgacatcgacaccagcaagagcacgagcgggattctcttcttccttggcgagtgccttgttagctggcagtcagtcaagcagcaggtggtggccctgtctagttgcgaggccgagtacatggcggcctccgccgcttcgacctag

SEQ ID NO: 15249 - DNA, 4806 bp, Oryza sativa
  Clone ID: TFbOSC422301j.C1.o5.fg
atgtccgacgctcggtctcagcgttcggtcgcctcgagcactcggcgtcagcaggacgccgagctcgccgcagcaaaagagcgcaggcgagcaacggctcagaccgctgcagcagcagcgagggcggccagactggcggcagcggagttggcagcagccagggcggaggcggaggcggaggcggcggaagatgcggcacgtgcggcggaggtagaggttgagaccttgcgcagcagcatcaacggctccatcgccggcgacatcaccgctgacagggagcttgaggagctggcaagaggaagggcacgggagcgagcagagcggtgggcagcagcccacctccacggcggcggcggcggcccaagggaccgcgcgcccgccgacgggaacccagacgggcgcgggcgtgccggcggcagcccggagcccgcacgcggccctcgcaggcggcacggctccctctcccctgaccggcgccatggtcaccacggcgtccagacggtggtcagggattttggtcccggcggtgggtggcctaccctcaccaaaaccaactacatcgagtgggccgcggtgatgagggtgaggctccaggtgcggcacatgtgggaggcagtccggtacggtgacgtcgactacgacgaggatcggcgggcactggatgccctcatcgctgcagttccgcccgagatgcagttctcgctttcccagaaacggactgccaaggaggcctgggacgccatcgctgcggcacgcatcggcagcgaccgcgcccgcaagtccacactgcaggcactccgcaaggagtgggagaacctggccttcaagccaggtgaggatgttgatgactttgctctccgtctcaacactctcttgcaaaaaatggtgcagtacggcgacgacacctacgacgaggagagagctgtcgagaagctcttccgctgcgtccctgagaagtacaggcagatcgctcgctcgattgaatctctgctggacctctccacgatgtcgatcgaggaggcgttaggtcgcctcaaggtcgtcgatggtgatgagccacggcctctctcggggcccatcaccatcggcgggaagctccatctcactcgggagcagtgggaggcctctcagggtgacgggaggaagggggagtcatcttccccgacaggcggccgtaagccgcgcaaggcgcggggaggtgtccagctacggtgggcgcgaagacgtgccgagggtggcgcccgcagaggcgcccagggcgttgccaccggcaaccacaagccggcacgagacgacacctgccgcaactgtggcaagcttggccattgggccaaagactgtcgacagccacgacgcggccaggcccacgtcgcacgggtggaggaggaagagtcggctctgctcctagctcacgcaagcatcgagctacctccagcggcaccggccgcagcggctttcctccaccttgatgagccgaaggtactcgtctccctctgcgacggctccagcaacgacaaggctgatgggtggtacctcgacaccggcgccacccatcacatgaccggccgacgggagttcttcaccgagttcgactccagcgtccgaggcaccgtcaagttcggggacgcctccggcgtggagatcaagggtgttggctccgtcaccttcaccgccaagtccggtgagcacaggctgctcaccggagtctactacatccccgcgttgaggaattctatcatcagcgtgggacagctggatgagaacggctcacgcgtgttggtcgaggacggactcatgaggatttgggatcgccgtcgtcgccttcttgccaaggtaaccagaggcactaatcgactctacatcctcagcgcgcaagtcgcacatccagtttgcctcgccgctcgtcgggacgacgaggcgtggcagtggcacgagcgcttcgggcacctccactttgaggccctgaagcagctcagtgccaaggagatggtgcgaggcatgccgtgccttgaccacgtggagcagctctgcgacgtctgcgtggtgacaaagcagcggcggctcccctttccccagcagacgagcttccgagccaaggagcggctcgggctcgtgcacggggacttgtgtggcccagtgacaccggccacaccaggaggacgacgttatttcctgctgctcgtcgacgacctctcccgctacatgtgggtgatggtcctcggcagcaagggagaggctgcggacgccatcaggcatgcgcaggctgcagcagaggcggagtgcggccgcaagctgcgcgtgctgcgcaccgacaacggcggcgaattcacggcggctgaattcgcgtcgtactgcgctgatgagggcattcagcgccactacaccgcgccgtacagcccacagcagaacggcgtcgtcgagcggcgcaaccagacggttgtggggatggctcgggccctcctcaagcagagggggatgccggccatcttctggggggaggcggtggtgacggccgcctacatcctcaaccgctcgcctaccaaggccctcgatggcaggacaccgtacgaggcttggcatgggcgcaagccggcggtctcccacctgcgggtcttcggctgcctcgcgttcgccaaggagcttggccacatcggcaagctcgacgacaggagcaccccaggggtgttcatcggctacgcggagggctcgaaggcctaccgcatcctcgacccggagacacagcgtgtgcgcattacgcgcgatgttgtgttcgacgaagggcgagggtgggtatgggacaaggcggtggatgatggttcgactccgacgtacgacgacttcaccatcgagtacgtccacttcgagggagctgggggagtaggcagctcttcttcaccgagcgtgtctaccccagtccccgagcctccaccgactccaacaccaacacaccctcgggccacgacttcgactacgacgagctcgtcgtcgacaccaccccagccggtgtccccacacgctccagcaccaacagccactcctccgggcacgtctactccgacgccagctcgtgttgagcgcagcccggtggagttcgttactccgctctcccacgacggggagcgcatcgacgcgtaccatgacggcgagcagctacggtaccgtacgatggaggatcttctcggcgaccagccggtgccgggactggtgcctcgcaacctggaggcgcagttgcaccttgcgtgcgacgacggtgagcctcggtcttttgcagaggccgagaaacacgcggcatggcgtgccgcgatgcagtcggagatggacgcggttcaggagaaccgcacctgggagcttgctgacctccctcgtggtcaccgcgcgatcacccttaagtgggtgttcaagctgaagagggatgaagccggagccatcgtcaagcacaaggctcgcttggtggcacgcggtttcgtgcagcaggaggggatcgactacgacgatgccttcgctcccgtggcacggatggagtccgtgcgactccttcttgcgctggctgctcaggaaggctggggcgtccatcacatggacgtcaagtcggcgtttctaaacggcgacttgaaggaggaggtctacgtgcaccagccgccgggatttgtgatccccggcaaggagggcaaggtgctacgcctgcacaaggccctctacggcttgcggcaggcaccgagggcgtggaatgccaagttggattccacgctcaaggggatgggcttcgagcaaagcccgcacgaggcggccatctaccggcggggcaatggaggaaatgccttgctggtgggtgtctacgtcgacgacttagtgatcaccggcaccaaggatgcagaggtcgcggcgttcaaggaggagatgaaggccaccttccagatgagtgatctggggcctctctccttctacctggggatcgaagtgcaccaggacaactccgggatcacgcttcgacagaccgcctacgccaagcgcgtcgttgagctggctgggctcaccgattgcaacccagctctcactccgatggaggagagactgaagctgagccgcgacagcacagcggaggaggtggatgctacacagtaccgacgtcttgtggggagccttcgctacctcacccacacacggccggacttggccttctccgtcggctacgtcagtcggttcatgcagcgaccgacgacggagcaccagcaggctgtgaagaggatcatccgctacgttgcggggactctcgaccacggtctctactacccgaggtgtcctggcaaggcacacttcgtcgggtacagcgacagcgaccacgccggcgacatcgacaccagcaagagcacgagcgggattctcttcttcctcggcgagtgcctcgttagctggcagtcaatcaagcagcaggtggtggccctgtccagctgcgaggccgagtacatggcggcatccgccgcttcgacccaggcgctctggcttgctcgactgcttagtgatctcctcggcagagatactggagcggtggagctcagggtggatagcaagtccgctctggccctggcaaaaaaccccgtttttcacgaacggagcaagcacatccgagtgaggtaccatttcatccgaagctacttggaggaagggagcatcaaggcgagctacatcaacaccaaggaccagcttgcggatttgctcaccaaaccccttgggaggatcaagttccttgagctttgctcccggatcgggatggctcaactctcccacaagacggcgcacaagacttag

SEQ ID NO: 15250 - DNA, 4230 bp, Oryza sativa
  Clone ID: TFbOSC900345j.C1.o5.fg
atgagggtgaggctccaggtgcggcacatgtgggaggcagtccggtacggtgacgtcgactacgacgaggatcggcgggcactggatgccctcatcgctgcagttccgcccgagatgcagttctcgctttcccagaagcggactgccaaggaggcctgggacgccatcgctgcggcacgcatcggcagcgaccgcgcccgcaagtccacactgcaggcactccgcaaggagtgggagaacctggccttcaagccaggtgaggatgttgatgactttgctctccgtctcaacactctcttgcaaaaaatggtgcagtacggcgacgacacctacgacgaggagagagctgtcgagaagctcttccgctgcgtccctgagaagtacaggcagatcgctcgctcgattgaatctctgctggacctctccacgatgtcgatcgaggaggcgttaggtcgcctcaaggtcgtcgatggtgatgagccacggcctctctcggggcccatcaccatcggcgggaagctccatctcactcgggagcagtgggaggcctctcagggtgacgggaggaagggggagtcatcttccccgacaggcggccgtaagccgcgcaaggcgcggggaggtgtccagctacggtgggcgcgaagacgtgccgagggtggcgcccgcagaggcgcccagggcgttgccaccggcaaccacaagccggcacgagacgacacctgccgcaactgtggcaagcttggccattgggccaaagactgtcgacagccacgacgcggccaggcccacgtcgcacgggtggaggaggaagagccggctctgctcctagctcacgcaagcatcgagctacctccagcggcaccggccgcagcggctttcctccaccttgatgagccgaaggtactcgtctccctctgcgacggctccagcaacgacaaggctgatgggtggtacctcgacaccggcgccacccatcacatgaccggccgacgggagttcttcaccgagttcgactccagcgtccgaggcaccgtcaagttcggggacgcctccggcgtggagatcaagggtgttggctccgtcaccttcaccgccaagtccggtgagcacaggctgctcaccggagtctactacatccccgcgttgaggaattctatcatcagcgtgggacagctggatgagaacggctcacgcgtgttggtcgaggacggactcatgaggatttgggatcgccgttgtcgccttcttgccaaggtaaccagaggcactaatcgactctacatcctcagcgcgcaagtcgcacatccagtttgcctcgccgctcgtcgggacgacgaggcgtggcagtggcacgagcgcttcgggcacctccacttcgaggccctgaagcagctcagtgccaaggagatggtgcgaggcatgccgtgccttgaccacgtggagcagctctgcgacgtctgcgtggtgacaaagcagcggcggctcccctttccccagcagacgagcttccgagccaaggagcggctcgggctcgtgcacggggacttgtgtggcccagtgacaccggccacaccaggaggacgacgttatttcctgctgctcgtcgacgacctctcccgctacatgtgggtgatggtcctcggcagcaagggagaggctgcggacgccatcaggcatgcgcaggctgcagcagaggcggagtgcggccgcaagctgcgcgtgctgcgcaccgacaacggcggcgaattcacggcggctgaattcgcgtcgtactgcgctgatgagggcattcagcgccactacaccgcgccgtacagcccacagcagaacggcgtcgtcgagcggcgcaaccagacggttgtggagatggctcgggccctcctcaagcagagggggatgccggccatcttctggggggaggcggtggtgacggccgcctacatcctcaaccgctcgcctaccaaggccctcgatggcaggacaccgtacgaggcttggcatgggcgcaagccggcggtctcccacctgcgggtcttcggctgcctcgcgttcaccaaggagcttggccacatcggcaagctcgacgacaggagcaccccaggggtgttcatcggctacgcggagggctcgaaggcctaccgcatcctcgacccggagacacagcgtgtgcgcattacgcgcgatgttgtgttcgacgaagggcgagggtgggtatgggacaaggcggtggatgatggttcgactccgacgtacgacgacttcaccatcgagtacgtccacttcgagggagctgggggagtaggcagctcttcttcaccgagcgtgtctaccccagtccccgagcctccaccgactccaacaccaacacaccctcgggccacgacttcgactacgacgagctcttcgtcgacaccaccccagccggtgtccccacacgctccagcaccaacagccactcctccgggcacgtctactccgacgccagctcgtgttgagcgcagcccggtggagttcgttactccgctctcccacgacggggagcgcatcgacgcgtaccatgacggcgagcagctacggtaccgtacgatggaggatcttctcggcgaccagccggtgccgggactggtgcctcgcaacctggaggcgcagttgcaccttgcgtgcgacgacggtgagcctcggtcttttgcagaggccgagaaacacgcggcatggcgtgccgcgatgcagtcggagatggacgcggttcaggagaaccgcacctgggagcttgctgacctccctcgtggtcaccgcgcgatcacccttaagtgggtgttcaagctgaagagggatgaagccggagccatcgtcaagcacaaggctcgcttggtggcacgcggtttcgtgcagcaggaggggatcgactacgacgatgccttcgctcccgtggcacggatggagtccgtgcgactccttcttgcgctggctgctcaggaaggctggggcgtccatcacatggacgtcaagtcggcgtttctaaacggcgacttgaaggaggaggtctacgtgcaccagccgccgggatttgtgatccccggcaaggagggcaaggtgctacgcctgcacaaggccctctacggcttgcggcaggcaccgaggacgtggaatgccaagttggattccacgctcaaggggatgggcttcgagcaaagcccgcacgaggcggccatctaccggcggggcaatggaggaaatgccttgctggtgggtgtctacgtcgacgacttagtgatcaccggcaccaaggatgcagaggtcgcggcgttcaaggaggagatgaaggccaccttccagatgagtgatctggggcctctctccttctacctggggatcgaagtgcaccaggacaactccgggatcacgcttcgacagaccgcctacgccaagcgcgtcgttgagctggctgggctcaccgattgcaacccagctctcactccgatggaggagagactgaagctgagccgcgacagcacagcggaggaggtggatgctacacagtaccgacgtcttgtggggagccttcgctacctcacccacacacggccggacttggccttctccgtcggctacgtcagtcggttcatgcagcgaccgacgacggagcaccagcaggctgtgaagaggatcatccgctacgttgcggggactctcgaccacggtctctactacccgaggtgtcctggcaaggcacacttcgtcgggtacagcgacagcgaccacgccggcgacatcgacaccagcaagagcacgagcgggattctcttcttcctcggcgagtgcctcgttagctggcagtcaatcaagcagcaggtggtggccctgtccagctgcgaggccgagtacatggcggcatccgccgcttcgacccaggcgctctggcttgctcgactgcttagtgatctcctcggcagagatactggagcggtggagctcagggtggatagcaagtccgctctggccctggcaaaaaaccccgtttttcacgaacggagcaagcacatccgagtgaggtaccatttcatcagaagctacttggaggaagggagcatcaaggcgagctacatcaacaccaaggaccagcttgcggatttgctcaccaaaccccttgggaggatcaagttccttgagctttgctcccggatcgggatggctcaactctcccacaagacggcgcacaagacttag

SEQ ID NO: 15251 - DNA, 7002 bp, Oryza sativa
  Clone ID: TFbOSC900415j.C1.o7.gm
atgggcaacggagttttcaagaaaactgaagttcttgctgctgttaaacataagaaatctggaatatctggatctacgaattcttacaatgctgtagtgcgtgagaatgcacaacttcgccatgaagtgactgaacagcgtggaatgatacgtgaacagcgtggaatgatacaagaacatcgtggaatgctaaaggcagtatatgagaagcttggaatggacatacctgaggaggtactttcaaggtgggagtcacaaagagaggattctgaattagatgtggactgttctgaggggtctgaagagtatgaaatagaggaagaagatgaggggcagtcaccaaaattccgttctcttgtagtggatgggccgccgccctccggccgacacaacctcgccaccctcgtcggcggcgccggcgccggcgccgcctccgccgggaaggaatgcaacagcaatgcagcatcacggggacagtaccagaatttccatgaaattccaccggatgatgctgattttaataaccttacaatttacttgaagtcagcatcaccgcctgcagctgaactaccatctctgactgatcatgtcaacgaggaggtggccaagctggacagaactgtgcgccgaatcaccgcggtgttggttgatgcagatgaaagggaaatcgctgacgagactatgaagctttggatctctgagctcaagcaagtgacatgggaagctgaggggatacttgaagattacagctatgagttgctccgcagcaccaccgtccaggaagagaaggaaggattgtgtaggaaagaatctaggattagtaggtgcaccagttctttgcttgatccattggaggtctacggccgggaggatgagaaaaaattaataatatcttctttgcttgatgggtgccttacatttaagaagagaagattgaaggaacatgaatatgaaacttgtaaagctggtgctgtaaggcttatttctatagttgccatgggtggaatggggaagacaacactagctaggctcgtctataatgacgcaagggttcaaaatcactttgatatacaagcatgggtttgggtttcagaagtattcgatgaagtcagactaaccaaagcagcaatcgagtcggtcaccgctaaaccctgtgatctgactgagctagagccactccagaggcaattgcacgaggaggtcaaggggagccacatgatcatcactactcgcaacgagaatgtctccacaattgtgcaggcgaagaagttggctggttcacgggagaagtttgtcatagtgcacgacctcattcatgaccttgctaaatcaattgggggtaaagagatccttgtcaaaaagtgttgtggttcatctgttggtggttgcaatactagtgccaataatcatcttcgatatttagctgttcttgttggaacaacgcccttctactcagacaataaattggtgcttgttcagagccagtggtggtataaccttgaaggttgtctgctgcattcaccacacctgaagtatctacgaatcctggatgtatcatcaagtgatcagatcaagctggtggccaattcagggagcggagctgccacgctggatgaaatcaaggacattaacactcttcaagggcagctctgcatcatggatctccagaacatcacacatgacagaatttgggaaccaaggagtgcaaacctgagcaagaaaaaattaactcgcttagaactagtgtggaatcctctgccttcctacaaaagcgtaccccatgatgaggttgtactggaatccctgcagcctcacaactacatccgacaactcgtaataagtggttttagaggattgaacttctgttcatggctaggagaccggtccttgtttagtttacaagaactggagctgtgcaagtgctactacactgatcatctaccaccacttggacaattgccaaacctgaagcagctcaagctgacgagcctgtggaaattgagaagcatagggcctgagttctacggcgattgcgaggccccatttcagtgtcttgagacattggtggtacagaacctggttgcatgggaggaatggtggctacctgaaaaccatccacattgtgtcttccctctccttcgtacgatcgacatcaggggctcacacaagcttgtgcgccttccactgtcaaatctccatgcccttgcagggatcaccgtatcatcgtgcagcaagttagagaccatagttgggctcaaggagcgctgtgaagtgactgctgggaacggtggattgcaagcaggtcagactaacgtgcttccctcccttcgaagggtaaagatcactgcttgcccttcactggaggagcctctgatatcgatgcttcgccggcagacggagatcggcttctcctactgggaacaaagccccagcacctctcccaccgacatcgctgattttggcaagactccatggaaagattctggcaaggacgccgagctcgccgcagcagaagagcgcaggcgagcaacggctcagaccgctgcagcagcagcgagggcggccagactggcggcagcagagttggcagcagccagggcggaggcagaagcagaggcggcggaagatgcggcacgtgcggcggaggtagaggttgagaccttgcgcagcagcatcaacggctccatcgccggcgacatcaccgctgacagggagcttgaggagctggcaagaggaagggcacgggagcgagcagagcggtgggcagcagcccacctccacggcggcggcggcggcccaagggaccgcgcgcccgccgacgggaacccagacgggcgcgggcgtgccggcggcagcccggagcccgcacgcggccctcgcaggcggcacggctccctctcccctgaccggcgccatggtcaccacggcgtccagacggtggtcagggattttggtcccggcggtgggtggcctaccctcaccaaaaccaactacatcgagtgggccgcggtgatgagggtgaggctccaggtgcggcacatgtgggaggcagtccggtacggtgacgtcgactacgacgaggatcggcgggcactggatgccctcatcgctgcagttccgcccgagatgcagttctcgctttcccagaaacggactgccaaggaggcctgggacgccatcgctgcggcacgcatcggcagcgaccgcgcccgcaagtccacactgcaggcactccgcaaggagtgggagaacctggccttcaagccaggtgaggatgttgatgactttgctctccgtctcaacactctcttgcaaaaaatggtgcagtacggcgacgacacctacgacgaggagagagctgtcgagaagctcttccgctgcgtccctgagaagtacaggcagatcgctcgctcgattgaatctctgctggacctctccacgatgtcgatcgaggaggcgttaggtcgcctcaaggtcgtcgatggtgatgagccacggcctctctcggggcccatcaccatcggcgggaagctccatctcactcgggagcagtgggaggcctctcagggtgacgggaggaagggggagtcatcttccccgacaggcggccgtaagccgcgcaaggcgcggggaggtgtccagctacggtgggcgcgaagacgtgccgagggtggcgcccgcagaggcgcccagggcgttgccaccggcaaccacaagccggcacgagacgacacctgccgcaactgtggcaagcttggccattgggccaaagactgtcgacagccacgacgcggccaggcccacgtcgcacgggtggaggaggaagagccggctctgctcctagctcacgcaagcatcgagctacctccagcggcaccggccgcagcggctttcctccaccttgatgagccgaaggtactcgtctccctctgcgacggctccagcaacgacaaggctgatgggtggtacctcgacaccggcgccacccatcacatgaccggccgacgggagttcttcaccgagttcgactccagcgtccgaggcaccgtcaagttcggggacgcctccggcgtggagatcaagggtgttggctccgtcaccttcaccgccaagtccggtgagcacaggctgctcaccggagtctactacatccccgcgttgaggaattctatcatcagcgtgggacagctggatgagaacggctcacgcgtgttggtcgaggacggactcatgaggatttgggatcgccgtcgtcgccttcttgccaagtggcacgagcgcttcgggcacctccactttgaggccctgaagcagctcagtgccaaggagatggtgcgaggcatgccgtgccttgaccacgtggagcagctctgcgacgtctgcgtggtgacaaagcagcggcggctcccctttccccagcagacgagcttccgagccaaggagcggctcgggctcgtgcacggggacttgtgtggcccagtgacaccggccacaccaggaggacgacgttatttcctgctgctcgtcgacgacctctcccgctacatgtgggtgatggtcctcggcagcaagggagaggctgcggacgccatcaggcatgcgcaggctgcagcagaggcggagtgcggccgcaagctgcgcgtgctgcgcaccgacaacggcggcgaattcacggcggctgaattcgcgtcgtactgcgctgatgagggcattcagcgccactacaccgcgccgtacagcccacagcagaacggcgtcgtcgagcggcgcaaccagacggttgtggggatggctcgggccctcctcaagcagagggggatgccggccatcttctggggggaggcggtggtgacggccgcctacatcctcaaccgctcgcctaccaaggccctcgatggcaggacaccgtacgaggcttggcatgggcgcaagccggcggtctcccacctgcgggtcttcggctgcctcgcgttcgccaaggagcttggccacatcggcaagctcgacgacaggagcaccccaggggtgttcatcggctacgcggagggctcgaaggcctaccgcatcctcgacccggagacacagcgtgtgcgcattacgcgcgatgttgtgttcgacgaagggcgagggtgggtatgggacaaggcggtggatgatggttcgactccgacgtacgacgacttcaccatcgatccccgagcctccaccgactccaacaccaacacaccctcgggccacgacttcgactacgacgagctcgtcgtcgacaccaccccagccgtggagttcgttactccgctctcccacgacggggagcgcatcgacgcgtaccatgacggcgagcagctacggtaccgtacgatggaggatcttctcggcgaccagccggtgccgggactggtgcctcgcaacctggaggcgcagttgcaccttgcgtgcgacgacggtgagcctcggtcttttgcagaggccgagaaacacgcggcatggcgtgccgcgatgcagtcggagatggacgcggttcaggagaaccgcacctgggagcttgctgacctccctcgtggtcaccgcgcgatcacccttaagtgggtgttcaagctgaagagggatgaagccggagccatcgtcaagcacaaggctcgcttggtggcacgcggtttcgtgcagcaggaggggatcgactacgacaatgccttcgctcccgtggcacggatggagtccgtgcgactccttcttgcgctggctgctcaggaaggctggggcgtccatcacatggacgtcaagtcggcgtttctaaacggcgacttgaaggaggaggtctacgtgcaccagccgccgggatttgtgatccccggcaaggagggcaaggtgctacgcctgcacaaggccctctacggcttgcggcaggcaccgagggcgtggaatgccaagttggattccacgctcaaggggatgggcttcgagcaaagcccgcacgaggcggccatctaccggcggggcaatggaggaaatgccttgctggtgggtgtctacgtcgacgacttagtgatcaccggcaccaaggatgcagaggtcgcggcgttcaaggaggagatgaaggccaccttccagatgagtgatctggggcctctctccttctacctggggatcgaagtgcaccaggacaactccgggatcacgcttcgacagaccgcctacgccaagcgcgtcgttgagctggctgggctcaccgattgcaacccagctctcactccgatggaggagagactgaagctgagccgcgacagcacagcggaggaggtggatgctacacagtaccgacgtcttgtggggagccttcgctacctcacccacacacggccggacttggccttctccgtcggctacgtcagtcggttcatgcagcgaccgacgacggagcaccagcaggctgtgaagaggatcatccgctacgttgcggggactctcgaccacggtctctactacccgaggtgtcctggcaaggcacacttcgtcgggtacagcgacagcgaccacgccggcgacatcgacaccagcaagagcacgagcgggattctcttcttcctcggcgagtgcctcgttagctggcagtcaatcaagcagcaggtggtggccctgtccagctgcgaggccgagtacatggcggcatccgccgcttcgacccaggcgctctggcttgctcgactgcttagtgatctcctcggcagagatactggagcggtggagctcagggtggatagcaagtccgctctggccctggcaaaaaaccccgtttttcacgaacggagcaagcacatccgagtgaggtaccatttcatccgaagctacttggaggaagggagcatcaaggcgagctacatcaacaccaaggaccagcttgcggatttgctcaccaaaccccttgggaggatcaagttccttgagctttgctcccggatcgggatggctcaactctcccacaagacggcgcacaagacttag

SEQ ID NO: 15252 - DNA, 4326 bp, Oryza sativa
  Clone ID: TFbOSC900422j.C1.o3.fg
atggcggacagactggcggcggtggggggggaaggtcgtcccggcggtgggtggcctaccctcaccaaaaccaactacatcgagtgggccgcggtgatgagggtgaggctccaggtgcggcacatgtgggaggcagtccggtacggtgacgtcgactacgacgaggatcggcgggcactggatgccctcatcgctgcagttccgcccgagatgcagttctcgctttcccagaagcggactgccaaggaggcctgggacgccatcgctgcggcacgcatcggcagcgaccgcgcccgcaagtccacactgcaggcactccgcaaggagtgggagaacctggccttcaagccaggtgaggatgttgatgactttgctctccgtctcaacactctcttgcaaaaaatggtgcagtacggcgacgacacctacgacgaggagagagctgtcgagaagctcttccgctgcgtccctgagaagtacaggcagatcgctcgctcgattgaatctctgctggacctctccacgatgtcgatcgaggaggcgttaggtcgcctcaaggtcgtcgatggtgatgagccacggcctctctcggggcccatcaccatcggcgggaagctccatctcactcgggagcagtgggaggcctctcagggtgacgggaggaagggggagtcatcttccccgacaggcggccgtaagccgcgcaaggcgcggggaggtgtccagctacggtgggcgcgaagacgtgccgagggtggcgcccgcagaggcgcccagggcgttgccaccggcaaccacaagccggcacgagacgacacctgccgcaactgtggcaagcttggccattgggccaaagactgtcgacagccacgacgcggccaggcccacgtcgcacgggtggaggaggaagagccggctctgctcctagctcacgcaagcatcgagctacctccagcggcaccggccgcagcggctttcctccaccttgatgagccgaaggtactcgtctccctctgcgacggctccagcaacgacaaggctgatgggtggtacctcgacaccggcgccacccatcacatgaccggccgacgggagttcttcaccgagttcgactccagcgtccgaggcaccgtcaagttcggggacgcctccggcgtggagatcaagggtgttggctccgtcaccttcaccgccaagtccggtgagcacaggctgctcaccggagtctactacatccccgcgttgaggaattctatcatcagcgtgggacagctggatgagaacggctcacgcgtgttggtcgaggacggactcatgaggatttgggatcgccgttgtcgccttcttgccaaggtaaccagaggcactaatcgactctacatcctcagcgcgcaagtcgcacatccagtttgcctcgccgctcgtcgggacgacgaggcgtggcagtggcacgagcgcttcgggcacctccacttcgaggccctgaagcagctcagtgccaaggagatggtgcgaggcatgccgtgccttgaccacgtggagcagctctgcgacgtctgcgtggtgacaaagcagcggcggctcccctttccccagcagacgagcttccgagccaaggagcggctcgggctcgtgcacggggacttgtgtggcccagtgacaccggccacaccaggaggacgacgttatttcctgctgctcgtcgacgacctctcccgctacatgtgggtgatggtcctcggcagcaagggagaggctgcggacgccatcaggcatgcgcaggctgcagcagaggcggagtgcggccgcaagctgcgcgtgctgcgcaccgacaacggcggcgaattcacggcggctgaattcgcgtcgtactgcgctgatgagggcattcagcgccactacaccgcgccgtacagcccacagcagaacggcgtcgtcgagcggcgcaaccagacggttgtggagatggctcgggccctcctcaagcagagggggatgccggccatcttctggggggaggcggtggtgacggccgcctacatcctcaaccgctcgcctaccaaggccctcgatggcaggacaccgtacgaggcttggcatgggcgcaagccggcggtctcccacctgcgggtcttcggctgcctcgcgttcaccaaggagcttggccacatcggcaagctcgacgacaggagcaccccaggggtgttcatcggctacgcggagggctcgaaggcctaccgcatcctcgacccggagacacagcgtgtgcgcattacgcgcgatgttgtgttcgacgaagggcgagggtgggtatgggacaaggcggtggatgatggttcgactccgacgtacgacgacttcaccatcgagtacgtccacttcgagggagctgggggagtaggcagctcttcttcaccgagcgtgtctaccccagtccccgagcctccaccgactccaacaccaacacaccctcgggccacgacttcgactacgacgagctcttcgtcgacaccaccccagccggtgtccccacacgctccagcaccaacagccactcctccgggcacgtctactccgacgccagctcgtgttgagcgcagcccggtggagttcgttactccgctctcccacgacggggagcgcatcgacgcgtaccatgacggcgagcagctacggtaccgtacgatggaggatcttctcggcgaccagccggtgccgggactggtgcctcgcaacctggaggcgcagttgcaccttgcgtgcgacgacggtgagcctcggtcttttgcagaggccgagaaacacgcggcatggcgtgccgcgatgcagtcggagatggacgcggttcaggagaaccgcacctgggagcttgctgacctccctcgtggtcaccgcgcgatcacccttaagtgggtgttcaagctgaagagggatgaagccggagccatcgtcaagcacaaggctcgcttggtggcacgcggtttcgtgcagcaggaggggatcgactacgacgatgccttcgctcccgtggcacggatggagtccgtgcgactccttcttgcgctggctgctcaggaaggctggggcgtccatcacatggacgtcaagtcggcgtttctaaacggcgacttgaaggaggaggtctacgtgcaccagccgccgggatttgtgatccccggcaaggagggcaaggtgctacgcctgcacaaggccctctacggcttgcggcaggcaccgaggacgtggaatgccaagttggattccacgctcaaggggatgggcttcgagcaaagcccgcacgaggcggccatctaccggcggggcaatggaggaaatgccttgctggtgggtgtctacgtcgacgacttagtgatcaccggcaccaaggatgcagaggtcgcggcgttcaaggaggagatgaaggccaccttccagatgagtgatctggggcctctctccttctacctggggatcgaagtgcaccaggacaactccgggatcacgcttcgacagaccgcctacgccaagcgcgtcgttgagctggctgggctcaccgattgcaacccagctctcactccgatggaggagagactgaagctgagccgcgacagcacagcggaggaggtggatgctacacagtaccgacgtcttgtggggagccttcgctacctcacccacacacggccggacttggccttctccgtcggctacgtcagtcggttcatgcagcgaccgacgacggagcaccagcaggctgtgaagaggatcatccgctacgttgcggggactctcgaccacggtctctactacccgaggtgtcctggcaaggcacacttcgtcgggtacagcgacagcgaccacgccggcgacatcgacaccagcaagagcacgagcgggattctcttcttcctcggcgagtgcctcgttagctggcagtcaatcaagcagcaggtggtggccctgtccagctgcgaggccgagtacatggcggcatccgccgcttcgacccaggcgctctggcttgctcgactgcttagtgatctcctcggcagagatactggagcggtggagctcagggtggatagcaagtccgctctggccctggcaaaaaaccccgtttttcacgaacggagcaagcacatccgagtgaggtaccatttcatcagaagctacttggaggaagggagcatcaaggcgagctacatcaacaccaaggaccagcttgcggatttgctcaccaaaccccttgggaggatcaagttccttgagctttgctcccggatcgggatggctcaactctcccacaagacggcgcacaagacttag

SEQ ID NO: 15253 - DNA, 1995 bp, Oryza sativa
  Clone ID: TFbOSC400177j.C1.o42.np
atggatgaagtcgttgcgacgatggatatctctgaggcaaatgaaggctacgcgagctgcggctcggtaatcgagatgtctaggcaaatgaagactacacgggtcggtgcccgggctcaaccctggcctgcctgtcccgggataccggccgtaggcagggttgggtcggtacttttgttcacggctaggatgggtgaagggttatgtcacatctttacgacgggttccaaggccatggaatgcggagtaaagatgtgtcttgtgggttggcctgggttggcttgggacgagctggaacccaggtcgggttgccagttcggtccgaatcatcgtaggccttgggttaaggcagtactagatggtcagctttgcgaagaagaagatgtcgtcagtcgtttgccgaagctccggaagactgcaggatccgctagcgaagcgaaggaagcagtgaagccagctgtgaagcaggacaaaagacttagatctgttaaggtcctatccttagtttctaatctgtctctcccctttgttttccctctctccctctccaaacctttgcaacagatggctgacaatgagaaaggcaataaggtcagaagtcaggacattggtacctcaagctcccgagtgaatgaagcaccagacaccagttgtgtgacactagtccaacacctgattaaccagaaccgattgcttatagagatactacagcagcaccagacgccaattctgaacttgagtcaaatacaacctcaagtacagttggaggcagtccaagcactcacaccacaagtcagcgcaccgccaacatcccagaaggcccctcatgccatgccacatgttgacccaaaagaagcaagtatcatctgttttatgtgtgatgagcaagggcactacgcaaggaactgtcctcagcagaaaagaaaagcaccaatgcgaaccgaagatgaagtccgtaagatgatcattaccagcacagaatggcctccaccaggaatgacaaaacatcagagaagaaattccttccgaggtgcacaacagttgacagagcatcttttagctaatggaggtagagtgtctgatagtgaagattcagatcaagtctcctcagatgatgaagatgcgaagtctccccaagattttaaccagaataaaatagaacttaaggcatgctctcgttgtggagaaatcggtcatgttgccagctcgtgtgcctttacatgcgttcgttgtgaggaagaccatccacccgataggtgccctatgagcaggatcacttgtttcttgtgtgaaggaactgatcatgtaccaaaagattgtcaactcagttttctgctgacgaagaagatggccgaccaacacgcccattctaatggagagaagcatcaaggaagcacaaatcctcgccaagattacagtttcagcctaactccagtgccaggacagaggaaacaaaatgagaaaagaaaatgccgagtccgggaagatatccgttgcttcaattgtcaaggaatgggtcatttcgccgacaagtgcccaaaaccgagaaacatagctgccggcacgtcagtccacgcaactccctgcaatcagcagcttgctcctcaacgaattgtcatccatgcatcccgaagcagtcctttagcccgcgttgcaacaactccaattccaatgagtgcactaccacaaggtgtcaatgctcaatttcagccccagccaccagctgacaagacagaggccagtatctgcgttgtacctttggaagttccaatacagcagctgagaaatcaagtacaagatgaagaacccgagtgtaagaaagttattgtttgttacaactgcagtgaagaagggcattactccaaaaactgtccccaaccaaggcaaaatcgacctccacattaccgccaatttacacgaagcagacattccaatcgtattgtggtcacgggagcaaacgccgtacccgtaaggcctcgtgttaatcagaaccca

SEQ ID NO: 15254 - DNA, 1961 bp, Oryza sativa
  Clone ID: TFbOSC407089j.C1.o1.np
atgaataaagtcgttgcgacgatgaatattctgaggcaaatgaaggctacgcgagctgcggctcggtaatcgagatgtctaggcaaatgaagactacacgggtcggtgcccgggctcaaccctggcctgcctgtcccgggataccggccgtaggcagggttgggtcggtacttttgttcacggctaggatgggtgaagggttatgtcacatctttacgacgggttccaaggccatggaatgcggagtaaagatgtgtcttgtgggttggcctgggttggcttgggacgagctggaacccaggtcgggttgccagttcggtccgaatcatcgtaggccttgggttaaggcagtactagttggtcagctttgtgaagaagatgtcgtcagttgtttgccgaagctccggaagactgcaggatccgctagtgaagtgaaggaagcagtgaagccagctgtgaaggacagcaaaagacttagatctgttaaggtcctatccttagtttctaatctgtctctcccctttgttttccctctctccctctccaaacctttgcaacagatggctgacaatgagaaaggcaataaggtcagaagtcaggacattggtacctcaagctcccgagtgaatgaagcaccagacaccagttgtgtgacactagtccaacacctgattaaccagaaccgattgcttatagagatactacagcagcaccagacgccaattctgaacttgagtcaaatacaacctcaagtacagttggaggcagtccaagcactcacaccacaagtcagcgcaccgccaacatcccagaaggcccctcatgccatgccacatgttgacccaaaagaagcaagtatcatctgttttatgtgtgatgagcaagggcactatgcaaggaactgtccccagcagaaaagaaaagcaccactgcgaaccgaagatgaagtccgtaagatgatcattaccagcacagaatggcctccaccaggaatgacaaaacatcagagaagaaattccttccgaggtgcacaatagttgacagagcatcttttagctaatggaggtagagtgtctgatagtgaagattcagatcaagtctcctcagatgatgaaaataaaatagaacttaaggcatgctctcgttgtggagaaatcggtcatgttgccagctcgtgtgcctttacatgcgttcgttgtgaggaagaccatccacccgataggtgccctatgagcaggatcacttgtttcttgtgtgaaggaactgatcatgtaccaaaagattgtcaactcagttttctgctgacgaagaagatggccgaccaacacgcccattctaatggagagaagcatcaaggaagcacaaatcctcgccaagattacagtttcagcctaactccagtgccaggacagaggaaacaaaatgagaaaagaaaatgccgagtccgggaagatatccgttgcttcaattgtcaaggaatgggtcatttcgccgacaagtgcccaaaaccgagaaacatagctgccggcacgtcagtccacgcaactccctgcaatcagcagcttgctcctcaacgaattgtcatccatgcatcccgaagcagtcctttagcccgcgttgcaacaactccaattccaatgagtgcactaccacaaggtgtcaatgctcaatttcacccccagccaccagctgacaagacagaggccagtatctgcgttgtacctttggaagttccaatacagcagctgagaaatcaagtacaagatgaagaacccgagtgtaagaaagttattgtttgttacaactgcagtgaagaagggcattactccaaaaactgtccccaaccaaggcaaaatcgacctccacattaccgccaatttacacgaagcagacattccaatcgtattgtggtcactggagcaaacgccgtacccgtaaggcctcgtgttaatcaggaccca

SEQ ID NO: 15255 - DNA, 1902 bp, Oryza sativa
  Clone ID: TFbOSC10729j.C1.o1.np
atgggggtcattggggagtccatgcctctggttgtagaggggggggattctgatccaggtatggtgcactgtggtgagttgtgttttgcaaggggtactgttacagttcctttccaaggtaccgtggtggcattgaggcgcatggagacatgttttggagctgtgtcttgtgggtacagtgttgtatatttgctgtgtagcttgttgagtatgtcatatgctcattcttgcaatattcattcatcagaggaggagtacttcagtgaagaaattccgggcgtgacaagttggtatcagagccatgttgaccttaggacaagccaaatgatgtcgccccatccgccggaaagattgatcgatgtggtaggattcgtcagggggctgagaatgatggcatttgaagtaggctacgacgttgcccctgagtatcgtcagattccccatgaccccaacgaggagcaatgtcgtgttcgcgtgacgttgactagtgatcgtgaagaccttccgtcaataaagtttgaagctgggggaaaaaagtatagtcatgcttgtcaggaggcagccttggtggccattggagagctacgtcatcgctttgatgaggagttagagtcatcagctttttagtatcatccacacaagccacatggtcaagactatggagttcacaactaccctgaagatgaagatagcaccactctgaagcatgcggtgtatatgcttagcgccatggatgcaataggcgtggagcgggagaaagcagctcatgataaggaaaactagaaccatggcaagatttacaagctggagagcaaggtgtaccgtctgcagaaggaactggccgagcttaagggagaagcacaaccgccagcacccaagcttcgcctcaccgcaaggaagagaacccgtcctccacgtcatatccagttggcttcgaagactcgtgtggtgggagatgctgtgcctgatcatgctgaacctgtcatccatatggtgaacacccgcactgaaagtgaagtggtcacaatgaagaagatcccacccttgcccaagttttggctcagcaaactcagtttgattaatctactagtgcagcaagcgcagaaccagcaggcaaataacaacaatcaaccaccacctccacagaacaagttggcagattttctacgtgtcagagcacctaccttctcaagcaccactaacccagtagaggcaggtgattggctgcatgctgttgaaaagaaagctgcgggaaagcctatcacttggcgggagtttactgctgctttcaagaagacacatataccatcaggtgttgtggcacttaagaagagagagttcagcgcactcaatcagggatcccgttctgtcatagagtacctccatgactttaatcgcctagctcgttatgccccagaggatgttcgcactgatagagaacgtcaggagaagtttttagagggactgaatgatgagttgtcttatgcattactggctatggaataacgggatttccagcagttggtggacaaggcgattcgccaagaaaacatgtacgataggatggaacagaagaagcttgctcgccctcaatgccagttctacaacaacaacactggtaatcgcagcaacaacaatcgtaatgtggtcactcgtccagtagcaactccaactcagaatcagcctgtcaggaaggaacagggaagcaagctaggggtgtgcttcaattgtggtgatccaggacattatgctaataagtgtccaaagcctcggcgtgtgaagactgctcctgtccagaacaactccaatgctccagcaccgaaggctcgtgttaatcacgttacagctgcagaagcccagatcgacctgcaggcatgcaagaatgaagttctcagtgacagt

SEQ ID NO: 15256 - DNA, 5850 bp, Oryza sativa
  Clone ID: TFbOSC417563j.C1.o1.fg
atggccaagaaccccaaggcggccaagaaccgccgccccacgacgcggagacctcgcgccgccgccgccgccgccaccgcctccgcctccgcggacatcgaggacctggcgccgccgtccgggtgcagggcagcagtggggctcaccacggccgccgcggcggtgcgcgcggagctgctgcggtggtacgacgccaaccggcgcgacctgccatggcggcgcgccgcggagccggcggggagcgggagcgggagcgggcgcggcgaggagaagagggcgtacgcggtgtgggtgtcggaggtgatgctgcagcagacgcgggtgcccgtggtggtcgactactactcccggtggatggcccgctggcccaccgtggacagcctcgccgctgccacgcaggaggaggtgaacgagatgtgggcggggctcgggtattaccggagggctcgatttcttctcgagggagcaaagcaaattgttgaaaaaggcgagttccctcgcacagcatcagcactccgtgaagttcgtggcattggggattacacagcaggagccattgcttccatagccttcaatgaggttgtccctgttgtggatggaaatgtccgagttatcagcaggctttacgctattcctgataacccaaaagaatcctcaactgtgaagagattctgcactcggcgtcagcaggacgccgagctcgccgcagcagaagagcgcaggcgagcaacggctcggaccggtgcagcagcagcgagggcggccagactggcggcagcggagttggcagcagccagggcggaggcggaggcggaggcggcggaagatgcggcacgtgcggcggaggtagaggttgagaccttgcgcagcagcatcaacggctccatcgccggcgacatcaccgccgacagggagcttgaggagctggcaagaggaagggcacgggagcgagcagagcggtgggtagcagcccacctccatggcggcggcggcggcccaagggaccgcgcgcccgccgacgggaacccaaacgggcgcgagcgtgctggcggtagcccggagcccgcacgcggccctcgcaggcagcacggctctctctcccctgaccggcgccatggtcaccacggcgtccagacggtggtcagggactttggtcccggcggtgggtggcctaccctcaccaaaaccaactacatcgagtgggccgcggtgatgagggtgaggctccaggtgcggcatgtgggaggcagtccgttctcgctttcccagaagcggactgccaaggaggcctgggacgccatcgctgcggcacgcatcggcagcgaccgcgcccgcaagtccacactgcaggcactccgcaaggagtgggagaacctggccttcaagccaggtgaggatgttgatgactttgctctccgtctcaacactctcttgcagaaaatggtgcagtacggtgacgacacctacgacgaggagagagctgtcgagaagctcttccgctgcgtccctgagaagtacaggcagatcgctcgctcgatcgaatctctgttggacctctccacgatgtcgatcgaggaggcgttaggtcgcctcaaggtcgtcgatggtgatgagccacagcctctctcggggcccatcaccatcggcgggaagctccatctcactcgggagcagtgggaggcctctcaaggtgacaggaggaagggggagtcatcttccccgacaggcggccgtaagccgcgcaaggcgcggggaggtgtccagctacgaggtgcccagggcgttgccaccggcaaccacaagccggcacgagacgacgcctgccgcaactgtggcaagcttggccattgggccaaagactgtcaacagccacgacgtggccaggcccacgtcgcacgggtggaggaagagccggctctgctcctggctcacgcaagcatcgagctacctccagcggcaccggccgcagcggctttcctccaccttgatgagccgaaggtactcgtctccctctgcaacggctccagcaacgacaaggctgatgggtggtacctcgacaccggcgccacccatcacatgaccggccgacgggagttcttcaccgagttcgactctagcgtccgaggctccgtcaagttcggggacgcctccggcgtggagatcaagggtgttggctccgtcaccttcaccgccaagtccggtgagcacaggctgctcactggagtctactacatccccgcattgaggaattctatcatcagcgtgggacagctggatgagaacggctcacgcgtgatggtcgaggacggactcatgaggatttgggatcgccgtcgtcgccttcttgccaaggtaaccagaggcactaatcgactctacatcctcagcgcgcaggtcgcacaaccagtttgcctcgccgctcgtcgggacgacgaggcgtggcagtggcacgagcgcttcgggcacctccacttcgaggccctgaagcagctcagtgccaaggagatggtgcgaggcatgccgtgccttgaccacgtggagcagctctgcgacgtctgcgtggtgacgaagcagcggcggctcccctttccccagcagacgagcttccgagccaaaaagcggctcgagctcgtgcacgaggacttgtgtggcccagtgacaccggccacaccaggaggacgacgttacttcctactgctcgtcgacgacctctcccgctacatgtgggtgatggtcctcggcagcaagggagaggctgcggacgccatcaggcatgcgcaggctgctgcagaggcagagtgcggccgcaagctgcgcgtgctgcgcaccgacaacggcggcgaattcacagcggctgaattcgcgtcgtactgcgctgatgagggcattcagcgccactacaccacgccgtacagcccgcagcagaacggcgtcgtcgagcggcgcaaccagacggttgtggggatggctcgggccctcctcaagcagagggggatgccggccatcttctggggggaggtggtggtgacggccgcctacatcctcaaccgctcgcctaccaaggccctcgatggcaggacaccgtacgaggcttggcatgggcgcaagccggcggtctcccacctgcgggtcttcggctgcctcgcgttcgctaaggagcttggccacatcggcaagctcgacgacaggagcaccccaggggtgttcatcggctatgcagagggctcgaaggcctaccgcatcctcgacccggagacacagcgtgtgcgcactgcgcgtgacgttgtgttcgatgaagggcgagggtgggtatgggacaaggcggtggacgatggttcgattccgacgtacgacgacttcaccgtcgagtacgtccacttcgagggagctgggggagtaggcagctcttcttcacctagcgtgtctaccctagcccctgaatctccaccgactccaacaccaacacaccctcgggccacgacttcgactacgacgagctcttcgtcgacaccaccccagccagtgactccacatgctccagtaccaacagccactcctccaagcacgtctactctgacgccagctcgtgttgagcgtagcccggtggagttcgctactccgctctcccacgacggggagcgcatcgacgcgtacaacgacggcgagcagctacggtaccgtacgatggaggatcttctcggcgaccagccggtgccgggactggtgcctcgcgacctagaggcgcagttgcaccttgcgtgcgacgacggtgagcctcggtcttttgcagaggccgagaaacacgcggcatggcgtgccgcgatgcagtcggagatggacgcggttcaggagaaccgcacctgggagcttgctgacctccctcgtggtcaccgcgcgatcacccttaagtgggtgttcaagctaaagagggatgaagccggagccatcatcaagcacaaggctcgcttggtggcacgcggtttcgtgcagcaggaggggatcgactacgacgatgccttcgctcccgtggcacggatggagtccgtgcgactccttcttgcgctggctgctcaggaaggctggggcgtccatcacatggacgtcaagtcggcgtttctaaacggcgacttgaaggaggaggtctacgtgcaccagccgccgggatttgtgatccccggcaaggagggcaaggtgctacgcctgcacaaggccctctacggcttgcagcaggcaccgagggcgtggaatgccaagttggattccacgctcaaggggatgggcttcgagcaaagcccgcacgaggcggccatctaccggcggggcaatggaggaaatgccttgctggtgggtgtctacgtcgacgacttagtgatcaccggcaccaaggatgcggaggtcgcggcgttcaaggaggagatgaaggccaccttccagatgagtgatcaggggcctctctccttctacctggggatcgaagtgcacaaggacaactccgggatcacgcttcgacagaccgcctacgccaagcgcgtcgttgagctggctgggctcaccgattgcaacccagctctcactccgatggaggagagactgaagctgagccgcgacagcacggcggaggaggtggatgctacacagtaccgacgtcttgtggggagccttcgctacctcacccacacacggccggacttggccttctccgtcggctacgtcagtcggttcatgcagcgaccgacgacggagcaccagcaggctgtgaagaggatcatccgctacgttgcggggactctcgaccacggtctctactacccaaggtgtcctggcaaggcacacttcgtcgggtacagcgacagcgaccacgccggcgacatcgacaccagcaagagcacgagcgggattctcttcttcctcggcaagtgcctcgttagctggcagtcggtcaagcagcaggtggtggccctgtccagctgcgaggccgagtacatggcggcctccgccgcttcgacccaggcgctctggcttgctcgactgcttagtgatctcctcggcagagacactggaacggtggagctcagggtggatagcaagtctgctctagccctggcaaaaaaccccgttttcacgaacggagcaagcacatccgggcagctcactggtgaactggtcgacccttctaggccaggagacttcaaccaagcaattatggaactaggagcaacactctgcagaaagacgaagcccggttgctcccagtgccctgtctccaaccactgccaagcactcacactttccaaccaaagtgcttccgtaaaagttacagactacccacgagtggttccaaaagccaagccacggtctgattttgctgctgtttgtgttgttcaaatcaatgataatctctttctattgatcaagaggccagaagagggcctgctcgctgggctctgggagttcccatctgttcttgtgagcgaagagaagactgatgtgctgaataggagaaaagagatggacaaatatttgaagcaggtccttagcatagatgttaaaaggagatccagtgtgatcctcagggaagatgttggccaacatgttcacattttctctcacattcgcctgacgatgtttgttgagctgatgattttgaacctcaaagatgatggggataaattatgcatggagggacaagataacagcaaactgagattcattgacgaaaatgcagtcgactcaataggattgatatcagggatccggaaggtgtacaacatggtcaaggccttcaaggagaagaggccgaaagagcagagccaagtaccatcgaggaaaaggagtagacggctgaagtag

SEQ ID NO: 15257 - DNA, 1411 bp, Oryza sativa
  Clone ID: TFbOSC900136j.C1.o9.np
atgtcatggcacagggctggtgtcctgctgctagggggctcaatcctgcctgcctgtcccgggggttccggccgtaggtggggttgggtcggtactcttgtttatggctaggatgggttgggaactatgtcacgtcttccgtccgtataccgtggtgatgtttaacagagaaaaaggaaagaatgtcagagggtatgcctccagtaactcaagttttcaactcaatccaccactggcctcaagagagttaaccagggcacacccttggtccattccaagcatgctgcttagttcccagctaccattggttggaagtcaagaccaaaatcagtatgtgtttgatcgagcatttgccacccagatcaatgagcttccaatgccagaagagcatgtccccttttgtcatgattgtagagaataaggacactatgccttgaattgtccatgggtatatgccaaagaagccccttcctttggtttaacagggcagacatcgctaaaccagcctcctcgcaccaagtcaagcttgcagcctagtgtgcaaagtagagagcccaatggagagaatccattgaatcccgggaattgctttcctcctagcctttcgtaccacgtggggtcacgtactaagcaagccaaaggcaagaagagtaagaatcagaagagaaaagcaccgatgcgaactgaagaagaagtacgtaagatgactattaccagcaccgaatggcctccagcagggataactattcctagacgtcaaagaggaaataccttccgaggtgcacgacagttgacccagcacctcctaagccatggtggcagagtatctgatagtgaagggtcagatcaagtctcctcggatgttgaagatgagtctccccgacatctcggcgaggaagagatggaatcaaaggcatgcacccgttgtggagaaattggacacattgctagcaggtgtctcacactctgccctcattgtgaagaagaccatccaccaggtgaatgtcccacccgcaaggtcacatgttttctgtgcgaaggtaccaaccatgtgcccaaggattgccaactcagtgtgttgttgaccaagaccgcagaaatccaacgaacaaccctacgattgtctcatcagctagtcagctccaacagcaacctcgacgatatcatccacagcaccaatgctcctcctgctgcacctgactctgcagtaaatcatagcaataataccttcaacaccaaccattctctgcaccgacggcctcagcaaagaattgtcgtcgatggaagaagttgtgtctctccccgacctactccaggccgagcgaagggcaatcaatctcaggagtgcgataccaagcagaagaccgttatctgcttcaaatagcaatcagaaggaagcttctcctgtgaa

SEQ ID NO: 15258 - DNA, 5976 bp, Oryza sativa
  Clone ID: TFbOSC1745j.C1.o15.fg
atgaagagtggcaagtccaaattcgccgttgccaacatcacctcaactgcatggagagggagaaggcagggaggccaacgagctcctccaagtctaaatatgccgtcgacgacaccacctccaccacagtcgtcgctgccaccaagcacaggagagaagcaagatggcaactctgatgttgagggcaatctcgaagctgtctcaccgcttgctcagacgacgcatgccaccggcttcggtgccaagatcaacgacaacgacggccaccccgctgcatctagagaaggagaggggagaaggggaagaaggccaccggtcgcatctgcgagggaggctgccatcctcaaaaccaaatggtgttgcgaggagggaggagcgaggcgaggactggatgccgcctggggatcacgaggaagaaattatggtttgtttggtttcactatgaatgactacctgtcagttggcactgtgatctcttttacgacaataataaattttggacgtgtcatgatggcccttgcagtagatgtctctcgttttgaaggagtgccgatggcccctccagacccaattctcggggtttcagaagcatttaaggcagatcaaaatgatctgaagctcaaccttggtgttggtgcctatagaacagaagagttacagccttatgtcctcaatgtggtcaagaaggctgaaactcttatgttggagaaaggagaaaacaaggagtatctgccaattgaaggcttagctgcatttaacaaagcaactgcagaactattgtttggagctgataatccagtactcaagcaaggacgtgttgctactcttcagtctctctcaggaaccgggtcgctgcgccttgctgcagcatttatacaaagatatttccctgaagcaaaagtactgatatcatctcccacttggggcaatcacaagaacattttcaatgatgcaaaggtaccttggtcagagtaccgttattacgaccccaagactgttggcttggattttgagggaatgatagctgacatacaggctgccccagatggatcttttgttctgctgcatggttgcgctcacaacccaactggaatagacccaactccggaacaatgggagaaaattgcagatgtcattcaagagaagaaacacatgcctttctttgatgttgcatatcagggttttgccagtggaagccttgatgaagatgcatcttctgtcaggctttttgttcaacggggactggaagtgtttgttgcgcagtcttatagcaaaaaccttggtttatatgcagaaagaattggagcaataaatgttgtctgctcaacacctgaagtcgcaaacagggtgaagagccagctgaaacgattggcacggcccatgtattcgaatccccctattcatggtgctaggatagttgccaacgttgttggggatccaaccatgtttggtgaatggaaacaggagatggaagaaatggcagggcgtatcaagaatgtaagacagaagctttatgatagtttgtctgcaaaggacgacagtggcaaggactggtctttcattctgaggcagataggcatgttctcctacacgggcttgaacaaaactcagagtgataatatgaccgacaaatggcacatatacatgacaaaggatgggagaatttcgttggctggattgtccctggctaaatgcgagtacctagctgacgccatcatcgactccttccataacggcccatctagtcatgtatatgtaaataaggatagcaatacagagaaggtgaagcttccagagaaaattggctgccaaaaaacttcatggtatcagagccgaccggccggcggcaggcgacggttgaaccctagctggccggaggcgtggaggcttgagcagggtagagagtgcgcatcagcagcggcgcggaagagcggggccagcgcggcgcgtcgaggaggaagaagccgagcagctgcaggtgcggagctgctgctgctgcttggggctgagctcgcaggaagaagtggctcttgctctgtagtggcggggtcacagcacagtgaagactttgcatctcttgtggaaaatcaaggaatagaacaagtgatgggtaaattggtggacatgctagcgaaaaaatttagtgaggcctcaactacaagcaatgcaattatccctcatactgaatcaatactgaagattgagttaatgcaaaacgaaatcaagttggagggtgtcaaaaattatttgagttggtcaaggagggcattactaatactaaaaacaaaggggttagaaggatatgtcacaggagaagtgaaggagcctgagaacacatcaagtgtagaatggaagacttggagcactaccaactctttagtggtggcatggttgttgacttcattaatcccagctattgctacaactgttgagactatctctagtgcgagggagatgtggaaaactcttactaaactatactcaggagaaggtaatgtgatgctaatggtggaggcacaagagaagataagtgctttgagacagggggagcgctctgtggcagaatatgtcgtagagttgaagagtttgtggtccgatttagatcattatgatcctcttggattagagcactctgattgcatagcaaaaatgaagaaatgggttgagcgtagaagggttattgagttcttgaagggtctaaatccagagttcgaaggaagaagagatgcaatgtttcaccaaaccactcttcctaccttagatgaggccattgcagctatggcacaggaggagcttaagaagaaagtattgcctagtgccgcaccatgttcaccaagtcccacctatgcaattgtacaaggtaaagagactagagagtgcttcaattgtggtgaaatgggacaccttatgcgtgattgtcatgctccacgcaagcctacttatgggagaggaagaggtgttgatagaggtggaacaagaggtggaagaggctatgctggtaggagcaatagaggaagaggttatggatatagaggtgattacaaggctaatgcagttactctagaagagggttcttccgggactacacctgacaatgttgccaactttgctcattctacttcaggtagttttaatcaagcatttatgtctatgaacacttctcattcaagttggatattagactcaggtgcatccaggcatgtcactggcatgagtggagaatttacatcatataaaccatattcatttgcacacaaagagaccattcaaactgctgatggcacatcatgtcaggagagaagaacagggaagaaacttgggattagtatcaggcgtgatggactttggtacttggacagaagagggacaaatgaggatgtgtgtgcactaatggcttcaacaagtaaagaagtgactgagtttattagaactgataatggaggggagtatatgaatagtgaattcggtcactttctttctttagaaggaatattacatcagacttcttgtcctgatactcctccacagaatggagtggctgaaagaaaaaatcgccatcttttggagatagctcggtcactaatgtatactatgaatgtacctaaatttctatggagtgaggcagtaatgacggcagcttatctcatcaaccgcacaccatcaagaatacttggaatgaagacaccatatgagatgatatttgggaagaatgaatttgtggttccaccgagggtgtttggctgcacttgttttgttagagatcatagaccatctattggaaaacttgatcctcgagctgttaaatgcatctttataggctattcatccaaccagaaggggtataagtgttggagtccatcagaacggcggacatttgtaagtatggatgttacgtttagggaatctgttccattctatggtgagaaaacagatataagctctttatttgttgatcttgatgatttaactagaggtgaccatgatcaacaaaaggaaggtgaaatcttgggtctcaaggagaatgaacaatcaaagggaaagattatggttggtgaaattccatgtgctataggtgatcctgtacaagaacaagaatggagaaagccacatgaagaggaaaatcttcaagtttacacaaggagaatgagacttccaacaactcaacaagttgaagttgatgatcaagtatcagatgatcttactcatgtgcaagtgtcttcggagtcagggggagaacaaatagaaattagagaagaagaatcaaacttgccaattgccataagaaaggggatgagaagcaatgcaggcaaacctccacaaagatatggttttgaaattggagatgaaagtggtgatgagaatgatatagccaattatgtatcttacacttccttgtcatcgacatacaaggcctttgtggcatctctaaattcagctataattcctaaggattggaaagaggcaaagcaagacccaaggtggcatcaagcaatgctagatgaactagaagctcttgagaagaacaaaacatgggatcttgtatcctatcccaatggaaagaaagtggtaaactgtaagtgggtatatgcagtgaaacaaaatccggatggaaaagtggagaggtacaaagcaagacttgtggctaaggaatatagccagacatatggaattgattatgatgaaacgtttgcaccggttgcaaaaatgagtacggtaagaactataatatcttgtgcagttaactttgattggccattacatcaattggatgtcaagaatgcttttctacatggcgatcttcaagaggaggtatatatggaaattccacctggatttgctactttgcaaactaaaggtaaagtattgagattgaagaaatccttatatggtctcaaacagtcgccaagagcatggtttgatcgatttaggcgtgcaatgtgtgctatgggctataaacaatgtaatggagatcacacagttttctatcatcatagtggagatcatataaccattcttgctgtttatgttgatgatatgattatcactggaaatgattgctcggagataactaggctgaaacaaaatctaagcaaagaatttgaagttaaggacctaggccagttgaaatattttctgggtattgaaattgcaagatctcctagagggatagttctttcacagcggaaatatgcattggacttgctcagtgacacaggtatgcttggatgtcgcccagcctctacaccagttgatcaaaatcataagttatgtgcagagtctggaaatccagtgaataaggaaagataccaaaggctggttgggagactgatatatttatgtcatacacgacctgacataacttatgctgtcagtatggtgagtcgatatatgcatgatccaaggagtgggcatatggatgctgtctataggatcttgagatatttgaaaggaagcccaggtaaaggcctatggtttaagaaaaatggacacttggaggttgaaggctattgtgatgcagattgggcaagttgtcctgatgatagaagatcaacttcaggctattgtgtgtttgttggtggtaatctagtatcttggaggagcaagaagcaaccggtggtgtctcgctcaaccgctgaggcagaatatcgggcaatgtcagtgagtttaagtgagttgttatggctaaggaatcttctttctgagttgatgttgccggtggatactccaatgaaattgtggtgtgacaacaagtcagcaatcagcattgctaacaacccagttcaacatgatcgaacaaagcatgtggagttggatcgtttctttatcaaggaaaaactggatgagggagttttggaattagaatttgtaatgtctggtggacaagttgctgattgtttcacaaagggtttaggtgttaaaaagtgtaatagttcatgtgacaagatgggtatgatagatatctatcacccatcttga

SEQ ID NO: 15259 - DNA, 3714 bp, Oryza sativa
  Clone ID: TFbOSC401213j.C1.o23.fg
atggcagaaaatcaaggaatagaacaagtgatgggtaaattggtggacatgctagcgaaaaaatttagtgaggcctcaactacaagcaatgcaattatccctcatactgaatcaatactgaagattgagttaatgcaaaacgaaatcaagttgggtgtcaaaaattatttgagttggtcaaggagggcattactaatactaaaaacaaaggggttagaaggatatgtcacaggagaagtgaaggagcctgagaacacatcaagtgtagaatggaagacttggagcactaccaactctttagtggtggcatggttgttgacttcattaatcccagctattgctacaactgttgagactatctctagtgcgagtgagatgtggaaaactcttactaaactatactcaggagaaggtaatgtgatgctaatggtggaggcacaagagaagataagtgctttgagacagggggagcgctctgtggcagaatatgtcgcagagttgaagagtttgtggtccgatttagatcattatgatcctcttggattagagcactctgattgcatagcaaaaatgaagaaatgggttgagcgtagaagggttattgagttcttgaagggtctaaatccagagttcgaaggaagaagagatgcaatgtttcaccaaaccactcttcctaccttagatgaggccattgcagctatggcacaggaggagcttaagaagaaagtattgcctagtgccgcaccatgttcaccaagtcccacctatgcaattgtacaaggtaaagagactagagagtgcttcaattgtggtgaaatgggacaccttatgcgtgattgtcatgctccacgcaagcctacttatgggagaggaagaggtgttgatagaggtggaacaagaggtggaagaggctatgctggtaggagcaatagaggaagaggttatggatatagaggtgattacaaggctaatgcagttactctagaagagggttcttccgggactacacctgacaatgttgccaactttgctcattctactccaggtagttttaatcaagcatttatgtctatgaacacttctcattcaagttggatattagactcaggtgcatccaggcatgtcactggcatgagtggagaatttacatcatataaaccatattcatttgcacacaaagagaccattcaaactgctgatggcacatcatgtcaggagagaagaacagggaagaaacttgggattggtatcatgcgtgatggactttggtacttggacagaagagggacaaatgaggatgtgtgtgcactaatggcttcaacaagtaaagaagtgactgagaatggagtggctgaaagaaaaaatcgccatcttttggagatagctcggtcactaatgtatactatgaatgtacctaaatttctatggagtgaggcagtaatgacggcagcttatctcatcaaccgcacaccatcaagaatacttggaatgaagacaccatatgagatgatatttgggaagaatgaatttgtggttccaccgagggtgtttggctgcacttgttttgttagagatcatagaccatctattgggaaacttgatcctcgagctgttaaatgcatctttataggctattcatccagccagaaggggtataagtgttggagtccatcagaacggcggacatttgtaagtatggatgttacgtttagggaatctgtccattctatggaaggtgaaatcttgggtctcaaggagaatgaacaatcaaagggaaagattgtggttggtgaaattccatgtgctataggtgatcctgtacaagaacaagaatggagaaagccacatgaagaggaaaatcttcaagtttacacaaggagaatgagacttccaacaactcaacaagttgaagttgatgatcaagtatcagatgatcttactcatgtgcaagtgtcttcggagtcagggggagaacaaatagaaattagagaagaagaatcaaacttgccaattgccataagaaaggggatgagaagcaatgcaggcaaacctccacaaagatatggttttgaaattggagatgaaagtggtgatgagaatgatatagccaattatgtatcttacacttccttgtcatcgacatacaaggcctttgtggcatctctaaattcagctataattcctaaggattggaaagaggcaaagcaagacccaaggtggcatcaagcaatgctagatgaactagaagctcttgagaagaacaaaacatgggatcttgtatcctatcccaatggaaagaaagtggtaaactgtaagtgggtatatgcagtgaaacaaaatccggatggaaaagtggagaggtacaaagcaagacttgtggctaagggatatagccagacatatggaattgattatgatgaaacgtttgcaccggttgcaaaaatgagtacggtaagaactataatatcttgtgcagttaactttgattggccattacatcaattggatgtcaagaatgcttttctacatggcgatcttcaagaggaggtatatatggaaattccacctggatttgctactttgcaaactaaaggtaaagtattgagactgaagaaatccttatatggtctcaaacagtcgccaagagcatggtttgatcgatttaggcgtgcaatgtgtgctatgggctataaacaatgtaatggagatcacacagttttctatcatcatagtggagatcatataaccattcttgctgtttatgttgatgatatgattatcactggaaatgattgctcggagataactaggctgaaacaaaatctaagcaaagaatttgaagttaaggacctaggccagttgaaatattttctgggtattgaaattgcaagatctcctagagggatagttctttcacagcggaaatatgcattggacttgctcagtgacacaggtatgcttggatgtcgcccagcctctacaccagttgatcaaaatcataagttatgtgcagagtctggaaatccagtgaataaggaaagataccaaaggctggttgggagactgatatatttatgtcatacacgacctgacataacttatgctgtcagtatggtgagtcgatatatgcatgatccaaggagtgggcatatggatgctgtctataggatcttgagatatttgaaaggaagcccaggtaaaggcctatggtttaagaaaaatggacacttggaggttgaaggctattgtgatgcagattgggcaagttgtcctgatgatagaagatcaacttcaggctattgtgtgtttgttggtggcaatctagtatcttggaggagcaagaagcaaccggtggtgtctcgctcaaccgctgaggcagaatatcgggcaatgtcagtgagtttgagtgagttgttatggctaaggaatcttctttctgagttgatgttgccggtggatactccaatgaaattgtggtgtgacaacaagtcagcaatcagcattgctaacaacccagttcaacatgatcgaacaaagcatgtggagttggatcgtttctttatcaaggaaaaactggatgagggagttttggaattagaatttgtaatgtctggtggacaagttgctgattgtttcacaaagggtttaggtgttaaagagtgtaatagttcatgtgacaagatgggtatgatagatatctatcacccatcttga

SEQ ID NO: 15260 - DNA, 3900 bp, Oryza sativa
  Clone ID: TFbOSC401669j.C1.o18.fg
atggcagaaaatcaaggaatagaacaagtgatgggtaaattggtggacatgctagcgaaaaaatttagtgaggcctcaactacaagcaatgcaattatccctcatactgaatcaatactgaagattgagttaatgcaaaacgaaatcaagttggagggtgtcaaaaattatttgagttggtcaaggagggcattactaatactaaaaacaaaggggttagaaggatatgtcacaggagaagtgaaggagcctgagaacacatcaagtgtagaatggaagacttggagcactaccaactctttagtggtggcatggttgttgacttcattaatcccagctattgctacaactgttgagactatctctagtgcgagtgagatgtggaaaactcttactaaactatactcaggagaaggtaatgtgatgctaatggtggaggcacaagagaagataagtgctttgagacagggggagcgctctgtggcagaatatgtcgcagagttgaagagtttgtggtccgatttagatcattatgatcctcttggattagagcactctgattgcatagcaaaaatgaagaaatgggttgagcgtagaagggttattgagttcttgaagggtctaaatccagagttcgaaggaagaagagatgcaatgtttcaccaaaccactcttcctaccttagatgaggccattgcagctatggcacaggaggagcttaagaagaaagtattgcctagtgccgcaccatgttcaccaagtcccacctatgcaattgtacaaggtaaagagactagagagtgcttcaattgtggtgaaatgggacaccttatgcgtgattgtcatgctccacgcaagcctacttatgggagaggaagaggtgttgatagaggtggaacaagaggtggaagaggctatgctggtaggagcaatagaggaagaggttatggatatagaggtgattacaaggctaatgcagttactctagaagagggttcttccgggactacacctgacaatgttgccaactttgctcattctacttcaggtagttttaatcaagcatttatgtctatgaacacttctcattcaagttggatattagactcaggtgcatccaggcatgtcactggcatgagtggagaatttacatcatataaaccatattcatttgcacataaagagaccattcaaactgctgatggcacatcatgtcaggagagaagaacagggaagaaacttgggattggtatcaggcgtgatggactttggtacttggacagaagagggacaaatgaggatgtgtgtgcactaatggcttcaacaagtaaagaagtgactgagtttattagaactgataatggaggggagtatatgaatagtgaattcggtcactttctttctttggaaggaatattacatcagacttcttgtcctgatactcctccacagaatggagtggctgaaagaaaaaatcgccatcttttggagatagctcggtcactaatgtatactatgaatgtacctaaatttctatggagtgaggcagtaatgacggcagcttatctcatcaaccgcacaccatcaagaatacttggaatgaagacaccatatgagatgatatttgggaagaatgaatttgtggttccaccgagggtgtttggctgcacttgttttgttagagatcatagaccatctattgggaaacttgatcctcgagctgttaaatgcatctttataggctattcatccagccagaaggggtataagtgttggagtccatcagaacggcggacatttgtaagtatggatgttacgtttagggaatctgttccattctatggtgagaaaacagatataagctctttatttgttgatcttgatgatttaactagaggtgaccatgatcaacaaaaggaaggtgaaatcttgggtctcaaggagaatgaacaatcaaagggaaagattgtggttggtgaaattccatgtgctataggtgatcctgtacaagaacaagaatggagaaagccacatgaagaggaaaatcttcaagtttacacaaggagaatgagacttccaacaactcaacaagttgaagttgatgatcaagtatcagatgatcttactcatgtgcaagtgtcttcggagtcagggggagaacaaatagaaattagagaagaagaatcaaacttgccaattgccataagaaaggggatgagaagcaatgcaggcaaacctccacaaagatatggttttgaaattggagatgaaagtggtgatgagaatgatatagccaattatgtatcttacacttccttgtcatcgacatacaaggcctttgtggcatctctaaattcagctataattcctaaggattggaaagaggcaaagcaagacccaaggtggcatcaagcaatgctagatgaactagaagctcttgagaagaacaaaacatgggatcttgtatcctatcccaatggaaagaaagtggtaaactgtaagtgggtatatgcagtgaaacaaaatccggatggaaaagtggagaggtacaaagcaagacttgtggctaagggatatagccagacatatggaattgattatgatgaaacgtttgcaccggttgcaaaaatgagtacggtaagaactataatatcttgtgcagttaactttgattggccattacatcaattggatgtcaagaatgcttttctacatggcgatcttcaagaggaggtatatatggaaattccacctggatttgctactttgcaaactaaaggtaaagtattgagactgaagaaatccttatatggtctcaaacagtcgccaagagcatggtttgatcgatttaggcgtgcaatgtgtgctatgggctataaacaatgtaatggagatcacacagttttctatcatcatagtggagatcatataaccattcttgctgtttatgttgatgatatgattatcactggaaatgattgctcggagataactaggctgaaacaaaatctaagcaaagaatttgaagttaaggacctaggccagttgaaatattttctgggtattgaaattgcaagatctcctagagggatagttctttcacagcggaaatatgcattggacttgctcagtgacacaggtatgcttggatgtcgcccagcctctacaccagttgatcaaaatcataagttatgtgcagagtctggaaatccagtgaataaggaaagataccaaaggctggttgggagactgatatatttatgtcatacacgacctgacataacttatgctgtcagtatggtgagtcgatatatgcatgatccaaggagtgggcatatggatgctgtctataggatcttgagatatttgaaaggaagcccaggtaaaggcctatggtttaagaaaaatggacacttggaggttgaaggctattgtgatgcagattgggcaagttgtcctgatgatagaagatcaacttcaggctattgtgtgtttgttggtggcaatctagtatcttggaggagcaagaagcaaccggtggtgtctcgctcaaccgctgaggcagaatatcgggcaatgtcagtgagtttgagtgagttgttatggctaaggaatcttctttctgagttgatgttgccggtggatactccaatgaaattgtggtgtgacaacaagtcagcaatcagcattgctaacaacccagttcaacatgatcgaacaaagcatgtggagttggatcgtttctttatcaaggaaaaactggatgagggagttttggaattagaatttgtaatgtctggtggacaagttgctgattgtttcacaaagggtttaggtgttaaagagtgtaatagttcatgtgacaagatgggtatgatagatatctatcacccatcttga

SEQ ID NO: 15261 - DNA, 1470 bp, Oryza sativa
  Clone ID: TFbOSC900020j.C1.o11.fg
atgagcaacagcgccgccacctccacctacgcggagagcgtcgcgtcctgccgcgctcccgctcccgccacccccagggcccccccacgccgccgtgaggcgccacttcgacttcgccgccggcgacggcgttatatgttggattttctggatgcatgtgtatattttctcaagcatgcgagagtacatgaggaaagaaatgcaaatattctgtttggtgtggagaagctgatatttgtccaaatgccacagcctgcttatatgagccatcctaaaccaaatcctcatgtttttagcagcccatgcagtcctgttgtgttcaacagtcctagcaatcatttagctggttctacaactcctacaccgaacaatctccaagtttttaatggtccaagaaaccctcatgtgtccaacagtcctagcaatcatttagctggttctacaactcctacaccaaacaatctccaagtttttaatgctccaggaaaccttcatgtgtccaacagtccaaacaatcatcgatctggtgctacaactccagttaacgctaatccccctggttctagatcaagtgataaacaaccaatctgccattgtagggctggaaaatgcaaagtggagacaataaaagggcaaaagtactatgtgtgttgtatacagaagggacaaggtgcatgcccttaccaagtgccggtcaatgcttttgttgaagaatcaccacaagctggaaacagcgttccattggaggataaccgtgggaactacagtccagttaaagtggaggcgaacaatgacaacggatcaatcaatcctgatcaacctgaatacgatgagtggccatttgacatcgtcaacaatgatgttgtatgcagtggcttcttgccaactgctgagcctacactaagagatggtatagttgctggggaatcaccaagtacgcagcacctgtcaaatgctacgactgaagcgaaaacaccaacaaaatcgcccattatgccgccacctcatggtagcgggagccccttcactcctcggtcgaacccctgctaccgatgtggtgaagacgggcactggtccaggaactgccctaagccggcttcgagcccacttaactctccttgctacaactgcggcaagcttgggcactggagagcaagaggtgggctcctacggtgtttgtccatcatctgctttgttaatcacttcttacatgaatgcaaagtgcagacctgttactgctacaactgctactttgctcctttcttcttcagtatgatgaactggaaggcgatcggctgccgttctctgaatctttctctgaaatttttcctcgagagtttctttcagagatggtccagccctctgccgttcattcggtcagaaactgaaacctgggatgatgatcgttgcagagacttgaccaggacatacgaggacaagaagaagaacaccaatcgatggatggattga

SEQ ID NO: 15262 - DNA, 1658 bp, Oryza sativa
  Clone ID: TFbOSC13693j.C1.o1.np
actagtactagatggtcagctttgcgaagaagaagatgtcgctagtggtctgccgaagttctagaaggctgcaggatccactagcgaagcaaaggaagcagtgaagccagatgtgaagcaggaggaaaagattagatctgttaaggtcctatccttagtttctgatctctttctttcctccaattttctctttccccctctctaaaccttgtaacagatggctgacaatgagaaaggaagtaggtcagaaatcaaaacaagggtgccccaagctccgagtgaatgaagcaccagacaccagttgtgtgacagtggtctaacacctgattaactagaacgaattgcttatagagctaccacagcagcatcagatgccaattctagacccgagtcagatgcaacctcaagtgcaggtggaggcagtccaatcactcacaccacaagttagcgcaccgccagcatcccaacaagcccatcgtgccatgccacatgtggactcaaaagaagcaagaatcatttgttttatctatgttgaacaagggcactatgcaaggaactgtccttagcagaaaaaaaaagcaccaatgcgaaccgaagatgaggtccgtaagatgaccattaccggcacagaatggcctccaccaggaatgacaaaacgtcaaagaagaaatttcttccgaggtgcaccatagttgacggaacatcttttagctaatggaggtagagtgtctgatagcgaagattcagatcaagtctcctcacgggttgaagatgagaagtctctccaaggtttcaaccagaataaaaaggaacatatggcatgctctcgttgtggagaaatcggtcactttgccagctcatgtgtcaccacttgcgttcattgtgaggaagaccatccacccgacgagtgtccaacaagcaggattacttatttcttgtgcgaatgagctgatcatgtacgaaaagattgtcaattcagttttctgctgatgaagaagatggccaaccaacccgccagttacaacagacagaagcatcaaggcaacccaaatcctcgacaagactacagtttcagcctaactccaatgccaggacagaggaatcaaaatgggaaaagaaaatgccgagtctggaaagatatctgttgtttcaattgtcaagaagtgggtcatttcgccgacaagtgctcgaaaccgagaaacatatttaccaacacgtcagtccatgcaactccgcgcaatcagaagcttgctccttagcaaattggcatccatgcatcctgaagcagccctatagcccaagttgcaatagctcccactccaatgagtgcactaccacaaggtgtcaatgctcaatttcagccccagccaccagttgacaagacagaggccagtatagggttggacctttggatggtccaggacaacagccaagaaatcaagtcaagatgaagaacctgagagtaagaaagttattggtttgttacaactggaaagaaccagggcataactccaggacttgtccctaaccaaggaaaaaaaatcggcctccacattttcgccaatttacaagaaacagacatgccaatcgccaagtggtcactgagaaaaaaaattttttttgggccccccccaaaaaagggggtttttaaaaacccc

SEQ ID NO: 15263 - DNA, 3645 bp, Oryza sativa
  Clone ID: TFbOSC900382j.C1.o4.fg
atggctggttttgccgatgcactgaggacggataaattcaccgatgtgcacttcaagagatggcagatcagggtcactctgtggctgacagctatgaaatgcttctgggtgagtactggcaagcctatgggtgttcttaatgctgatcagcagaaagaattcgatgaggccactactctctttgtgggatgcattcttagcgtgcttggcgatcgtctggtcgaggtgtatatgcatatgaccgacgctaaggagttgtgggatgcactgaatactaaattcggtgctactgatgctagcaatgatctgtatatcatggagcaatttcatgactacaagatggctgacaaccgttctgtagtcaaacaggctcatgagatacaaaccatggctaaggaactcgaactccttaagtgtgtcttacccaacaaatttgtggtcgggtgcattattgcgaaactacctccatcttggagaggtttcggtactgcactcaaacacaagagacaggaatactccattgaggggttgatagcgtctcttgatgttgaggagaaagctcgggaaaaagatgccgcgtctaagggcgatggtggccagtccactgccaatgttgtgcacaaggcccagaacaagagcaaggggaaatacaaagctcagcagaccaccaacttcaagaagaagaagaacaacaacaatcctaatcaggatgagaggacttgctttgtgtgtagtcaacctggccatctagcgaggaagtgtccacaacgcaaggggatgaaggcacctgcagggcagacctctaagtctgctaatgtgaccattggcaacactggagatggaagcgggtatggtaatttacctactgttttttcagttaatcaatctactaattggtgggttgatactggggccaatgtacatgtttgtgctgacatctcattgttttcttcttatcaggtcgcacggggttacaccgtcctagtggggaatgggtcacatgcttctgttcatggtgttggcacggtagatctgaaatttacttcaggaaagatcgtgcagctgaagaacgtgcagcatgccccttccatcgacaggaatcttgttagtggctcccgtctgactagagacggatttaagttggtttttgagtctaataaagtagtcgtgtctaaacatggatattttattggtaaagattatgagtgcggaggcctgttccgcttttccctttctgatttctgcaataagtctgtgaaccatatttgtggcagtgtggatgatgaggctaatgtttggcactcacgtttatgttatattaattttggcttgatgtctcggctttccagcatgtgtttaattcctaagttttccattgtcaaaggttctaagtgccatagctgtgtgcaatcgaagcaacctcgcaagcctcacaaggctgccgaggagagaaacttggcaccactagaactcctacattcagatcattgtgaaatgaattgggtgttgacgaagggtggaaaacgatatttcatgacgttgattgatgatgctactagattttgctatatgtacctgttgaaaatgaaagacgaggctctagactattttaaaatatataaggcagaagttgaaaatcaacttgacagaaagataaaaaggcttaggtctgatcgtggtggagagtttttctcaaacgagtttgacttattctgtgaggaacatggcatcatacatgagaggacgcctccctattctcccgagtctaatgggattgctgaaaggaagaaccgcacactgactgacttggtgaatgccatgttggacaccgcgggactacctaaggcatgcattgcctatagatttttaatatttaaatctgaggtacctgacatgcatgttggtacaatcatggagtctcgtgatgctaccttctttgagagcttttttccaatgaaggatacacatagtagttctagccaaacctctgaaataattcctaattcaatcacaccaccagaacaaactgaacatacacatgaacatgtcactgaggaggatgacagtgaagctcctcgaaggagtaaaagacaaaggacggctaagtcttttggtgatgatttcactgtgtacctcgtggacgacactcctaagtcaatttcagaagcatatgcatctcctgatgtagactactggaaggaggctgagatgacagagcgaccctatgggtgtaaacctgtggggtgcaagtgggtgttcaaaaagaagctgaggcctgatggtaccattgaaaagtacaacgctcggcttgttgctaagggctatactcagaaagaaggcgaagatttctttgacacttactcacctgttgccagattgaccacaattcgtgtgttactttccctagcagcctcacatggtcttctcgttcatcaaatggacgttaagacagcttttcttaatggagagctggatgaggagatctatatggatcagcctgatgggtttgtagttgaaggtcaagaaggcaagatatgcaaattgttgaagtctttgtatggtctgaaacaagctcctaagcaatggcacgagaaatttgatagaacattgacatctgcaggcttcgcagtcaatgaagcagataaatgtgtatactatcgccatggtgggggtgagggagttattctgtgcttgtatgttgatgacatactgatatttgggacaaaccttgaggtgataaatgaggttaaatcattcttgtctcaaaaatttgatatgaaggatttgggagtagctgatgttatcctaaacattaagctaattagaggtgagaatgggattacactcttgcagtcccattatgtggagaagatcttgaatcgctttggctactttgatagtaagccttctccaacaccttatgatcctagcttgttgcttcgcaagaacaagagaattgctaggaatcaactggaatactccaaaatcattggctcgctgatgtacctggctagtgcaactaggcctgatatctcctttgctgtgagcaagttgagccggtttacctctaatccgggagatgatcactggcgtgcgcttgagcgagtaatgcactatctgaaaggtactatggaattggggcttcactattctgggtatcctgtggtactggaaggatatagtgattctaactggatctctgatgtggatgagatcaaagccactagtggatatatcttcacactaggtggtggtgctgtttcgtggaggtcttgcaaacagaccattttgacgaggtcaaccatgaaagcagagttgacggcactggatactgctactgttgaggcagaatggctgcgtgatctattaatggatctccctattgttgaaaaaccggtgccggctatctttatgaactatgacaatcaaacggtaattgtcaaagtgaatagttctaaggataatatgaaatcgtctagacatgtgaaaagacgattgaagtctattaggaaactgagaaactccggagttataacgttggattacatccaaacagctagaaacctggcagatcccttcacgaagggactatcacaaaatgtgatagacaatgcatcgaaggagatgggtttgagacctatgtga

SEQ ID NO: 15264 - DNA, 1086 bp, Oryza sativa
  Clone ID: TFbOSC31099j.C1.o1.fg
atgccatgccacatgttgacccaaaagaagcaagggcactacgcaaggaactgtcctcagcagaaaagaaaagcaccaatgcgaaccgaagatgaagtccgtaagatgatcattaccagcacagaatggcctccaccaggaatgacaaaatgtcagagaagaaattcctcccgaggtgcacaacagttgacagagcatcttttagctaatggaggtagagtgtctggtagtgaagattcagatcaagtctcctcagatgatgaagatgcgaagtctccccaaggttttaaccagaataaaatagaacttaaggcatgctctcgttgtggagaaatcggtcatgttgccagctcgtgtgcctttacatgcgttcgttgtgaggaagaccatccacccgataggtgccctatgagcaggatcacttgtttcttgtgtgaaggaactgatcatgtaccaaaagattgtcaactcagttttctgctgacgaagaagatggccgaccaacacgcccattctaacggagagaagcatcaaggaaacacaaatcctcgccaacattacagtttcagcctaactccagtgccaggacagaggaatcaaaatgagaaaagaaaatgccgagttcgggaagatatctgttgcttcaattgtcaaggaatgggtcatttcgccgacaagtgcccaaaaccgagaaacatagctgccggcacgtcagtccacgcaactccctgcaatcagaagcttgctcctcaacgaattgtcatccatgcatcccgaagcagtcctatagcccgcgttgcaacagctccaattccaatgagtgcactaccacaaggtgtcaatgctcaatttcagccccagccaccagctggcaagacagaggccagtatctgcgttgtacctttggaagttccaatacaccagctgagaaatcaagtacaagatgaagaacccgagttgaagaagggcattactccaaaaactgtccccaaccaaggcaaaatcggcctccacattaccgccaatttacacgaagcggacattcccatcgtattgtggtcactggagcaaacgccgtgcccgtaa

SEQ ID NO: 15265 - DNA, 3222 bp, Oryza sativa
  Clone ID: TFbOSC400545j.C1.o30.fg
atggcagatcagggtcactatgtggctgacagctatgaaatgcttctggcgttcttggcgatcgtctggaacgaggtgtatatgcacatgaccgacgctaaggagttgtgggatgcactgaatactaaatttggtgctactgatgctagcaatgatctgtacatcatggaggagtttcatgactacaggatggttgacaaccgttctgtagtcgaacaggctcatgagatacaaaccatggctaaggaactcgaactccttaaaagtttcggtactgcactcaaacacaagagacaggaatactccattgaggggttgatagcgtctcttgatgttgaggagaaagctcgggaaaaggacgccgcgtctaagggcgatggtgggcagtccagtgccaatgttgtgcacaaggcccagaacaagagcaaggggaaatacaaagctcaacagaccaccaacttcaagaagcagaagaagaacaacaacaatcctaatcaggatgagaggacttgctttgtgtgtggccaacctagtcatctagctaggaagtgtccacagcgcaaggggatgaaggcacctgcagggcagacttctaagtctgctaatgtgaccattggcaatactggagatggaagcgggtatggtaatttacctactgttttttcagttaatcagtctactaattggtgggttgatactggggccaatgttgcacggggttccaccgtcctaatggggaatgggtcacatgctcctgttcatggtgttggcacggtagatctgaagtttacttcgggaaagatcgtgcaactgaagaacgtgcagcatgtcccttctatcgacaggaatcttgttagtggctcccgtctgactagagacggatttaagttggtttttgagtctaataaagtagtcgtgtctaaacatggatattttattggtaaaggttatgagtgcggaggcttgttccgcttttccctttctgatttctacaataagtctgtgaaccatatttgtggcagtgtggatgatgaggctaatgtttggcactcacgtttatgtcatattaattttggcttgatgtctcggctttccagcatgtgtttaatttctaagttttccattgtcaaaggttttaagtgccatagttgtgtgcaatcgaagcaacctcgcaagcctcacaaggctgccgaggagagaaacttggcaccactagaactcctacattcagatctttgtgaaatgaatggggtgttgacgaagggtggaaaacgatatttcatgacgttgattgatgatgctactagattttgctatgtgtacttgttaaaaatgaaagacgaggctctagactattttaaaatttataaggcagaagttgaaaatcaaattgacagaaagataaaaaaactcaggtctgatcgtggtggagagtttttctcaaacgagtttgacttattctgtgaggaacatggcatcatacatgagaggacgcctccctattctcccgagtctaatgggattgctgaaaggaagaaccgcacactgactgacttggtgaatgccatgttggacaccgcgggactacctaaggcatggtggggggaggcattgttgacctcgaatcatgtgttaaacagagttcctaacagaaataaggacaaaacaccatatgagatatggattgggagaaaaccatcactttgttatttgcgcacatgggggtgcttggcgaaagtcaatgtaccaataacgaagaagcgcaaacttggacctaagactgtggactgtgtctttctgggatatgctcatcatagcattgcctatagatttttaatagttaaatctgaggtacctgacatgcatgttggtacaattatggagactcgtgatgctaccttctttgagagctttttcccaatgaaggatacacatagtagttctagccaaccttctgaaataattcccagttcaatcacaccaccagaacaaactgaatatacacatgaacatgtcactgaggaggatggcagtgaagctcctcgaaggagtaagagacaaaggacggctaagtcctttggtgatgatttcactgtgtacttcgtggatgacactcctaagtcaatttcagaagcatatgcatctcctgatgcagactactggaaggaggctgtccctagtgaaatggattccattatcgctaacgggacttgggaggtgacagagcgaccctatgggtgtaaacctctggggtgcaagtgggtgttcaagaagaagcttaggcctgatggtactattgaaaagtacaaggctcggcttgttgctaagggctatactcagaaagaaggcgaagatttctttgacacttactcacctgttgctagattgaccacaattcgtgtgctactttccctagcagcctcacatggtcttctcgttcatcaaatggacgttaagacaacttttcttaatggagagctggatgaggagatctatatggatcaacctgatgggtttgtagttgaaggtcaagaaggcaaagtgataaatgaggttaaatcattcttgtctcaaaattttgatatgaaggatttgggagtagctgatgttatcctaaacattaagctaattagaggtgagaatgggattacactcttgcaatcccattatgtggagaagatcttgaatcgctttggctacattgatagtaagccttctccagcaccttatgatcctagcttgttgcttcgcaagaacaagagaattgctaggaatcaactggaatattcccaaatcattggctcgctgatgtacctggctagtgcaactaggcctgatatctcctttgctgtgagcaagttgagccggtttacctctaatctaggagatgatcactggcgtgcgcttgagcgagtaatgcgctatctgaaaggtactatggcattggggcttcactatactggatatcctgcgatactggagggttatagtgattctaactggatctctgatgtggatgagatcaaagccactagtggatatgtcttcacactgggtggtggtgctgtttcgtggaggtcttgcaaacagaccattttgacgaggtcaaccatggaagcagagttgacggcactgcatactgctactgttgaggcagaatggctgcgtgatctattaatggatttgcctattgttgaaaaaatggtgccggctatcttttga

SEQ ID NO: 15266 - DNA, 1110 bp, Oryza sativa
  Clone ID: TFbOSC415186j.C1.o1.fg
atggtgaacagtcgcaccaatggaagtggaaacaataacaatgaagggaacccaactcttgctcaagttctggctcaacagactcagttaatgaatatgatgatacagcagatgcagaaccagctcaaccaagggaacaacaatgctccaccgccgcagaacaagttaactgattttcttcgtgtgaggccacctaccttttctagcactaccaacctagtggaagcaggtgattggctgcacgctgttgagaagaagttggaactgctccagtgcacggatcaggagaaagttgttttcgcttcacatcagttgcaaggacctgcatcagaatggtgggatcatttccggatgaacagagcagatggacaaccaatcacttgggcagagttcacagaagcattcaagaagacacacatacctgtaggagttgttgctttgaagaagcgtgagttcagagcattgaagcaaaaggatcataccgtggcagagtatcttcatgagttcaatcgtctggcacgttatgctccagaagatgtgcgtactgacgaggaaaggcaggagaagttcttggaaggtctgaaggatgaactgtcagttacgttgatctcccatgactatgttgattttcagcagctggttgacaaagcaattcgacttgaagacaagaagaatatgatggataaccgtaaaaggaaaatgactgtattccatgaggcacaaggtagtagccagaggcagcgtatcaagccactccaaattggtgaatcttcctccgctggtcaaggacagtcgcaacagttgaacatcggtggtgagatcaaatcagagactaatggaagcaatgaagttaacatcgagcaagctaatcagccagtgccagttcagcaggatcagtctcaggagaataacagtagtggaagggagcagcaggtatgtttcaactgttacaacccaggtcactttgcaagagagtgtccgaagccgaagcatcagcagtcgcaagtcaacaacattgtcgtcacaggagccaatgcagtgtcagttgcgtcttcaagagttgcgtcttcaagtgttacagctcagccaccagtttcaaggcagcagtag

SEQ ID NO: 15267 - DNA, 4266 bp, Oryza sativa
  Clone ID: TFbOSC900086j.C1.o11.gm
atgccggagcgaagctgccgcttcccccgcggcgacgccacgccgccgccgccgccggcagcagcatccacatgcgggcgcttgggcgcgggcaccaggacaagcccagctggtggcgcctgtgccggcagcggacgcttcgtgtgcatatcgccgcgcaaggggatgaaggcacctgcagggcagacttctaagtttgctaatgtgaccattggcaacactagagatggaagcgggtatggtaatttacctactgtcgcacggggttccactgtcctaatggggaatgggtcacatgcttctgttcatggtgttggcacggtagatctgaagtttacttcgggaaagatcgtgcagctgaagaacgtgcagcatgtcccttctatcgacaggaatcatgttagtggctcccgtctgactagagacggatttaagttggtttttgagtctaataaagtagtcgtgtgtaaacatggatattttattggtaaaggttatgagtgcggaggcctgttccgcttttccctttctgatttctgcaataagtctgtgaaccatatttgtggcagtgtggataatgaggctaataagcgcaaacttggacctaagactgtggactgtgtctttctgggatatgctcatcacagcattgcctatagatttttaatagttaaatccgaggtacctgacatgcatgttggtacaattatggagtcccttgatgctaccttctttgagagctttttcccaatgaaggatacacatagtggttcgagccaaccctctgaaataattcccagttcaatcacaccaccagaacaaattgaacatacacatgaacatgtctctgaggaggatgtctgtgaagctcctcgaaggagtaagagacaaaggacggctaagtcctttggtgatgatttcactgtgtacctcgtggatgacactcctaagtcaatttcagaagcatatgcatctcctgatgcagactactggaaggaggctgtccgtagtgaaatggattccattatcgctaacgggacttgggaggtgacagagcgaccctatgggtgtgaacctgtggggtgcaagtgggtgttcaagaagaagcttaggcctgacggtactattgaaaagtacaaggctcggcttgttgctaagggctatactcagaaagaaggcgaagatttctttgacacttactcacctgttgctagattgaccacaattcgtgtgctactttccctagcagcttcacatggtcttctcgttcatcaaatggacgttaagacagcttttcttaatggagagctggatgaggagatctatatggatcaacctgatgggtttgtagttgaaggctttgcagtcaatgaggcagataaatgtgtgtactatcgccatggtgggggtgagggagttattctgtgcttgtatgttgacgacatactgatatttgggacaaaccttgaggtgataaatgagtcccattatgtggagaagatcttgaatcgctttggctacattgatagtaagccttctccaacaccttatgatcctagcttgttgcttcgcaagaacaaaagaattgctaggaatcaactggaatactcccaaatcattggctcgctgatgtacctggctagtgcaactaggcctaatatctcctttgctgtgagcaagttgagccggtttacctctaatccgggagatgatcactggcgtgcgcttgagcgaataatgcgctatctgaaaggtactatggaattggggcttcactatattgggtatcctgcggtactggagggttatagtgattctaactggatctctaatgtggatgagatcaaagccactagtggatatatcttcacattgggtggtggtgctgtttcgtggagcattcttggcgatcgtctggtcgaggtgtatatgcatatgaccgacgctaaggagttgtgggatgcactgaatactaaattcggtgctactgatgctagcaatgatctgtatatcatggagcagtttcatgactacaaaatggctgacaaccgttctgtagtcgaacaggctcatgagatacaaaccatggctaaggaactcgaactccttaagtgtgtcttacccgacaaatttgtggccgggtgcattattgcaaaactacctccatcttggaggagtttcggtactgcactcaaacacaagagacaggaatactccgttgaggggttgattgcgtctcttgatgttgaggagaaagctcggaaaaaagatgccgcgtctaagggcgatggtgggcagtccagtgccaatgttgtgcacaaggcccagaacaagagcaaggggaaatacaaagctcagcagaccaccaacttcaagaagcagaagaagaacaacaacaatcctaatcaggatgagaggacttgctttgtgtgtggccaagttggtcatctggttaggaagtgtccacagcgcaaggggatgaaggcacctgcagggcagacttctaagtctgctaatgtgaccattggcaacactagagatggaagcgggtatggtaatttacctactgtcgcacggggttccaccgtcctaatagggaatgggtcacatgcttctgttcatggtgttggcacggtagatctgaagtttacttcgggaaagatcgtgcagctgaagaacatgcagcatgtcccttctatcgacaggaatcttgttagtggctcccgtctgactagagacggatttaagttggtttttgagtctaataaagtagtcgtgtctaaacatgtatattttattggtaaaggttatgagtgcggaggcctgttccgtttttccctttctgatttctgcaataacatgtgtttaattcctaagttttccattgtcaaaggttctaagtgccatagttgtgtgcaatcgaagcaacctcgcaagcctcacaaggctgccgaggagataaacttggcaccactagaactcctacattcagatctttgtgaaatgaatggggtgttgacgaaggaagttgaaaatcaacttgacagaaagataaaaaggcttaggtctgatcgtggtggagagtttttctcgaacgagtttgacttattctgtgagaaacatggcatcatacatgagaggacgcctccctattctcccgagtctaatgggattggtgaaaggaagaaccgcacactgactgacttggtgaatgccatgttggacaccgcgggactgcctaaggcatgtgaagctcctcgaaggagtaagagacaaaggacagctaagtcttttggtgatgatttcattgtgtacctcgtggatgacactcctaagtcaatttcagaagcatatgcatctcctgatgcagactactggaaggaggctgtccgtagtgaaatggattccattatcgctaacgggacttgggaggtgacagagcgaccctatgggtgtaaacctgtggggtgcaagtgggtgttcaagaagaagcttaggcctgacgcctcacatggtcttctcgttcatcaaatggacgttaagacagcttttcttaatggagagctggatgaggagatctatatggatcagcctgatgggtttgtagttgaaggtcaagaaggcaaggcttcgcagtcaatgaggcagataaatgtgtgtactattgccatggtggagtcccattatgtggagaagatcttgaatcgctttggctacattgatagtaagccttctccaacaccttatgatcctagcttgttgcttcgcaagaacaagagaattgctaggaatcaactagaatactcccaaatcgttggctcgttgatgtacctggctagtgcaactaggcctgatatctcctttgctgtgagcaagttgagccgatttacctctaatccgggagataatcactggtgtgcgcttgagcgagtaatgcgctatctgaaaggtactgtggaattggggcttcactatactgggtatcctgcggtactggagggttatagtgattctaactggatctctgatgtggatgagataaaagccactagtggatatgtcttcacactgggtggtggtgctgtttcatggaggtcttgcaaacagaccattttgacgaggtcaaccatggaagcagagctgacggcactggatactgctactattgaggtctccggaacctctgccttcgacatcctgcaccggctcgtcttcctctccgctcgcgtgcttcgcgacttcgtcgacgctcgcaaccgcgagtag

SEQ ID NO: 15268 - DNA, 4119 bp, Oryza sativa
  Clone ID: TFbOSC900219j.C1.o7.fg
atggcatgccacataggcagaactgtttacatgtatagatctaatgatgcgttcatgctagttttcatctgtaatgttatgatttatttatggaatagattaaatcattatacgtctataatctcaacaatccaaaaaccttattataggcactgtgattttactatggctggttttgccgatgcactgaggccggataaattcaccggtgtgcattttaagagatggcagatcagggtcactctgtggctgacagctatgaaatgcttctgggtgagtactggcaaacctgaaggagttcttactgctgaacagcagaagcaattcgaggaagccactactctctttgtgggatgcattcttagcattcttggcgatcgtctggtcgaggtgtatatgcatatgaccgacgctaaggagttgtgggatgcactgaatactaaattcggtgctactgatgctagcaatgatctgtatatcatggagcagtttcatgactacaaaatggctgacaaccgttctgtagtcgaacaggctcatgagatacaaaccatggctaaggaactcgaactccttaagtgtgtcttacccgacaaatttgtggccgggtgcattattgcaaaactacctccatcttggaggagtttcggtactgcactcaaacacaagagacaggaatactccgttgaggggttgattgcgtctcttgatgttgaggagaaagctcggaaaaaagatgccgcgtctaagggcgatggtgggcagtccagtgccaatgttgtgcacaaggcccagaacaagagcaaggggaaatacaaagctcagcagaccaccaacttcaagaagcagaagaagaacaacaacaatcctaatcaggatgagaggacttgctttgtgtgtggccaagttggtcatctggttaggaagtgtccacagcgcaaggggatgaaggcacctgcagggcagacttctaagtctgctaatgtgaccattggcaacactggagatggaagcgggtatggtaatttacctactgttttttcagttaatcaatctactaattggtgggttgatactggggccaatgtacatgtttgtgctgacatctcattgttttcttcttatcaggtcgcacggggttccaccgtcctaatggggaatgggtcacatgcttctgttcatggtgttggcacggtagatctgaagtttacttcgggaaagatcgtgcagctgaagaacgtgcagcatgtcccttctatcgacaggaatcttgttagtggctcccgtctgactagagacggatttaagttggtttttgagtctaataaagtagtcgtgtctaaacatggatattttattggtaaaggttatgagtgcgaaggcctgttccgcttttccctttctgatttctgcaataagtctgtgaaccatatttgtggcagtgtggatgatgaggctaatgtttggcattcacgtttatgtcatattaattttggcttgatgtctcggctttccagcatgtgtttaattcctaagttttccattgtcaaaggttctaagtgccatagttgtgtgcaatcgaagcaacctcgcaagcctcacaaggctgccgaggagagaaacttggcaccactagaactcctacattcagatctttgtgaaatgaatggggtgttgacgaagggtggaaaacgatatttcatgacattgattgatgatgctactagattttgctatgtgtacttgttgaaaacgaaagacgaggctctagactattttaaaatttataaggcagaagttgaaaatcaacttgacagaaagataaaaaggcttaggtctgatcgtggtggagagtttttctcgaacgagtttgacttattctgtgaggaacatggcatcatacatgagaggacgcctccctattctcccgagtctaatgggattgctgaaaggaagaaccgcacactgactgacttggtgaatgccatgttggacaccgcgggactgcctaaggcatggtggggggaggcattgttgacctcaaatcatgtgttaaacagagttcctaacagaaataaggacaaaacaccatatgagatatggattggtagaaaaccatcactttcttatttgcgcacatgggggtgcttggcgaaagtcaatgtaccaataacgaagaagcgcaaacttggacctaagactgtggactgtgtttttctgggatatgctcatcatagcattgcctatagatttttaatagttaaatccgaggtaccggacatgcatgttggtacaattatggagtctcgtgatgctaccttctttgagagctttttcccaatgaaggatacacatagtggttcgaaccaaccctctgaaataattcccagttcaatcacaccaccagaacaaactgaacatacacatgaacttgtctctgaggaggatgtcagtgaagctcctcgaaggagtaagagacaaaggacggctaagtcttttggtgatgatttcactgtgtacctcgtggatgacactcctaagtcaatttcagaagcatatgcatctcctgatgcagactactggaaggaggctgtccgtagtgaaatggattccattatcgctaacgggacttgggaggtgacagagcgaccctatgggtgtaaacctgtggggtgcaagtgggtgttcaagaagaagcttaggcctgacggtactattgaaaagtacaaggctcggcttgttgctaagggctatactcagaaagaaggcgaagatttctttgacacttactcacctgttgctagattgaccacaattcgtgtgctactttccctagcagcctcacatggtcttctcgttcatcaaatggacgttaagacagcttttcttaatggagagctggatgaggagatctatatagatcaacctgatgggtttgtagttgaaggtcaagaaggcaaagtgtgcaaattgttgaagtctttgtatggtctgaaacaagctcctaagcaatggcatgagaaatttgacaaaacattgatatctgcaggctttgcagtcaatgaggcagataaatgtgtgtactatcgccatggtgggggtgagggagttattttgtgcttgtatgttgacgacatactgatatttgggacaaaccttgaggtgataaatgaggttaaatcattcttgtctcaaaattttgatatgaaagatttgggagtagctgatgttatcttaaacattaagctaattagaggtgagaatgggattacactcttgcagtcccattatgtggagaagatcttgaatcgctttggctacattgatagtaagccttctccaacaccttatgatcctagcttgttgcttcgcaagaacaagagaattgctaggaatcaactggaatactcccaaatcattggctcgttgatgtacctggctagtgcaactaggcctgatatctcctttgctggttatagtgattctaactggatctctgatgtggatgagatcaaagccactagtggatatgttttcacactgggtggtggtgctgtttcatggaagtcttgcaaacagacaattttgacgaggtcaaccatggaagcagagctaacggcactggatactgctactgttgaggcagaatggctgcgtgatctattaatggatctgcctgttgttgaaaaaccggtgccggctatccttatgaactgtgacaatcaaacgacatgtgaaaagacgattgaagtctgtcaggaaattaagaaactccggagttataacgttggattacatccaaacagcgagaaacctggcagatcccttcacgaagggactatcacgaaatgtgatagacaatgcatcgaaggagatgggtttgagacccattggcggcaaaggggaagggtggcggcggcgactggtggtgccaaaggggagggtggcatggttgagggagtagatcaaggaaggatatatcggcagcggccaaggggtgcaatggcgcggcttggtgccagtggcgcttggtggcaacagccgcggggagggggtggcttagtccagatcctacggcctcaaagacggcaacaacggatggcacagggaagccagtag

SEQ ID NO: 15269 - DNA, 2391 bp, Oryza sativa
  Clone ID: TFbOSC900421j.C1.o3.gm
atggagctctcccgtggtcgccacatccaactgggtgttgcggggccccgctcacccgcgggtcccctgcgggcccgccccctgaaccgccgctcacaccctcatgcgaaggcgcgaacgcgagatcgcggccgctggcaccagcgccgacgcaacacctcagccatctcgtccgaggccgccgcgcccgcgggccgtttgcgcgcgcttccgcttccgtcgcgcgacgcccacgcgaggcgccgaggcgcagccgccgagagccgcggagactactccatcccgctcgccggcgtgcaccggcgatcgggagagcaggtctccggaacctctaccttcaacgtcctgcaccgggagaaggcggcaataagggtcactctgtggctgacagctatgaaatgcttctgggtgagtactggcaaacctgaaggagttcttactgctgaacagcagaagcaattcgaggaagccactactctctttgtgggatgcattcttagcgttcttggcgatcgtctggtcgaggtgtatatgcatatgaccgacgctaagaagttgtgggatgcactgaatactaaattcggtgctactgatgctagcaatgatctgtatatcatggagcagttttatgactacaaaatggctgacaaccgttctgtagtcgaacaggctcatgagatacaaaccatggctaaggaactcgaactccttaagtgtgtcttacccgacaaatttgtggccgggtgcattattgtaaaactacctccatcttggagaagtttcggtactgcactcaaacacaagagacaggaatactccgttgaggggttgatagcgtctcttgatgttgaggagaaagctcgggaaaaagatgccgcgtctaagggcgatggtgggcagtccagtgccaatgttgtgcataaggcccagaacaagagcaaggggaaatacaaagctcagcagaccaccaacttcaagaagcagaagaagaacaacaacaatcctaatcaagatgagaggacttgctttgtgtgtggccaagttggtcatctggttaggaagtgcccacagcgcaaggggatgaaggcacctgcagggcagacttctaagtctgctaatgtgaccattggcaacactggagatggaagcgggtatggtaatttacctactgtcgcacggggttccaccgtcctaatggggaatgggtcacatgcttctgttcatggtgttggcacggtagatctgaagtttacttcgggaaagatcgtgcagctaaagaacgtgcagcatgtcccttctatcgacaggaatcttgttagtggctcccgtctgactagagacggatttaagttggtttttgagtctaataaagtagtcgtgtctaaacatggatattttattggtaaaggttatgagtgcggaggcctgttccgtttttccctttctgatttctgcaataagtctgtgaaccatatttgtggcagtgtggatgatgaggctaatgtttggcattcacactactggaaggaggctgtttgtagtgaaatggattccattatcgctaacgggacttgggaggtgacagagcgaccctatgggtgtaaacctgtggggtgcaagtgggtgttcaagaagaagcttaggcctgacgcctcacatggtcttctcgttcatcaaatggacgttaagacagcttttcttaatggagagctggatgaggagatctatgtggatcaacctgatgggtttgtagttgaaggctttgcagtcaatgaggcagataaatgtgtgtactatcgccatggtgggggtgagggagttattttgtgcttgtatgttgacgacatactgatatttgggacaaaccttgaggtgataaatgagtcccattatgtggagaagatcttgaatcgctttggctacattaatagtaagccttctccaacaccttatgatcctagcttgttgcttcgcaagaacaagagaattgctaggaatcaactggaatactcccaaatcattggctcgttgatgtacctggctagtgcaactaggcctgatatctcctttgctgtgagcaagttgagccgatttacctccaatccgggagatgatcactgcgaagatgttgtcctgcagagcattcttgaaagaactcacctttgtgagcttgactgttggtcgcagtctatgaagattttggactactccatcccgctcgccggcgtgcactggcgatcgggagagcaggtctccggaacctctaccttcgacgtcctgcaccgggagaaggcggcaataaggtttttgggaagcgcttcgcgcgactgctccctgttcgttcgcgacggctcgccttcctcttcgctcgcgtgtttcgtgccttcgtag

SEQ ID NO: 15270 - DNA, 957 bp, Oryza sativa
  Clone ID: TFbOSC400972j.C1.o1.fg
atgggaataaaccagcccatgctactctttgaagatcctccccaagcttccaggaacaaaggacgagtccaagcctcactaaagcctgaagactacaccatcaatctgaatcacctaaagcaatattcttcgaatgaaaggtgccacctgactccagcaaaacgaaggataaatgtcacgtgttatagatgtggcgaggaaggacattgtgccttggattgccctaagaaaaagctaggaaatggacaagtaaggaatatacctcgacacccaaaaaggaaaatgagggcaggaataccaccaaaaccgatgccacattcactctatccaaaacctatgtatcagcaatttcgtagacaaggaactacaccacattggtggaagggaaaacggaaaagaaaagcgtcatcacgaataacatatgctgaacttaacctcagtaaaatgggaatagaaatcggtgatttgcctgaagatgttgaagaactacaactatggcaacgaaagagagatggctgttgtttttcttgtggacaatttggacattatgcgataggttgtactcaagacaccaatgaagaacaagaaacactgccctcacagatcggcccggaaaaggatagagttccagacccatccaaagaagtttcgaagattaaggcatgtagtcgttgcggagagataggacactacggtagtaattgcattactcaatgcccctactgtgacgaagaccatccaaacggagaatgcccaacaacgaagatcacgtgcttcctctgcgaaaagacggatcatgtgccccaagattgtcaactaagtccgttgctgaccaagacggcggaagtacaaagagtgtcgcttcgcttcgcccatcgactcatgacatccagaagccacgaagacccgggatttcctacttttgatttgcatgtttgtttgtcgaacaatatttaa

SEQ ID NO: 15271 - DNA, 639 bp, Oryza sativa
  Clone ID: TFbOSC900146j.C1.o24.fg
atgtggaatggttggcctggattggcttgggacgagctgggacccaggtcgggttgccagttcggtctgaatcatcgtagaccttgggttaaggcaggcctgaagcgcctgtgtaataatatggctaacaatgaaaaaggcaataaggtcagaagtcaggacaagggtacctcaagctcccgattgaatgaagcaccagacaccagttgtgtggcagtggtccaacacctgattaaccagaatcgattgcttaaagagctactacagcagcatcagacaccaattctgaacccgagtcagatgcaacctcaagtgcagttggaggcagtccaagcactcacacctcaaccccagcaaccagttgacaagacagaggccagtatctgcgttgtacctttagatgttccagcacagcagccaagaaatcaggtacaagatgaagaacctgagtgtaagaaagttattgtttgttacaactgcagtgaagaaggacattactccagaaattgtccacaaccaaagcgtaacccacgccatcattccggacattatgcacgaagaagacatgaccacaatattagggtcactggagcaaatgcagaacctgtcaagcctagtgctagtcagaagcaatcataa

SEQ ID NO: 15272 - DNA, 975 bp, Oryza sativa
  Clone ID: TFbOSC400299j.C1.o12.fg
atggcggcggcggtgcccaccggctgctacaagtgcggccgtccgggccactggtcccgcgactgcccctccgagcccgccggcgccggcgctgcatccaccgacaaccctaaccctaaccccaaccccaaacccagcgcctcccgcttcgccccttacccgaggccgaggttcgggaagagtgccgcggcggcggcggcggcagaaggggaggacgggagtggcggccaggcgcagggtaagaagaagaagaaggagagggcgacgcggcccaagctcactccggacttgctgctctccgatgacggccttggcttcgtcctccgctacttccccaaggccttcaaaccccgcgcccgccccggccacgaggtagaggatcttggtaatctgatcaagctatacacagactggcactctcgcttgattccttattactcctttgatcagtttgtgcgaaaagtcgagaaagtgggggctagtaaccgtgttaggagatgcgtttctgaactgagggacagggttgccagagggggagatcctaccctactgcatgaaccgccggtcgaagtcatcccagagggcgaaccagatggagccacagctgaagacccaatttttgggactgaagttccggcgaccgaaaaccatggcgtggaccaggtgcaagaagatatagacataccggtcgaaagcaacgatgtggatcccatgcaagaagatctccttaatgaaatctacaataaggaagctgatgagccacaaatcccagctgttggaggaacagccgaggaaaccacaccggccatggctccaaaggaagcgaaaccacaagatgatccaccacgagaagcgcagaaccaaccgggcaagattcagctgaccgaagagcagagggcgcgcatggaggcaaaccggctcagggccttggagagggcagcagcggcgcgtgctcgcgcctcgcagccggcatag

SEQ ID NO: 15273 - DNA, 1068 bp, Oryza sativa
  Clone ID: TFbOSC10205j.C1.o1.fg
atggctgacaataaaaaaggcagtatggtcagaaatcaggacgtgggtacctcaagctcccgagtgaatgaagcaccagacaccagttgtatggcagtggtccaacacctgattaaccagaacaaattgcttatagagatactacagcagcatcagacgccaattctgaacccgagtcagatgcaacctcaagtgcagttggaggcagtccaagcactcacaccacaagtcagcgctccgccagcatcccaacaggcccatcgtgccatgccacttgtggactcaaaagaagcaagaatcatttgttttatctgtgttgaacaagggcactatgcaaggaaccgtcctcagcagaaaagaaaagcaccaatgcgaaccgaagatgaggtccgtaagatgaccattaccggcacagaatggcctccaccaggaatgacaaaacgtcagagaagaaatttcttccgaggtgcaccacagttgacagaacatcttttggctaatggaggtagagtgtctgatagcgaagattcagatcaagtctcctcacgggatgaagatgagaagtctctccaaggtttcaatcagaataaaaaggaacataaggcatgctctcgttgtggagaaatcggtcactttgccagctcatgtgtcaccacttgcgttccttgtgaggaagaccatccacccgacgagtgtccaacgagcaggatcacttgtttcttgtgtgaaggaactaatcatgtaccaaaagattgtcaattcagttttctgctgacgaagaagatggccaaccaacccgccagttacaatggagagaagcatcaaggcaacccaaatcctcgacaagactacagtttcagcctaactccagtgccaagacagaggaatcaaaatgggaaaagaaaatgccaagtctggaaagatatatgttgcttcaattgtcaagaagtgggtcatttcgccgacatgtgcccgaaaccgagaaacatatttgccagcacatcagtccatgcaactcccctcaatcagaagcttgctcctcagcgaattgtcatccatgcgtcctga

SEQ ID NO: 15274 - DNA, 1520 bp, Oryza sativa
  Clone ID: TFbOSC12275j.C1.o1.np
ctcaaaactgagcctccaacctttgccattgccatcgatcctatggaagccagtgattggttgcgcacagtcgagaagaagctagggttgattcagtgcaccgaccaggagcgggttggcttcgcaactcatcagttggttggaccggcttcagagtggtggaatagctacgaagcatcacggccagaaggacataccatcacctggaacgagcttttcagtcctgctactttcatggtagtatccatcatggtgtcccgtcaggtaatgtattacactaagaaaacgagagtttcgctacctgaagcaaggagatttgaccgtcacagagtacctgcacgagttctatcgtttggctcactatgcaccagaagatgtggaaacggatgaagacaaacaagagaagtttctccaggggttaaaagatgagccgcagtgcaactccttctagaggattatgaagattttgagaaacttgtggacaaagccatgcaactcgaaagtgagcataatcggatgacgaactgcaagaggaggattgtcaacatcccagtatttccatgtggtaaccaaagacagcgcactgagccacttcagatcaccggatcttctgttgtgcatcaagagtttccgcgccaagaagatggacacaatgcagacaacaacattagcaatactaatgatgatgatgttaccaccaacaaccatgcttcttgccccaatagtgaccactcgaatcaagcgtgcaatgtcaacatcattcaccaagatgtcgacgatagtatcaatgatggcacccaaaatgacaaccctagcaattgggactctgagaaagactccgatggtgatagcaactatggtaccactgatgccaatgttagcaaggatttccagccaccaattccaactccaagtcagaatgaccgtccccagacggatagctcagcaaagaagacgttgatttgctacaattgcaaagaaccagggcattactcgagggactgcctgcaaccaaggcaaagtcgacctccacattaccgccaatttacacgaagcagacatcccaatcgtattgtggtcactggagcaaacgctgtacccgtttctctgaaaggcagcaggctcaagtaccacatcgtcaccagaagcatccacaactctcggagtgaagagtacttagttgacaaagttgacgccaaagatatgaactatgcgaagttctggaactgaagccccatcttcaggtgccgcaacccagtcgaagtcagctaaaggttcaaccagggacaagtcgggtgaagagaagatcccatctgcaacaggagatcgagccaagcagtccagagtggagaagttttgctaggcaagtttgttatagaagacgcgacgaaagaagtccaccaagaagagaagaccgcccaacctatcttcttgctagcctcctcgaatctcggggacgagattcttgtaaggggggtggatttgtcacgtcctgataaattcatcccaaaattaaaaat

SEQ ID NO: 15275 - DNA, 800 bp, Oryza sativa
  Clone ID: TFbOSC13326j.C1.o2.gm
agtacctgcatgagttctatcgtttggctcactatgcaccagaagatgtggaaacggatgaagacaaacaagagaagtttctccaggggttaaaagatgagcttgcagtgcaactactcctagaggattatgaaaattttgagaaacttgtggacaaagccatgcaacttgaaagtgagcataatcggatgacgaactgcaagagaaggatggtcaacaacccagtatttccaggtggtaaccaaagacagcgcactgagccacttcagatcaccggatcttctgttgtgtatcaagagttcctgccccaagaagatgaacgcaatgcagacaacaacaatagcactactaatgctgataataccaccaaccaccatggttcttgccccattcatgatcacttagatcaagcgtgcaatgtcaacagcattcaccaagatatcgacgatagtatcaatgaaggcacccagaatgacaaccctagcaattttgactctgagaaagactccaatggtgatagcaactatggtaccactgatgccaatgttagcaaggatttccaaccaccaactccaactccaagtcagaatgatcgtcctcagacggatagctcagcaaagaagacgttgatttgctacaattgcaaagaaccagggcattactcgagggactgcctgcaaccaaggcaaaatcgacctccacattaccgccaatttacacgaagcagacattccaatcgtattgtggtcactggagcaaacgccgtacccgtgaggcctcgtgttaatcagaacccatag

SEQ ID NO: 15276 - DNA, 1504 bp, Oryza sativa
  Clone ID: TFbOSC14131j.C1.o1.np
gtcatatggcagagggttggtgccctgctgctaggggctcagttccgcctgcctgtcccgggtatcccggccgtaggtgggattgggtcggtactcttgtctaaggctaggatgggttggaaactatgtcacgtcttccgtccgtataccgtggtgatggataatactggtaacaaaggctatgggaatgatggatccgatgactcaagaacccaagccaatgggaatgagagaagcatcaacgaaacctcaccagagctaatccaagttgtggttaaccaaaccaacatgttggcaacagcctttcaactattacagaattggaacaacccagcaggggcaaccaacgttcaagtgcctacagtccagcaacagtgcaagttatcagaatttctcaaaactgagcctccaacctttgccattgccgtcgatcctatggaagccagtgattggttgcgcacaatcgagaagaagctagggttgattcagtgcaccgaccaggagcgggttggcttcgcaactcatcagctggttggaccggcttcagagtggtgggatagctacgaggcatcacggccagaaggacataccatcacctggaacgagttttcctctgtattcaggagatcacatgttcccgcgggaatgatcacactaagaaaacgagagtttcgctacctgaagcaaggggatttgaccgtcacagagtacctgcacgagttctatcgtttggctcactatgcaccagaagatgtggaaacggatgaagacaaacaagagaagtttctccaggggttaaaagatgaacttgcagtgcaactactcctagaggattatgaagattttgagaaacttgtggacaaagccatgcaactcgagagtgagcataatcgaatgacgaactgcaagagaaggattgtcaacatcccagtaattccatgtggtaaccaaaggcagcgcactgagccacttcagatcaccgggtcttctgttgtgcatcaagagttcctgctccaagaagacggacgcgatgcagacaacaacactagcaatactaatgatgatgataccaccaacaaccatggttcttgccccattagtgaccactcgaataaagcgtgcaatgtcagtagcattcaccaagatgtcaatgatagtatcaatgttggaacccagaatgacaaccttagcaattttgacactgagaaagactccaatggtgatagcaactatggtaccactgatgccaatgttagcaaggattggcaaccaccgattccaactccaagtcagaatgatcgccctcagacggatagctcagcaaagaagaacgttgatttgctacaattgcaaagaaccagggcattactcgagggactgcctgcaaccaaggcaaaatcgacctccacattaccggcaatttacaagaatcagacatcccaatcctattgggggcactggagcaaacaccgtacccgtgaggccttgtggtaatcaaaaacca

SEQ ID NO: 15277 - DNA, 1341 bp, Oryza sativa
  Clone ID: TFbOSC15236j.C1.o1.fg
atggataacactggtaacaaaggctatgggaatgatggatctgatgactcaagaacccaagccaatgggaatgagaaaagcatcaacgaaacctcaccagagctaatccaaattgtggttaaccaaaccaacatgttggcaacagcatttcaactattacaaaatcggaagaacccagcaggggcaaccaacgttcaagtacctacagtccagcgacagtgcaagttatcagaattcctcaaaactgatcctccaacctttgccattgccgtcgatcctatggaagcttgtgattggttgcgcacagtcgagaagaagctagggttgattcagtgcacagaccaggagcgggttgtcttcgcaactcatcagttggttcgaccagcttcagaatggtgggatagctatgaagcatcacggccagaaggacataccatcacctgggatgagttttcagccgtgttcaagagatcacatgttcccgtaggaatgatcacacagagaaaacgagagttccgctacctgaagcaagaagatttgaccgtcacagagtacctgcacgagttctattgtttggctcactatgcaccagaagatgtggaaacggatgaagacaaacaagagaagtttctccacgggttaaaggatgagatcgcagtgcaactactactagaggaatatgaagattttgagaaacttgtggacaaagccatacaactcgaaagtgagcataatcggatgaagaactgcaagagaaggattgttagcatcccagtatttccatgtggtaaccaaagacagcgcaccgagccacttcagatcaccggatcttctgttgcgcatcaagagtttctgccccaagaagatggacacaatgcagacaacaacattagcaatactaatgatgatgataccaccaacaaccatgcttcttgccccattagtgaccactcgaatcaagcgtgcaatgtcaacatcattcaccaaggtgtcgacgatagtatcaatgatggcacccagaatgacaaccctagcaattgtgactctgagaaagactccaatggtgatagcaactatggtaccactgatgccaatgttagcaaggatttccaaccaccaattccaactccaagtcagaatgatcgtccccagacggatagctcagcaaagaagacgttgatttgctataattgcaaagaacccgggcattactcaagggactgcctgcaaccaaggcaaagtcgacctccacattaccgccaatttacacgaagcagacatcccaatcgtattgtggtcactggagcaaacgccgtacccgtgaggcctcgtgttaattag

SEQ ID NO: 15278 - DNA, 2380 bp, Oryza sativa
  Clone ID: TFbOSC15753j.C1.o3.np
atggataatactggtaacaaaggctatgggaatgatggatccgatgactcaagaacccaagccaatgggaatgagagaagcatcaacgaaacctcaccagagctaatccaagttgtggttaaccaaaccaacatgttggcaacagcctttcaactattacagaattggaacaacccagcaggggcaaccaacgttcaagtgcctacagtccagcaacagtgcaagttatcagaatttctcaaaactgagcctccaacctttgccattgccgtcgatcctatggaagccagtgattggttgcgcacaatcgagaagaagctagggttgattcagtgcaccgaccaggagcgggttggcttcgcaactcatcagctggttggaccggcttcagagtggtgggatagctacgaggcatcacggccagaaggacataccatcacctggaacgagttttcctctgtattcaggagatcacatgttcccgcgggaatgatcacactaagaaaacgagagtttcgctacctgaagcaaggggatttgaccgtcacagagtacctgcacgagttctatcgtttggctcactatgcaccagaagatgtggaaacggatgaagacaaacaagagaagtttctccaggggttaaaagatgaacttgcagtgcaactactcctagaggattatgaagattttgagaaacttgtggacaaagccatgcaactcgaaagtgagcataatcgaatgacgaactgcaagagaaggattgtcaacatcccagtaattccatgtggtaaccaaaggcagcgcactgagccacttcagatcaccgggtcttctgttgtgcatcaagagttcctgctccaagaagacggacgcgatgcagacaacaacactagcaatactaatgatgatgataccaccaacaaccatggttcttgccccattagtgaccactcgaataaagcgtgcaatgtcagtagcattcaccaagatgtcaatgatagtatcaatgttggaacccagaatgacaaccttagcaattttgacactgagaaagactccaatggtgatagcaactatggtaccactgatgccaatgttagcaaggatttccaaccaccgattccaactccaagtcagaatgatcgtcctcagacggatagctcagcaaagaagacgttgatttgctacaattgcaaagaaccagggcattactcgagggactgcctgcaaccaaggcaaaatcgacctccacattaccgccaatttacaagaatcagacatcccaatcgtattgtggtcactggagcaaacaccgtacccgtttcactgaaaggcagcaagccaaaggacctcatcgtccccagaagcgtccgcaatccacgacatgaagtgggtaacttgtatgaggttgactccaaagatatgaactatgcaaagttctggaactgaatccccatcttcaagtgccgcaacccagtcgaagtcagctaaaggttcaaccagggataagtcaggtgaagagaagattccatctgcaccccgcgcgcgcgcgccgctgacaggcgggcccgcccgccactctcgctgacgggtgggacccacctgtcatctccctccccgcgccgcgcccgccgccgcccgtgccctagcgccgccgccgccgccgaatccgccgcttcccgccttccccgcgcgccataaagaggggcgaattactccccgcgtttccctctcccgattccccctcttttccctctctctctccctcggattcgtccgatttgaatcccgcaatcatcgccggcgtcttcaatggcggccgagatctccgcgcgcgattccttcctccccggccgccttctctcccttccgacgctataaaatcgtccctcgtgcttcgctcttccgtttccgccgctcgccgctcgctctcgccgtcggtttcgtgcccgcgccgtgctcctctctctccgccgtcgccgccgagctccgtttcgccgccgtcgtcgctccggtcctcctcccgactcggcgccacctccatcggcttcgccgagtggttgccgaccccgtccgccgctccgcttcgcccgccgaccgccggagcaccgtcgtcatcgtcatcccgaaccgcgccgccgctttcctccgctccggccgccgttctcgtcgtcgtcgttgtcccggggtgagccgaagaccgccgttcgctttcccccttccctccgctctctcgggcgccgctccaccgcgccgatggtcgccggcggtgaccatcggggcgcgggcgcgccgctcccgtcggccgtgccggcgagtgggattctctccattgttgttattggggttgttgggaccattcccgttgctgcgagtattc

SEQ ID NO: 15279 - DNA, 2425 bp, Oryza sativa
  Clone ID: TFbOSC16364j.C1.o1.np
atggataacactggtaacaaaggctatgggaatgatggatccgatgactcaagaacccaagccaatgggaatgagagaagcatcaacgaaacctcaccagagctaatccaagttgtggttaaccaaaccaacatgttggcaacagcctttcaactattacagaattggaacaacccagcaggggcaaccaacgttcaagtacctacagtccagcaacagtgcaagttatcagaatttctcaaaactgggcctccaacctttgccatggccgtcgatcctatggaagccagtgattggttgcgcacaatcgagaagaagctagggttgattcagtgcaccgaccaggagcgggttggcttcgcaactcatcagttggttggaccggcttcagagtggtgggatagctacgaagcatcacggccagaaggacataccatcacctggaacgagttttcatctgtattcaagagatcacatgttcccgcaggaatgatcacactaagaaaacgagagtttcgctacctgaagcaaggagatttgaccgtcacagagtacctgcacgagttctatcgtttggctcactatgcaccagaagatgtggaaacggatgaagacaaacaagagaagtttctccaggggttaaaagatgagcttgcagtgcaactacttctagaggattatgaaaattttgagaaacttgtggacaaagccatgcaactcgaaagtgagcataatcggatgacgaactgcaagagaaggattgtcaacatcccagtatttccatgtggaaaccaaggacagcgcactgagccacttcagatcaccggatcttctgttgcgcatcaagagtttccgccccaagaagatggacacaatgcagacaacaacattagcaatactaatgatgatgatgttaccaccaacaaccatgcttcttgccccaatagtgaccactcgaatcaagcgtgcaatgtcaacatcattcaccaagatgtcgacgatagtatcaatgatggcacccaaaatgacaaccctagtaattgggactctgggaaagactccgatggtgatagcaactatggtaccactgatgccaatgttagcaaggagttccagccaccaattccaactccaagtcagaatgactgtccccagacggatagctcagcaaagaagacgttgatttgctacaattgcaaagaaccagggcattactcgagggactgcctgcaaccaaggcaaagtcgacctccacattaccgccaatttacacgaagcagacatcccaatcgtattgtggtcactggagcaaacgccgtacccgtttcactgaaaggcagcaagccaaaggacctcatcgtccccagaagcgtccgcaatccacattaaagaataccacctgttagaggttgacgccaaagatatgaattatgagaagttctggaactgaagtcccatcttcaagtgccacaatccagtcgaagtcagctagaggtgcaaccagggaaaagtcaggtgaagagaagattccatctgcaacacccgcgcgcgcgccgctgacgggcgggcccgcccgccaccctcgctgacgggtggggcccacccgtcatcgcctacctcgcgccgcgcccgccgctcgcccgtgccctagcgccgccgccgccgccgaatccgccgcatcccgccgtccccgcgcgccataaagagggggaaatcactccccgtgattccctctcccttttcccccgtttttccctctctctctctccctcggattcgtttggaatctctcccgaaatcctcgccggcgtcattgatggagccgagatcgccgcgccggtttccctctcatccggccgccctctctccctcccgacgctatataatcgttccccgtgcctccctcctccgtttccgccgctcgccgctctctctctccgtcggaatcgtgcccgcgccgtcgtcctctctctccgccgtcgccgacgagctccggttcgccgccgccgtcgctccggacttcctcccctctcggcgtcgcctccttcggcttcgccgcgtcctcgtcgaccccgtccgctcctccgtttcgcccgccgaccgccggaacatcgccgtcctcgtcgatccgaaccgcgccgccgccttcctccgctccggtcgtcgtttccgccgtcctcgtcgtcccggggtgagccgaggaccgccgcttcgcttccctcttccctcccctctctcggccgccgctccgccgcgccgttggtcgccggcggcgaccatcggggcgcgggtgcgccgccttccgtcggccgtgccggcgaggccgccttcgggcgcgccccgcggctgccaggtgggcccggccgtcagccgcccgcgcccgcgggtgcggctgacgcgtgggacccacggcgccggccggcgt

SEQ ID NO: 15280 - DNA, 1350 bp, Oryza sativa
  Clone ID: TFbOSC23023j.C1.o1.fg
atggataacactggtaacaaaggctatgggaatgatggatccgatgactcaagaacccaagccaatgggaatgagaaaagcatcaacgaaacctcaccagagctaatccaaatagtggttaaccaaaccaacatgttggcaacagcctttcaactattacagaattggaacaacccagcaggggcaaccaacgttcaagtgcctacagtccagcaacagtgcaagttatcagaatttctcaaaactgaacctccaacctttgccattgccgtcgatcctatggaagccagtgattggttgcgcacaatcgagaagaagctagggttgattcagtgcaccgaccaggagcgggttggcttcgcaactcatcagctggttggaccggcttcagagtggtgggatcgctacgaagcatcacggccagaaggacataccattacctggaacgagttttcatctgtattcaggagatcacatgttcccgcaggaacgatcacactaagaaaacgagagtttcgctacctgaagcaaggagatttgaccgtcacagagtacctgcatgagttctatcgtttggctcactatgcaccagaagatgtggaaacggatgaagacaaacaagagaagtttctccaggggttaaaagatgagcttgcagtgcaactactcctagaggattatgaaaattttgagaaacttgtggacaaagccatgcaacttgaaagtgagcataatcggatgacgaactgcaagagaaggatggtcaacaacccagtatttccaggtggtaaccaaagacagcgcactgagccacttcagatcaccggatcttctgttgtgtatcaagagttcctgccccaagaagatgaacgcaatgcagacaacaacaatagcactactaatgctgataataccaccaaccaccatggttcttgccccattcatgatcacttagatcaagcgtgcaatgtcaacagcattcaccaagatatcgacgatagtatcaatgaaggcacccagaatgacaaccctagcaattttgactctgagaaagactccaatggtgatagcaactatggtaccactgatgccaatgttagcaaggatttccaaccaccaactccaactccaagtcagaatgatcgtcctcagacggatagctcagcaaagaagacgttgatttgctacaattgcaaagaaccagggcattactcgagggactgcctgcaaccaaggcaaaatcgacctccacattaccgccaatttacacgaagcagacattccaatcgtattgtggtcactggagcaaacgccgtacccgtgaggcctcgtgttaatcagaacccatag

SEQ ID NO: 15281 - DNA, 1563 bp, Oryza sativa
  Clone ID: TFbOSC28035j.C1.o1.fg
atggacatctctaggacaaatgaaggctacacgagctgcggcccggtagtcgagatgtcatggcacagggctggtgtcctgctgctgggggctcattcctgcctacctgtcccggaggttccggccgtaggtggggttgggtcggtactcttgtttatggctaggatgggttgggaactatgtcacgtcttccgtccgtataccgtggtgatggataacactggtaacaaaggctatgggaatgatggatccgatgactcaagaacccaagccagtgggaatgagaaaagcatcaacgaaacctcaccagagctaatccaaattgtggttaaccaaaccaacatgttggcaacagcctttcaactattacagaattggaacaacccagcaggggcaaccaacgttcaagtacccacagtccagcaacagtgcaagttatcagaatttctcaaaactgagcctccaacctttgccattgccgtcgatcctatggaagccagtgattggttgcgcacagtcgagaagaagctagggttgattcagtgcaccgaccaggagcgggttggcttcgcaactcatcagttggttggaccggcttcagagtggtgggatagctatgaagcatcacggccagaaggacataccatcacctggaacgagttttcatctgtattcaagagatcacatgttcccgcaggaatgatcacactaagaaaacgagagtttcgctacctgaagcaaggagatttgaccgtcacagagtacctgcacgagttctatcgtttggctcactatgcaccagaagatgtagaaacggatgaagacaaacaagagcagtttctccaggggttaaaagatgagcttgcagtgcaactactcctagaggattatgaagattttgagaaacttgtggacaaagccatgcaacttgaaagtgagcataatcggatgacgaactgcaagagaaggatggtcaacattccagtatttccatgtggtaaccaaggacagcgcactgagccacttcagatcaccggatcttctgttgcgcatcaagagtttccgccccaagaagatggacacaatgcagacaacaacattagcaatactaatgatgatgatgttaccaccaacaaccatgcttcttgccccaatagtgaccactcgaatcaagcgtgcaatgtcaacatcattcaccaagatgtcgacgatagtatcaatgatggcacccaaaatgacaaccctagcaattgggactctgagaaagactccgatggtgatagcaactatggtaccactgatgccaatgttagcaaggatttccagccaccaattccaactccaagtcagaatgaccgtccccagacggatagctcagcaaagaagacgttgatttgctacaattgcaaagaaccagggcattactcgagggactgcctgcaaccaaggcaaagtcgacctccacattaccgccaatttacacgaagcagacatcccaatcgtattgtggtcactggagcaaacgccgtacccgtgaggcctcgtgttaatcagaacccatag

SEQ ID NO: 15282 - DNA, 357 bp, Oryza sativa
  Clone ID: TFbOSC28035j.C1.o3.gm
atggaattggacgggagaacagcggacgaggtggacctcgggatggcggacgcggcggcgccgatggcggggtgcggcgggagctcgggagcggacggcgaaagagggaaaaaggtggagagaggcgcggtggtcggttatatagaggtggggaggccggacgtggccgggagcggcggttccgcggcgacgacgtggagagggcgtggggcggcgacgtggggacgtgtgggcgcggagtggggcgcggatgcggaggaagcggcggcgtgggcggcggtttcggcggcggatggtggcggctgccggaggttagggacaaccgacagagcaagggaggggtacttcagggcgtga

SEQ ID NO: 15283 - DNA, 803 bp, Oryza sativa
  Clone ID: TFbOSC32072j.C1.o1.fg
agtacctgcatgagttctatcgtttggctcactatgcaccagaagatgtggaaacggatgaagacaaacaagagaagtttctccaggggttaaaagatgagcttgcagtgcaattactcctagaggattatgaagattttgagaaacttgtggacaaagccatgcaactcaaaagtgagcataatcggatgacgaactgcaagagaaggattgtcaacatcccagtatttccaggtggtagccaaagacagcgcactgagccacttcagatcaccggatcttctgttgtgcatcaagagttcctgccccaagaagatgaacgcaatgcagacaacaacactagcaatactaatgatgatgataccaccaacaaccatggttcatgccccattagtgaccactcgaataaagcgtgcaatgtcagtagcattcaccaagatgtcaacgatagtatcaatgttggaacccagaatgacaaccttagcaattttgacactgagaaagactccaatggtgatagcaactatggtaccactgatgccaatgttagcaaggatttccaaccaccgattccaactccaagtcagaatgatcgtcctcagacggatagctcagcaaagaagacgttgatttgctacaattgcaaagaaccagggcattactcgagggactgcctgcaaccaaggcaaaatcgacctccacattaccgccaatttacacgaagcagacatcccaatcgtattgtggtcactggagcaaatgcagtacctgttaagcctagcgctagtcagaagcaaccataa

SEQ ID NO: 15284 - DNA, 3222 bp, Oryza sativa
  Clone ID: TFbOSC400220j.C1.o47.fg
atggcacggggctccgctccgcttgacggtagcgtgctgccgccttcccgcatcgtgagcgagagacaggccgggctgccgcgccgcttcatgccggaatctgccaccggccgggagatagtctcgctgggcgagggatgcccggcgccacactacccggggcggtccgtcttcttcctcccttttgctatggcatggctggttccgccattttcttttttcttcatggatgttctggagttttacgatctccagatggcgcacctcacccccaacgcggtaatgacattggccatcttcgcgcacctgtgcgagatgttcatcggggtacagccggtgtcgccgccgtcggtggttggtggttgctacttccagctgcgggggccggtgctgaaccgctacattccctgcgtcctccgcaagaagtgggatgattggaagagcgactggttctacacccccctcgccgacgaagcgcgcctccgacttccgagccagcctctagcgcaggcctacagctggcgggtgccggtagatctgggagatggctatgacgccgtcctcgaccgcctggcgggcctgcgatcccaggggctcacaggggccatggagtacaccgggtccgaggactgtatgaggacccaccagggggtcagatgggactgggctcctgaggacttcaagatagtggtccaacgggtgctgaatctcagttccatggagacatccctcattcctcaaggagtcctccccctctgcagcgatccagaccgcgcctccatcctgaccatcatgcaggcggtcggggcgtcggaggagcgggctcctcgaggccacgatggagcgggcgggagccgcaggggggaacaatctaccccgggagggggtcgtgcttctgggccccgcgacgggggcccggggagcggccgccctgccgacacccgggggaagaggaagcaggaaggaacccctcccccatctcctccccgagggggcggggcggcgcgtgccagcagcaggcgcccggaggtggccacgccgacgtcgcagcccgagggggagcggaagaagaaacggctccgcaagatgggggggacagaaccatcccggggaaacctcatttcccctccaaggtggtcgtttaaccgaccccctcgcagcgagatcccgtcgcgtccctcccgccattccaagtccggccagtctaaggccgaggacccggcgaccacagaggctcggaggcgggaatctgaccggcgagaagccgcggatcgcctacgggaagccgaggaggccgcccagcagctggttgacaaagcaattcgacttgaagacaagaagaacaggatggataaccgtaaaaggaaaataattgtattccaggaggcacaggatagtagccagaggcagcgtatcaagccactccaaattggtgaatctttttctgcaggtcaagaacagtcacaacagttgggcatgaatggtgagatcaactcagagactaatgcaagcaatgaagacaatgatgagcaagctactcaatcagtgtcatttcagcaggatcagtctcgagaagataacagtaatggaagggagcagcgggtgtgtttcaattgttataagccaggtcactttgtaagagagtgtccgaagccgaagcatcagcagccgcaagtcaacaacattgtcgtcacaggagccaatgcagtgccagttgcgtcttcaagagttgcgtcttcaagtgttacagctcagctaccagtttcaaagcagcatgaatttccgggcgtgacagcgacgacttccgaggcagctcgcgacgaggccgcgggcgcatcgcttgggcccactccctcgggcgacgctcaggacaagccaggtccgggggacatccctgagtccggcacgtccatcggtgggccgagccgcgcggcatcctcaccgaggcggctcttccccacgccttccgttgctccactgagcgcagaaccccttctgcaggccttggccgtcgcaaacaccacggtgttggacgggttaagtgcccaggtggaggccctgcaagcagagcgggcggagcttgacgccgcatgggcgcgtgtcgaagaggggcgacgctcggtggaggccatggtggaggtgggccgcaaggcacaccgccggcacgtctcagagctcgaagcccgtcggaaggtgctgggggagatcgccaaggaggtggaggaggagcggggggctgccctcatcgccaccaccgtgatgaacgaggcgcaggacaccctccgccttcaatacaggagctgggaggcggagctagggaaaaagctcgacgccgcccggatggtccttgacgctgccgctgcccgagaacggcgggcggcggagaccgaggtggcatcccggcggcgcgaagaagcccttgaggcccgtgccatggcgctggaagagcgtgcctgcgccgtggagagggacttggcggatcgcgaggccgccgttgctattcgggaggtcacactggcggtgcacgaagccgcctgtgccgaagaagagtccgcgctccgcctccgcgaggacgcgctcaccgagcgggagcgagctctcgaggaagccgaggccgcggcgcaacggctggcggacagcctgtccctccgcgaggctgcgcaagaggaacaagcgcgtcgcaatctggaaagtgcccgcgccgagagggccgcactgaaccagcgggccgctgaactcgaggcgcaggcaagggagctggatgcaagggcgcgtagcggcggggcggccacgggcgacagcgacttagccgcccgcctcgcagctgccgaacacaccatcgcggatctgcagggcgcgctggattcgtccaccggggaggtcgaggcccttcgcctagcaggcgagatagggcccagcatgcttcgcgacgccgtgtcccgtttagaccgcgccgggcggcaggcgggtctctggggcgggcggactgtgaagtacgccgccaaccagggaggcctcgcccagcgcctctcggagatggccgggactctccagcggctccccgaggagctcgaggggacgattaagtcatcctcgagggacctcgcccgaggagcggtggagctcgtactggcgagttaccaggccagggaccccgacttctccccatggacggcgctggacgagttccctcccgggaccgaggatggcgcgcgcgcgtag

SEQ ID NO: 15285 - DNA, 1509 bp, Oryza sativa
  Clone ID: TFbOSC401338j.C1.o7.fg
atgtcatggcagagggttggtgccctgctgctaggggctcagtcttgcctgcctgtcccgggggttccggccgtaggcgggattgggtcggtactcttgtctatggctaggatgggttggaaactatgtcacgtcttccgtctgtataccgtggtgatgaataacactggtaacaaaggctatgggaatgatggatccgatgactcaagaacccaagccaatgggaatgagagaagcatcaacgaaacctcaccagagctaatccaagttgtggttaaccaaaccaacatgttggcaacagcctttcaactattacagaattggaacaacccagcaagggcaaccaacgttcaagtgcctacagtccagcaacagtgcaagttatcagaatttctcaaaactgggcctccaacctttgccatggccgtcgatcctatggaagccagtgattggttgcgcacagtcgagaagaagctagggttgattcagtgcaccgaccaggagcgggttggcttcgcaactcatcagttggttggaccggcttcagagtggtgggatagctacgaagcatcacggccagaaggacataccatcacctggaacgagttttcatctgtattcaagagatcacatgttcccgcaggaatgatcacactaagaaaacgagagtttcgctacctgaagcaaggagatttgaccgtcacagagtacctgcatgagttctatcgtttggctcactatgcaccagaagatgtggaaacggatgaagacaaacaagagaagtttctccaggggttaaaagatgagcttgcagtgcaattactcctagaggattatgaagattttgagaaacttgtggacaaagccatgcaactcaaaagtgagcataatcggatgacgaactgcaagagaaggattgtcaacatcccagtatttccaggtggtagccaaagacagcgcactgagccacttcagatcaccggatcttctgttgtgcatcaagagttcctgccccaagaagatgaacgcaatgcagacaacaacactagcaatactaatgatgatgataccaccaacaaccatggttcatgccccattagtgaccactcgaataaagcgtgcaatgtcagtagcattcaccaagatgtcaacgatagtatcaatgttggaacccagaatgacaaccttagcaattttgacactgagaaagactccaatggtgatagcaactatggtaccactgatgccaatgttagcaaggatttccaaccaccgattccaactccaagtcagaatgatcgtcctcagacggatagctcagcaaagaagacgttgatttgctacaattgcaaagaaccagggcattactcgagggactgcctgcaaccaaggcaaaatcgacctccacattaccgccaatttacacgaagcagacatcccaatcgtattgtggtcactggagcaaatgcagtacctgttaagcctagcgctagtcagaagcaaccataa

SEQ ID NO: 15286 - DNA, 3210 bp, Oryza sativa
  Clone ID: TFbOSC401835j.C1.o9.fg
atggctggttttgccgatgcactgaggccggataaatttaccggtgtgtactttaagagatggcagatcagggtcactctgtggctgacagctatgaaatgcttctgggtgagtactggcaagcctatgggcgttcttaatgttgatcagcagaaagaattcgatgaggccactactctctttgtgggatgcattcttagcatgcttggcgatcgtctggtcgaggtgtatatgcatatgaccgacgctaaggagttgtggaatgcactgaatactaaattcggtgctactgatgctagcaatgatctgtatatcatggagcagtttcatgactacaagatggctgacaaccgttctgtagtcgaacaggctcatgagatacagaccatggctaaggaactcgaactccttaagtgtgtcttacccgacaaatttgtggccgggtgcattattgcgaaactacctccatcttggagaggtttcggtactgcactcaaacacaagacacaggaatactccgttgaggggttgatagcgtctcttgatgttaaggagaaatctcgggaaaaagatgccgcgtctaagggagatggtgggcagtccactgccaatgttgtgcacaaagcccagaacaagagcaaggggaaatacaaagctcagcaggccaccaacttcaagaagaagaacaacagcaacaatcctaatcaggatgagatgacttgctttgtgtgtggtcaacctggccatctggtcaggaagtgtccacaacgcaaggggatgaaggcacctgcagggcagacctctaagtctgctaatgtgaccattggcaacactggagatggaagcgggtatggggccaatgtacatgtttgtgctgacatatcattgttttcttcttatcaggtcgcgcggggttccaccgtcctattggggaatgggttacatgcttctgttcatggtgttggcacggtagatctgaagtttacttcgggaaagatcgtgcagctgaagaacgtgcagcatgtcccttctatcgacaggaatcttgttagtggctcccgtctgaccagagacggatttaagttggtttttgagtctaataaagtagtcgtgtctaaacatggatattttattggtaaagattatgagtgcagaggcctgttccgcttttccctttctgatttctacaataagtctatgaaccatatttgtggcagtgtgggtgatgaggctaatgctgctgaggagagaaacttggcacctctagaactcctacactcagatctctgtgaaatgaatagggtgttgacgaagggtggaaaacgatatttcatgatgttgattgatgatgctactagattttgctatgtgtacttgttgaaaacgaaagacgaggctctagactattttaaaatttataaggcagaagttgaaaatcaacttgacagaaagataaaaaggcttaggtctgatcgtggtggagagtttttcttgaacgagtttgacttattctgtgaggaacatggcatcatacatgagaggacgcctccctattctcccgagtctaatgggattgctgaaaggaagaaccgcacactgactgacttggtgaatgccatgttggacaccgcgggactgcctaaggcatggtggggggaggcattgttgacctcaaatcatgtgttaaacagagttcctaacagaaataaggacaaaacaccatatgagatatggattgggagaaaaccatcactttcttacttgcgcacatgggggtgcttggtgaaagtcaatgtaccaataacgaagaagcgcaaacttggacctaagactgtggactgtgtctttctgggatatgctcaccacagtattgcctatagatttttaatagttaaatctgagtcaatttcagaagcatacgcatctcctgatgcagactactggaaggaggctgtccgtagtgaaatggattccattatcgctaacgggacttgtgaggtgatagagcgactctataggtgtaaacctgtggggtgcaagtgggtgttcaagaagaagctcaggcctgacggtactattgaaaagtacaaggctcggcttgttgctaagggctatactcagaaagaaggcgaagatttctttgacacttactcacctgttgctagattgaccacaattcgtgtgctactttccctagtagcctcacatggtcttctcgttcatcaaatggacgttaagacagcttttcttaatggagagctagatgaggagatctatatggatcaacctgatgggtttgtagttgaagatcaagaaggcaaagtgtgcaaattgttgaagtctttgtatggtctgaaacaagctcctaagcaatggcatgagaaatttgacaaaacattaacatctgcaggctttgcagtcaatgaggcagataaatgtgtgtactatcgccatggtgggggtgagggagttattatgtgcttgtatgttgatgacatactgatatttgggacaaaccttgaggtgataaatgaggttaaatcattcttgtctcaaaattttgatatgaaggatttgggagtagctgatgttatcttaaacattaagctaattagtggtgagaacgggattacactcttgcagtcccattatgtggagaagatcttgaatcactttggctacattgatagtactatggaactggggcttcactattctgggtatcctgcggtactggagggatatagtgattctaactggatctctgatgtggatgagatcaaagccactagtggatatgtcttcacactgggtggtggtgctgtttcgtggaggtcttgcaaacagactattttgacgaggtcaaccatggaagcagagctgacggcactggatactgctactgttgaggcagaatggctgcatgatctattaatggatctacctattgttgaaaaaccagtgccagctatccttatgaactgtgacaatcaaacggtaattgtcaaagtgaatagttctaaggataatatgaaatcgtctagacatgtgaaaagacgattgaagtctgtcaggaaattaagaaactctggagttataacattggattacatccaaacagctagaaacctggcagatcccttcatgaagggactatcacgaaatgtgatagacaatgcatcgaaggagatgggtttgagactcgtgtga

SEQ ID NO: 15287 - DNA, 1584 bp, Oryza sativa
  Clone ID: TFbOSC401912j.C1.o1.fg
atggatgaagtcgggggtcgatggacattctccagggcaaatgaaggctacacgagctgcggcccggtagtcgagatgtcatggcacagggttggtgccctgctgctaggggctcagtcctgcctgcctgtcccggaggttccggccgtaggtgggattgggtcggtactcttgtgtatggctaggatgggttggaaactatgtcacgtcttccgtctgtataccgtggtgatggataacactggtaacaaaggctatgggaatgatggatccgatgactcaagaacccaagccaatgggaatgagagaagcatcaacgaaacctcaccagagctaatccaagttgtggttaaccaaaccaacatgttggcaacagcctttcaactattacagaattggaacaacccagcaggggcaaccaacgttcaagtacctacagtccagcaacagtgcaagttatcagaatttctcaaaactgggcctccaacctttgccatggccgtcgatcctatggaagccagtgattggttgcgcacaatcgagaagaagctagggttgattcagtgcaccgaccaggagcgggttggcttcgcaactcatcagttggttggaccggcttcagagtggtgggatagctacgaagcatcacggccagaaggacataccatcacctggaacgagttttcatctgtattcaagagatcacatgttcccgcaggaatgatcacactaagaaaacgagagtttcgctacctgaagcaaggagatttgaccgtcacagagtacctgcacgagttctatcgtttggctcactatgcaccagaagatgtggaaacggatgaagacaaacaagagaagtttctccaggggttaaaagatgagcttgcagtgcaactacttctagaggattatgaaaattttgagaaacttgtggacaaagccatgcaactcgaaagtgagcataatcggatgacgaactgcaagagaaggattgtcaacatcccagtatttccatgtggaaaccaaggacagcgcactgagccacttcagatcaccggatcttctgttgcgcatcaagagtttccgccccaagaagatggacacaatgcagacaacaacattagcaatactaatgatgatgatgttaccaccaacaaccatgcttcttgccccaatagtgaccactcgaatcaagcgtgcaatgtcaacatcattcaccaagatgtcgacgatagtatcaatgatggcacccaaaatgacaaccctagtaattgggactctgggaaagactccgatggtgatagcaactatggtaccactgatgccaatgttagcaaggagttccagccaccaattccaactccaagtcagaatgactgtccccagacggatagctcagcaaagaagacgttgatttgctacaattgcaaagaaccagggcattactcgagggactgcctgcaaccaaggcaaagtcgacctccacattaccgccaatttacacgaagcagacatcccaatcgtattgtggtcactggagcaaacgccgtacccgtgaggcctcgtgttaatcagaacccatag

SEQ ID NO: 15288 - DNA, 1935 bp, Oryza sativa
  Clone ID: TFbOSC401952j.C1.o2.fg
atgtacacctctgatcagagtaaatctattcgaatagccgagccctcggatatgggcaagcctagcaatgtacccaagtcagtgtttcaattcttaaaatttgctcaacaactaaaatgtggaatggttggcctgggttggcttgggacgagctgggacccagggtcgggttgccagttcggtctgaatcatcgtaggccttgggttaaggcaggcctgaagcgcctttgtaataatatggataatactggtaacaaaggctatgggaatgatggatccgatgactcaagaacccaagccaatgggaatgagagaagcaccaacgaaacctcaccagagctaatccaagttgtggttaaccaaaccaacatgttggcaacagcctttcaactattacagaattggagcagcccagcaggggcaaccaacgttcaagtgcctacagtccagcaacagtgcaagttatcagaatttctcaaaactgagcctccaatctttgccattgccgtcgatcctatggaagccagtgattggttgcgcacaatcgagaagaagctagggttgattcagtgcaccgaccaggagcgggttggcttcgcaactcatcagctggttggaccggcttcagagtggtgggatagctacgaggcatcacggccagaaggacataccatcacctggaacgagttttcctctgtattcaggagatcacatgttcccgcaggaatgatcacactaagaaaacgagaatttcgctacctgaagcaaggagatttgaccgtcacagagtacctgcacgagttctatcgtttggctcgctatgcaccagaagatgtggaaacggatgaagacaaacaagagaagtttctccaggggttaaaagatgagcttgcagtgcaactactcctagaggattatgaagattttgagaaacttgtggacaaagccatgcaactcgaaagtgagcataatcggatgacgaactgcaagagaaggattgtcaacatcccagtaattccatgtggtaaccaaagacagcgcactgagccacttcagatcaccggatcttctgttgtgcatcaagagttcctgccccaagaagacggacgcaatgcagacaacaacactagcaatactaatgatgatgataccaccaacaaccatggttcttgccccattagtgaccactcgaataaagcgtgcaatgtcagtagcattcaccaagatgtcaacgatagtatcaatgttggaacccagaatgacaaccttagcaattttgacactgagaaagactccaatggtgatagcaactatggtaccactgatgccaatgttagcaaggatttccaaccaccaattccaactccaagtcagaacgatcgtcctcagacggatagctcagcaaagaagacgttgatttgctacaattgcaaagaaccagggcattactcgagggactgcctgcaaccaaggcaaaatcgacctccacattaccgccaatttacacgaagcagacattccaattgtattgtggtcactggagcaaacgccgtacccgcaaagagtgaaatcttcaactcggtatcagatgctacacggagtgaaaagtgcaagcaccggttaccaggcaatgccatgacttgggaagatgatccaatgggaaagaacacatcaagtggtaacttgtctgaggttgactccgaagatatgaatcatgagaagttctggaacggaagcatcactgaactaccgcaacctagtctgagtcagccaaaaggtgcaccctggtccaagttaggtgaagagaagattccatccgcaacaggaggtcaagccaagcagttccgagtggtaaagttttgctggaagtttgtcaagacgcaacggaagaagtcagacaagaagagaagaccgcccaacctatcttcttgctag

SEQ ID NO: 15289 - DNA, 1617 bp, Oryza sativa
  Clone ID: TFbOSC401984j.C1.o8.fg
atgtcatggcagagggttggtgccctgctgctagggggctcagtcctgcctgcctgtcccgggtgtcccggccgtagggggattgggtcggtactcttgtttatggctaggatgggttgggaactatgtcacgtcttccgtccgtataccgtggtgatggataacactggtaacaaaggctatgggaatgatggatccgatgactcaagaacccaagccaatgggaatgagaaaagcatcaacgaaacctcaccagagctaatccaaattgtggttaaccaaaccaacatgttggcaacagcctttcaactattacagaatcggaacaacccagcaggggcaaccaacgttcaagtacctacagtccagcaacagtgcaagttatcagaatttctcaaaacggggcctccaacctttgccatggccgtcgatcctatggaagccagtgattggttgcgcacaatcgagaagaagctagggttgattcagtgcaccgaccaggagcgggttggcttcgcaactcatcagctggttggaccggcttcagagtggtgggatagctacgaagcatcacggccagaaggacataccatcacctggaacgagttttcatctgtattcaagagatcacatgttcccgcaggaatgatcacactaagaaaacgagagttccgctacctgaagcaaggagatttgaccgtcacagagtacctgcacgagttctatcgtttggctcactatgcaccagaagatgtggaaacggatgaagacaaacaagagaagtttctccaggggttaaaagatgagcttgcagtgcaactacttctagaggattatgaagattttgagaaacttgtggacaaagccatgcaactcgaaagtgagcataatcggatgacgaactgcaagagaaggattgtcaacatcccagtatttccaggtggtaaccaaagacagcgcactgagccacttcagatcaccggatcttctgttgcgcatcaagagtttccgccccaagaagatggacgcaatacagacaacaacactagcaatactaatgatgatgataccaccaacaaccatggttcttgccccattagtgaccactcgaataaagcgtgcaatgtcagtagcattcaccaagatgtcaacgatagtatcaatgttggaacccagaatgacaaccttagcaatttcgacactgagaaagactccaatggtgatagcaactatggtaccactgatgccaatgttagcaaggattcccaaccaccaattccaactccaagtcaaaatgatcgtccccagatggacagctcagtaaagaagacgttgatttgttacaactgcaaagaaccagggcattactcgagggactgcctgcaaccaaggcaaagtcgacctccacattaccgccaatttacacgaagcagacatcccaatcgtattgtggtcactggagcaaacgccgtacccgttgacgccaaagatatgaattatgagaagtctggaactgaagtcccatcttcaagtgccacaatccagtcgaagtcagctagaggtgcaaccagggaaaagtcaggtgaagagaagattccatctgcaacaggagattga

SEQ ID NO: 15290 - DNA, 1541 bp, Oryza sativa
  Clone ID: TFbOSC407179j.C1.o2.np
atggataatactggtaacaaaggctatgggaatgatggatccgatgactcaagaacccaagccaatgggaatgagagaagcaccaacgaaacctcaccagagctaatccaagttgtggttaaccaaaccaacatgttggcaacagcctttcaactattacagaattggaacaacccagcaggggcaaccaacgttcaagtgcctacagtccagcaacagtgcaagttatcagaatttctcaaaactgagcctccaacctttgccattgccgtcgatcctatggaagccagtgattggttgcgcacaatcgagaagaagctagggttgattcagtgcaccgaccaggagcgggttggcttcgcaactcatcagctggttggaccggcttcagagtggtgggatagctacgaggcatcacggccagaaggacataccatcacctggaacgagttttcctctgtattcaggagatcacatgttcccgcgggaatgatcacactaagaaaacgagagtttcgctacctgaagcaaggagatttgaccgtcacagagtacctgcacgagttctatcgtttggctcgctatgcaccagaagatgtggaaacggatgaagacaaacaagagaagtttctccaggggttaaaagatgaacttgcagtgcaactactcctagaggattatgaagattttgagaaacttgtggacaaagccatgcaactcgaaagtgagcataatcggatgacgaactgcaagagaaggattgtcaacatcccagtaattccatgtggtaaccaaagacagcgcactgagccacttcagatcaccggatcttctgttgtgcatcaagagttcctgccccaagaagacggacgcaatgcagacaacaacactagcaatactaatgatgatgataccaccaacaaccatggttcttgccccattagtgaccactcggataaagcgtgcaatgtcagtagcattcaccaagatgtcaacgatagtatcaatgttggaacccagaatgacaaccttagcaattttgacactgagaaagactccaatggtgatagcaattgtggtaccggtgatgccaatgttagcaaggatttccaaccaccaattccaactccaagtcggaatgatcgtccccagatggatagctcagcaaagaagacgttgatttgctacaattgcaaagaaccagggcattactcgagggactgcctgcaaccaaggcaaaatcgacctccacattaccgccaatttacacgaatcagacatcccaatcgtattgtggtcactggagcaaacgccgtacccgtttcaccgaagggcagcaagccaaaggacctcatcgtccccagaagcgtccgcaatccacattaaagaataccacctgttagaggttgactccgaagatatgaatcatgagaagttcggaaacggaagcatcactgaactaccgcaacctagtctgagtcagccaaaaggtgcaccctggtccaagtcaggtgaagagaagattccatccgcaacaggag

SEQ ID NO: 15291 - DNA, 612 bp, Oryza sativa
  Clone ID: TFbOSC413099j.C1.o8.hg
atgaagaactgtaagagaaggattgtcagcatcccagtattcccatgtggtaaccaaagacagcgcacggagccacttcagatcaccggatcttctgttgcgcatcaagagtttccgccccaagaagatggacacaatgcagacaacaacattagcaatactaatgatgatgataccaccaacaaccatgcttcttgccccattagtgaccactcaaatcaagcgtgcaatgtcaacatcattcaccaaggtgtcgacgatagtatcaatgatggcacccaaaatgacaaccctagcaattgtgactctaagaaagactccaatggtgatagcaactatggtaccactgatgccaatgttagcaaggatttccaaccaccaattccaactccaagtcagaatgatcgtccccagacggatagctcagcaaagaagacgttgatttgctacaattgcaaagaaccagggcattactcgagggactgcctgcaaccaaggcaaagtcgacctccacattaccgccaatttacacgaagcagacatcccaatcgtattgtggtcactggagcaaacgccgtacccgtgaggcctcgtgttaatcagaacccatag

SEQ ID NO: 15292 - DNA, 795 bp, Oryza sativa
  Clone ID: TFbOSC900009j.C1.o8.fg
atgcccaaaccgcctctctcgcctgaggaggaggctaagttcgaggctgcggattgcttgttctgtggagcattgatcagtgtgctcaccgataacatagtggacgtctatatgcacatgcctttggggaagaacatgtgggatgctcttgaggccaagttcggactttccgatgccggcagcgagctatatatcatggagcagttctatgactacaagatgatgctggcaaaggaacttgagaataacaactgcgagttgccggacaagtttgtggcggaaggcattattgccaaattgccaccttcttgttcggactttgctacttctctaaaacataaaagacaagggttcagtgttactgacctcattggctttttgggtgttgaggagaaggggagggcaaaggacaatcggggcaaagtgatcgagggaggttctaccgccaatttggtgcaaaagacgaaccctcatgcatcctacaacaacaagaagaaagtcaaacctgacgtcaaacccaaggctacaactaattttaagaagaaaggcaagggaaaggcaaagagcgactgctttgtgtgcggtaagcctgggcattgggtcaagaattgtcctgagcgtaaggacaagaagtctgcaaacatggttattagcgagggcggagaaacattggggtatggtgcgtgcttggcaacaatgactcaagtaggaccttaccctttgagtttttctctagggctgggtagcaagcttgttagtcgacagggctttcctaaccctggtgttcgcacatga

SEQ ID NO: 15293 - DNA, 1116 bp, Oryza sativa
  Clone ID: TFbOSC101565j.C1.o1.fg
atggtgaacactcgcgccagtggaagtgaaaacaataacaatgaagggaacccaactcttgctcaagttctggctcaacagactcagttaatgaatatgatgatacagcagatgcagaaccagcttaaccaagggaacaacaatgctccactgccgcagaacaagttagctgattttcttcttgtgaggccacctaccttttctagcactaccaacccagtggaagcaggtgattggttgcacactattgagaagaagttggaactgctccagtgcacagatcaggagaaagtcgtgttcgcttcacatcagttgcaaggacctgcatcagaatggtgggatcatttccggatgaacagagcagaaggacaaccaatcacttgggaagagtttactgaaggattcaagaaaacacacatacctgtaggagttgttgctttgaagaagcgtgagtttagggctttgaagcaaaaggatcataccgtggcagagtatcttcatgagttcaatcgtctggcacgttatgctccagaagatgtgcgcactgacgaggaaaggcaggagaagtttttggaaggtttgaaggatgaactgtcagttacgttaatctcccatgactatgtggattttcagcagttggttgacaaagcaattcgacttgaagacaagaagaataggatggataaccgtaaaaggaaaatgactgtattccaggaggcacaaggtagtagccagaggcagcgtatcaagccactccaaattggtgaatcttttcccgctggtccaggacagtcgcaacagttgaacatcggtggtgagatcaaattagagactaatgaaagcaaagaagttaacatcgagcaagctaatcagccggtgctagttcagcaaggtcagtctcaagagaataacagtagtggaagggagcagcaggtatgtttcaactgttacaagccaggccactttgcaagagagtgtccgaagccgaagcatcagcagccgcaaggtcaggttaacaacattgttgtcacaggagccaatgcagtgccagttgcgtcttcaagagttgtgtcttcaagtgttacaactcagccaccagtttcaaagcggcagtag

SEQ ID NO: 15294 - DNA, 1185 bp, Oryza sativa
  Clone ID: TFbOSC14497j.C1.o1.fg
gttgcttgcttaatcaacttgaacaatataatgaactacacacaccagatcagtggtaacctggttaagatggtgaacactcgcgccagtggaagtggaaacaataacaatgaagagaacccaacctttgctcaagtgctggctcaacagacccaattgatcaacctgttagtgcaacaaatgcagaaccagcaagggaacaacaatgtcaatcctccgccgccccagaacaagttagttgattttcttcgtgtgaagccacctaccttctctagcactaccaacccagtggaagcaggtgattggttgcacgctgttgagaagaagttggaattgctccagtgcacggatcaggagaaagttgttttcgcttcacatcagttgcaaggatctgcttcggaatggtgggatcatttccggatgaacagagcagaaggacaaccaatcacttgggcggagttcactgaagcattcaagaagacacatatacctgcaggtgttgttgctttgaagaagcgtgagttccgggcacttaagcaaaaggatcgtaccgtgacggaatatcttcatgagttcaatcgtctagctcgctatgctccagaagatgtgcgtactgacgaggaaaggcaggagaagttcttggaaggcttaaaggatgagctgtcagttatgttgatctctcatgactatgaggattttcaggagttggttgacaaagcaattcgactggaagacaagaagaacaggatggataaccgtaaaaggaaaatgactgttttccaggaggcacaaggtagtcgccagagacagcgtatcgagccactccaaattggtgaatctttttccgctggtcaaggacagtcgcaacagttgaacatcggtggtgagatcgaatcagagactaatgaaagcaatgaagtaaacatcgagcaagctaatcaaccggtgccagttcagcaggatcagtctcaagagaataacagtagtggaagggagcagcaggtatgtttcaactgttacaagccaggtcactttgcaagagagtgtccgaagtcaaagcatcagcagccgcaaggtcaggtcaacaacattgtcgtcacaggagccaatgcagtgccagttgcgtcttcaagagttgcgttctcaagggatacagctcagccaccagtttcaaagcagcagtag

SEQ ID NO: 15295 - DNA, 1116 bp, Oryza sativa
  Clone ID: TFbOSC14970j.C1.o1.fg
atggtgaacactcgcgccagtcgaagtggaaacaataacaatgaagggaacccaactcttgctcaagttctggctcaacagactcagttaatgaacatgatgatacagcagatgcagaaccagctcaaccaagggaacaacaatgctccaccgccgcagaacaagctagctgattttcttcgtgtgaggccacctaccttttctagcactaccaacccagtggaagcaggtgattggctacacgctattgagaagaagttggaattgctccagtgtacggatcaggagaaagttgttttcgcttcacatcagttgcaaggacctgcatcagaatggtgggatcatttccggatgaacagagcagaaggacaaccaatcacttgggcggagttcacggaagcattcaagaagacacacatacctgcaggtgttgttgctttgaagaagcgtgagttccgggcacttaagcaaaaggatcgtaccgtgacggaatatcttcatgagttcaatcgtctagctcgctatgctccagaagatgtgcgtactgacgaggaaaggcaggagaagtttttggaaggcttaaaggatgagctatcagttatgttgatctctcatgactatgaggattttcaggagttggttgacaaagcaattcgacttgaagacaagaagaacaggatggataaccgtaaaaggaaaatgactgttttccaggaggcacaaggtagtagccagaggcagcgtatcaagccactccaaattggtgaacctttttccgctggccaaggacaatcgcaacagttgaatatcggtggtgagatcaaatcagagactaatgaaagcaatgaagttaacatcaagcaagctaatcagccggtgccagttcagcaggatcagtctcaggagaataacagtagtggaaggaagcagcaggtatgtttcaactgttacaagccaggccactttgcaagagagtgtccgaagccgaagcatcagcagccgcaaggtcaggtcaacaacattgtcgtcacaggagccaatgcagtgccagttgcgtcttcaagagttgtgtcttcaagtgttgcagctcagccaccagtttcaaagcagcagtag

SEQ ID NO: 15296 - DNA, 1116 bp, Oryza sativa
  Clone ID: TFbOSC15152j.C1.o2.fg
atggtgaacactcgcgccagtggaagtggaaacaataacaatgaagagaacccaacctttgctcaagtgctggctcaacagacccaattgatcaacctgttagtgcaacaaatgcagaaccagcaagggaacaacaatgtcaatcctccgccgccccagaacaagttagttgattttcttcgtgtgaagccacctaccttctctagcactaccaacccagtggaagcaggtgattggttgcacgctgttgagaagaagttggaattgctccagtgcacggatcaggagaaagttgttttcgcttcacatcagttgcaaggatctgcttcggaatggtgggatcatttccggatgaacagagcagaaggacaaccaatcacttgggcggagttcactgaagcattcaagaagacacatatacctgcaggtgttgttgctttgaagaagcgtgagttccgggcacttaagcaaaaggatcgtaccgtgacggaatatcttcatgagttcaatcgtctagctcgctatgctccagaagatgtgcgtactgacgaggaaaggcaggagaagttcttggaaggcttaaaggatgagctgtcagttatgttgatctctcatgactatgaggattttcaggagttggttgacaaagcaattcgactggaagacaagaagaacaggatggataaccgtaaaaggaaaatgactgttttccaggaggcacaaggtagtcgccagagacagcgtatcgagccactccaaattggtgaatctttttccgctggtcaaggacagtcgcaacagttgaacatcggtggtgagatcgaatcagagactaatgaaagcaatgaagtaaacatcgagcaagctaatcaaccggtgccagttcagcaggatcagtctcaagagaataacagtagtggaagggagcagcaggtatgtttcaactgttacaagccaggtcactttgcaagagagtgtccgaagtcaaagcatcagcagccgcaaggtcaggtcaacaacattgtcgtcacaggagccaatgcagtgccagttgcgtcttcaagagttgcgttctcaagggatacagctcagccaccagtttcaaagcagcagtag

SEQ ID NO: 15297 - DNA, 1116 bp, Oryza sativa
  Clone ID: TFbOSC23005j.C1.o1.fg
atggtgaacactcgcgccagtggaagtggaaacaataacaatgaagagaacccaacccttgctcaagtgctggctcaacagacccaattgatcaacatgttagtgcaacaaatgcagaaccagcaagggaacaacaatgtcaatcctccgccgccgcagaacaagttagctgattttcttcgtgtgaggccgcctaccttctctagcactaccaacccagtggaagcaggtgattggttgcacgctgttgagaagaagttggaattgctccagtgcacggatcagaagaaagttgttttcgcttcacatcagttgcaaggatctgcttcagaatggtgggatcacatccggatgaacagagcagaaggacaaccaatcacttgggcggagttcactgaggcattcaagaagacacacatacctgcaggtgttgttgctttgaagaaacgtgagtttagggctttgaagcaaaaggatcataccgtggcagagtatcttcatgagttcaatcgtctagctcgctatgctccagaagatgtgcgtactgacgaggaaaggcaggagaagttcttggaaggcttaaaggatgagctgtcagttatgttgatctctcatgactatgaggattttcaggagttggttgacaaagcaattcgactggaagacaagaagaacaggatggacaatcgtaagagaggaaggattgttttccaggaggcacaggatagtagccagaggcagcgtatcaagccactccaaattggtgaatctttttctactggtcaaggacagtcgcaacagttgaacatcggtggtgagatcaaatcagagactaatgaaagcaatgaagttaacatcgagcaagctaatcagccggtgccagttcagcaggatcagtctcaagagaataacagtagtggaagggagcagcaggtatgtttcaactgttacaagccaggtcactttgcaagagagtgtccgaagccgaagcatcagcagccgcaaggtcagatcaacaacattgttgtcacaggagctaatgcagtgccagttgcgtcttcaagagttgcgtcttcaagtgttacagctcagccaccagtttcaaagcagcagtag

SEQ ID NO: 15298 - DNA, 1116 bp, Oryza sativa
  Clone ID: TFbOSC28072j.C1.o3.fg
atggtgaacactcgtgctaatggaagtggaaacaataacaatgaagggaacccaactcttgctcaagttctggctcaacagactcagttaatgaacatgatgatacagcagatgcagaaccagctcaaccaagggaacaacaatgctccaccgccgcagaacaagttaactgattttcttcgtgtgaggccacctaccttttctagcactaccaacccagtggaagcaggtgattggttgcacactattgagaagaagttggaactgctccagtgcacggatcaggagaaagttgttttcgcttcacatcagttgcaaggacctgcatcagaatggtgggatcatttccggatgaacaaagcagaaggacaaccaatcacttgggcggagttcacggaagcattcaagaagacacacatacctgcaggtgttgttgctttgaagaagcgtgagttccgggcacttaagcaaaaggatcgtaccgtgacggaatatcttcatgagttcaatcgtctagctcgctatgctccagaagatgtgcgtactgacgaggaaaggcaggagaagtttttggaaggcttaaaggatgagctatcagttatgttgatctctcatgactatgaggattttcaggagttggttgacaaagcaattcgacttgaagacaagaagaacaggatggataaccgtaaaaggagaatgactgtattccaggaggcacaaggtagtagccagaggcagtgtatcaagccactccaaattggtgaatcttcttccgctggtcaaggacagtcgcaacagttgaacatcggtggtgagatcaaatcagagactaatgaaagcaatgaagttaacatcgagcaagctaatcagccggtgccagttcagcaggatcagtctcaggagaataacagtagtggaaggaagcagcaggtatgtttcaactgttacaagccaggccactttgctagagagtgtccgaagccaaagcatcagcagccgcaaggtcaggtcaacaacattgttgtcacaggagccaatgcagtgccagttgcgtcttcaagagttgtgtcttcaagtgttacaactcagccaccagtttcaaggcagcagtag

SEQ ID NO: 15299 - DNA, 4300 bp, Oryza sativa
  Clone ID: TFbOSC29458j.C1.o6.np
atggtgaacactcgcgccagtggaagtggaaacaataacaatgaagggaacccaactcttgctcaaaacaagttagctgattttcttcgtgtgaggccacctaccttttctagcactaccaacccagtggaagcaggcgattggctacacgctattgagaagaagttggaactgctccagtgcacggatcaggagaaagttgttttcgcttcacatcagttgcaaggacctgcatcagaatggtgggatcatttccgaatgaacagagcagaaggacaaccaatcacttgggcggacttcacggaagcattcaagaagacacacatacctacaggagttgtttctttgaagaagcgtgagttcagggcattgaagcaaaaggatcaaaccgtggcagagtatcttcatgagttcaatcgtctggcacgttatgctccagaagatgtgcgtactgacgaggaaaggcaggagaagttcttggaaggtttaaaggatgaactgtcagttacgttgatctctcatgactatgctgattttcagcagttggttgacaaagcaattcgacttgaagacaagaagaacaggatggataaccgtaaaaggaaaatgactgttttccaggaggcacaaggtagtagccagaggcagcgtatcaagcaactccaaattggtgaatcttcttctgctggtcaaggacagtcgcaacagttgaatatcggtggtgagatcaaaacagagactaatgaaagcaatgaagttaacatcgagcaagctaatcagctggtgccagttcagcaggatcagtctcaagagaataacagtagtggacgggagcagcaggtatgtttcaactgttacaagccaggccactttgcaagagagtgtccgaagccgaagcatcagcggccgcaaggtcaggtcaacaacatgtcgtgtgctgcaatcaagatgattgctaaccatgtctaccacgcggacaagattgctaacaacattgtcgtcacaggagccaatgcagtgccagttgcgtcttcaagagttgtgtcttcaagtgttacaactcagccaccagtttcaaagcagcagtagttttctttaaagccttagaatgattatcggagttatggaataagatagactgcagtttgcctattccctttttctttctagctgttccgaatctcgggacgagattctttgtaaggggggtagtttgtcacatcctgattttcgtttcaggatttataaattatttaataaattaatagtagaatttatattaagtgttctttaatttacaagtgaagttaaatgtgggaaataaaatatcctaaatataaagcatggatggatttaatttttgttaaattctccatggttaattatactctctgaaattttctcggatttttcagagctcaattcctaaatgatacaaagaacagttcagtaattatttgatcattaatgatctaattatttttgttaagtgcttttcttgtttaaaatccttaaattataaattgttgtttaaaaggaataattagaaatgattttaaaagcctggaagagaagatctaattttaatttgctaaatctcaatataaaattgggctagataaaattttgttaaatactttgcttaattctataattcttagatttttctgggatttatttgagctaaggaagtatttttaataaatggaattgcatttcatgaataatttaaattgaaaaaggttttaaaagtcttcttttggctttgggccgaaagccggcccaaaacctctctttctctctccctccccggcccagtcggcccagtcggcccagtccgccgagccgctgctctcctctctctctcagccgctgacaggtgggccccacttgtcagggtcgtcgtcttcgtcgcgccgctgccgcccgaaacactagccgagccactccgccgccgctttccaattcggccgcgtctttccttctccggtcgaattgatagaggggaaatgatcctcgggatctcctctaccttttctcttttggaaacatcggctaatttgttttggaagttcgtggaatcgagttcgattcggatcggcctctttcctccgaaccccgaagtttccatctcgtcgccggccgccgtgggcctttgccgccgcctcctagtcgctttaaaaggctccccggtgtctcctctacccgtcgccaccttcgccttcgcctctcgtcgtccgtagcgccctagcgccatgagacctagcgccgccgtcgccgctgtcgctccagccgtgcgccgccgccgtttcagccgtcgtcgttgctcgggaaggtcgtcatcgtggtcgtcaagtcgccgccgtcctcgtccgctccttcgccgccgccgaagaccgccggagccccgtcgccgccgttgacccgatctccgccgccgcttcttcctcatcgccggcgccgtccgttgcccttccgccgttgttttggtcaccggtgagttcgccgcgtcgccctctacccgttggtgccctccgttcgcgtcgccgcgccgtcgttcgccggcgagcatgcgcgcccgagtcgccgccggtggtgacgtcatcgctgacgtcatcgtccccgtctcccgtgagccggtcgtggaccgatcgatctcggccgtccgttttggatagggttgatctcggccgttcgtttccgtgaactgaacttattcctttgttatggccaatttgcattgattattttattccttgataccttgggttattataacttgactagttgagctatatatattggatcagctagatattagatatgattgcttacccatgcttagaaacattagcacacaattgggataactaatgtttcactatcacttatggttatatttaatggtagctcacgatggtcaatcgtgattggttaattaattacttgccaactaaaacttgataatggtgggttgtgagcacatggttttgagagtcgtgctcatgacaattaaggaccggttcacgagctactattgtgaaacattaaccgtgccaaccacaagccagcgtgggcaacggctttatcttttgtataacatgattcattgcggagcaccagactgagaagtggcggagataagcccacgggggtcgctggggagtccatgccttgttttataagggggtgattatgatccaggaatggtgcactgtggtgagttgtgttgtgcaaagggtattgtcacagcctctattcgggtactttccagtatcgcgacacatggtagacatgatgttgaggccgtgtcttgtgggtacagtggtacacctctggccagagtaaaactattcgaatagccgtgcccgcggttatgggcgagttgagcaatgtttttcgtgattagtctcacacctctcacaataattatggatgttataactggtaataatttgcttagctcctggtttggaatggaaaattcctggtttggagattagatctgtacagccgggtatggttgttcaggatggtcgggcctgtgcagcatgggtgtgctgttcagtgttgattaaaatttctgattaactactctactgttttatttctcttaaatattttgctaaacgctgcttttgcaaatgagcctatattatgccatcctttggtatccttgtgcacttgcatatttgctgtgtggcttgctgagtatgtcatatgctcaccttgcaataatcaatcaacctcagttgaagaaaaaggatccagaaggagaagacgtttggcttataccccagttgagctgcctgtgggagtggagccggagcttcgctagattttattttccgctgcagttttcttcatggtgaggactacgcctcttcgaggagttcatcgttttcacaccaaaggaaaattggcaccgcgttttgtgggaccttataagattgtcagtagaagaggagaggttgcttatcagttggagttacctcaatctttggcaggagtccataatgtgttccatgtgtcgcaattgaagaagtgtttaagggtacctaccgaagaagctaatcttgaacagatagaagtccaagaggatctgacctatgttgagaaaccaatccgtattttggaaatagatgagagaagaaccagaaatcgagttatccgtttttgcaaagtccagtggagtaatcactcggaagaagaatcaacttgggaacgagaagatgaattgaagtcagctcatccgcatctgttcgccagttcttccgaatctcaaggacgagattctgtt

SEQ ID NO: 15300 - DNA, 1032 bp, Oryza sativa
  Clone ID: TFbOSC400483j.C1.o11.fg
atggtgaacactcgcgccagtggaagtggaaacaataacaatgaagggaacccaactcttgctcaagtcctggctcaacagactcagttaatgaacatgatgatacagcagatgcagaaccagctcaaccaagggaacaacaatgctccaccgccgcagaacaagttaactgattttcttcgtgtaaggccacctaccttttctagcactaccaacccagtagaagcaggtgattggctacacgctgttgagaagaagttggaactgctccagtgtacggatcaggagaaagttgttttcgcttcacatcagttgcaaggacctgcatcagaatggtgggatcatttccggatgaacagagcagaaggacaaccaatcacttgggaagagtttactgaaggattcaagaagacacacatacctgtaggagttgttgctttgaagaagcaagatgtgcgtactgacgaggaaaggcaggagaagttcttggaaggcttaaaggatgaactgtcagttacgttaatctcccatgactatgttgattttcagcagctggttgacaaagcaattcgacttgaagacaagaagaacaggatggataaccgtaaaaggaaaatgattgtattccaggaggcacaaggtagtagccagaggcagcgtatcaagccactccaaattggtgaatcttcttccgctggtcaaggacagtcgcaacagttgaatatcgctggtgagatcaaatcagagactaatgaaagcaatgaagttaacatcgagcaaataaatcagccgatgccagttcagcaggatcagtctcgggagaataacagtagtagaagggagcagcaggtatgtttcaactgttacaagccaggccactttgcaagagagtgtccgaagccgaagcatcagcagccgcaaggtcaggtcaacaacattgtcgtcacaggagccaatgcagtaccagttgtgtcttcaagagttgcatcttcaagtgttacagctcagccactagtttcaaagcggcagtag

SEQ ID NO: 15301 - DNA, 1116 bp, Oryza sativa
  Clone ID: TFbOSC400718j.C1.o68.fg
atggtgaacactcgcgccagtggaagtggaaacaataacaatgaagggaacccaactcttgctcaagttctggctcaacagactcagttaatgaacatgatgatacagcagatgcagaatcagctcaaccaagggaacaacaatgctccaccgccgcagaacaagttagctgattttcttcgtgtgaggccacctaccttttctagcactaccaacccagtggaagcaggtgattggctacacgctgttgagaagaagttggaactgctccagtgtacggatcaggagaaagttgttttcgcttcacatcagttgcaaggacctgcatcagaatggtgggatcatttccggatgaacagagcagaaggacaaccaatcacttgggcggacttcacggaagcattcgagaagacacacatacctacaggagttgtttctttgaagaagcgtgagttcagggcattgaagcaaagggatcataccgtggcagagtatcttcatgagttcaatcgtctggcacgttatgctccagaagatgtgcgtactgacgaggaaaggcaggagaagttcttggaaggcctgaaggatgaactgtcagttacgttgatctcccatgactatgttgattttcagcagctggttgataaagcaattcgacttgaagacaagaagaacaggatggataaccgtaaaaggaaaatgactgtattccaggaggcacaaggtagtagccagaggcagcgtatcaagccacttcaaattggtgaatctttttccactggtcaaggacagtcgcaaccattgaacatcggtggtgagatcaaatcaaagactaatgaaagcaatgaagttaacatcgagcaagctaatcagccggtgccagttcagcaggatcagtctcaagtgaataacagtagtggaagggagcagcaggtatgtttcaactgttacaagccaggccactttgcaagagagtgtccgaagccgaagcatcagcagccgcaaggtcaggtcaataacattgttgtcacaggagccaatgcagtgccagttgcgtcttcaagagttgtgtcttcaagtgttacaactcagccaccagtttcaaggcagcagtag

SEQ ID NO: 15302 - DNA, 1104 bp, Oryza sativa
  Clone ID: TFbOSC401076j.C1.o10.fg
atggtgaacactcgcgccagtggaagtggaaacaataacaatgaagggaacccaactcttgctcaagttctggctcaacagactcagttaatgaacatgatgatacagcagatgcagaaccagctcaaccaagggaacaacaatgctccaccgccgcagaacaagttaactgattttcttcgtgtgaggccacctaccttttctagcactaccaacccagtggaagcaggtgattggttgcacactattgagaagaagttggaactgctccagtgcacggatcaggagaaagttgttttcgcttcacatcagttgcaaggacctgcatcagaatggtgggatcatttccggatgaacagagcagaaggacacccaaagttcacggaggcattcaagaagacacacatacctgcaggagttgttgctttgaagaagcgtgagttccgggcacttaagcaaaaggatcgtaccgtgacggaatatcttcatgagttcaatcgtctagctcgctatgctccagaagatgtgcgtactgacgaggaaaggcaggagaagtttttggaaggcttaaaggatgagctatcagttacgttgatctctcatgactatgaggattttcaggagttggttgacaaagcaattcgacttgaagacaagaagaacaggatggataaccgtaaaaggagaatgactgtattccaggaggcacaaggtagtagccagaggcagtgtatcaagccactccaaattggtgaatctttttccgctggtcaaggacagtcgcaacagttgaacatcggtggtgagatcaaatcagagactaatgaaagcactgaagttaacatcgagcaagctaatcagccggtgccagttcagcaggatcagtctcaagagaataacagtagtggaagggagcagcaggtatgtttcaactgttacaagccaggccactttgcaagagagtgtccgaagccgaagcatccgcagccgcaaggtcaggtcaacaacattgttgtcataggagccaatgcagtgtcagttgcgtcttcaagagttgtgtcttcaagtgttacagctcagccaccagtttcaaggcagcagtag

SEQ ID NO: 15303 - DNA, 2211 bp, Oryza sativa
  Clone ID: TFbOSC401130j.C1.o19.np
gccctagtcgccgccgtcgttgccgtcggttcagccgcgccgcgccgccgttgcagtcgtcgtcgtcggtcgccgtcgccaccatcgggttcgccaagtcgtcgccgtccccgtccaccgcttcgccgccgccgaagaccgtcggagcgccgtcgccgtcgtcgacccgaagagcttcgccgcttcctcctcgtcgccgccgccgtccgttggtcttccgccgccgttttggtcaccggtgagttcgccgcgtcgtcctctacataagcccacgggggtcgctggggagtccatgccttgttttataagggggtgattatgatccaggaatggtgcgctgcggtggattgtgttatgcaaggggtactgtcacagcccctttccgaggtaccgtggtggtactgaggcacatggtgacatgatgtggggctgtgtcttgtgggtacagtgttgcatatttgctgtgtggcttgctgagtatgtcatatgctcaccttgcaataatcaatcaacctcagttgaagacaagttgcgaaggagaagacgtttggcttataccccagttgagctgcctgtgggagtggagccggagcttcgctagattttatttttccgctgcaattttcttcttggtgaggactaagtgcctcataagtaagtatttatcgttttagttaatttgatgaatctgtatattaaattgtcaatttgtgtacctcggctgattcctggacgaggattttatgcacaaataagttcggaaattactagtgaatttccgggcgtgacaagttggtatcagagccatctcgactgtaggataagccaaatggtcaaaccttaaggactaattttccgaaaacatgatgtgtgaaaattttcctttcttccttctctagaattctctataaatcattttatcatcctctcccctcctgctttcaacttgagtagttctaaaactagttgttgaaactagaagatgttaatgaggtctacttatggaggtcagtcaagtggatcgaggaagaaccgaagtgccaagtggtcaagatggaatgaagtttggatcctaccttagaacctatgccgccaaagtgtctttgaagaatagttagtagggtagaacgcttgttgcttgcttgtgtgtaggtatggttgcattcccatcattggagtagttcattgatgagtgtgtaactatactaggtaacccctctcctcctatctcctcctatctgcaatagatggtgaacactcgtgctaatggaagtggaaacaataataatgaagggaacccaactcttgctcaagttctggctcaacagactcagttaatgaacatgatgatacagcagatgcagaaccagctcaaccaagggaactacaatgctccaccgccgcagaacaagttaactgattttcttcgtgtgaggccacctaccttttctagcactaccaacccagtggaagcaggcgattggctgcacgctattgagaagaaagcagaaggacaaccaatcacttgggcggagttcacggaagcattcaagaagacacacatacctgcaggtgttgttgctttgaagaagcgtgagttccgggcacttaagcaaaaggatcgtaccgtgatggaatatcttcatgagttcaatcgtctagctcgctatgctccagaagatgtgcgtactgacgaggaaaggcaggagaagtttttggaaggcttaaaggatgagctatcagttatgttgatctctcatgactatgaggattttcaggagttggttgacaaagcaattcgacttgaagacaagaagaacaggatggataaccgtaaaaggagaatgactgtattccaggaggcacaaggtagtagccagaggcagtctaatgatgaacttaacatcgagcaggctaatcagctggtgccagttcagcaggatcagtctcaagtgaataacagtagtggaagggagcagcaggtatgtttcaactgttacaagccaggccactttgcaagagagtgtccgaagccgaagcatcagcagctgcaaggtcaggtcaacaacattgaagtgaaaactcccaaagcgaaagcgaagtcggcgactcatgaaattgattccatcgcgctcgttgataggaaactcgacgcaacccctacctggcgcgccaactgtcgaaacatgaattcggcaataataaaagggg

SEQ ID NO: 15304 - DNA, 1134 bp, Oryza sativa
  Clone ID: TFbOSC401143j.C1.o24.fg
atggtgaacactcgcgccagtggaagtggaaacaataataatgaagggaacccaactcttgctcaagttctggctcaacagactcagttaatgaacatgatgatacagcaaatgcagaaccagctcaaccaagggaacaacaatgctccaccgccgcagaacaagctagctgattttcttcgtgtgaggccacctaccttttctagcactactaacccagtggaagcaggtgattggttgcacactattgagaagaagttggaattgctccagtgcacggatcaggagaaagtcgtgttcgcttcacatcagttgcaaggacctgcatcagaatggtgggatcatttccggatgaacagagcagaaggacaaccaatcacatgggaagagtttaccgaaggattcaagaagacacacatacctgtaggagttgttgctttgaagaagcgtgagttcagggcattgaagcaaaaggatcataccgtggcagagtatcttcatgagttcaatcgtctggcacgttatgctccagaagatgtgcgtactgacgaggaaaggcaggagaagttcttggaaggcttaaaggatgaactgtcagttacgttgatctctcatgactatgctgattttcagcagttggttgacaaagcaattcgacttgaagacaagaagaacaggatggataaccgtaaaaggagaatgactgtattccaggaggcacaaggtagtagccagaggcagtgtatcaagccactccaaattggtgaaccttcttccgctggtcaaggacagtcgcaacagttgaacatcggtggtgagatcaaatcagagactaatgaaagcaataaagttaacatcgagcaagctaatcagccggtgccagttcagcaggatcagtctcaggagaataacagtagtggaagggagcagcaggtatgtttcaactgttacaagccaggccactttgcaagagagtgtccgaagccgaagcatcagcagccgcaaggtcaagtcaacaacattgtcgtcacaggagccaatgcagtgccagttgcgtcttcaagagttgcgtcttcaagtgttgcagctcagccaccagtttcaaagcggcagcagttttcattaaagccttag

SEQ ID NO: 15305 - DNA, 1197 bp, Oryza sativa
  Clone ID: TFbOSC401827j.C1.o24.fg
atggaattctttgcaaatcattttatcatcctctcccctcctgctttcaacttgagtagctctaagacattggaacttgaagacgccaatgaggtctacttatggagtggaaataataacaatgaagggaacccaactcttgctcaagttctggctcaacagactcagttaatgaatatgatgatacagcagatgcagaaccagctcaaccaagggaacaacaatgctccaccgccgcagaacaagttagctgattttcttcgtgtgaggccacctacattttctagcactaccaacccagtggaagcaggtgattggctgcacgctattgagaagaagttggaactgctccagtgcacggatcaggagaaagtcgttttcgcttcacatcagttgcaaggacctgcatcagaatggtgggatcatttccggatgaacagagcagaaggacaaccaatcacttgggcggagttcactgaagcattcaagaagacacacatacctgcaggtgttgttgctttgaagaagcgtgagttccgggcacttaagcaaaaggatcgtaccgtgacggaatatcttcatgagttcaatcgtctggcacgctatgctccagaagatgtgtgtactgacgaggaaaggcaagagaagttcttggaaggtctgaaggatgaactgtcagttacgttgatctctcatgactatgttgattttcagcagctggttgacaaagcaattcgacttgaagacaagaagaacaggatggataaccgtaaaaggaaaatgactgtattccaggaggcacaaggtagtagccagaggcagtgtatcaagccactccaaattggtgaatcttcttccgctggtcaaggacagtcgcagcagttgaacatcggtggtgagatcaaatcagagactaatgaaagcaaagaagttaacatcgagcaagctaatcagccggtgccagttcagcagggtcagtttcaagagaataacagtagtggaagggagcagcaggtatgtttcaactgttacaagccaggccactttgcaagagagtgtccgaagccgaagcatcagcagccgcaaggtcaggtcaacaacattgttgtcacaggagccaatgcagtgccagttgcgtcttcaagagtcgtgtcttcaagtgttacagctcagccaccagtttcaaagcggcagtag

SEQ ID NO: 15306 - DNA, 1116 bp, Oryza sativa
  Clone ID: TFbOSC408811j.C1.o16.fg
atggtgaacactcgcgccagtggaagtggaaacaataacaatgaagggaacccaattcttgctcaagttctggctcaacagactcagttaatgaacatgatgatacagcagatgcagaaccagctcaaccaagggaacaacaatgctccaccgccgcagaacaagttagctgattttcttcgtgtgaggccacctaccttttctagcactactaacccagtggaagcaggtgattggttgcacactattgagaagaagttggaactgctccagtgcacggatcaggagaaagttgttttcgcttcacatcagttgcaaggacctgcatcagaatggtgggatcattttcggatgaacagagcagaaggacaaccaatcacttgggtggagttcacggaagcattcaagaagacacacatacctgtaggagttgtttctttgaagaagcgtgagttcaggacattgaagcaaaaggatcataccgtggcagagtatcttcatgagttcaatcgtctggcacgttatgctccagaagatgtgcgtactgacgaagaaaggcaggagaagttcctggaaggcctgaaggatgaactgtcagttacattgatctcccatgactatgttgattttcagcagctggttgacaaagcaattcgacttgaagacaagaagaacaggatggataaccgtaaacggagaatgactgtattccaggaggcacaaggtagtagccagaggcagcatatcaggccactccaaattggtgaatcttcttccgctggtcaaggacagtcgcaacaattgaacatcgctggtgagatcaaatcagagactaatgaaagcaatgatgttaacatcgagcaagctaatcagccggtgccagttcagcaggaccagtctcaggagaataacactagtggaagggagcagcaggtatgtttcaactgttacaagccaggccactttgcaagagagtgtccgaagccgaagcgtcagcagccgcaaggtcaggtcaacaacattgtcgtcacaggagccaatgcagtgccagttgcgtcttcaagagttgcgtcttcaagtgttacagctcagccactagtttcaaagcagcagtag

SEQ ID NO: 15307 - DNA, 1116 bp, Oryza sativa
  Clone ID: TFbOSC411778j.C1.o1.fg
atggtgaacactcacgccaataaaagtggaaataataacaatgaagggaacccaactcttgctcaagttctggctcaacagactcagttaatgaacatgatggtacagcagatgcagaaccagctcaaccaagggaacaataatgctccaccgccgcagaacaagttaactgattttcttcgtgtgaagccacctaccttttctagcactaccaacccagtggaagcaggtgattggttgcacactattgagaagaagttggaactgctccagtgcacggatcaggagaaagttgttttcgcttcacatcagttgcaaggacctgcatcagaatggtgggatcatttccggatgaacagggcagaaagacaaccaatcacttgggcggagttcacggaggcattcaagaagacacacatacctgtaggagttgttgctttgaagaagggtgagtttagggcattgaagcaaaaggatcataccgtggcagagtatcttcgtgagttcaatcgtctggcacgttatgctccagaagatgtgcgtactgacgaggaaaggcaggagaagttcttggaaggcttaaaggatgaactgtcagttacgttgatctcccatgactatgttgattttcagcagctggttgacaaagcaattcgacttgaagacaagaagaacaggatggataaccgtaaaagaaaaatgactgtattccaggaggcacaaggtagtagccagagacagcgtatcaagccactccaaattggtgaaccttcttccgctggtcaaggacagtcgcaacagttgaatatcggtggtgagatcaaatcagagactaatgaaagcaatgaagttaacatcgagcaggctaatcagccggtgccagttcagcaggatcagtctcaagtgaataacagtagtagaagggagcagcaggtatgtttcaactgttacaagccaggccactttgctagagagtgtccgaagccgaagcatcagcagccgcaaggtcaggtcaacaacattgttgtcacaggagccaatgcagtgccagttgcgtcttcaagagtcgtgtcttcaagtgttacagctcagccaccagtttcaaagcggcagtag

SEQ ID NO: 15308 - DNA, 2640 bp, Oryza sativa
  Clone ID: TFbOSC4124j.C1.o4.np
gtgcagccgctgccggctgccctcgtcgcctcctcgccggccccggtcgtcgtcgtcgtcatcctctcgtcgttcccggttgtcgtggcgttcgtccgtccgtcaagccattctcgttcgtcgtcctcgttccgtcaagtgccgcagccccgtcatcgtcttcgtcctcgcctccgcgtcgccaagcattgcgccggccgcgtctcgccttcgtccaaggatcgacgccgaagtcgtcccctcgcctttcgtctccgtcattcccggccgtctccgccgcgcccgttcgtcgttgtcgttcccacgcctcgttgcatggtggtaaggatccctctccctcgctgccccgtcctcgtcctttcggtgtcgcccgtgcctgttgtgcggttgtcggccccgagctctggacagagccgagccgcccgtgctgtgccctgtgcagtcgccgcttcctccgttaaatctcgcctccccgttgctcctttttccaatttagttgaggggaaatattcctcttatcctcctctatctttacccccaaaaaatcggagctaatcgttgagtatcttatccaaatcaaactcgttttcgagtttatctccaaaaccgagtttttgatttcccggatcgatttcttgcgggaggagtccgatctcttcaatccaaggctataaataggaccccctagtcctcctctttcgtttgccccctctcccgtggtctcccgtgcctcgtagcgctgccgccacgtgctccaccccgccgtcgtcgccggccgagctccatccgcgtcgcgccgccgcctccgtcgtcgccgccggtcgccgtcaccgccgtaaggtgcgccgaggtgtggagaagcccggcctcctgtcccccttcgtcgccggccaccggagctccaccgccggcgaggtccgagccgccgccgccgttcacctcgtcgccggtcaccgtcggtcgtcgtttggctcgagggtaagtaccggtaataatttgtttagctcctggtttggagttagatctgtacagccgggtatggttgttcagaatggttgggcctgtgcaacatgggtgtgttgtttagtgttgattaaaattttggagctgaagccatcgctagatcgttattccgctgctgttttcttttcttttgtaagtatgtaacgttattattaagatggatttttatattaaattgtcagtttgtgtacctcggctgattcttggacgaggattttatgcacaaattagttcggaaattactagtgaatttccgggcgtgacaagttggtatcagagccatctcgactgtaggataagccaaatagtcaaaccttaaggactaattttccggaaacatgatttgtgaaaatttctcctttcttccttatctagaattcttcacaaatcgttttgtcgttctctcctcttttccctctttcaacttgagtagttgttaaatttgatggagaaactcgaagacgtcgatgttgtcaacttctgcaagtcaagtggatcgaggaataagaagatgatagttgaatcaaagtgttcagctgtcaagatagagtgaagtttggaacctagcttagaacctatgccgccaaagtgtctttgaagaatagttagtagggttgaacgtttgttgtttgctttgtgtgtaggtatggttgcattcccatcattggagtagttcatcaaaggaacaacaatgtcaatcctccgccgccgcagaacaagttagctgattttcttcgtgtgaggccgcctaccttctctatcactaccaacccagtggaagcaggtgattggctgcacgctgttgagaagaagttggaattgctccagtgcacggatcaggagaaagttgttttcgcttcacatcagttgcaaggacctgcatcagaatggtgggatcatttccggatgaacagagcagaaggacaaccaatcacttgggcggagttcactgaggcattcaagaagacacacatacctgcaggtgttgttgctttgaagaagcgtgagttccgggcacttaagcaaaaggatcgtaccgtgacggaatatcttcatgagttcaatcgtctagctcgctatgctccagaagatgtgcgtactgacgaggaaaggcaagagaagttcttggaaggcttaaaggatgaggtgtcagttatgttgatctctcatgactatgaggattttcaggggttggttgacaaagcaattcgactggaagacaagaagaacaggatggacaatcgtaagagaggaaggattgttttccaggagacacagggtagtagccagaggcagcgtatcaagcccaatgaagtaaacatcgagcaagctaatcagccggtgctagttcagcaggatcagtctcaggagaataacagtaatggaagggggcagcaggtatgtttcaactgttacaagccaggccactttgcaagagagtgtccgaagtcaaagcatcagcagccgcagggtcagatcaacaacattgtcgtcacaggagccaatgcgtcatcttccagctctggacagagccgagccgcccgtgctgtgccctgtgcagccgccgctttctccgtaaatctcgcctccccgttgctcctttttcatttagttgag

SEQ ID NO: 15309 - DNA, 1116 bp, Oryza sativa
  Clone ID: TFbOSC415853j.C1.o8.fg
atggtgaacactcgcgccagtggaagtggaaacaataacaatgaagggaacccaactcttgctcaagttctggctcaacagactcagttaatgaatatgatgatacagcagatgcagaaccagcttaaccaagggaacaacaatgctccaccgccgcagaacaagttagctgattttcttcgtgtgaggccacctaccttttctagcactactaacccagtggaagcaggagattggctgcacgctattgagaagaagttggaattgctccagtgcacggatcaggagaaagttgttttcgcttcacatcagttgcaaggacctgcatccgaatggtgggatcatttccggatgaacagagcagaaggacaaccaatcacttgggcggagttcacggaagcattcaagaagacacacatacctgttggagttgttgcttcgaagaagcgtgagttcagggcattgaagcaaaaggatcataccgtggcagagtatcttcatgagttcaatcgtctggcacgttatgctccagaagatgtgcgtactgacgaggaaaggcaggagaagttcttggaaggcctgaaggatgaactgtcagttacgttgatctctcatgactatgctgattttcagcagttggttgacaaagcaattcgacttgaagacaagaagaacaggatggataaccgtaaaaggaaaatgactgttttccaggaggcacaaggtagtagccagaggcagcgtatcaagccactccaaattggtgaacctttttccgctggtcaaggacattcgcaacagttgaacatcggtggtgagatcaaatcagagactaatgaaagcaaagaagttaacatcgagcaagcaaatcagccggtgccagttcagcaggatcagtctcaagtgaataacagtagtggaagggagcagcaggtatgtttcaactgttacaagccaggccactttgcaagagagtgtccgaagccgaagcatcagcagccgcaaggtcaggtcaacaacattgttgtcacaggagccaatgcagtgccagttgcgtcttcaagagttgtgtcttcaagtgttacaactcagccaccagtttcaaagaagcagtag

SEQ ID NO: 15310 - DNA, 2355 bp, Oryza sativa
  Clone ID: TFbOSC408811j.C1.o3.fg
atggcttccctcctcacgctcccctccctctccctctccaaccctagcgcctccgccgccgccgcgggagccggagcggcgccgtctctgcgcctccgcgccgccttccgctgctgggcgctgcggcgcgcgggcggcggccggtgggcggccgcgggggccatcgcgtcgcccaactcggtgctcagcgagcacgcgttcaagcggctgcagctcagcgacgaggaggaggaggaggaggagggggcctacgggagtgacgaggagggggtcgaggcggtgggtggcggggagggggacgaggacgagctcgccattgccaggctcggcctgcccgagcagctcgtatccacgctcgagaagcgcgggattacccacctgttccccatccaggtttcggtattaggcggagacagcgagggaattggtgttagtgtaggatttgttggggggatgagttcgtggacagttagggctgtattgattccagctcttgacggccgtgacctgattgctagagcaaagacaggaaccgggaagacgctagccttcggcattcccatgatcaagcaattaatggaggaggatgatggacggagtgtgaggcgaggtcgtattcctcgtgttttggttctagcacctactagggagttagccaagcaagttgagaaggaaataaaagaatcagcacccaagctcagtacagtctgtgtttatggaggtgtctcatataatgtccagcagaacgcactctcccgtggtgttgatgttgttgtaggaacacctggtcgcattattgatttgataaatggcggaagtcttcagttgggagaagttaagtacttggtccttgatgaggctgaccaaatgcttgcagttgggtttgaggaggatgtggaaacgatattacaacagctaccagctgagaggcaaagcatgctcttctctgccaccatgcctggttgggtgaagaaattatctaggcgatacttgaacaatcctttgacaattgacttggtcggcgatcaagatgaaaaacttgctgaaggaatcaaactttatgctatcccgctcacatctacatcgaagcgcactgttcttagtgatctcattacggtgtatgcaaagggtgggaaaaccattgtgttcaccaagacgaaaagggatgcagacgaggtatcattagcactgacaaacagtattgcttcggaggcactgcatggtgatatttcacagcatcagcgtgagaggacactaaatggttttcgtcaagggaaatttactgttctcgtagcaaccgatgttgctgcccgtggtcttgatataccgaatgttgatttgattatccattatgaattgcccaatgatccagagacttttgttcatcgttctggacgcactggccgagctgggaaagcaggaactgcaatcttgatgttcacaaacagccagagaaggacagttagatcacttgagcgtgatgttggatgcagatttgacttcataagtcctccagcaattgaggatgtgctggagtcctctgctgaacatgtcatagctactttaagaggtgtgcacacggagtcgattcagtacttcattccagcagctgaaagactgcaagaagaattaggacctaatgctcttgcttctgcattggcacatctgagtggattttctcagccaccctcttcacgttctcttatcagtcatgagcagggatgggtgactttgcaactaactagagatccaggatatggaagggggttcttttctcctagatctgttactggctttctgtctgatgtttcttcagctgctgctgatgaagttggcaaaattttccttacagcagatgagaaggttcaaggtgcagttttcgatttacctgaggagattgcgagggatttgcttagtatggaactgcccccaggaaacaccataaccaaagtgacaaagctacctgcattacaggatgatggtcctgctactgatagttatggccgattctcaaactcggaccggggtttcaggaacagacggtccaggggtggtggctcaagaggcgggcggggtggttgggactctgatggtgaagacagatttcgccgtggtggcaggagcttcagatctgacaatgatagttggtcagatgatgactttggtggcgggagaagatcgaaccgttcgtcatcctttggtggccgcgggtcatcttacggcagtcgtagctcgtcatcctttggtggccgctcatcatcttttgggtctagggacagcagcaggagcttcagtggtgcttgcttcaactgtggcgaaagcgggcaccgagcatcagactgcccaaacaagtag

SEQ ID NO: 15311 - DNA, 1767 bp, Oryza sativa
  Clone ID: TFbOSC401920j.C1.o6.fg
atgcccctcggtgagctccgccgcctcccttttcgcctcctccgctcgttttcgccgctccccggccgccccctcgctcgttgggccgacgccgccatcaccgttgtagtggtcgtccttcccgcgtcgggatttaatacgcaaaatagtctggaaatttgggttaaatttctgggcgtgacaaagtggtatcagagccaactcgactttgttaaaccgtggaggataaaccgtcagcttcgtgtctgttcggaagtcaagtcaagcatcaagcttcatgcagcaaagagcgggaagcagatggtcagtgtgaggggcaatttcaacggatcaggatcccgtcagtttcatggatcaactcagctcaattctataagcttcccacgtcaacctctcaaagatcagccacaatcccaagtcatggctaatcagactcagacagtggaagagttgttacagcagatgcgacgtcggtaccagatctatctgatgcagcagatgcaacggcaatgtcaggagccgcgtcaagtccaccagccacaaatgcaagtccaggtgccagcccggaacctgaatcagagtcaggagttcccaatatcggcacctaagacccctgtcaaaatgatgtccagatccccgaagataacttcagccaactcaccgtcggaccaaaggaaaataagtgctacctgttatgactgtggtgagcaaggtcattatgtaaggaactgtccatggaaggtgtttgccaggtcacctgaaaaagacgagaagcagtgcccagggagtaaccaagctccaagtcagtctaccgacaagaaggatggtactttgcagcgcaactctggagcgaataggacagtgatatggaagatggataatggtaggaccatgatcatcaccggttcagaatttactcctgaagacgcagcaaggatacccaagcgtcggagaggaagaaataccttccgaggagcgcgtcagctaacccgtcatctcataaagtacggtccacccagacccgaagatgatgaatcaggagaacggttttctgctgatgacaatgacgacaacgatgatgataatgatgacaatgatgatgcgacccttgacagtttcagggaaagagagttgaagtgcaaagcatgtgctagatgtgggatagtcggacatactgctagtttatgcctccccacatgtcgctgtggtgaatacacccattactcagatgcatgccctttgaggaaggtcacatgtttcttgtgtgaaggaacagatcatgtgcctaaggactgtcagttgaacgcggtcctagctatgaccaagaaagaacaaggggcaaccgtgcaacccattcgtcaaccaatggtggtcgacaacaacagtctcaacccttctactctttcaccaaccacagctccagtggaagccaaccttggaagaagcaacgtcgccagggatgttcatgaatcactatgtgttccagtttcagctgccaaagtgcataatcagaagcctgcaccccgagacccagcaagtcgattctgtcgcaactgtcgtaagccaggacatcgtttcagtgattgtcctcttccaagagcagcaaaggcagttcgtcgtgattcccaagttaccagcactgcccatgacaccaatcgacacctgaatgtgcaacctccgcctcaacggattatcgtcaagggcaccgtcaaaggtcacattgttccaccggccatcgtttcaagcctacagcaccagcaccagtag

SEQ ID NO: 15312 - DNA, 2745 bp, Oryza sativa
  Clone ID: TFbOSC404332j.C1.o20.fg
atggcccagcgctggcgctcgagggcgcggcgcgacccggacgtggacgacgaggaaggctcgcccccggagcggcggcgcaggggggctcgaagcggcagcgacgacgaggaggcgggcaacgaggacctcagcctcgagatcgtcgcgcgggcggcgcggcggcggcggcggcgcgaggccagcgccgggttcgcggccgacgccttctcgtccggggacgagatcgacgaggatgccgtggtggagctcggcgaggcggatcccagcagcaggaagcggcgcaaggagaagaagaagcggcgcaaggagaagaggaagcagcggaagggggcgccgcccgagggctcgccctcgaccgccgccgccgacaaggagtctcaagttgctgggacccaggaggggcaaactggcacagcacaatcagtgctcactgaagatgggcctgatgtccctttatctgacaatattgttttacggaagcttcttcgcataccaagatactttgatcctggtgaaactttattggaaacatgctttaattgtggtgaggagggtcatgtagctgtgaactgtccaatggaaaagcggaagaggccttgttttgtttgtgggttgtttggacacaattcaaagcagtgcacgcaggttggtctccctagctccaaggcattattgcttggtgacttggataggttccagacttccagttcattaatcacacatatttacttgcccctgccaatgcttcttgcctgtgtggcatggcctgccaatttcaggaatcaaacatttgttaatcatttttgtagggtcaagactgtttcatctgcaaaaaaggaggtcatattgcgaaagactgccctgaaaagcacaataggaatactcaacagtctactttttgtttacgatgtggagaatcaggtcatgatatgtttggatgtgccaatgattatccacgcgatgatgttaagaaaggtcatctatgttgcgccgacttctctgatatttgtccaaaagaagttagttgttataattgtgcccaacctggtcatactggtttgggatgtgccaagcaacgtagggaagctagtaccgcggcaactccaactttgtgttacaaatgtggcgaggaaggccacttcgcacgtgggtgcacaaagaacaccaagtcggaaaaaaggcaaaggcaagaaagattttggcactagatcagctcctcatgatgctcgcaagacaagtaaaaggaaaagccccttatttgaggaaagaaggaactcatctcattttaagtccaaagctaggggtggttggattgcagacgatgcggatgaccagccatacaagaagtgcaaacccaatgtgtgggcttctccatctacccctaagaagcaatacaataaccatcagttctcttctggtggtgactactcaactcctcagtcttcaagatggcagaaacacggtttcgcatcgccgagcgcaacttactcaccaaacacaaggaagcatagcttttcatcgtcgagattcgccagcaacactcatgtccgcctacatgggcaacctactctggagctctttgctgcatcgaatcttacctctcccaacgatggctcgcagtgtagcctcatcgcgtcggagaccgaggagatgtgtgttagtggctgcatcattgagcttgagctctacggcctcctcgcgttggaggccgaggagagacacgccagcggtcatcgagtaggcgaggtgggactaaaaggagagcttactagctcagtggcttcatcgtatgggcctcgaaactcggcaagcgaaagggccgcagcccatacgtgtggtcttcggctcttcgctgctgcagacgattttgaaattgattggttgtttgaatcttctaatcgcttacgatttgtctcatcgctacgatacgatgccccgccgccgcgaaccctccgcctccgcagccacacgaccgcagcgacggtggcgcaggggctctcccgccgcgccgtgcaacctgccgacggcgtgttccgggaggaggctgccggtgatcgtgccgttccacgggggcgcgttcgcgaggggcgcggccgacagcgacgccatcgtggtttcatcgcgctctgggcatccacggccgcgccgtccccggcgccatcggctgttggccccaccccggctgctgcggcggcggagctcctccgccgggtcgcggcgcccggggtcgacccgtgcccggcgctgcggccggtgggcggtggcgcggcggagaccgtggcgtcggtgctccggaggagggggaagggcgatgatgatgatggcggcgtggaggccgtcgaggcggccgtccgggtgctcgcggtgctcgccacgtcggactgcatcgaggaggagaacaggaggcgcgtcgtcgccgcgctcgccgcggggggcgccgcgccgtcggtggcggcgtcgctggcgcgcgtgatgcggagcgggagcgggctcgaggcccgcgtcgacgcggcgaggctggtggagtcgctgctccgggacggcggcgaggatgatgaagtgcggcgggatgggcggcgcggaggcggcggtgtccgtgctgtgggcggtgtgccaccggtacagggaccggcgcgcggcggaggcggcggcggcgtccaagggcgggctgacgaagctgctcctgccgatgcagagcgggtgctcgccggcggcgaggcagatggcctcggagttccttaa

SEQ ID NO: 15313 - DNA, 1494 bp, Oryza sativa
  Clone ID: TFbOSC10946j.C1.o3.fg
atggagatggatgaagtcgggggtcgatggacattctctaggacaaatgaaggctacacgagctgcggcccggtagtcgagatgtcatggcacagggttggtgccctgctgctaggggctcagtcctgcctgcctgtcccgggggttccggccgtaggtgggattgggtcggtactcttgtctatggctaggatgggttggaaactatgtcacagcttccgtctgtataccgtggtgatgtttaacagagaaaaaggaaagaatgtcagcgggtatgactcaagtaactcaagttttcaactcaatctgccactggcctcaagagagttaaccagggcacacccttggtccattccaagcatgctgcttagttcacagctaccattggttggaagtcaagaccaaaatcagtatgtgtttgatcgagcctttgccacccaggtcaatgagcttccaatgccagaagagcaggttcccttttgtcatgattgtagagagcaaggacactatgccctgaattgtccatgggtatatgtcaaagaagccccttcccttggtttagcagggcggacatcgctaaaccagcctcctcacaccaagtcaagcttgcagcctagtgtgcaaagtagagagctcaacggagagaatccattgaatcccgggaaatgctttcctcctagcctctcgtaccacgtggggtcacatactaagcaagccaaaggcaagaagagtaagaatcagaagagaaaagcaccgatgcgaactgaagaagaagtacgtaagatgactattaccagcaccgaatggcctccagcagggataactattcctagacgtcaaagaggaaataccttccgaggtgcacgacagttgacccagcacctcctaagccgtggtggcagagtatctgatagtgaagggtcagatcaagtctcctcggatgaagaagatgagtctccccgacatctcggcgaggaagagatggaatccaaagcatgcccccgttgtggagaaattggacacgttgctagcatgtgtctcacactctgccctcattgtgaggaagaccatccaccaggtgaatgtcccacccgcaaggtcacatgttttctgtgcgaaggtacaaaccatgtgcccaaggattgccaactcagtgtgttgttgaccaagaccgcagaaatccaacgaacaaccctacgattgtctcatcagctagtcagctccaacagcaacatcgacgatatcatccacagcaccaatgctcctcccgctgcacctgactctgcaataaatcatagcgataataccttcagcaccaaccattctctgcaccgacagcctcaacaaagaattgtcatcgatggaagaagttgtgtctctccccgacctactccaggccgagccaagggcaatcaacctccggagggcgataccaagcagaagaccgttattcgcctcaaccagcaaccagaaggaaacttctcctgtgaatga

SEQ ID NO: 15314 - DNA, 1101 bp, Oryza sativa
  Clone ID: TFbOSC13029j.C1.o1.fg
atggtgaacactcatgctagtggaagtggaaacaataacaatgaagagaacccaacccttgctcaagttctggctcaacagactcagttaataaacatgatgatgcagcagatgcagaaccatctcaaccaagggaacaacaatgctccaccgccccagaacaagttagctgatttcctttgtgtgaagccgcctaccttttctagcactatcaacctagtggaagcaggtgattggctacacactattgagaagaagttggaattgctccagtgcacagatcaagagaaagttgtgttcgcttcacatcagttgcatggatatgcttcagaatggtgggatcacttccggatgaacagagcagaaggacaaccaatcacttgggaagagtttaccgaaggattgaagaagacacacatacctgcaggagttgttgctttgaagaagcgtgagttcaggacattgaagcaaaaggatcgtaccgtgactaagtttctttatgagttcaaccgtctagcacgttatgctccagaagatgtctgtactgacgaggaaaggcaggagaagatcttggaaggcctgaaggatgaactgtcagttacgttgatctctcatgactatgctgattttcatgagctggttgacaaagcaattcaactggaagataagaagaacaggatggacaaccgtaagagaagaatgactgttttccaggaggcacagggcagtagccagaggcagcatatcaagccatcccaagttggtgaatcaagtctaacatctcaagaacaatcgcaacagttgaacatcggtggtgagatcaattcagagactaatgcaagcaatgaagttaacatcaagcaagctactctatcggagccagttcagcaggatcagtctcaagaaaataacagtagtggaagggagcagcaagtatgtttcaactgttatgagccaggtcacttcgcaagaaagtgtccgaagccgaagcatcagcagccgcaaggtcaagtcaacaacattgtcgtcacaggagccaatgcagtgccagttgcgtcctcaagtgttacagctcagccaccagtttcaaagcagcagtag

SEQ ID NO: 15315 - DNA, 1413 bp, Oryza sativa
  Clone ID: TFbOSC17330j.C1.o2.fg
atgtcatggcacaggaccggtgtcctgctgttaggggctcagtcctgcctacctgtcccgggggttccgggcgtaggtggggttgggtcggtactcttttctatggctaggatgggttggaaactatgtcacgtcttccgtccgtataccgtggtgatgtttaacagagaaaaaggaaagaatgtcagcgggtatgactcaagtaactcaagttttcaactcaatctgccactggcctcaagagagttaaccagggcacacccttggtccattccaagcatgctgcttagttcacagctaccattggttggaagtcaagaccaaaatcagtatgtgtttgatcgagcctttgccacccaggtcaatgagcttccaatgccagaagagcaggttcccttttgtcatgattgtagagagcaaggacactatgccctgaattgtccatgggtatatgtcaaagaagccccttcccttggtttagcagggcggacatcgctaaaccagcctcctcacaccaagtcaagcttgcagcctagtgtgcaaagtagagagctcaacggagagaatccattgaatcccgggaaatgctttcctcctagcctctcgtaccacgtggggtcacatactaagcaagccaaaggcaagaagagtaagaatcagaagagaaaagcaccgatgcgaactgaagaagaagtacgtaagatgactattaccagcaccgaatggcctccagcagggataactattcctagacgtcaaagaggaaataccttccgaggtgcacgacagttgacccagcacctcctaagccgtggtggcagagtatctgatagtgaagggtcagatcaagtctcctcggatgaagaagatgagtctccccgacatctcggcgaggaagagatggaatccaaagcatgcccccgttgtggagaaattggacacgttgctagcatgtgtctcacactctgccctcattgtgaggaagaccatccaccaggtgaatgtcccacccgcaaggtcacatgttttctgtgcgaaggtacaaaccatgtgcccaaggattgccaactcagtgtgttgttgaccaagaccgcagaaatccaacgaacaaccctacgattgtctcatcagctagtcagctccaacagcaacatcgacgatatcatccacagcaccaatgctcctcccgctgcacctgactctgcaataaatcatagcgataataccttcagcaccaaccattctctgcaccgacagcctcaacaaagaattgtcatcgatggaagaagttgtgtctctccccgacctactccaggccgagccaagggcaatcaacctccggagggcgataccaagcagaagaccgttattcgcctcaaccagcaaccagaaggaaacttctcctgtgaatga

SEQ ID NO: 15316 - DNA, 6474 bp, Oryza sativa
  Clone ID: TFbOSC29926j.C1.o1.fg
atgtcagacttagggggaaagaacggagaaaatggaaatgaagatggagcgagcagcaaggaaactccatcacccaagggagctactataccttttggttacaggaaacataccattccccctcacaactttgtctccgtgccttccgggcgtgctcctcaatttgatgggacacattacgccgcttggaagcacaagatgaagttgcatctaatctctttgtatctaagtatttggaaagttgtttgtaaaggtgttgatgtaccccatgatgacatggagctcacttcggagcaagagcaactcatccaccgcaatgctcaagcttccaatgcaattctctccgccttgagtccggaggagttcaacaaggttgatgggcttgaggaggccaaggagatatgggatactttgcaattggctcatgagggatcacccgccgttcgtgaggccaagattgacttattggaaggaaggcttggaagatttgtgatggatgacaaggagacaccacaagagaagtatgataggacgatgattcttgtcaacaagattaaaggacttgggagtgaggacatgacaaatcattttgtgctcaagagacttctccgtgcacttggtccaagaaatcccactcttgtatcaatgatacgggaaaggaaagacttcaagagactcaccccaagtgacattcttggaagaattgtgtctcatgagatgcaagaagaggaagctcgtgaaagattcaagcactttcttcgcaacagtggctatggcaaagggaggaaggatgatgacaagggaaagaggcaatcaaagagggcttgcttcaattgtggcgaatatggccacttcgtagccaattgtcccaagtcaaatgaagctaaggctaagggaggcaagaagaagccagagcatgctcatgtggcggaggcacacatggcggaggtgttttactccggagatgaagaagatcccgaggtcaagcccaagcccaagccgaaagacaaggttgaaggagaaggtggtgttgctaccgtcgccttcaagtcatcttcttcaagcaagaagcgtctcttcaacaacttgagtgatgacgacgacgacttctaccactactcttgtttcatggcccaaggccgcaaggtgatgactcaaaagcgctctcacacctctcttgatgttgattctagtgatgaggaaagtgataatgaattagatgatgtgcttaagagctttagaaaacccgctatgcaacatttggctaagttaatgagagctttggatagtaaagaacaatcgctcgaaaggcaagaagaattacttattcttgagaagaaaagaaaccttgccttagaggagagcctagctaaagaatgtgctaaaaatgaacaactggctaatgagcttaatttggctaatggttctctagctagccttagtgatgtcaatgaaactcttcaagagaagtttgctagtttagacaaaagtcataaagatcttgaagttcaatttgacactctttggaatagcacttctcaaccaaatgtggtttctaattcttccaacccatctacaagcaatggttgtgctaggtgttacaatattgatttgaactctcatactactaatgttgatgctatgcaagctcttaagaaagagaatgaaaggttgggcacattggtgaaatatggatgcatgaagacataccattcaaaagatgccctttacaagacaatcaatcatcttaacatggatggacacgggctcgggttttctggtggaagtcctgtgtctaagcgtgtgatggcatactcctccggtggctcaagttgggttgtggacagtggctgcaccaatcatatgacgggagagaggagtatgtttacaagtcttgatgagggggctggaagtcgtgaaaatattgtctttggagatgatggtaaaggaaaggtaatggatctcggtaagattgccatttccaagaatcaatctctatctaatgtcctccttgtcaattcattaagagtgaatccggaggcatgcttgattgctaaatcctctatgggttggctatggcaccgtaggctagcccatgttggaatgaggaatttggcatctcttctaaaaggggaacacattcttggtctatataatgtttcttttgagaaagattgtgtgtgtagtgcttgccaagccgggaagcaagttgggagtccacatcctataaaaaacatcatgactacaacaagaccactcgagcttcttcatatggatttatttgggcccgtggcctacataagcattggaggtaacaagtatggtttcgtcattgttgatgatttttcacgcttcacttgggtgtactttctccatgacaaaagcgaagatcaagatgtcttcaagcgcttcgcaaagcaagcccaaaacctctacgatctcactatcaagagggtgcaaagcgacaatggaggagaattcaagaacactcaaatggaggaatttcttgatgaagaaggaatcaagcacgagttctctgccccctatgatcctccccaaaacggcattgttgagaggaagaaccgaaccctcattgaagccacaagggcaatgcttgatgagtacaagacttcgaatgtcttttgggcggaagccgtgagtaccgcatgtcatgccatcaaccgcttgtacctccacaagatcctaaagaaaacctcatatgagctcttgagtggtaagaagcctaatgtttcatattttcgtgtctttgggagcaaatgttttattttaagtaagaggcctcgctcatctaagttttcacctaaggtggatgagggattcttacttagctatgaatctaatgcacatgcctattgtgtcttcaacaaaacctctggtattgttgaagtcactagggatgtgacatttgatgaatctaatggctcccaaggagagcaagttgttgtacatgttgtagggggtgtggatccaaatcaagctattggtactaaggctattggagacatacgaccagtcgagacgcaggatgaccaagaagatagggatcaacctccgtcaccggcatccaacagccctacaagtgttgtgtctgctgagtcggaaattccgggtcctattgaccggaacctccggacatctctaggcccggaagttccgggttctatagtccggaacctttggatcagtggcagtgaagacatgccaacggcacaagtggatgggatcgatgctgagggcactttagagcattctgatcaggctcaggtccccccagtgcaccatccaaggatacatcacactgtccaaagagaacatcctgttgacaacatacttggtgacataagaaaaggggtaactactcgctctcgtatcacaagtttttgtcaacacttctcgtttgtctcttctttggaaccaaccagggtggaagatgtgcttggtgatccggattgggtgatggctatgcaagaggagttgaataacttcactcgcaatcaagtatggactttggtggagagacccaagcaaaatgttatcgccaccaagtggatctttcgcaacaagcaagatgaacatggggtggttgtaaggaacaaagcccggttattccaaatggatgtcaagagtgcctttctcaatggacctatctcggagttagtctatgtggagcaaccaccggggttcgaggatccaaagttgccaaaccatgtgtacaagctccacaaggcgctctatgggctcaaacaagcccctagagcttggtatgaatgtctccgagattttcttttgaaaaatggttttgaaattgggaaggcggatacaactatcttcacaaaaaaatttaagagtgattcattcatttgccaaatttatgtcgatgacataatatttggttctacgaatgcctctttttgtgaagaatttagtagtatcatgactaaaaggttcgagatgtctatgatgggtgagttgaccttctttcttgggctacaagtgaagcaagcacaagagggcaccttcatctctcaaaccaagtacgtgaaagacatactcaagaagtttgggatggaggatgccaaacctatcaagacgcccatgcctactaatggacacctagacctcgaccataatggtaaatgtgtagaccaaaaggtatatcgctccatgataggatctttgctttacttatgtgcatctcgtctcgacatcatgcttagtgtttgcatgtgtgcccgttttcaagcggagcctaaagagtgccatttgattgccgtcaagagaattctaagatatttagttcacactcctaatcttggcttgtggtatcctaagggttgtggctttgagcttttgggctattccgattcggattatgccgggtgtaaggttgatagaaaaagtacaaccgggacttgtcaattccttgggtggtcccttgtttcttggtcctctaagaagcaaaattccattgccttatcaactgccgaagccgaatatgttgccgccgattcttgttgtgcccaactcctttggatgagacaaaccctaaaagactttggctacaacttcaccaagatcccactcctatgtgataatgagagtgccatcaaaatagccaacaatcccgtccaacactcaagaaccaagcacatagacattcgccaccacttcttgagagatcatgagactaaaggagacatatgccttacccatgtgacaaccgaaagtcaattagccgacattttcaccaagcctttagatgagaaaagattttgcgagctgaggagtgagctcaatatcttagactctcgtaacattaggctggaagttccggtcaccccagtccggaacttccgggggtcggggggtataaatacccagggggagcctgagcctgtagtcattatgcctcgtgagaagagacaaaagctttctcaagatattcctgctgactcgagccccccgattccgatccattccaggagggctggtagcattgtcattcgtgatgcaccccgctctccctccccaactgcatctgagtcagatgatggtggcaatgaggatgagccaggttctgaaagcaatcctttgaggctgtacaagacaagggctgttgatcctgatcctaaacgcccaagagtgaactatctgaagaatctactcaagtgtggaaaggacagaatggttagtcctgatactctgccagctgactctcaggatgacagattcaggaccttggtgcaggttgattggtataactctgtgatcatgggaagatctcatccagtggtagagatgaagtggctagactggaagtacatgtcctcaaagaacaacatagtcttcaatgaggtacgcaaggtgtgtgagcacaagcacgcggcagatttgttggccttgcagtattcctggaatgaggaagtgattggacagttctactccactgctttctttggcaccaccaagaaggggcttgattttgtgaagtggaccattcaggggcagcagtatagggtttctatggcacaatttgttgcagctttggggttagatgatgatgacctgagtcgtccacatatctttgtagaggatgctctgtcaccgaccagcactacctttatgtatgagaaggatgctcccaaggattgtttggggactactcgagggttgcatccatattatagagtgctatactctatcttcaggtggtctttgctccccaaagtgggagatgctacagctcttccaggtaggcatgcgctcctcctcagtcgcatgcgctacaacaagcccgatttcagcatcatgaagcttatctggagtgagatctatgagacagtgtgtgagccaaagaggggttgcatctatgctccttatatcatgaagatgattgaggccaagactgggatttgttatttcaaggacaatcaatacaagcctttccgtccacatgctcccactacttcagctactcctaccaccagagtgacaagtgcttccacctcagctgctccttctttctctgctgcacctcagcgttctgagtcttcttctcccataaagaaggctctcaaggctatcttttgcatgtgtgccaagacagctaagaaggtaaagaagatagagaggcgtcaaaaggaagattggattgcagtaggcaaggatgtctctgacatttctgatgatgaggagtttgttgatccttttgctgcttatgagactgctcaagacattggtagtggtgagggtccctctggcacttctcgtttcttcaatgaggagtcctgtcactccgaggagagcagtgatgatgaggagtcagatgcccctaccgagaatgttcctacagatcccgatgaggcagtggacgccgccgggcaagacatcgactctcctcactccggcgacactgagatcattccttctgatggcgatattgatgaggcttga

SEQ ID NO: 15317 - DNA, 4278 bp, Oryza sativa
  Clone ID: TFbOSC400458j.C1.o45.fg
atgtcatacacaccgcctggccgtcgtggtggcggtggcggcggggggagcggcaacggccgcggtggcgcaagcggcagcggcggggggaatggcgcagacggcgcattacttccgctcgtgtctcaggggagagacgcatcgcacaccgctcgcctcccagtcctctcgaggacgaactacccggattgggcgctcctgatgcgcgtcaacctgcaggcacaggggctgtggacggcgatcgatcccggctacgcggagtttcgtgaagatcgggcggctctctcggcaatccttcaggcggtgccgcgtgagatgttgcgcgggctggcaaagcatgacacggcgaaggcggcgtgggacgccatcaagaccatgcgggtcggcgtcgaccgtgtgcgtgaggcgaaggagcagggcttccgtcgtcaatttgagtcgatgcgattcaaggagagggagacgccggaggagtttgcgatgcggctcactgctgtcgtcgcagacattcgcgacatgggtggagtcatggaagatgaacacgtcaacaagaagctgctgcgcgttgttcccaagaagtataagccggtggctatctctctcgagcagctgctcgatgtgaagaccatggcgctggaggagctagttgggcggctgtcaacagtggattcttacagcgatgatgaggagggaagcaatggcggcaaattgtacctcacggaggaacaatggcaggcacgtgtgaagcagcgggagcaggagggctctggcaacagcggcaataagggccgcggcgcgcccggcgcgcagaatcaccgaggcaagcccggtgggtcaccaaagggcaaagaggcggccactggtgcgaacagcagccgcgacatctcaagggtaaagtgcttcaattgtgatgaatttggtcactatgcaaggcagtgccgcaagccacgtcgccaacgccggggagaggcgaacctggtgcaagccgccgaggaagaaccgacgttgcttatggcacatgtcgtaggggtgtcacttgctggcgaggcgacactcggacgaacacctagtggacaggaggtacacctcacggagaagaaggtgatcctggaccacgaggatggtggagaggaggaggtgacaggagattggtttctggataccggcgccaccaaccacatgactggagtgcgttcggcgttcgccgagctcgacaccggcgttgttgggacggtgaagtttggcgacggctctgtgattgaaatccaggggcgcgggaccgtggtgttccgatgcaagaatggtgatcaccggtctctcgacgcggtgtactacatcccgaagctgcgcaagaacatcatcagcgtcggccgtctcgacgcgcgcggctacgacgcacatatctggggcggggtctgcacactccgtgatcccaatggtcttctcctcgcaaaggtaaaacgagacataaattatctctacatactcaagctgcatattgcaaatccagtctgcatggcggcgagcggtggcgacacggcatggcggtggcatgcgcgtttcggacacttgaacttccagtcactccggaggctggcccaggggaacatggtccgcgggcttccgaccattgatcacactgatcaactgtgcgacggttgtctcgcgggcaagcaacgacgactcccgttcccggaggaggccaagtttagagcacaggaggcgctcgaactggtgcacggcgacttgtgtgggccgatcacgcctgcgaccccaggcggcaggaagtatttcctgctcctcgtcgacgatatgagccggcatatgtggatacggctcctctccggcaagcatgaagcggcgacggcgatcaaacagttccaagccggcgttgagctggagtccgggcgaaagctgcgggctctgaggacagatcgtgggggggaatttacctccgtggagttcatggactactgcaccgatcgcgggatgcggcgagagctcactgctccttactccccgcagcaaaacagagtcgtggagcggcgcaatcagaccgtcgtcgcggcggcgcgctccatgctcaaggcggctgggctgccggcgcggttctggggggaggctgttgtggcggcggtgtacgttctgaatcgctcgccaacgaaggcgctggatggtgtgaccccatatgaggcgtggcatgggcgacgtccctcggtcgaacaccttagggtgtttggctgtgtcggctacgtcaagacggtgaagccgaacctgcgcaagcttgacgatcgaggtacgaggatggtctttattggctatgaacaggggtcgaaggcataccgcatgtatgatcctgtggcgcagcgcgtctgcgtgtcgcgggatgtcgtttttgatgagacggcgacatgggcgtggcgtgatcctgaggatgcggcgactgaagaagaagagttcacggtggatttctttgtgagccctgtggcgccctctgttgctgatgcgggcgagcagacaggaacgccggtgcaggcaggcgtgtctccggtgtcgacgggcgttctgtcctcaccaccgcgagcgccaaatggggagttttgcacaccaccaacttcagtgacgccagaaacagatggaggccctgttaggtatcgccgagtgcaagacattctctccactactgaacctgttttggatttcgactacagtgatcagtgtttgattgctactgaagaaccaacaagctttgtggaagcagagaagcatgaatgctggaggagggcaatggtggaagaattgagatcagttgaggaaaatcagacttggtcacttgctgagttgccggcagggcacaaagccattgggcttaagtgggtctataaattgaagaaggatccatctggtgcgattgtgaagcacaaggcaagactagttgccaaaggttatgtgcagcagcagggtgttgacttcgatgaagtgtttgcacctgtggcaagaatggagacagtgagattgttggttgcactagctgcacagaaagggtgggagatacaccacatggatgtgaagtctgcattcttgaatggagagcttgaggaagaagtttatgtagtgcaacctcctggatttgatgacaagaccaatgcaagcaaggttttgaaactgagaaaggctttgtatgggttgaggcaggctcctagggcttggaatgccaagttggacaacacactgctgtctttgaagttcaataaatctgcaactgaaagtgctgtttatgtgaggggagttggggactcaaagctgatagtgggagtgtatgtggatgatcttattatcactgggtctcagaaaaaggagattgatgcattcaagttgcagatgaagcagaggtttaacatgagtgatttgggttttctgagctactatttgggaatggaagttgttcagaaaggagaagggatttttctgtcacaaagtgcctatgcaggaaaaattctggagaaaacgggcatggagggctgcaatcccactcaagtacccatggaggcaaggctcaagctgagtaaagaaggcactggagaatgtgttgatccaacagagtatagaagtatagttggcagcttgaggtacttggtaaacactagacctgatctggcatattctgttggttatgtcagtagattcatggaaaaaccaacaagtgaacattgggcagcagtcaagcatatactgagatacatctcagggactatcaagacaggttgctggtatggaagagaagaagttggaaatgcaaagttggttgggttcagtgatagtgatatggcaggtgatcttgatgatagaaagagcaccacaggtgtattgttcaggtatggtggaagcctgatcagttggcaatctcagaagcaaaaagttgttgctctatcatcatgtgaggcagagtacatagctgccactactgctgcctgtcaaggtatttggctgagtcggctgattgctgagctgcttgatgcagaacccggccaaacaacacttatgattgacaacaagtcagcgattaatctttgcaagaaccctgtattccatgacagaagcaaacatattgatacccgctaccattttatcagggagtgtgtggagaagaagcaaattgcagtggagtatgtctgttctgaagatcagcttgctgatttgttaactaagcctgtcggacgagttcgtttcaaggaattgcgaaggaagatgggtttggataggacacttcaagattag

SEQ ID NO: 15318 - DNA, 4635 bp, Oryza sativa
  Clone ID: TFbOSC401327j.C1.o24.fg
atggccacctgcatcaatggcggcgagctgcaagttcgggtcgtgagccggcgactcgtgcaggcctccgacgagtccctccggccgcacgtcctcgccgtctccaacctcgacctcctcccgcagtccatccaggtctccatgatctgcatctaccccaacccacccacctccgccggcggcttccacgacgtcgtcgcggcgttcgccgccggcttgccgtcgttgctcaaccacttcttcccgctcgccgaccgcatcgccgtcaacccttgctccggcctccccgagatccactgctacaaccaaggcgcggagctcgtcgtcggcgaggccgacgtggctctcgctagcctggactacggtagggtcggggagtcgatccagaagatcctgctgccgtacgccggcgacgtggcgctgtcggtgcagtactggaacgatccggcgatgtcatacacaccgcctggccgtcgtggtggcggtggcggcggggggagcggcaacggccgcggcggcgcaagcggcagcggcggggggaatggagcagacggcgcattacttccgctcgtgtctcaggggagagacgcatcgcacaccgctcgcctcccagtcctctcgaggacaaactacccggattgggcgctcctgatgcgcgtcaacctgcaggcgcaggggctgtggacggcgatcgatcccggctacgcggagtttcgtgaagattgggcggctctctcggcaatccttcaggcggtgccgcgtgagatgttgcgcgggctggcaaagcatgacacggcgaaggcggcgtgggacgccatcaagaccatgcgggtcggcgttgaccgtgtgcgtgaggcgaaggagcagggcttccgtcgtcaatttgagtcgatgcgattcaaggagagggagacgccggaggagtttgcgatgcggctcactgccgtcgtcgcggacattcgcgacatgggtggagtcatggaagatgaacacgtcaacaagaagctgctgcgcgttgttcccaagaagtataagccggtggctatctctctcgagcagctgctcgatgtgaagaccatggcgctggaggagctagttgggcggctgtcaacagtggattcttacagcgatgatgaggagggaagcgatggcggaaaattgtacctcacggaggaacaatggcaggcacgtgtgaagcagcgggagcaggagggctccggcaacagcggcaataagggccgcggcgcgcccggcacgcagaatcaccgaggcaagcccggtgggtcgccaaagggcaaagaggcggccactggtgcgaacagcagccgcgacatctcgagggtaaagtgcttcaattgtgatgaatttggtcactatgcaaggcagtgccgcaagccacgacgccaacgccggggagaggcgaacctggtgcaagccgccgaggaagaaccgacgttgcttatggcacatgtcgtaggggtgtcacttgctggcgaggcgacactcggacgaacacctggtggacaggaggtacacctcacggagaagaaggtgatcctggaccacgaggatggtggtgaggaggaggtgacaagagattggtttctggataccggcgccaccaaccacatgactggagtgcgttcggcgttcgccgagctcgacaccggcgttgttgggacggtgaagtttggcgacggctctgtgattgaaatccaggggcgcgggaccgtggtgttccgatgcaagaatggtgatcatcggtctctcgacacggtgtactacatcccgaagctgcgcaagaacatcatcagtgtcggccgtctcgacgcgcgcggctacgacgcacatatctggggcggggtctgcacactccgtgatcccgatggtcttctcctcgcaaaggtaaaacgagacataaattatctctatatactcaagctgcatattgcaaatccagtctgcatggcggcgagcggtggcgacacggcatggcggtggcatgcgcgtttcggacacttgaacttccagtcgctccggaggctggcccaggggaacatggtccgcgggcttccgatcattgatcacactgatcaactgtgcgacggttgtctcgcgggcaagcaacgacgactcccgttcccggaggaggccaagtttagagcacaggaggcgctcgaactggtgcacggcgacttgtgtgggccgatcacgcctgcgaccccaggcggcaggaagtatttcctgctcctcgtcgacgatatgagccggcatatgtggatacggctcctctccggcaagcatgaagcggcgacggcgatcaagcagttccaagtcggcgttgagctggagtccgggcgaaagctgcgggctctgaggacagatcgtgggggggaatttacctccgtggagttcatggactactgcgccgatcatgggatgaggcgagagctcactgctccttactcccctcagcagaacggagtcgtggagcggcggaatcagaccgtggttgcggcggcgcgctccatgcttaaggcggctgggatgccggcgtgcttctggggggaggcggttgtggcggcggtgtatgtgctgaaccggtcgccgacgaaggcattgaatggcgtgaccccccatgaggcgtggcatgggcgacgtccctcggtcgaacacttgagggtgtttggctgtgtaggctacgtcaagacggtgaagccgaacctgcgcaagctcgacgatcgaggtacgaggatggtgtttattggctatgaacaggggtcgaaggcgtatcgcatgtatgaccctgtggtgcggcgcgtttgcgtgtcgcgtgatgtcgtcttcgacgaggcggcgacatgggcgtggcgtgatcctgagacagaggcgactgaagaggaggaattcacggtggatttctttgtgaatcccgtggactctgttgttgccgacttgggcgaacaggctagcacgcctgtgcagggaggcacgtacccggcgtcgacggccactccgccctcaccaccggaagtgccggcgggggtggagttttgctcaccaccaaactctgtcacgccagggacaaatgaaggccctatcaggtatcgccgagtgcaggatatcctatctgctactgaacctgtccttgattttgattatagcgaccaatgcttgctggcaagtgaggaaccaatgagtcttgcagaagctgaacaacagttgtgttggaggcaggcaatgcaagaggagctaaagtccattgaagacaatcagacttggagctttgctgagctccctgttggacataaagcaattgggttaaagtgggtctataaggtgaaaaaggatccatcaggagttgtggtgaaacacaaagcaaggttggtagcaaagggatatgtgcaacaacaaggaattgattttgaggaagtgtttgccccagtggctagaatggaaactgtgaggctcctgattgcagtagctgcaaacaaaggatgggagattcatcacatggatgtgaagtctgctttcctgaatggtgatttggaagaggaagtttatgttgtgcagccacctggttttattgagaaaggaaaagaaggccaggtgttgaggctcaagaaagctttgtatgggctaaagcaggctccccgagcatggaatgcaaaactgcacaacactttgatttctctgaatttcatcaagtctgaaactgagagtgcagtgtatgaggagatgaagaagaaatttcgcatgagtgacttaggtctgctgagttactatctgggaatggaggttgtccaaaaggatgatggagtgtttctgtcacaaactgcttatgcagcaaaaatcctagaaaagacaggaatggaaggctgcaattctactcaagttcccatggaagctaggttgaaactgaagagggagagtggaggggaaggagttgattcaaccatgtatagaagcactgtgggaagtctcaggtatttggtgaacacaaggccagatcttgcttactctgtcgggtatgtgagcagatttatggagaaaccaacttctgaacattgggcagcagtgaagcatattctgagatacattgcaggtactcttgatgttggctgctggtttgggagaagggaaaagggtgaactcagattgattgggttcagtgacagtgatatggctggggatttggatgataggaagagcaccacaggtgtactgtatatgctgggagacagtttgatcagctggcaatctcagaaacaaaaggtggtagctttgtcgtcatgtgaagctgagtatattgctgctactactggtgcttgtcaagggatttggctcaataggctattggcagaattacttggagaggaccctggccaaactgtgatgaaagttgataacaaatcagcaatcaatctctgcaagaatccggtactccatgatcgaagtaagcacattgacactcgatttcattttatcagggagtgtgtggagaagaagcaaatcgctgtggagtatgtgcgaacagaagatcagcttgcagatatactgactaagcctgttggacgagttcggtttcttgaactccggaagaagatgggtttggagcaggcacatcaagattag

SEQ ID NO: 15319 - DNA, 4281 bp, Oryza sativa
  Clone ID: TFbOSC401947j.C1.o42.fg
atgtcatacacaccgcctggccgtcgtggtggcggtggcggcggggggagcggcaacggccgcggcggcgcaagcggcagcggcggggggaatggagcagacggcgcattacttccgctcgtgtctcaggggagagacgcatcgcacaccgctcgcctcccagtcctctcgaggacaaactacccggattgggcgctcctgatgcgcgtcaacctgcaggcgcaggggctgtggacggcgatcgatcccggctacgcggagtttcgtgaagatcgggcggctctctcggcaatccttcaggcggtgccgcgtgagatgttgcgcgggctggcaaagcatgacacggcgaaggcggcgtgggacgccatcaagaccatgcgggtcggcgttgaccgtgtgcgtgaggcgaaggagaagggcttccgtcgtcaatttgagtcgatgcgattcaaggagagggagacgccggaggagtttgcgatgcggctcactgccgtcgtcgcggacattcgcgacatgggtggagtcatggaagatgaacacgtcaacaagaagctgctgcgcgttgttcccaagaagtataagccggtggctatctctctcgagcagctgctcgatgtgaagaccatggcgctggaggagctagttgggcggctgtcaacagtggattcttacagcgatgatgaggagggaagcgatggcggaaaattgtacctcacggaggaacaatggcaggcacgtgtgaagcagcgggagcaggagggctccggcaacagcggcaataagggccgcggcgcgcccggcacgcagaatcaccgaggcaagcccggtgggtcgccaaagggcaaagaggcggccactggtgcgaacagcagccgcgacatctcgagggtaaagtgcttcaattgtgatgaatttggtcactatgcaaggcagtgccgcaagccacgacgccaacgccggggagaggcgaacctggtgcaagccgccgaggaagaaccgacgttgcttatggcacatgtcgtaggggtgtcacttgctggcgaggcgacactcggacgaacacctggtggacaggaggtacacctcacggagaagaaggtgatcctggaccacgaggatggtggtgaggaggaggtgacaagagattggtttctggataccggcgccaccaaccacatgactggagtgcgttcggcgttcgccgagctcgacaccggcgttgttgggacggtgaagtttggcgacggctctgtgattgaaatccaggggcgcgggaccgtggtgttccgatgcaagaatagtgatcatcggtctctcgacacggtgtactacatcccgaagctgcgcaagaacatcatcagtgtcggccgtctcgacgcgcgcggctacgacgcacatatctggggcggggtctgcacactccgtgatcccgatggtcttctcctcgcaaaggtaaaacgagacataaattatctctatatactcaagctgcatattgcaaatccagtctgcatggcggcgagcggtggcgacatggcatggcggtggcatgcgcgtttcggacacttgaacttccagtcgctccggaggctggcccaggggaacatggtccgcgggcttccgatcattgatcacactgatcaactgtgcgacggttgtctcgcgggcaagcaacgacgactcccgttcccggaggaggccaagtttagagcacaggaggcgctcgaactggtgcacggcgacttgtgtgggccgatcacgcctgcgaccccaggcggcaggaagtatttcctgctcctcgtcgacgatatgagccggcatatgtggatacggctcctctccggcaagcatgaagcggcgacggcgatcaagcagttccaagtcggcgttgagctggagtccgggcgaaagctgcgggctctgaggacagatcgtgggggggaatttacctccgtggagttcatggactactgcgccgatcatgggatgaggcgagagctcactgctccttactcccctcagcagaacggagtcgtggagcggcggaatcagaccgtggttgcggcggcgcgctccatgcttaaggcggctgggatgccggcgtgcttctggggggaggcggttgtggcggcggtgtatgtgctgaaccggtcgccgacgaaggcattgaatggcgtgaccccccatgaggcgtggcatgggcgacgtccctcggtcgaacacttgagggtgtttggctgtgtaggctacgtcaagacggtgaagccgaacctgcgcaagctcgacgatcgaggtacgaggatggtgtttattggctatgaacaggggtcgaaggcgtatcgcatgtatgaccctgtggcgcggcgcgtttgcgtgtcgcgtgatgtcgtcttcgacgaggcggcgacatgggcgtggcgtgatcctgagacagaggcgactgaagaggaggaattcacggtggatttctttgtgaatcccgtggactctgttgttgccgacttgggcgaacaggctagcacgcctgtgcagggaggcacgtacccggcgtcgacggccactccgccctcaccaccggaagtgccggcgggggtggagttttgctcaccaccaaactctgtcacgccagggacaaatgaaggccctatcaggtatcgccgagtgcaggatatcctatctgctactgaacctgtccttgattttgattatagcgaccaatgcttgctggcaagtgaggaaccaatgagtcttgcagaagctgaacaacagttgtgttggaggcaggcaatgcaagaggagctaaagtccattgaagacaatcagacttggagctttgctgagctccctgttggacataaagcaattgggttaaagtgggtctataaggtgaaaaaggatccatcaggagttgtggtgaaacacaaagcaaggttggtagcaaagggatatgtgcaacaacaaggaattgattttgaggaagtgtttgccccagtggctagaatggaaactgtgaggctcctgattgcagtagctgcaaacaaaggatgggagattcatcacatggatgtgaagtctgctttcctgaatggtgatttggaagaggaagtttatgttgtgcagccacctggttttattgagaaaggaaaagaaggccaggtgttgaggctcaagaaagctttgtatgggctaaagcaggctccccgagcatggaatgcaaaactgcacaacactttgatttctctgaatttcatcaagtctgaaactgagagtgcagtgtatgtgagaggaacaggaagctcaaggttgatagtgggagtgtatgtggatgatctgattatcagtggggctcaagcaagtgaaattgattttttcaaggaggagatgaagaagaaatttcgcatgagtgacttaggtctgctgagttactatctgggaatggaggttgtccaaaaggatgatggagtgtttctgtcacaaactgcttatgcagcaaaaatcctagaaaagacaggaatggaaggctgcaattctactcaagttcccatggaagctaggttgaaactgaagagggagagtggaggggaaggagttgattcaaccatgtatagaagcactgtgggaagtctcaggtatttggtgaacacaaggccagatcttgcttactctgtcgggtatgtgagcagatttatggagaaaccaacttctgaacattgggcagcagtgaagcatattctgagatacattgcaggtactcttgatgttggctgctggtttgggagaagggaaaagggtgaactcagattgattgggttcagtgacagtgatatggctggggatttggatgataggaagagcaccacaggtgtactgtatatgctgggagacagtttgatcagctggcaatctcagaaacaaaaggtggtagctttgtcgtcatgtgaagctgagtatattgctgctactactggtgcttgtcaagggatttggctcaataggctattggcagaattacttggagaggaccctggccaaactgtgatgaaagttgataacaaatcagcaatcaatctctgcaagaatccggtactccatgatcgaagtaagcacattgacactcgatttcattttatcagggagtgtgtggagaagaagcaaatcgctgtggagtatgtgcgaacagaagatcagcttgcagatatactgactaagcctgttggacgagttcggtttcttgaactccggaagaagatgggtttggagcaggcacatcaagattag

SEQ ID NO: 15320 - DNA, 6309 bp, Oryza sativa
  Clone ID: TFbOSC408405j.C1.o8.fg
atgtcagacttagggggaaagaacggagaaaatggaaatgaagatggagcgagcagcaaggaaactccatcacccaagggagctactataccttttggttacaggaaacataccattccccctcacaactttgtctccgtgccttccgggcgtgctcctcaatttgatgggacacattacgccgcttggaagcacaagatgaagttgcatctaatctctttgtatctaagtatttggaaagttgtttgtaaaggtgttgatgtaccccatgatgacatggagctcacttcggagcaagagcaactcatccaccgcaatgctcaagcttccaatgcaattctctccgccttgagtccggaggagttcaacaaggttgatgggcttgaggaggccaaggagatatgggatactttgcaattggctcatgagggatcacccgccgttcgtgaggccaagattgacttattggaaggaaggcttggaagatttgtgatggatgacaaggagacaccacaagagaagtatgataggacgatgattcttgtcaacaagattaaaggacttgggagtgaggacatgacaaatcattttgtgctcaagagacttctccgtgcacttggtccaagaaatcccactcttgtatcaatgatacgggaaaggaaagacttcaagagactcaccccaagtgacattcttggaagaattgtgtctcatgagatgcaagaagaggaagctcgtgaaagattcaagcactttcttcgcaacagtggctatggcaaagggaggaaggatgatgacaagggaaagaggcaatcaaagagggcttgcttcaattgtggcgaatatggccacttcgtagccaattgtcccaagtcaaatgaagctaaggctaagggaggcaagaagaagccagagcatgctcatgtggcggaggcacacatggcggaggtgttttactccggagatgaagaagatcccgaggtcaagcccaagcccaagccgaaagacaaggttgaaggagaaggtggtgttgctaccgtcgccttcaagtcatcttcttcaagcaagaagcgtctcttcaacaacttgagtgatgacgacgacgacttctaccactactcttgtttcatggcccaaggccgcaaggtgatgactcaaaagcgctctcacacctctcttgatgttgattctagtgatgaggaaagtgataatgaattagatgatgtgcttaagagctttagaaaacccgctatgcaacatttggctaagttaatgagagctttggatagtaaagaacaatcgctcgaaaggcaagaagaattacttattcttgagaagaaaagaaaccttgccttagaggagagcctagctaaagaatgtgctaaaaatgaacaactggctaatgagcttaatttggctaatggttctctagctagccttagtgatgtcaatgaaactcttcaagagaagtttgctagtttagacaaaagtcataaagatcttgaagttcaatttgacactctttggaatagcacttctcaaccaaatgtggtttctaattcttccaacccatctacaagcaatggttgtgctaggtgttacaatattgatttgaactctcatactactaatgttgatgctatgcaagctcttaagaaagagaatgaaaggttgggcacattggtgaaatatggatgcatgaagacataccattcaaaagatgccctttacaagacaatcaatcatcttaacatggatggacacgggctcgggttttctggtggaagtcctgtgtctaagcgtgtgatggcatactcctccggtggctcaagttgggttgtggacagtggctgcaccaatcatatgacgggagagaggagtatgtttacaagtcttgatgagggggctggaagtcgtgaaaatattgtctttggagatgatggtaaaggaaaggtaatggatctcggtaagattgccatttccaagaatcaatctctatctaatgtcctccttgtcaattcattaagagtgaatccggaggcatgcttgattgctaaatcctctatgggttggctatggcaccgtaggctagcccatgttggaatgaggaatttggcatctcttctaaaaggggaacacattcttggtctatataatgtttcttttgagaaagattgtgtgtgtagtgcttgccaagccgggaagcaagttgggagtccacatcctataaaaaacatcatgactacaacaagaccactcgagcttcttcatatggatttatttgggcccgtggcctacataagcattggaggtaacaagtatggtttcgtcattgttgatgatttttcacgcttcacttgggtgtactttctccatgacaaaagcgaagatcaagatgtcttcaagcgcttcgcaaagcaagcccaaaacctctacgatctcactatcaagagggtgcaaagcgacaatggaggagaattcaagaacactcaaatggaggaatttcttgatgaagaaggaatcaagcacgagttctctgccccctatgatcctccccaaaacggcattgttgagaggaagaaccgaaccctcattgaagccacaagggcaatgcttgatgagtacaagacttcgaatgtcttttgggcggaagccgtgagtaccgcatgtcatgccatcaaccgcttgtacctccacaagatcctaaagaaaacctcatatgagctcttgagtggtaagaagcctaatgtttcatattttcgtgtctttgggagcaaatgttttattttaagtaagaggcctcgctcatctaagttttcacctaaggtggatgagggattcttacttagctatgaatctaatgcacatgcctattgtgtcttcaacaaaacctctggtattgttgaagtcactagggatgtgacatttgatgaatctaatggctcccaaggagagcaagttgttgtacatgttgtagggggtgtggatccaaatcaagctattggtactaaggctattggagacatacgaccagtcgagacgcaggatgaccaagaagatagggatcaacctccgtcaccggcatccaacagccctacaagtgttgtgtctgctgagtcggaaattccgggtcctattgaccggaacctccggacatctctaggcccggaagttccgggttctatagtccggaacctttggatcagtggcagtgaagacatgccaacggcacaagtggatgggatcgatgctgagggcactttagagcattctgatcaggctcaggtccccccagtgcaccatccaaggatacatcacactgtccaaagagaacatcctgttgacaacatacttggtgacataagaaaaggggtaactactcgctctcgtatcacaagtttttgtcaacacttctcgtttgtctcttctttggaaccaaccagggtggaagatgtgcttggtgatccggattgggtgatggctatgcaagaggagttgaataacttcactcgcaatcaagtatggactttggtggagagacccaagcaaaatgttatcgccaccaagtggatctttcgcaacaagcaagatgaacatggggtggttgtaaggaacaaagcccggttattccaaatggatgtcaagagtgcctttctcaatggacctatctcggagttagtctatgtggagcaaccaccggggttcgaggatccaaagttgccaaaccatgtgtacaagctccacaaggcgctctacgggctcaaacaagcccctagagcttgtagtatcatgactaaaaggttcgagatgtctatgatgggcgagttgaccttcttcctcgggctacaagtgaagcaagcactagagggcaccttcatctctcaaaccaagtacgtgaaagacatactcaagaagtttgggatggaggatgccaaacctatcaagacgcccatgcctactaatggacacctagacctcgaccataatggtaaatgtgtagaccaaaaggtatatcgctccatgataggatctttgctttacttatgtgcatctcgtctcgacatcatgcttagtgtttgcatgtgtgcccgttttcaagcggagcctaaagagtgccatttgattgccgtcaagagaattctaagatatttagttcacactcctaatcttggcttgtggtatcctaagggttgtggctttgagcttttgggctattccgattcggattatgccgggtgtaaggttgatagaaaaagtacaaccgggacttgtcaattccttgggtggtcccttgtttcttggtcctctaagaagcaaaattccattgccttatcaactgccgaagccgaatatgttgccgccgattcttgttgtgcccaactcctttggatgagacaaaccctaaaagactttggctacaacttcaccaagatcccactcctatgtgataatgagagtgccatcaaaatagccaacaatcccgtccaacactcaagaaccaagcacatagacattcgccaccacttcttgagagatcatgagactaaaggagacatatgccttacccatgtgacaaccgaaagtcaattagccgacattttcaccaagcctttagatgagaaaagattttgcgagctgaggagtgagctcaatatcttagactctcgtaacattaggctggaagttccggtcaccccagtccggaacttccgggggtcggggggtataaatacccagggggagcctgagcctgtagtcattatgcctcgtgagaagagacaaaagctttctcaagatattcctgctgactcgagccccccgattccgatccattccaggagggctggtagcattgtcattcgtgatgcaccccgctctccctccccaactgcatctgagtcagatgatggtggcaatgaggatgagccaggttctgaaagcaatcctttgaggctgtacaagacaagggctgttgatcctgatcctaaacgcccaagagtgaactatctgaagaatctactcaagtgtggaaaggacagaatggttagtcctgatactctgccagctgactctcaggatgacagattcaggaccttggtgcaggttgattggtataactctgtgatcatgggaagatctcatccagtggtagagatgaagtggctagactggaagtacatgtcctcaaagaacaacatagtcttcaatgaggtacgcaaggtgtgtgagcacaagcacgcggcagatttgttggccttgcagtattcctggaatgaggaagtgattggacagttctactccactgctttctttggcaccaccaagaaggggcttgattttgtgaagtggaccattcaggggcagcagtatagggtttctatggcacaatttgttgcagctttggggttagatgatgatgacctgagtcgtccacatatctttgtagaggatgctctgtcaccgaccagcactacctttatgtatgagaaggatgctcccaaggattgtttggggactactcgagggttgcatccatattatagagtgctatactctatcttcaggtggtctttgctccccaaagtgggagatgctacagctcttccaggtaggcatgcgctcctcctcagtcgcatgcgctacaacaagcccgatttcagcatcatgaagcttatctggagtgagatctatgagacagtgtgtgagccaaagaggggttgcatctatgctccttatatcatgaagatgattgaggccaagactgggatttgttatttcaaggacaatcaatacaagcctttccgtccacatgctcccactacttcagctactcctaccaccagagtgacaagtgcttccacctcagctgctccttctttctctgctgcacctcagcgttctgagtcttcttctcccataaagaaggctctcaaggctatcttttgcatgtgtgccaagacagctaagaaggtaaagaagatagagaggcgtcaaaaggaagattggattgcagtaggcaaggatgtctctgacatttctgatgatgaggagtttgttgatccttttgctgcttatgagactgctcaagacattggtagtggtgagggtccctctggcacttctcgtttcttcaatgaggagtcctgtcactccgaggagagcagtgatgatgaggagtcagatgcccctaccgagaatgttcctacagatcccgatgaggcagtggacgccgccgggcaagacatcgactctcctcactccggcgacactgagatcattccttctgatggcgatattgatgaggcttga

SEQ ID NO: 15321 - DNA, 1443 bp, Oryza sativa
  Clone ID: TFbOSC900201j.C1.o3.fg
atggcacagggctggtgtcctgctgctagggggctcaatcctgcctgcctgtcccgggggttccggccatgtgccttttgtatcatgtttgttcggtgtaccccggcttttcctgggacggggattaatacactagcattcgggaaaagaataagtgaaacaaacaacacatcaacaagaagagttagttcctttaaggtcctgtccctagttctgatgtttaacagagaaaaaggaaagaatgtcagcgggtatgcctccagtaactcaagttttcaactcaatccaccactagcctcaagagagttaacaagggcacacccttggtccattccaagcatgctgcttagttcacagcgaccattggttggaagtcgagaccaaaatcagtatgtgtttgatcgagcatttgccacccaggtcaatgagcttccaatgccagaagagcatgtccccttttgtcatgattgtagagaacaaggacactatgcccttaattgtccatgggtatatgccaaagaagccccttcctttggtttagcagggcagacatcgctaaaccagcctcctcgcaccaagtcaagcttgcagcctagtgtacaaagaagagagcccattagagagaatccattgaatcccggaaaatgctttcctcctagcctttcgtaccacgtggggtcacgtactaagcaagccaaaggcaagaagagtaagaatcagaagagaaaagcaccgatgcgaactgaagaagaagtacgtaagatgactattaccagcaccgaatggcctccagcagggataactattcctagacgtcaaagaggaaataccttccgaggtgcacgacagttgacccagcacctcctaagccatggcggcagagtatctgatagtgaagggtcagatcaagtctcctcggattatgaagatgagtctctccgacatctcggcgaggaagagatggaatcaaaagcatgcccccgttgtggagaaattggacacgttgctagcatgtgtctcacactttgccctcattgtgaggaagaccatccaccaggtggatgtcccacccgcaaggtcacatgttttctatgcgaaggtacaaaccatgtgcccaaggattgccaactcagtgtgttgttgaccaagactgcagaaatccaacgaacaaccctacgattgtctcatcagctagtcagctccaacatcaacatcgacgatatcatccccagcaccaatgctcctcctgctgcacctgactctgcagtaaatcatagcaataataccttcaacaccaaccattctctgcaccgacggcctcagcaaagaattgtcgtcgatggaagaagttgtgtctctccccgacctactccaggccgagcgaagggcaatcaatctcaggagtgcgataccaagcagaagaccgttatctgcttcaaatag

SEQ ID NO: 15322 - DNA, 1832 bp, Oryza sativa
  Clone ID: TFbOSC401021j.C1.o3.np
gagcgtacaaattgatcagtatgtgcgtggtgcacgatatgcggacgtgggaggtttttgtttttaagatattcacgataccctcggccccatgtcaccgacacgaagaatacaagaaacgcaagtctaaccatcaatgaaattcttcccgaggcgcacctcgccctcgctacggtcaacccatgcaataccaccagtcggtcactcaggctaactgccagccaggctacgcccctcgtcctcagatgaaccgtccggcacctcggccacagcagcgtgcccctagtggcactactgcgccaaacagtgttacctctttcaagtcaccgcagggaccgtcagcagttcagtgtttccggtgcaaccagatgggtcactatgccagagagtgccctcagaatcctaccaacaccaactccgggcatgctaatggcagcactgccagaactcctactccagcggcagctcagtctcgtcctagctctcaggcaagtggacaaggttctcgtgcttccaacagctttggtcgaggccgagtgaaccacattcaagctgagaccgctcaggatgctccagacattgtgatgggtatgttctctgtcaactccatacccgcaatagttctatttgattcaggagcttctcattctttcatatcacaagcttttgtgaaaagaaatggttggaaaacccaaaatttacgtgtacctatgatagtacattcccctgggaggaatataagggcaactcaaatatgcccggaagttaaccttagaactgaggaagttgacttcctagccaaaccgatagtcctagactcgcaaaacttggacatcatcctagggatggattggttagctaagcacaaaggacagatagattgtgccgaaaagtccatcaccttgcaaggacctggaggaaagcaagtccgctttacctctaacacccctaccgcaagtcggtctatcctaacctgtttacaagtcacctccttggagtcggtgcccgtagtctgtgaatatcccgacgtattcccagaagaattaacgagtatgccaccagaccgagagattgagttcgcgatagaactggcaccaggcaccgcaccaattgcaaaaagaccctaccaaatggcagctaatgagttagcagaggtcaaaagacaaatcgaagaattggagagtaaaggttatgtgcgacctagctcatccccttggggagccccagtgcttctggttaaaaagaaggatggctctgagagaatggtaatcgactgtagagccctgaatgaagtaactataaataacaagtacccattgccacggattgacgatttgttcgatcaactaaaaggagcaagagttttctccaaaattgacttgagattaggttaccaccaactggaaatcagatctgaagatatcccgaagaccactttctcaacgcgttatggtctatatgagttcacagtgatgtccttcggactcaccaatgctccagcattcttcatgaacttaatgaacaaaatcttcatggaatacctggaccaatttgtcgtggtgttcatcgatgacatcctgatatactccaagaatgaggaagaacatgctgaacacctgaggctgataatggaaaagctcagggatcatcaactactcgctaaattctcaaaatgcgaattctggttagaccgagtagcatttcttggacacatgatctcctccaacggtgtcgaagtagatcccagcaaggttaaggctgtacttgcttggaacccgcccaagaatgtgtcagagatccgcagcttccttggcttagctggatattatcga

SEQ ID NO: 15323 - DNA, 3645 bp, Oryza sativa
  Clone ID: TFbOSC900048j.C1.o16.fg
atgcaataccaccagtcggtcactcaggctaactgccagccaggctacgcccctcgtcctcagatgaaccgtccggcacctcggccacagcagcgtgcccctagtggcactactgcgccaaacagtgttacctctttcaagtcaccgcagggaccgtcagcagttcagtgtttccggtgcaaccagatgggtcactatgccagagagtgccctcagaatcctaccaacaccaactccgggcatgctaatggcagcactgccagaactcctactccagcggcagctcagtctcgtcctagctctcaggcaagtggacaaggttctcgtgcttccaacagctttggtcgaggccgagtgaaccacattcaagctgagaccgctcaggatgctccagacattgtgatgggtatgttctctgtcaactccatacccgcaatagttctatttgattcaggagcttctcattctttcatatcacaagcttttgtgaaaagaaatggttggaaaacccaaaatttacgtgtacctatgatagtacattcccctgggaggaatataagggcaactcaaatatgcccggaagttaaccttagaactgaggaagttgacttcctagccaaaccgatagtcctagactcgcaaaacttggacatcatcctacggatggattggttagctaagcacaaaggacagatagattgtgccgaaaagtccatcaccttgcaaggacctggaggaaagcaagtccgctttacctctaacacccctaccgcaagtcggtctatcctaacctgtttacaagtcacctccttggagtcggtgcccgtagtctgtgaatatcccgacgtattcccagaagaattaacgagtatgccaccagaccgagagattgagttcgcgatagaactggcaccaggcaccgcaccaattgcaaaaagaccctaccaaatggcagctaatgagttagcagaggtcaaaagacaaatcgaagaattggagagtaaaggttatgtgcgacctagctcatccccttggggagccccagtgcttctggttaaaaagaaggatggctctgagagaatggtaatcgactgtagagccctgaatgaagtaactataaataacaagtacccattgccacggattgacgatttgttcgatcaactaaaaggagcaagagttttctccaaaattgacttgagattaggttaccaccaactggaaatcagatctgaagatatcccgaagaccactttctcaacgcgttatggtctatatgagttcacagtgatgtccttcggactcaccaatgctccagcattcttcatgaacttaatgaacaaaatcttcatggaatacctggaccaatttgtcgtggtgttcatcgatgacatcctgatatactccaagaatgaggaagaacatgctgaacacctgaggctgataatggaaaagctcagggatcatcaactactcgctaaattctcaaaatgcgaattctggttagaccgagtagcatttcttggacacatgatctcctccaacggtgtcgaagtagatcccagcaaggttaaggctgtacttgcttggaacccgcccaagaatgtgtcagagatccgcagcttccttggcttagctggatattatcgaagattcattgaaggattctctaagctagccagacctatgaccgagctattaaagaaggaaaagaaatttcaatggtctgcagcatgtgaaggcagctttcaagaaatgaagaaaaggttgaccactgccccagttctcaccttgccagatatccgaaaagattttgagatcttctgtgatgcatcaagacaaggcttaggatgtgtcctaatgcaagaacgaaaggttgtggcctatgcatccaggcagctcaggcctcatgaagtcaactatcccacccatgatctcgagttggcagccgtggttcatgctcttaagatctggaggcactatttaatcgggaacagatgtgaagtatacaccgatcacaaaagtcttaagtacatcttcactcagactgagttaaatatgaggcagagaagatggttggaactaatcaaggattacgatcttggaattcattatcaccccggtaaagccaacgtggtcgctgatgcgctaagtcgcaaggcctattgcaatgtagctcaaatacggcctgaccaagatcgcctgtgcagagaattggagaagttgaggctgaccgtggtacagtcaggtgtccctgccagcttgacagtacagcctaccctagagtcgcaaatccgggaagctcagaaagacgacgaagggataaaagagttaataaaaagaatacaggagaagaaagacaccaatttctccatagacgatcaaggcacagtttggtgcggtccacgcatctgtgtaccggccaagaaggaattaagagatctcatcctaaaggaagctcatgagtccgcctactccattcatccaggaagtacgaagatgtaccaagatatcaaggcatacttctggtgggctggaatgaagcgagatgtcacagaatacgtagccttgtgtgacatttgccaaagagtcaaggcagagcatcagaggccagctggtctgctacagcccctaccaattcccgagtggaaatgggaagaaatcggaatggatctcatcaccggtttgccaagaacccctagcgggtacgactccatctgggtaatcgtggatcgactcacgaaatcagctcatttcgtggcagtgaaaactacctttgatggaaagaaactagcagaactctacatgacccatgtcgtatgtagattcggctgtcccaagaagatcgtgtcagaccgaggcactcagttcacctcaaggttctggaaacagttgcatgaagctctcggaaccgatctaaattttagtacagcttaccatccgcagaccgatggtcagacagaaagagtaaaccaaatcctagaagacatgctacgtgcgtgtgccctggatttcgaaggcacttgggatcgttgtttgccgtatgctgagttctcatacaacaacagttaccaggccagtattcagatgtcgccgaatgaggcaatgttcggaagaaagtgccacacccccttgtgctggaatgaggtaggcgaagcgctggtattcggtcctgacatactcaaggcagcaaaagaacaagttaagctgatccgagaacgtttaaagacagcacagaaccgccaaaagaattacgctgacaatcggaggcgtgaccttgagttcggaaaaggagatcatgtgtacctgcgggtatcacctctccgtggtatgaggaggtttgggatgtccggcaagttagcaccccgctacatcggcccctacctcataaccgccagacgtggcgaagtggcttatcagcttgagttacctgaagaagagcaagtttccctgggtaatatcgagctggaaaagaatctgacctacaaggaaagactgatcaaggttcttgaagaggcagaacgtcagactcgaaggaagaccatcaagttctacaaagtccaatggagcaaccattctgaagatgaggcaacctgggagcgagaagatcttctccgcgccgagttcccggagctgctcccttag

SEQ ID NO: 15324 - DNA, 1149 bp, Oryza sativa
  Clone ID: TFbOSC415688j.C1.o7.fg
atggcctccaccaggaatgacaaaacgtcagagaagaaataccttccgaggtgcaccacagttgacagagcacctttagctaatggaggtagagtgtctgatagtgaagattcagatcaagtctcctcagatgatgaagatgaaatggaacgtaaggcatgctctcgttgtggagaaatcggtcatgttgccagctcgtgtgccactacatgcgttcattgtgaggaagaccatccacccgacaggtgtccaacgagcaggatcacttgtttcttttgtgaaggaactgatcatgtatcaaaagattgtcaattcagttttctgctgacgaaaaagatggctaaccaactcgccagttccaacggagagaagcatcaaggcaacaccaatcctcgccaagattacagtttcagcctaaatccagtgccaggacagaggaatcaaaatgagaaaagaaaatgccgagtccgggaagatatctgttgcttcaattgtcaaggaatgggtcatttcgccgacaagtgcccaaaaccgagaaacgtagctgccagcacgtcagtccacgcaactccctgcaatcagaagcttgctcctcagcgaattgtcatccatgcatcccgaagcagtcctatagcccgcgttgcaacagctccaactccagcgagtgcattaccacaaggtgtcaatgctcaatttcagccccagccatcagttgacaagacagaggtcagtatcggcattgtacctttggacgttccagcacagcagccaagaaatcaagtacaagatgaagaacccgagccaccaaccattctctgcaccgacagcctcagcaaagaattgtcgtcgatggaagaagttgtgtctctccccgacctactccaggccgagcaaagggcaatcaacctccggagggcgataccaagcagaagaccgtcatccgcttcaaacagcaatcagaaggaagcttctcctatgaatgatagcaatatgcagtcctatcacatcatcacagaaccaatcaaggatgatgcagtcactagaacaatgccagctatatctctccagaatcaaaatgagcagccacgcttgtggttttcagttcgctacttatcattgtgtaatcgaaagtttgcagcaatcatgtaa

SEQ ID NO: 15325 - DNA, 1260 bp, Oryza sativa
  Clone ID: TFbOSC411239j.C1.o1.fg
atggctgacaatgagaaaggcaataaggtcagaagtcaggacatcggtacctcaagctcccgagtgaatgaagcaccagacaccagttgtgtgacactggtccaacacctgattaaccagaaccgattgcttatagagatactacagcagcatcaaacgccaattctgaacctgagtcagatacaacctcaagtgcagttggaggcagtcccagcactcacaccacaagtcagcatgccgccagcatcccgaaggacccatggtgaagtgccacatgttgactcaaaagaagcaagtatcatttgttttatgtgtgatgagcacgggcactatgcaagggagtgtcctcagcagaaaagaaaaacaccaatgcgaaccgaagatgaagtccgtaagatgatcattaccagcacagaatggcctccactaggaatgacaaaacgtcaaagaagaaataccttccgaggtgcaccacagttgacagagcatcttttagctaatggaggtagagtgtctgatagtgaagattcagatcaagtctcctcagatgatgaagatgaaatggaacgtaaggcatgctctcgttgtggagaaatcggtcatgttgccagctcgtgtgccactacatgcgttcattgtgaggaagaccatccacccgacaggtgtccaacgagcaggatcacttgtttcttttgtgaaggaactgatcatgtaccaaaagattgtcaattcagttttctgctgatgaagaagatggccaaccaacccgccagttccaacggagagaagcatcaaggcaacacaaatcctcgccaagattacagtttcctcctaactccagtgccaggacagaggaatcaaaatgagaaaagaaaatgccgagtccgggaagatatttgttgcttcaattgtcaaggaatgggtcatttcgccgacaagtgcccaaaaccgagaaacatagctgccggcacgtcagtccacgcaactccctgcaatcagaagcttgctcctcagcgaattgtcatccatgcatcccgaagcagtcctatagcccgcgttgcaacagctccaactccagcgagtgcattaccacaaggtgtcaacgctcaatttcagccccagccatcagttgacaagacagaggccagtatcggcattgtacctttggatgttccagcacagcagccaaggaatcaagtacaagatgaagaacctgagcgtgagaaagttattgtctgttacaactgtagtacctgttaa

SEQ ID NO: 15326 - DNA, 1017 bp, Oryza sativa
  Clone ID: TFbOSC421348j.C1.o2.fg
atgtctcggtatgttgaccctaatgaccgttacgaaccacgtggtcgtaacagcaggttgtatgtgggccatatttctctacgtacaagggcagaggatcttgagaacctgttcagcagatatgggagggtgcgatttgtggatctgaagaatgaatatggctttgttgagtttagtgatccccgggatgcaaatgatgcgaggcttgatcttgatggccgaaagtatgatgggagtgacatcattgttcagtttgcaagaggggtcgaacgtggtcttggaggttctcgtggatataaagccagacccgcacatggttctgaccactgcttcaactgtgggatggaggggcactggcaccgtaactgcactgctggtgactggacaaataggtgctatggctgtggagagaggggtcatatattaagggaatgcaagaacagccccaaggatctcaagcaagagagaggctactcaaggtcccgttcacctcgtcgcagaaggagcccaagctatggcaagagtggacccccttctcattggggtagccatggtgctgatcgtgaggaaaggcttcattcaagaagggatggccgcggttacagccgcagccctcggcgccatgattcgccttccaatcagagaaaccacagccctaggcgctatgctttaccctccaatgagagatatgatggcactaggcgctacgcctcgccttcttatgggagagaccgcagtcccgggggcaatgctttgccagccaatgggagaagccacaacctcacatcagatggcatgaacccttcaccaagggagagagatgatcagaatgggagccacaggagaggtgacaacgattacctgcccagtaagagagatgatcagaatgggagctacaggagaggtgacagcgattacctctccagggagagagatgattacctgtccagggggagagatgatcagaatgggagccacaggagaggtgacagcgattacctgtcccgcgaccgttga

SEQ ID NO: 15327 - DNA, 918 bp, Oryza sativa
  Clone ID: TFbOSC401685j.C1.o63.fg
atgcctcgctatgatgaccgtgatcgctacgatgaccgttacggcggcaacacgaggctgtacgtaggtcgtctttcctcgcgcacccggacccgggaccttgaagaccttttcggcagatatgggagagtgcgatatgtggatatgaagcacgagtttgcatttgttgaatttagtgatgctcgggatgctgatgaggcaaggtacaacctggatggtcgggactttgatggaagccgcatgattgttgagtttgctaaaggggttccacgtggccctggaggatcacgtgaatatatgggcagaggaccaccacctggttctggccgctgctttaactgtgggattgatgggcactgggcccgtgactgcaaagctggagactggaaaaacagatgctatcggcgtggaagaagctactcaagatccccatcccctcgtcgtgggaggagccgtggtaggagctacagcaggagccgtagcaggagctacagccgctcccagtctccaaggagggatagccgtaatgaaaggagatcaaggagccctcgtgacagtcggagccctaggggaagcccccgtgacagtcgcagccctagggggagcccccgtgacagtcgcagccctaaggggagccctcgcgacacccagagccctaggggaagccctcgtgatagccgcagccctaggagaagtgcttcaccacccaacgggaggaaccgcagccctacccctaatgccagcaggagtcctgcaccaagggacagcaggagcccaatgagagctgacagccgtagccctgctgaccatgagcgccgtgacatgagtacagctgccaatggccggagcccaagccccagggattatgaagacaatggcaatcatcgggcctcgcctagaggaagcgcatccccttga

SEQ ID NO: 15328 - DNA, 207 bp, Oryza sativa
  unsure (1)..(207): unsure at all n locations
  Clone ID: TFbOSC900030j.C1.o15.fg
atggcagggatgttgatggaaagccgcattcttgtggagtttgctaaaggagttccacgtggtgctgntggtggttcacgtgaatatatggggagaggacctcctccaggaacaggtcgctgttttaactgtgggattgatggtcactgggcaagagactgcaaggntggtgactggcatgatgcgtacgccgcgcaccccgcatga

SEQ ID NO: 15329 - DNA, 1053 bp, Oryza sativa
  Clone ID: TFbOSC401054j.C1.o14.fg
atgccgcttagttcacagctaccattggttggaagtcaagaccaaaatcagtatgtgtttgatcgagcatttgccacccaggtcaatgagcttccaatgccagaagaggatgtccccttttgtcacgattgtagggaaccaggacactatgccctgaattgtccatgggtatatgccaaagaaaccccttcctttggtttagcagggcagacatcgctaaaccagcctcctcacaccaagacaagcttgcagcctagtgtgcaaagtagagagcccaatggagagaatccatggaatcccgggaattgctttcctcctagcctttcgtaccacgtggggtcacgtactaagcaagccaaaggcaagaagagtaagaatcagaagagaaaagcgccgatgcgaactgaagaagaagtacgtaagatggctattagcagcaccgaatggcctcccgcagggataactattcccagacgtcaaagaggaaataccttccgaggtgcccgacagttgacccagcaccttctaagccatggtggcagagtatctgatagtgaagggtcagatcaagtctcctcgaatgatgaagatgagtctccccgacatctcggtgaggaagagatggaatcaaaagcatgcacccgttgtggagaaattggacacgttgctagcatgtgtctcacactctgcactcattgtgaagaagaccatccaccaggggagtgtcccacccgcaaggtcacatgttttctgtgcgaaggaatgggtcatttcgccgacaagtgccccagaccgagaaacatagctgccagcacgtcagtccacgcaactccttgcaatcagaagcttgctcctcagcgaattgtcatccatgcatcccgaagcagtcctatagaccgcgttgcaacagctccaactctagcgagtgcattaccacaaggtgtcaatgctcaatttcagccccagccatcagttgacaagacagaggccagtatcggcattgtacctttggatgttccagcacagcagccaaagaaatcaagtacaagatga

SEQ ID NO: 15330 - DNA, 1434 bp, Oryza sativa
  Clone ID: TFbOSC26158j.C1.o1.fg
atggctgacaatgagaaaggcaataaggtcagaagtcaggacattggtacctcaaactcccgagtgaatgaagcaccagacaccagttgtgtggcagtggtccaacacctgattaaccagaacaaattgcttatagagatactacagcagcatcggatgccaattttgaacccgagtcagatgcaacctcaagtgcagttggaggcagtccaagcactcacaccacaagtcagcgcaccgccaacatcccagaaggcccctcatgccatgccacatgttgacccaaaagaagcaagtatcatctgttttatgtgtgatgagcaagggcactacgcaaggaactgtcctcagcagaaaagaaaagcaccaatgcgaaccgaagatgaagtccgtaagatgatcattaccagcacagaatggcctccaccaggaatgacaaaacatcagagaagaaattccttccgaggtgcacaacagttgacagagcatcttttagctaatggaggtagagtgtctgatagtgaagattcagatcaagtctcctcagatgatgaaggtgcgaagcctccccaaggttttaaccagaataaaatagaacttaaggcatgctctcgttgtggagaaatcggtcatgttgccagctcgtgtgcctctatatgcgttcattgtgaggaagaccatccacccgacaggtgtccaacgagcaggatcacttgtttcttttgtgaaggaactgatcatgtaccaaaagattgtcgattcagttttctgctgacgaagaagatggccaaccaacccgccagttccaacggagagaagcatcaaggaaacacaaatcctcgccaagattccagtttcagcctaactccagtgccaggacagaggaatcaaaatgagaaaagaaaatgccgagtccgggaagatatctgttgcttcaattgtcaaggaatgggtcatttcgccgacaagtgcccaaaaccgagaaacgtagctgccagcacgtcagtccacgcaaacccccgcaatcagaagcttgctcctcaacgaattgtcatccatgcatcccgaagcagtccgatagcccgcgttgcaacagctccaactccaatgagtgcactaccacaaggtgtcaatgctcaatttcagccccagccaccagctgacaagacagaggccagtatctgcgttgtacctttggaagttccaatacagcagctgagaaatcaagtacaagatgaagaacccgagtgtaagaaagttattgtttgttacaactgcaatgaagaagggcattactccaaaaactgtccccaaccaaggcaaaatcgacctccacattaccgccaatttacacgaagcagacattccaatcgtattgtggtcactggagcaaacgctgtacccgtgaggcctcgtgttaatcagaacccatag

SEQ ID NO: 15331 - DNA, 1995 bp, Oryza sativa
  Clone ID: TFbOSC405314j.C1.o1.np
atggatgaagtcgttgcgacgatggatatctctgaggcaaatgaaggctacgcgagctgcggctcggtaatcgagatgtctaggcaaatgaagactacacgggtcggtgcccgggctcaaccctggcctgcctgtcccgggataccggccgtaggcagggttgggtcggtacttttgttcacggctaggatgggtgaagggttatgtcacatctttacgacgggttccaaggccatggaatgcggagtaaagatgtgtcttgtgggttggcctgggttggcttgggacgagctggaacccaggtcgggttgccagtttggtctgaatcatcgtaggccttgggttaaggcagtactagatggtcaggtcagtgaagaagaggacatcgtcagttgtttgccgaagctccagaagactgcaggatctgctagtgaagtggaggaagcagtgaagccagctgtgaagcaggacaaaagacttagatctgttaaggtcctatccttagtttctaatctgtctctcccctttgttttccctctctccctctccaaacctttgcaacagatggctgacaatgagaaaggcaataaggtcagaagtcaggacattggtacctcaaactcccgagtgaatgaagcaccagacaccagttgtgtggcagtggtccaacacctgattaaccagaacaaattgcttatagagatactacagcagcatcggatgccaattttgaacccgagtcagatgcaacctcaagtgcagttggaggcagtccaagcactcacaccacaagtcagcgcaccgccaacatcccagaaggcccctcatgccatgccacatgttgacccaaaagaagcaagtatcatctgttttatgtgtgatgagcaagggcactacgcaaggaactgtcctcagcagaaaagaaaagcaccaatgcgaaccgaagatgaagtccgtaagatgatcattaccagcacagaatggcctccaccaggaatgacaaaacatcagagaagaaattccttccgaggtgcacaacagttgacagagcatcttttagctaatggaggtagagtgtctgatagtgaagattcagatcaagtctcctcagatgatgaaggtgcgaagcctccccaaggttttaaccagaataaaatagaacttaaggcatgctctcgttgtggagaaatcggtcatgttgccagctcgtgtgcctctatatgcgttcattgtgaggaagaccatccacccgacaggtgtccaacgagcaggatcacttgtttcttttgtgaaggaactgatcatgtaccaaaagattgtcgattcagttttctgctgacgaagaagatggccaaccaacccgccagttccaacggagagaagcatcaaggaaacacaaatcctcgccaagattccagtttcagcctaactccagtgccaggacagaggaatcaaaatgagaaaagaaaatgccgagtccgggaagatatctgttgcttcaattgtcaaggaatgggtcatttcgccgacaagtgcccaaaaccgagaaacgtagctgccagcacgtcagtccacgcaaacccccgcaatcagaagcttgctcctcaacgaattgtcatccatgcatcccgaagcagtccgatagcccgcgttgcaacagctccaactccaatgagtgcactaccacaaggtgtcaatgctcaatttcagccccagccaccagctgacaagacagaggccagtatctgcgttgtacctttggaagttccaatacagcagctgagaaatcaagtacaagatgaagaacccgagtgtaagaaagttattgtttgttacaactgcaatgaagaagggcattactccaaaaactgtccccaaccaaggcaaaatcgacctccacattaccgccaatttacacgaagcagacattccaatcgtattgtggtcactggagcaaacgctgtacccgtgaggcctcgtgttaatcagaaccca

SEQ ID NO: 15332 - DNA, 5406 bp, Oryza sativa
  Clone ID: TFbOSC400710j.C1.o4.fg
atggagggagtaccagctgctggagccaatgcttccaggtcgccacaacaccgcggccgccgtcactcgttatcgccaacaccacggcgaggacgaggtcgaggcgctgctgttcgagaggttgttgtgcagcggactgtcagggaggttggcggcgctgctgctttccccaccctcacgcgaaccaactacaccgagtggtcgctgctgatgaaggtgatgctgcaagcccgtggcctttgggacgcggtggagcatggtgaatgcgatgagcaagaagacaggatggcaatggaggccatcctacgcgctgtccccagcgagatgatctcgctgctcgccaccaaggactccgcgaaggacgcctgggatgccatcaaagtgatgcgcgtcggcgtggaccgcgtgaggaaggcgaaggcgcaacagctgcaccgggagtatgaatccatctcgttccatgatggtgaatcgatcgacgacttcgccctacggctcacaagcctagtgtctcagcttgggacattaggagaacgaatcgaggagcagaacgtcatcgagaagttcttgcgcgtcgtcccagagcgattttcccaaatcgctgtgtcgattgagaccctgttggatctctcgacactcaccatcgaggatgtcactgggcgtctcaaggagcagtggctcgcacggcagaaggagcgacaaaaaggggagcgatcctccaagcagtcgcaaggtggagctcgtcagcgacctcgctcccatcgcaagaaaagaggttttggtggcggcgtaggaggcgagaaagggaacaccaatcgggacacggcaccaaacagatgccacaattgtggccgtcttggccattgggccaaggactgtcgccagcccaagaaagaagccgctcacctagcccaaggtgatgacgatgacgacgtcctgctgctttcgcgggcatgcgagcttgaagatgacgatgccactttgttgatggcccacgcttgcgagctcaatgatggccccatcatcgcgccatctcctgtctccctcgttgaaccgcgagtgcaggtgagcctaggagccacggacgctgaggacaaggaggcgtggtaccttgacacaggagccaccaaccacatgacaggccgtggtgacgtctttgctgagctcgatcgaagcgtcaccggcaccgtcaaatttggagacagctccatcgtagacatcaagggtgccggtaacgtcatcttcaccggcaagaatggcgagcacaaggttctcagtggcgtctactacattccgcgcctcaagagctcaatcatcagcatcggtcagcttgatgaaagcgggacgcgtgtgctggtcgaggacggcatcatgcgtatctgggaccgccgccgccgtcttcttgccaagatcaagcggggacgaagccgtctatacgtcctccgtctcgaggttgctaggccgatttgcttggctacgcgacacgatgatgttgcctggcgctggcacgagcgcttcgggcacatccacttcggctcgctagagaagatgggccgacaagagctcgtgcgtggcctgcctcgactggagcatgtcgagcagctttgcgacacgtgtgtcatcaccaagcatcggcgcgctgcctttccaaaggcagccaagtaccgcgctcaggagccgctagatctcgtccatggcgacatctgtggccctatcacgccggcaacgccaggtggccggcgttacttcttgctgctggtcgacgatgccacacgatacatgtgggtggcgctcctagcagccaagagcaatgcacctgacgccatcaagagaattcagatggcagccaagactcactgtgggcgcaagctgtgtgtatttcgcacggacaacggcggcgagttcacgtcgcttgagttcgccacctactgcactgatgagggtatccaacgtcatttcttcgcgccctacgccccacaacaaaatggcgtggtcgagcggcggaatcagacagtggtgtccatggcgcgcgcccttctcaaacagaagggaatgcctgcggagttttggggggaggctgtcagcacggctgtcttcctcctcaatcatgcaccaaccaaaagcctcactggcaagacgccgtatgaagcttggcacggcaagaagccgatggtcagcttcctacgtaccttcgggtgcctggcgtacgtgaaggagctaaacgatgtgcgcaagctcgacgaccgcagcacacccggcgtcttcattggctatgaagaaggggtgaaggcatatcgtgtcctggatccaaggacacggcgtgtacgtctcgcccgtgatgtcatctttgacgagagccgcgggtgggactggacggcagcaagcagcacagatgctcgaccgagcagcgatttcgccatcgagtaccatgttgagaagaccactgggcatcctatccctagtgtggggggaggcgtggtgaccccatcagcatccccaacgccactacaagagacttcaccagcaacccctgccacaccagcaccaagtcctagcgttgccccaacagagttcgtgtcacctccctcacacgacgaggagaggatcgacgcggcgcactccaacacccctgtccgctaccgcacagtcgacaacttgatcggggagaatgccccggcaccagggattgcacaacgggaactcgaggaggcgtctttgctcctcgctggacctggtgagccatgctcgtttgcagaggcggagggtgatgatgcatggcgagcagccatgcgtgaagagatggacgcggtgaatcgcaatgggatttgggagcttgttgatctcccacatggccatcgcccaattggactcaaatgggtctataaattgaagaagaacgaggccggaaaggtggtcaagcacaaagctcgtctcgtcgccaggggatttgtccagcaacctgggattgattttgacgaggtgtttgcgcccgtcgcgcgcatggagtcaattcgtctcctgcttgcggtcgccgcccaaaaagggtggcacgtccatcacatggacgtgaagtctgcctttctcaatggagatttggcagaggaggtgtatgtgaagcagccccctggttttgtcgtcgccggagaagaagacaaggtcctccgcctgcgcaaggctctttatggcctgcggcaggcgccaagagcctggaatgcgaagcttgattgtactctgaaggagctcggtttcgaccaaagcaagcatgagcacgccatgtaccgacgaaacaatggtggctctgctctactcgtcggggtctatgtagatgaccttgtgatcaccgggccatcgacaagagcaattgaacaattcaaggaagaaatgaaggcaaagtttcagatgagtgatcttggcttgctctctttctaccttggaattgaggtgaagcaaggagatgatggaatctccctgaaccaggggcgctatgctcagcgcattgtggagtcggctggcctcaaggactgcaacccttgcgccactccaatggaagaaaggctcaagctgagccgtgatagcacggcacctcccgttgatgcaacaaaatatcgacggctggttggtagccttcgctatcttgtgcacacacggccagacctagcatttgctgttgggttcgtgagtcgcttcatggagcggccaactgaggagcacatggtggccgtgaagcgcattctacgctatgtcgctggcacgatggagtacggacttcattacaaaagggagaaagaggagcagcggctgattggttacagcgacagcgacctcgccggcgacattgatacaaggagaagcacaagtggcatgttgtttttccttggttcaagcttggtgagttggcaatccatcaagcagagagtggtggctttatcttcctgtgaagcagaatatgttgcagccaccaatgctgccacacaaggaatctggttggctcgattgctcggcgaacttcttgggaagcaacctaaagcgatcgagctaaaggtggacagcaagtctgccttggcgctggcaaagaaccctgtcttccatgagcgcagcaagcatattgatttgcgctatcacttcatcagaagctgcttggaggaaggaagcatcagcgccagcttcatcaccaccatggaccagctcgctgacattctaacgaaggcattggggcgagttcgattccatgagcttgttgcaaggattggagtgatactgaaccgtcaggttgtgaaatctgattcagcaactattaagattccagaactggactttgagatccctccagaagctcaacgtggatcactttcaacagtggaagggattattatgcgagctgtggatgagctgcaggcacttcaagatgaaagaaagaaagtggatcctcaaaaggccgaagctattgataaatttttagcaaaattgagatctcttggattaggagaagctgctttcacctttgttcttgatgatcctgctggaaatagcttcattgaaaaccagaatgcaccttcatcagatcctttgttatctgtgagattctatgaaaggatgcgtgagcaacaggcagcacttggttttcttgttgaaccatccacagaagaacctggggatcagcctgttaatcatgcttcaactgtggaagggaactctgaggtgttgcaggagccccacggttcggttggagctgttgcaggtcgccgtgctatagctcaaggaaaccctgatgaagttgctgcagcgctgtgcagatattcagcaccagaagagtgtctggtctttgacctttggttagaaatcccatattttcgtgaggttattgttatggcaacaacatgcgacatgtgcggctatcgcaactcagagttgaagcctggtggtgaaatcccagccaaaggaaagaaaattacactacgtgtgcagaacggaaaagatcttacacgtgatgtcataaagtcagattcagctggcgtaaaagtacctgaactcgagttggagctagcaagtggaacattgggtggtattgttacaacagttgaaggtttaattgtgaaaatatgcgaggctctgcagagagtgcatggattccatttgggtgatagcacactggaatggaaaaagaagaaatgggaggatttcaacgatagattatccaagcttctaagtttacaagagccttggactttaattatcgatgatggattggcagcttcatttgttgctccagctaccgattctttagaagatgacaaccagctaaccattgaggagtatgtgaggagctgggagcagaatgaggagcttggcttgaatgacatggacacatcgtctgctgacgccgcctacaacaccaccaacccataa

SEQ ID NO: 15333 - DNA, 4353 bp, Oryza sativa
  Clone ID: TFbOSC401728j.C1.o22.fg
atggagggagtaccagctgctggagccaatgcttccaggtcgccacaacaccgcggccgccatcactcgttatcgccaacaccacggcgaggacgaggtcgaggcgctgctgttcgagaggttgttgtgcagcggactgtcagggaggttggcggcgctgctgctttccccaccctcacgcgaaccaactacaccgagtggtcgctgctgatgaaggtgatgctgcaagcccgtggcctttgggacgcggtggagcatggtgaatgcgatgagcaagaagacaggatggcaatggaggccatcctacgcgctgtccccagcgagatgatctcgctgctcgccaccaaggactccgcgaaggacgcctgggatgccatcaaagtgatgcgcgtcggcgtggaccgcgtgaggaaggcgaaggcgcaacagctgcaccgggagtatgaatccatctcgttccatgatggtgaatcgatcgacgacttcgccctacggctcacaagcctagtgtctcagcttgggacattaggagaacgaatcgaggagcagaacgtcatcgagaagttcttgcgcgtcgtcccagagcgattttcccaaatcgctgtgtcgattgagaccctgttggatctctcgacactcaccatcgaggacgtcactgggcgtctcaaggtggcggaggaacggcgaccagctccaacgtcgacgactactccagccggaggccagcttctcctcacggaggagcagtggctcgcacggcagaaggagcgacaaaaaggggagcgatcctccaagcagtcgcaaggtggagctcgtcagcgacctcgctcccatcgcaagaaaagaggttttggtggcggcgtaggaggcgagaaagggaacaccaatcgggacacggcaccaaacagatgccacaattgtggccgtcttggccattgggccaaggactgtcgccagcccaagaaagaagccgctcacctagcccaaggtgatgacgatgacgacgtcctgctgctttcgcgggcatgcgagcttgaagatgacgatgccactttgttgatggcccacgcttgcgagctcaatgatggccccatcatcgcgccatctcctgtctccctcgttgaaccgcgagtgcaggtgagcctaggagccacggacgctgaggacaaggaggcgtggtaccttgacacaggagccaccaaccacatgacgggccgtggtgacgtctttgctgagctcgatcgaagcatcaccggcaccgtcaaatttggagacagctccatcgtagacatcaagggtgccggtaacgtcatcttcaccggcaagaatggcgagcacaaggttctcagtggcgtctactacattccgcgcctcaagagctcaatcatcagcatcggtcagcttgatgaaagcgggacgcgtgtgctggtcgaggacggcatcatgcgtatctgggaccgccgccgccgccgccgtcttcttgccaagatcaagcggggacgaagccgtctatacgtcctccgcctcgaggttgctaggccgatttgcttggctacgcgacacgatgatgttgcctggcgctggcacgagcgcttcgggcacatccacttcggctcgctagagaagatgggccgacaagagctcgtgcgtggcctgcctcgactggagcatgtcgagcagctttgcgacacgtgtgtcatcaccaagcatcggcgcgctgcctttccaaaggcagccaagtaccgcgctcaggagccgctagatctcgtccatggcgacatctgtggccctatcacgccggcaacgccaagtggccggcgttacttcttgctgctggtcgacgatgccacacgatacatgtgggtggcgctcctagcagccaagagcaatgcacctgacgccatcaagaaaattcagatggcagccgagactcactgtgggcgcaagctgtgtgtatttcgcacggacaacggcggcgagttcacgtcgcttgagttcgccacctactgcactgatgagggtatccaacgtcatttctccgcgccctacgccccacaacaaaatggcgtggtcgagcggcggaatcagacagtggtgtccatggcgcgcgcccttctcaaacagaggggaatgcctgcggagttttggggggaggctgtcagcacggctgtcttcctcctcaatcgtgcaccaaccaaaagcctcactggcaagacgccgtatgaagcttggcacggcaagaagccgatggtcagcttcctacgtaccttcgggtgcctggcgtacgtgaaggagctaaacgatgtgcgcaagctcgacgaccgcagcacacccggcgtcttcattggctatgaagaaggggtgaaggcatatcgtgtcctggatccaaggacacggcgtgtacgtctcgcccgtgatgtcatctttgacgagagccgtgggtgggactggacggcagcaagcggcatagatgctcgaccgagcagcgatttcgccatcgagtaccatgttgagaagaccactgggcatcctatccctagtgtggggggaggcgtggtgaccccatcagcatccccaacgccactacaagagacttcaccagcaacccctgccacaccagcaccaagtcctagcgttgccccaacagagttcgtgtcacctccctcacacgacgaggagaggatcgacgcggcgcactccaacacccctgtccgctaccgcacagttgacaacttgatcggggagaatgccccggcaccagggattgcaaaacgggaactcgaggaggcgtctttgctcctcgctggacctggtgagccatgctcgtttgcagaggcggagggtgatgatgcatggcgagcagccatgcgtgaagagatggacgcggtgaatcgcaatgggatttgggagcttgttgatctcccacatggccatcgcccaattggactcaaatgggtctataaattgaagaagaacgaggccggaaaggtggtcaagcacaaagctcgtctcgtcgccaggggatttgtccagcaacctgggattgattttgacgaggtgtttgcgcccgtcgcgcgcatggagtcaattcgtctcctgcttgcggtcgccgcccaaaaagggtggcacgtccatcacatggacgtgaagtctgcctttctcaatggagatttggcagaggaggtgtatgtgaagcagccccctggttttgtcgtcgccggagaagaagacaaggtcctccgcctgcgcaaggctctttatggcctgcggcaggcgccaagagcctggaatgcgaagcttgattgtactctgaaggagctcggtttcgaccaaagcaagcatgagcacgccatgtaccgacgaaacaatggtggctctgctctactcgtcggggtctatgtagatgaccttgtgatcaccgggccatcgacaagagcaattgaacaattcaaggaagaaatgaaggcaaagtttcagatgagtgatcttggcttgctctctttctaccttggaattgaggtgaagcaaggagatgatggaatctccctgaaccaggggcgctatgctcagcgcattgtggagtcggctggcctcaaggactgcaacccttgcgccactccaatggaagaaaggctcaagctgagccgtgatagcacggcacctcccgttgatgcaacaaaatatcgacggctggttggtagccttcgctatcttgtgcacacacggccagacctagcatttgctgttgggttcgtgagtcgcttcatggagcggccaactgaggagcacatggtggccgtgaagcgcattctacgctatgtcgctggcacgatggagtacggacttcattacaaaagggagaaagaggagcagcggctgattggttacagcgacagcgacctcgccggcgacattgatacaaggagaagcacaagtggcatgttgtttttccttggttcaagcttggtgagttggcaatccatcaagcagagagtggtggctttatcttcctgtgaagcagaatatgttgcagccaccaatgctgccacacaaggaatctggttggctcgattgctcggcgaacttcttgggaagcaacctaaagcgatcgagctaaaggtggacagcaagtctgccttggcgctggcaaagaaccctgtcttccatgagcgcagcaagcatattgatttgcgctatcacttcatcagaagctgcttggaggaaggaagcatcagcgccagcttcatcaccaccatggaccagctcgctgacattctaacgaaggcattggggcgagttcgattccatgagcttgttgcaaggattggagtggtcaagattagttcagaatag

SEQ ID NO: 15334 - DNA, 2256 bp, Oryza sativa
  Clone ID: TFbOSC401048j.C1.o45.np
acacctcccaactctaagctatcaattgaggctccccgtggaccggcattgtcagtacctcattctcccggtggagctgatatggacttggcagatatagctcaaagcttggctccaataaagaccacaatagcgccgccgccgccgcggattccgccgcatcccgccgtccccgcgcgcattaaagagggggaaattattccccgcgtttccctcccccgtttcccccgatttcccctctctctctccctcggatccgtccggattcatcccgtaatcctcgccggcgacatctatggagcccgagatccccgcgcccgtttccttcctctccggccgcgttctccccctctcggtgctatataattgctccccgagctccgctcttccgtttcccgccgctcgccgctcgctctcgccgtcggatccgtgctcgcgccgtgctcctctctctccgccgtcgccgccgaccttcggttcgccgccgacgtcgctccggtcctccgcccgactcggcgacacctccatccgcttcgccgtatcgccgtcgacctcgtccgcgcctccgtttcgctcgccgaccgtcggagcgccgccgtcatcgtcatcccgagccgcgccgccgcgtttctccactccgttcgtcgtctccgccgtcctcgtgtctcggggtgagccgtggaccgtcccttccgtttccccctcctctccgctctctcgggcgctgctccgccgcgccgatggtcgccggcggtgaccatcggggcgcgggcgcgccgctcccgtcggccgtgccggcgaggccgccttcgggcgcgccctcgcggctgccaggtgggcccggccgtcagccgcccgcgcccgcgggtgcggctgacgcgcgggacccacggcgccgaccgccgccagccgcgtgcgcccggtccaccgtggaccgagaggctgacgcgtgggccccacttcccgtggacccgggcaaatgaaggctacacgagctgcggcccgatggctgacaatgagaaaggcaataaggtcagaagtcaggacattggtacctcaagctcccgagtggatgaagcaccagacaccagttgtgtgacactggtccaacacctgattaaccagaaccgattgcttatagagatactacagcagcatcagacgccaattctgaacctgagtcaaacacaacctcaagtgcagttggaggcagtccaagcactcacaccacaagtcagcatgccgccagcatcccgaaggacccatggtgacgtgccacatgttgacccaaaaggagcaagtaacatttgctttatgtgtgatgagcaagggcactatgcaagggagcgtcctcagcagaaaagaaaaacaccaatgcgaaccgaagatgaagtccgtaagatgatcattactagcacagagtggcctccaccaggaatgaccagacgtcagagaagaaataccttccgaggtgcaccacagttgacagagcatcttttagctaatggaggtagagtgtctgatagtgaagattcagatcaagtctcctcagatgatgaagatgaaatggaacgtaaggcatgctctcgttgtggagaaatcggtcatgtcgccagctcgtgtgccactatatgcgttcattgcgaggaagaccatccacccgacaggtgtccaacgagcaggatcacttgtttcttttgtgaaggaactgatcatgtaccaaaagattgtcaattcagttttctgctgacgaagaagatggctaaccaacccgccagttccaacggagagaagcatcaaggcaacaccaatcctcgccaagattacagtttcagcctaactccagtgccaggacagaggaatcaaaatgagaaaagaaaatgccgagtccgggaagatatctgttgcttcaattgtcaaggaatgggtcatttcgccgacaagtgcccaaaaccgagaaacatagctgccggcacgtcagtccacgcagctccctgcaatcagaagcttgctcctcagcgaattgtcatccatgcatcccaaagcagtcctatggctcgcgttgcaacagctccaactccagcgagtgcattaccacaaggtgtcaatgctcactttcagccccagcaaagaattgtcgtcgatggaagaagttgtgtctctccccgacctactccaggccaagcaaagggcgataccaagcagaagaccgtcatccgcttcaaccagcaatcagaaggaagcttctcctgtgaa

SEQ ID NO: 15335 - DNA, 1254 bp, Oryza sativa
  Clone ID: TFbOSC401054j.C1.o18.fg
atggctgacaatgagaaaggcaataaggtcagaagtcaggacattggtacctcaagctcccgagtggatgaagcaccagacaccagttgtgtgacactggtccaacacctgattaaccagaaccgattgcttatagagatactacagcagcatcagacgccaattctgaacctgagtcaaacacaacctcaagtgcagttggaggcagtccaagcactcacaccacaagtcagcatgccgccagcatcccgaaggacccatggtgacgtgccacatgttgacccaaaaggagcaagtaacatttgctttatgtgtgatgagcaagggcactatgcaagggagcgtcctcagcagaaaagaaaaacaccaatgcgaaccgaagatgaagtccgtaagatgatcattactagcacagagtggcctccaccaggaatgaccagacgtcagagaagaaataccttccgaggtgcaccacagttgacagagcatcttttagctaatggaggtagagtgtctgatagtgaagattcagatcaagtctcctcagatgatgaagatgaaatggaacgtaaggcatgctctcgttgtggagaaatcggtcatgtcgccagctcgtgtgccactatgtgcgttcattgcgaggaagaccatccacccgacaggtgtccaacgagcaggatcacttgtttcttttgtgaaggaactgatcatgtaccaaaagattgtcaattcagttttctgctgacgaagaagatggctaaccaacccgccagttccaacggagagaagcatcaaggcaacaccaatcctcgccaagattacagtttcagcctaactccagtgccaggacagaggaatcaaaatgagaaaagaaaatgccgagtccgggaagatatctgttgcttcaattgtcaaggaatgggtcatttcgccgacaagtgcccaaaaccgagaaacatagctgccggcacgtcagtccacgcagctccctgcaatcagaagcttgctcctcagcgaattgtcatccatgcatcccaaagcagtcctatggctcgcgttgcaacagctccaactccagcgagtgcattaccacaaggtgtcaatgctcactttcagccccagcaaagaattgtcgtcgatggaagaagttgtgtctctccccgacctactccaggccaagcaaagggcgataccaagcagaagaccgtcatccgcttcaaccagcaatcagaaggaagcttctcctgtgaatga

SEQ ID NO: 15336 - DNA, 1818 bp, Oryza sativa
  Clone ID: TFbOSC900056j.C1.o3.fg
atggctgacaatgagaaaggcaataaggtcagaagtcaggacattggtacctcaagctcccgagtgaatgaagcaccagacaccagttgtgtgacactggtccaacacctgattaaccagaaccgattgcttatagagatactacagcagcatcagacgccaattctgaacctgagtcaaatacaacctcaagtgcagttggaggcagtccaagcactcacaccacaagtcagcatgccgccagcatcccgaaggacccatggtgacgtgccacatgttgacccaaaagaagcaagtaacatttgctttatgtgtgatgagcaagggcactatgcaagggagcgtcctcagcagaaaagaaaaacaccaatgcgaaccgaagatgaagtccgtaagatgatcattaccagcacagaatggcctccaccaggaatgacaagacgtcagagaagaaataccttccgaggtgcaccacagttgacagagcatcttttagctaatggaggtagagtgtctgatagtgaagattcagatcaagtctcctcagatgatgaagatgaaatggaacgtaaggcatgctctcgttgtggagaaatcggtcatgtcgccagctcgtgtgccactatatgcgttcattgtgaggaagaccatccacccgacaggtgtccaacgagcaggatcacttgtttcttttgtgaaggaactgatcatgtaccaaaagattgtcaattcagttttctgctgacgaagaagatggctaaccaacccgccagttccaacggagagaagcctcaaggcaacaccaatcctcgccaagattacagtctcagcttaaaaccagtgccaggacagaggaatcaaaatgagaaaagaaaatgccgagtccgggaagatatctgttgcttcaattgtcaaggaatgggtcatttcgccgacaagtgcccaaaaccgagaaacatagctgccagcacgtcagtccacgcaactccctgcaatcggaagcttgctcctcagcgaattgacatccatgcatcccgaagcagtcctatagcccgcgttgcaacagctccaactccagcgagtgcattaccacaaggtgtcaatgctcaatttcagccccagccatcagttgacaagacagaggccagtatcggcattgtacctttggatgttccagcacagcagccaagaaatcaagtacaggatgaagaacccaagccactaaccattctctgcaccgacagcctcagcaaagaattgtcgtcgatgaaagaagttgtgtctctccccgacctactccaggccaagcaaagggcaatcaatctcaggagggcgataccaagcagaagaccgtcatccgcttcaaacagcaatcaaaaggaagcttctcctgtgaatgatagcattatgcagtcctatcacatcatcacagaaccaatcaaggatgcagtcactagaacaatgcccgctatatctctccagaatcaaaatgagcagccacgcttgtggttttcagttcgctacctatcattgtgcagtcgaaagtttgcagcaatcactggtaacttgtctgaggttgactccgaagatatgaatcatgagaagttctggaacggaagcatcactgaactaccgcaacctagtctgagtcagccaaaaggtgcaccctggtccaagtcaggtgaagagaagattccatccgcaacaggaggtcaagccaagcagttccgagtggtaaagttttgctggaagtttgtcaagacgcaacggaagaagtcagacaagaagagaagaccgcccaacctatcttcttgctag

SEQ ID NO: 15337 - DNA, 3156 bp, Oryza sativa
  Clone ID: TFbOSC11569j.C1.o3.fg
atgcgtaaggagaaaataccgcatcaggcgccattcgccattcaggctgcgcaactgttgggaagggcgatcggtgcgggcctcttcgctattacgccagctggcgaaagggggatgtgctgcaaggcgattaagttgggtaacgccagggttttcccagtcacgacgtttgaaccacctgtctctcctgaggagaaggttaagttcgaggctttggattgcctgttccgtggagcattgatcagtgtactcgctgacaatatagtggacgtgtatatgcacataccttcaaggaaggacatgtggaatgcacttgaggccaagttcggagtttccgacgccggcagcgagctgtatgtcatggagcagttctatgactacaagatggtcgatgaccgttctgtagtggaacaagctcatgagattcagatgctggctaaggagcttgagaacaacaagtgtgagttgccggacaagtttggggcgggtggcattattgccaaattgccaccttcttggtcagactttgccacttctctaaggcacaagagacaagagttccgtgtttctgatctcattggctctttgggtgttgaggagaaggcgagggcaaaggacaaccggggcaaaaaggttgagggaggttctagtgccaatatggtacagaagaagaacactcatgcatcccacaatagcaagaaagtcaagtctgatgtcaaacctaaggctagaaccaattttaagaagaaaggcaagggaaaggcaaagggagactgctttgtgtgtggcaagtctgggcattgggccgaggactgtcctgagcgcaaagacaggaagtctgccaacatggtcattagtgagggcggaggaacatcggggtacggtaaaattttacctacagttctctctgtttttcattcacctgattggtggattgatactggtgctaatattcatgtcgggagaggttcctccttgttgatgggaaacgggtcacttgctaatattcatgtatgggttgttcatggtgttggtacggtcgatctgaagtttacttcgggaaagaccgtgcagctgaagaacgtgcagcatgtcccttcaataaagaagaatctagttagcggctctctactgtgtagagaaggttttagacttgtgtttgaatccaataaatgtgtcgtatctaaatatggaacttttattggaaaaggttatgacagcggaggcttgttccacttttctttggatgacatgcgtaataataataatgttgtgaaccatattagcgagaatgatgagtccaatgtgtggcattcgcgaccctgtcatgtgaattttggttgtatgacacgcttggctaacatgagtttaattccaaaattcactttggtcaaaggttccaagtgccatacttgtgttcaatcgaaacaacctcgcaagcctcacaaggcatctgaggcgagagatttggcacctctagaacttcttcattccaatctgtgcgaaatgaatggcgtgttgactaaagggggaaagaaatatttcatgacactgatagatgattgcactagattttgttatgtgtatctattgaaaacaaaggatgaagcattgcattattttaagacatataaagctaaggtagaaaaccaacttgaaaggaaaatcaaacggttgaggtctgatagaggtggagagtatttttccaatgagtttacatctttttgcgaagagtttggaattattcatgagaggacacctccctattcaccccaatcaaatggggtaaccgaaagaaagaaccgtactctaactgaaatggtgaatgccatgttagacactgcgagactttcccaggaatggtggggtgaggcagttttgactgcttgtcatgtcctaaataaaatcccaatgaagcataaggaagtaacaccattcgaggaatgggaaagaaagagattaaatctctcatacctacgaacatggggctgtttggccaaggtaaatgtacctatagccaaaaagcgtaaacttggaccgaatactgttgattgtgtgttccttggttatgctattcacagcgtgggttatagattcttagtagtaaactctgaagtacccgacatgcgagttggtacaattattgagtccagagatgctacattctttgagaatgaatttcccatgaaaaatacacctagcacttctaatcatgaaactgtcataccccataagcactttgcaccgatagaacacaatgatcaaacgcctgagggaaatcctgaggaggataatattgtagatactcgtaagagtaagagacaaagggttgcaaaatcctttggagatgactacattgtatacctcgtggatgacactccaagaaccatagaaaaggcatattcatctcctgacgctgactactggaaggaagcaaaaaagcttagacctgatggtacaattgaaaagtacaagacaaggcttgtggccagggttatacccaaaaagaaggcgaggatttttttcgacacctacttaccagttgcccgtttgatcacgattcgagtactacttgttcgagcagcctctcatggtcttctcgtccatcagatggacgttaagacagctttcctaaacggtgagctggaggaggagatctatatggatcaacaagacaggtatgtactagaaggtcaggtgggaatggtgtgtaaactgttgaaatccttgtatggccttaagcaagcacctaagcaatggcatgagaagtttgacaccacacttacatctactggctttgttgtgaacgaagctgacaaatgtgtgtactatcgctatggtgggggagaaggagtgatcttgtgtttatatgtcgatgacatattgatctttgggatcagcctcaatgtgattgaggaggtcaaggactttctgtccaagagctttgaaatgaaggatttgggagatgctgatgttattcttaacattaagctactgagaggagatgagggtgggattgcacaatcccactatgtggacaaagttttaagtcgctttggctatagtgactacaagccagctcctactccttatgatcccagcatgctattaaggaaaaaccgaagaatagcaagggatcaactgagatactcctaa

SEQ ID NO: 15338 - DNA, 1413 bp, Oryza sativa
  Clone ID: TFbOSC28694j.C1.o1.fg
atgtcatggcacagggccggtgtcctgctgctgggggctcagtcctgcctacctatcccaggggttccggccgtaggtggggttgggtcggtactcttgtttatggctaggatgggttgggaactatgtcacgtcttccgtccgtataccgtggtgatgtttaacagagaaaaaggaaagaatgtcagcgggtatgccccaagtaactcaagttttcaactcgatcaaccactggcctcaagagagttaaccagggcacacccttggtccattccaagcatgctgcttagttcacagctaccattggttggaagtcaagaccaaaatcagtatatgtttgatcgagcatttgccacccatgtcaatgagcttccaatgccagaagaggatgtccccttttgtcatgattgtagagaacaaggacactatgccctgaattgtccatgggtatatgccaaagaagccccttcctttggtttaacagggcagacatcgctaaaccagcctcctcgcaccaagtcaagcttgcagcctattgtgcaaagtagagagcccaatggagagaatccattgaatcccgggaaatgctttcctcctagcctttcgtaccacgtggggtcacgtactaagcaagccaaaggcaagaagagtaagaatcagaagagaaaagcgccgatgcgaactgaaggagaagtatgtaagatggctattagcagcaccgaatggcctcccgcagggataactattcctagacgtcaaagaggaaataccttccgaggtgcacgacagttgacccagcacctcctaagccatggcggcagagtatctgatagtgaagggtcagatcaagtctcctcggattatgaagatgagtctctccgacatctcggcgaggaagagatggaatcaaaagcatgcccccgttgtggagaaattggacacgttgctagcatgtgtttcacactctgccctcattgtgaggaagaccatccaccaggtgaatgtcccacccgcaaggtcacatgttttctgtgcgaaggtacaaaccatgtgcccaaggattgccaactcagtgtgttgttgaccaagaccgcagaaatccaacgaacaaccctacgattgtctcgtcagttagtcagctccaacagcaacatcgacgatatcatccacagcaccaatgctcctcttgctgcacctgactctgcaataaatcatagcaataataccttcagcaccaaccattctctgcaccgacggcctcagcaaagaattgtcgtcgatggaagaagttgtgtctctccccgacctactccaggccgagcgaagggcaatcaacctcaggaggatgataccaagcagaagaccgttattcgcttcaaccagcaatcagaaggaagcttctcctgtgaatga

SEQ ID NO: 15339 - DNA, 2226 bp, Oryza sativa
  Clone ID: TFbOSC400381j.C1.o11.fg
atgcggcccggacgacggtggggatacaggcgcgtcgcggtcgcattggcggtgtgcgtccacgcggcggtgcttctctcggccgtcgtctacttgtcctccgtcctctctgcagctgggcctggggctagctcctcgtccctgcaggaaacggagatgatgagactgaccgccaagctggagcagatcatcgggcggccaccgcacaaccgcgctcacctccccagtcacgccttcgccccaagcaagtcaggcctcgccactgctatccaagcccttgactggggaacggatgccgaggaggatgaggacgacgtcattgctccggagctacaccaacgttcagcggagacattcaatccgcaaaccgccaaagcacgcaaagcagcttctccatctccggcgtccaaggctttccatcaggaaatcaatgcccgaagccaggaagaggagctcgacattactgcagagagaggagagggacagagcgccattacgccccctccggaaaaggcacaagaggaagatgcagagaagaaggccagagaaaaagcaacattaaagtcgataatagtagccccggcaagagctacaagcaagtctcaaatcgaggcagaagaacaagatctttcatcaaaatggcaagcggtaaaaccaaagttttggtggcggaagcgccaaaatccttcttcatcaacctctcaggtcgtcttcaatcgcccagctacctccttcaatccactaaatctcagagaaaagttcaaggagatcttgcacggcaagtgcttccgctgcttcgcttcagatcaccaggcagcagcttgcagggatcccatccgctgctatacttgtagacgcagtggacacatctccttccgctgcccaaacaaatcaaagcaacccattcactcccgcctcaccttccccaagcaagccccctccattcaatcccgactcatcttcccaccacttcccagcaagaaccaacagcaaccaacaacaacccgccctggttcggttttccatcgtttgcacaaaccagcggtgaccatggatcacatacctggtctgccgaatcaacggccggcagtcggctatgcaacggtgccgatgacggagctcatgcagcacgagctggagcgccttcactatcatggcgcactcatctcggctgaggtcgagggacaggagacgtcccccagggaggtggcgcgtgcactgacccagcaggttgggatccccatctcggacctgcgagtcacgcgccatcacccggaagatttcttcgtcttcttcgatttcccagaggggcaggccgcggcagcgcggagaggcttcatcactctggatggaggaaggttcaccatcacgccatggagcgccgacaggcatgtgcaccacccgaactggtggtttcgtgtgcggctctgcctggagggattgccgcagtacgcatggaatagggcgggattggagggcgtcatggtgctctccaccttcttcccgccgggagctgggcgtgtcacctccggcatcacaccgccgcttccggacgagatcgcgctgccgccgagggggaggctgccgcatgtcatagtccatctggacgagatggaggactggactccaggaccgccccgctcgccttctttcggggtgagcggactgccctcctcggacttgtctgattcgggaggcccgatacccacggtgcgcaccttccagtggtacctgggctgcgccgacggaacccagcctcctcggcgacgggcggcagcgaggcggggatgcagggcaccgccacagagaagagaagacccggaggatgatgaggatgatgacgggcggcggcgccacgctgaggatattccaccacgccgccgctcgctgcgcgatgtcatcattggaaggggccggtcggttgagtcgcgggcggcggaaggggtgcgacaccggagccgcacgccgcatccttccggccgccagcgagcgcacggcgatggccgccaaggccgctcacagaccaggcacagctcccgatgctcctgccgctacagatcccgtcgcacgcgctccccaagctccttgactcctcgcgatcaggatggcacgggcgatgcaggctgcgcgacaaccaaggtggtcgctgtcagtggccaggctgatggcgaccagcagtgtagcgcccgttccgtcgtggcgcctagcgggaaaactatctcttaa

SEQ ID NO: 15340 - DNA, 1494 bp, Oryza sativa
  Clone ID: TFbOSC401054j.C1.o53.fg
atggaggtggatgaagtcgggggtcgatggacattctccagggcaaatgaaggctacacgagctgcggcccggtagtcgagatgtcatggcagagggttggtgccctgctgctagggggctcagtcctgcctgcctgtcccgggtgtcccggccgtagggggattgggtcggtactcttgtttatggctaggatgggttgggaactatgtcacgtcttccgtccgtataccgtggtgatgtttaacagagaaaaaggaaagaatgtcagcgggtatgcctcaagtaactcaagttttcaactcaatccaccactgtcctcaagagagttaacaagggcacacccttggtccattccaagcatgctgcttagttcacagctaccattggttggaagtcaagaccaaaatcagtatgtgtttgatcgagcatttgccacccaggtcaatgagcttccaatgccagaagaggatgtccccttttgtcacgattgtagagaacaaggacactatgccctgaattgtccatgggtatatgccaaagaagccccttcctttggtttagcagggcagacatcgctaaaccagcctcctcacaccaagtcaagcttgcagcctagtgtgcaaagtagagagcccaatggagagaatccatggaatcccgggaaatgctttcctcctagcctttcataccacgtggagtcacgtactaagcaagccaaaggcaagaagagtaagaatcagaagagaaaagcaccgatgcgaactgaagaagaagtacgtaagatgactattaccagcaccgaatggcctccagcagggataactattcctagacgtcaaagaggaaataccttccgaggtgcacgacagttgacccagcacctcctaagccatggcggcagagtatctgatagtgaagggtcagatcaagtctcctcggattatgaagatgagtctccccgacatctcggcgaggaagagatggaatcaaaagcatgcccccgttgtggagaaattggacacgttgctagcatgtgtttcacactctgccctcattgtgaggaagaccatccaccaggtgaatgtcccacccgcaaggtcacatgttttctgtgcgaaggtacaaaccatgtgcccaaggattgccaactcagtgtgttgttgaccaagaccacagaaatccaacgaacaaccatacgattgtctcatcagctagttagctccaacagcaacatcgacgatatcatccacagcaccaatgctcctcctgctgcacctgactctgcaataaatcatagcaataataccttcagccccaaccattctctgcaccgacagcctcagcaaagaattgtcgttgatggaagaagttgtgtctctccccgacctactccaagccgagcaaagggcaatcaacctcaggagggcgataccaagcaaaagaccgttatctgcttcaaacagcaatcagaaggaagtttctcccgtgaatga

SEQ ID NO: 15341 - DNA, 3060 bp, Oryza sativa
  Clone ID: TFbOSC900220j.C1.o13.fg
atggcgaggcgagcgttgcgactgcgactctctctctctctatcattttgcaacggaccggaatccaaccccactgaaccacctgtctctcctgaggagaaggttaagttcgaggctttggattgcctgttccgtggagcattgatcagtgtactcgctgacaatatagtggacgtgtatatgcacataccttcaaggaaggacatgtggaatgcacttgaggccaagttcggagtttccgacgccggcagcgagctgtatgtcatggagcagttctatgactacaagatggtcgatgaccgttctgtagtggaacaagctcatgagattcagatgctggctaaggagcttgagaacaacaagtgtgagttgccggacaagtttgtggcgggtggcattattgccaaattgccaccttcttggtcagactttgccacttctctaaggcacaagagacaagagttccgtgtttctgatctcattggctctttgggtgttgaggagaaggcgagggcaaaggacaaccggggcaaaaaggttgagggaggttctagtgccaatatggtacagaagaagaacactcatgcatcccacaatagcaagaaagtcaagtctgatgtcaaacctaaggctagaaccaattttaagaagaaaggcaagggaaaggcaaagggagactgctttgtgtgtggcaagtctgggcattgggccgaggactgtcctgagcgcaaagacaggaagtctgccaacatggtcattagtgagggcggaggaacatcggggtacggtaaaattttacctacagttctctctgtttttcattcacctgattggtggattgatactggtgctaatattcatgtcgggagaggttcctccttgttgatgggaaacgggtcacttgctaatattcatgtatgggttgttcatggtgttggtacggtcgatctgaagtttacttcgggaaagaccgtgcagctgaagaacgtgcagcatgtcccttcaataaagaagaatctagttagcggctctctactgtgtagagaaggttttagacttgtgtttgaatccaataaatgtgtcgtatctaaatatggaacttttattggaaaaggttatgacagcggaggcttgttccacttttctttggatgacatgcgtaataataataatgttgtgaaccatattagcgagaatgatgagtccaatgtgtggcattcgcgaccctgtcatgtgaattttggttgtatgacacgcttggctaacatgagtttaattccaaaattcactttggtcaaaggttccaagtgccatacttgtgttcaatcgaaacaacctcgcaagcctcacaaggcatctgaggcgagagatttggcacctctagaacttcttcattccaatctgtgcgaaatgaatggcgtgttgactaaagggggaaagaaatatttcatgacactgatagatgattgcactagattttgttatgtgtatctattgaaaacaaaggatgaagcattgcattattttaagacatataaagctaaggtagaaaaccaacttgaaaggaaaatcaaacggttgaggtctgatagaggtggagagtatttttccaatgagtttacatctttttgcgaagagtttggaattattcatgagaggacacctccctattcaccccaatcaaatggggtaaccgaaagaaagaaccgtactctaactgaaatggtgaatgccatgttagacactgcgagactttcccaggaatggtggggtgaggcagttttgactgcttgtcatgtcctaaataaaatcccaatgaagcataaggaagtaacaccattcgaggaatgggaaagaaagagattaaatctctcatacctacgaacatggggctgtttggccaaggtaaatgtacctatagccaaaaagcgtaaacttggaccgaatactgttgattgtgtgttccttggttatgctattcacagcgtgggttatagattcttagtagtaaactctgaagtacccgacatgcgagttggtacaattattgagtccagagatgctacattctttgagaatgaatttcccatgaaaaatacacctagcacttctaatcatgaaactgtcataccccataagcactttgcaccgatagaacacaatgatcaaacgcctgagggaaatcctgaggaggataatattgtagatactcgtaagagtaagagacaaagggttgcaaaatcctttggagatgactacattgtatacctcgtggatgacactccaagaaccatagaaaaggcatattcatctcctgacgctgactactggaaggaagcaaaaaagcttagacctgatggtacaattgaaaagtacaagacaaggcttgtggccagggttatacccaaaaagaaggcgaggatttttttcgacacctacttaccagttgcccgtttgatcacgattcgagtactacttgttcgagcagcctctcatggtcttctcgtccatcagatggacgttaagacagctttcctaaacggtgagctggaggaggagatctatatggatcaacaagacaggtatgtactagaaggtcaggtgggaatggtgtgtaaactgttgaaatccttgtatggccttaagcaagcacctaagcaatggcatgagaagtttgacaccacacttacatctactggctttgttgtgaacgaagctgacaaatgtgtgtactatcgctatggtgggggagaaggagtgatcttgtgtttatatgtcgatgacatattgatctttgggatcagcctcaatgtgattgaggaggtcaaggactttctgtccaagagctttgaaatgaaggatttgggagatgctgatgttattcttaacattaagctactgagaggagatgagggtgggattgcacaatcccactatgtggacaaagttttaagtcgctttggctatagtgactacaagccagctcctactccttatgatcccagcatgctattaaggaaaaaccgaagaatagcaagggatcaactgagatactcctaa

SEQ ID NO: 15342 - DNA, 2013 bp, Oryza sativa
  Clone ID: TFbOSC900403j.C1.o14.fg
atgttagatgaatacaagacatcggaccgcttttgggccgaagccgtcaacaccgcatgccacgccatcaaccgcctctatcttcaccgccttcttaagaagactccctatgagcttcttatcggtaacaaaccaaatgtctcttactttcgtgttttcggtagtaagtgctacattcttactaagaaggctagatcctcaaagtttgctcctaaagtggatgaggggttcttgcttgggtatgggtcaaatgaatgtgcataccgcgttttcaataaaacctctggtattgttgggatcgcgcgtgatgtgacatttgacgaaactaacggctctcaagtagagcaagttgactcacatgtgttaggtgaagaggaggacccgagcgtagcaatcaagagatgtgaaaaagcgccttcctcaacgggcctatcaacgagttggtatacgtggagcaaccactgggcttcgaggatccgaagtatcccaaccacgtgtacaagttccacaaggcgctctacgggctctagtaggatgatgaccaagcgttttgagatgtccatgatgggtgaattgaagttcttcctcggccttcaaatcaagcaactaaaggaaggaactttcatttgccaaacaaagtacttgaaggacatgctcaagaagtttggaatggagaacgccaagccaatccacactcccatgccatcaaattgtcacctcgacctcaatgagcaaggtaaagacgtcgaccaaaagatgtttaacagagaaaaaggaaagaatgtcagagggtatgcctccagtaactcaagttttcaactcaatccaccactagcctcaagagagttaacaagggcacacccttggtccattccaagcatgctgcttagttcacagctaccattggttggaagtcaagaccaaaatcagtgtgtgtttgatcgagcatttgccacccaggtcaatgagcttccaatgccagaagagcatgtccccttttgtcatgattgtagagaacaaggacactatgccctgaattgtccatgggtatatgccaaagaagccccttcctttggtttagcagggcagacatcgctaaaccagcctcctcgcaccaagtcaagcttgcagcctagtgtacaaaggagagagcccattggagagaatccattgaatcccgggaaatgctttcctcctagcctttcgtaccacgtggggtcacgtactaagcaagccaaaggcaagaagagtaagaatcagaagagaaaagcaccgatgcgaactgaagaagaagtacgtaagatgactattaccagcaccgaatggcctccagctgggataactattcctagacgtcaaagaggaaatactttccgaggtgcacgacagttgacccagcacctcctaagccatggtggcagagtatctgatagtgaagggtcagatcaagtctcctcggattatgaagatgagtctccccgacatctcggcgaggaagagatggaatcaaaagcatgcccccgttgtggagaaattggacatgttgctagcatgtgtttcacactctgccctcattgtgaggaagaccatccaccaggtgaatgtcccacccgcaaggtcacatgttttctgtgcgaaggtacaaaccatgtgcccaaggattgccaactcagtgtgttgttgaccaagaccgcagaaatccaacgaacaaccctacgattgtctcgtcagttagtcagctccaacagcaacatcgacgatatcatccacagcaccaatgctcctcttgctgcacctgactctgcaataaatcatagcaataataccttcagcaccaaccattctctgcaccgacggcctcagcaaagaattgtcgtcgatggaagaagttgtgtctctccccgacctactccaggccgagcgaagggcaatcaacctcaggaggatgataccaagcagaagaccgttattcgcttcaaccagcaatcagaaggaagcttctcctgtgaatga

SEQ ID NO: 15343 - DNA, 2733 bp, Oryza sativa
  Clone ID: TFbOSC101630j.C1.o12.fg
atggagtttggatgggccctgcgacgtcctatgcggcttccagattcacctaggcacgagaggggactgcccgctgccttgcgaggagtgggggtgaaacctgagggacggagcgccattacgccccctcccgaaaaggcacaagaggaagatgcagagaagaaagccagaggaaaagcaacattaaagtcgataatcgtagccccggcgagagctacaagcaagtttcaaatcgaggcagaagaacaatatctttcatcaaaatggcaagcggtaaaaccaaagttttggtggcggaagcgccaaaatccttcttcgtcaacctctcaggccgtcttcaatcgcccagctgcctccttcaatccactaaatctcagagaaaaattcaaggagatcttgcacggcaagtgcttccgctgcctcgcttcagatcaccaggcagcagcttgcagggatcccatccgctgctatacttgtagacgcagtggacacatctccttccgctgcccaaacaaatcaaagcaacccattcactcccgcctcaccttccccaagcaagccccctccattcaatcccaactcatcttcccaccgcttcccagcaagaaccaacagcaaccaacaacgacccgccctggttcggttttccatcgtttgcacaagccaacggtgaccatggatcacatacctggtctaccgaatcaacggccggcggtcggctatgcaacggtgccgatgacggagctcatgcagcacgagctggagcgccttcgctttcatggcgcactcatctcggccgaggttgagggacaggagacgtcccctagggaggtggcacgtgcactgacccagcaggttgggatccccatctcggacctgcgagtgacgcgccatcacccggaagatttcttcgtcttcttcgatttcccagaggggcaggccgcggcaacgcggagaggcttcatcactctggatggaggaaggttcaccatcacgccatggagcgccgacaggcatgtgcaccacccgaactggtggtttcgcgtgcggctctgcctggagggattgccgcagtacgcatggaacagggcgggattggagggcgtcatgggtcccatctgcctcttcgatcgcatcgagcatgagtcggttcagcggcagaacatggccatcttctcatgctggatgtggatgcggaatcctgacctcctgccacgaatagtgatctccaccttcttcccgccggaagctgggcgtgtcacctccggcatcacaccgccgcttccggacgagatcgcgccaccgccgagggggaggctgccgcatgtcatagtccatctggacgagatggaggactggactccaggaccgccccatccgccctgctcgccttcttccggcgtgagcggacttccctcctcggactcgtctgattcgggaggcccgatacccacggtgcgcaccttccagtggtacctgggctgcgccgacggaacccagcctcctcggcaacgggcggcagtgaggcggggatgcagggcactgccgcagagaagagaagacccagaggatgatgaggatgacaacgggcggcggcgccacgctgaggatattccaccacgccgccgctcgctgcgcgatgtcatcattggaagggactggtcggttgagtcgcgggcggcggaaggggcgcggcactggagccgcacgccgcatccttccggccgccagcgagcgcacggcgatgggtgccaaggccgctcacgaaccaggcacagctcccgatgctcctgccgctgcagatcccgtcgcacgcgctccccaagctccttgactcctcgcggtcaggacggcaccggcgatgcaggcggcgcgacgaccaaggtggtcgctgttagtggccaggctgatggcgaccagcagccagtcgacgctctcgtgagtcttcctgaccctctgatcaagatcctatgctcctcacccctgctccccttctcagatgaccagggggaccacgacccgatgctgccgctcctggcagagatcgctcccaagtcttcacgggaggcggagaacgagacgaagaggacgggtggggaagaaccgatactgggagaggataaggtggcgtcggcagctgagttgggccaggagaagatgggccatctcgtcccagatgcgcagcaggcccccaagatggacctcctcgctcagtccactggagatgacgaggcccaagcttccacaggagaccagcccaccctggtgcagcaggccgactgcgaggagcaacaccaggccacggtccagactcagcccatccacggaggagaaggtgaacgtgaaaaggtcgtcttatctcctctgttctcgcagctgcagccgccgatcatcctgcaggcgccgctcgagctggcgccgcccggcgcggccaagacgaaggggtgcggacgcaaggtggtgcagatgccgtcgcggcggagcggccgtaaggcgcgcttctcgtcggtgccggtgtctaagcgcgcagaagtgcgcctcatggaggagatggggctgctcaccccgggtgaaccggtcgtggatgcggtggtggaggcttatgcaaagtccttcgacacaccgcttccgttgcatgtcatcgccggtctgcgggcgctcacactcctggatggagtgcacgacatgccggtgccaggagagaaaggaaccaccgcaacggcggtggtctga

SEQ ID NO: 15344 - DNA, 1110 bp, Oryza sativa
  Clone ID: TFbOSC11448j.C1.o1.fg
atggaagcagaactcacagcactagatactgcgacagttgaggccgaatggcttcgtgaactcctggtggatttgccggtggttgaaaaaccagtgccagctatcctgatgaactgtgataatcaaacagtgattattaaagtgaacagttcgaaggacaacatgaagtcatctaggcatgtaaagagaagactgaaatctgtcagaaagcagaaaaactccggagtgatagcattggactatgtccagacggctaaaaagctggcagatcagtttactaaggggctaccacgcaaacgaagtgaaccgcctctctctcatgaggaggaggctaagttcgaggcttcggattgcctgttccgtggagcattgttcagtgtactcgctgacaatatagtggatgtgtatatgcacatgccttcagggaaggacatgtgggatgcacttgaggccaagttcggagtttccgacgctggcagcgagctgtatgtcatggagcagttctatgactacaagatggaacttgagaacaacaactgtgagttgccggacaagtttgtggcgggtggcattattgccaaattgccaccttttttgtcggactttgccacttctctaaaacacaagagacaagagttcagtgttaatgatctcattggctctttgggtgttgaggagaaggcgagggcaaaggacaaccggggcaaaaagatcgagggaggttctagtgccaatatggtgcagaagaagaaccctcacgcatcccacaacaacaagaaagtcaagcctgatgtcaaacccaaggctacaaccaattttaagaagaaaggcaagggaaaggcaaagggagattgctttgtgtatggcaagcctggacattgggccaaggattgtcctgagcgcaatgacaagaagtctgctaacatagtcattagtgagggcggaggaacatcggggtacggtcgggagaggttcctccttgttgatgggaaacgggtcgcttgcggctattcatggtgttggtacggtcgatctgaagtttacttcgggaaagatcgtgcagctgaagaacgtgcaacatgtcccttcaataaagaagaatctagttag

SEQ ID NO: 15345 - DNA, 1920 bp, Oryza sativa
  Clone ID: TFbOSC900186j.C1.o18.fg
atgcctccacaggtttctctacaactagtggtgatggcagcagatgaagggagccagatttggtggctagtagtgatgagcgacgaaagtggtatctctcaggcggatggaggcaaacgaagtgaaccgcctctctctcatgaggaggaggctaagttcgaggcttcggattgcctgttccgtggagcattgttcagtgtactcgctgacaatatagtggatgtgtatatgcacatgccttcagggaaggacatgtgggatgcacttgaggccaagttcggagtttccgacgctggcagcgagctgtatgtcatggagcagttctatgactacaagatggaacttgagaacaacaactgtgagttgccggacaagtttgtggcgggtggcattattgccaaattgccaccttttttgtcggactttgccacttctctaaaacacaagagacaagagttcagtgttaatgatctcattggctctttgggtgttgaggagaaggcgagggcaaaggacaaccggggcaaaaagatcgagggaggttctagtgccaatatggtgcagaagaagaaccctcacgcatcccacaacaacaagaaagtcaagcctgatgtcaaacccaaggctacaaccaattttaagaagaaaggcaagggaaaggcaaagggagattgctttgtgtatggcaagcctggacattgggccaaggattgtcctgagcgcaatgacaagaagtctgctaacatagtcattagtgagggcggaggaacatcggggtacggtaaatttttacctacagtactctctgtttttcattcacctgattggtgggttgatactggtgctaatattcatgtcgggagaggttcctccttgttgatgggaaacgggtcgcttgcggctattcatggtgttggttccaagtgccatacttgtgttcaattgaaacaacctcgcaagcctcacaaggcatctgaggcgaggaatttggcacctctagaacttgttcattccgatctgtgcgaaatgaatggcgtgttgactaaagggggaaagaaattttttatgacactgatagatgattgcactagattttgctatttgtatctattgaaaacaaaggatgaagcattgcattactttaagatctataaagctgaggtagaaaaccaacttgaaaggaaaatcaagcggttgaggtctgataggggtggagagtatttttccaatgagtttacatccttttgcaaagagtttggaattattcatgagaggacgtctccctattcaccccaatcaaatggggtagccgaaagaaagaaccgcactctaactgagatggtgaatgccatgttagacactgcgggacttcccaaggaatggtggggtgaggcaattttgactgcctgtcatgtcttgaataaaattccaatgaagcataaggaaataacaccattcgagcaatgggaaaggaagaaattaaatctctcatacctacgtacatggggctgtttggccaaggaagcggtacgcagtgagatagactcaattatgtttaatggtacttgtgaagtcgttgagcgtccatatgggtgcaagcctgtaggatgcaaatgggttttcaagaaaaagcttaggcctgcaaatgggttttcaacaaaaagtttaggcctgatgatggacgttaagacagcattcctaaacggagagctggaggaggagatctatatggatcaaccagacgggtatgcactagaaggtcaggagggaatggtgtgtaaacagttgaaatccttgtatggccttaagcaagcacctaagcaatggcatgagaagtttgacaccacacttacatctgctggctttgttgtgaacgaagctgacaaatgtgtgtactatcgctatggtgggggagaatga

SEQ ID NO: 15346 - DNA, 738 bp, Oryza sativa
  Clone ID: TFbOSC15136j.C1.o2.hg
atgcgaactgaagaagaagtacgtaagatgactattaccagcaccgaatggcctccagctgggataactattcctagacgtcaaagaggaaatactttccgaggtgcacgacagttgacccagcacctcctaagccatgacggcagagtatctgatagtgaagggtcagatcaagtctcctcggattatgaagatgagtctctccgacatctcggcgaggaagagatggaatcaaaagcatgcccccgttgtggggaaattggacacattgctagcatgtgtctcacactctgcactcattgtgaagaagaccatccaccaggggagtgtctcacccgcaaggtcacatgttttctgtgcgaaggtacaaaccatgtgcccaaggattgccaactcagtgtgttgttgaccaagaccgtagaaatccaacgaacaaccctacgattgtctcatcagctagtcagctccaacagcaacatcgacgatatcatccacagcaccaatgctcctcctgctgcacctgactctgcagtaaatcatagcgataataccttcagcaccaaccattctctgcaccgacagcctcagcaaagaattgtcgtcgatggaagaagttgtgtctctccccgacctactccaggccaagcaaagggcaatcaacctcaggagggcgataccaagcagaaaaccgtcatccacttcaaacagcaatcagaaggaagcttctcctgtgaatga

SEQ ID NO: 15347 - DNA, 2184 bp, Oryza sativa
  Clone ID: TFbOSC25727j.C1.o1.fg
atgaaatgcttctgggtgagtactggcaagcctatggaagttcttaatgctgaccagcagaaagaattcgacgaggccactactctcttcgtgggatgcattcttagcgttcttggcgatcgtctggtcgaggtgtatatacatatgaccgacgctaaggagttgtgggatgcactgattgctaaattcggtgctactgatgctagcaataatctgtacatcatggagctgtttcatgactacaagatggctgataaccgttctgtagttgagcaggcccatgtaatacagaccatggctaagaaactcgagcaggcccatgaatactccgttgaggggttgatagcgtctcttgatgttgaggagaaaactcgggaaaaagactctgcgtctaagggcgatggtgggcaatccagcgccaatgttgtgcacaaggcccagaacaagagcaaggggaaatacaaagctcagcagaccaccaacttgaagaagaagaagaacaacaatcctaatcaggatgagaggacttgctttgtgtgtggcctacctggtcatctggccaggaagtgtccacaacgcaaggggatgaaggcacttgcagggcagacttctaagtctgctaatgtgaccattggcaacactagagacggaagcgggtatgataatttaccttctggtttttcagttaatcagtctactaattggtggattgatataggggccaatgtcgcacggggttccaccgtcctaatagggaatgggtcacatgcttctgttcatggtgttggcacggtagatctgaaatttacttcaggaaagatcgtgcagctaaagaacgtgcagcatatccctactatcgacaggaatcttgttagtggctcccgtctaactagagatggatttaagttggtttttgagtctaataaaatagtcctgtctaaacatggatattttattggtaaatgttatgagtgcggaggcctgttccgcttttccctttctgattttctgcaagttcctaatagaaataaggacaaaacaccatatgagatatggattgggagaaaaccatcactttcttatttgcgcacatgggggtgcttggcgaaagtcaatgtaccaataacgaagaagcgcaaacttggacctaagactgtggactgtgtctttttgggatatgctcatcacagcattgcctatagatttttaatagttaaatctgaggtacctgacatgcatgttggtacaattatggagtctcgtgatgctaccttctttgtgaactttttcctaatgaaggatacacatagtagttctagccaaccctctgaaataattcccagttcaatcacatcaccagaacaaactgaacatacacatgaacatgtcactgaggagaatgacagtgaaggtcctcgaaggagtaatagacaaaggacggctaagtcttttggtgatgatttcattgtgtacctcgtggatgacacttctaagtcaatttcaaaagcatatgcatctccagatgcagactactggaaggaggctgtccgtagcgaaatggattccattatcactaacgggacttgggaggtgatagagcgaccctatgggtgtaaacctgttgggtgcaagtgggtgttcaagaagaagcttaggcctgacggtactattgaaaagtacaaggctcggcttgttgctaagtgctatactcagaaagaagagctggatgaggagatatatatggatcagcccgatgagtttgtagttgatggtcaagaaggcaagaaacaagctcctaagcaatggcatgagaaatttgataaaacattgacatctgcaggctttgcaatcaatgagaagatcttgaatcgcattggttacattgacaagctgacggcactggatactgctactgttgaggcagaatgggtgcgtgatctattaatgcacctacctattgttgaaaaatcggtgccggctattcttatgaactgtgacaatcaaacgaaagctggcaaatcccttcacgaagggactatcacgaaatgtgatagacaatgcatcgaaggagatgggtttgagacccatagcattcttgaaagaacttacctttgtgagcttgactgttggtcgcagtctatgaagatgttgggtgaatcttctaggaagcttactaaagactaa

SEQ ID NO: 15348 - DNA, 736 bp, Oryza sativa
  Clone ID: TFbOSC26403j.C1.o1.fg
atggagctgtttcatgactacaagatggctgataaccgttctgtagttgagcaggcccatgtaatacagaccatggctaagaaactcgagcaggcccatgaatactccgttgaggggttgatagcgtctcttgatgttgaggagaaaactcgggaaaaagactctgcgtctaagggcgatggtgggcaatccagcgccaatgttgtgcacaaggcccagaacaagagcaaggggaaatacaaagctcagcagaccaccaacttgaagaagaagaagaacaacaatcctaatcaggatgagaggacttgctttgtgtgtggcctacctggtcatctggccaggaagtgtccacaacgcaaggggatgaaggcacttgcagggcagacttctaagtctgctaatgtgaccattggcaacactagagacggaagcgggtatgataatttaccttctggtttttcagttaatcagtctactaattggtggattgatataggggccaatgtcgcacggggttccaccgtcctaatagggaatgggtcacatgcttctgttcatggtgttggcacggtagatctgaaatttacttcaggaaagatcgtgcagctaaagaacgtgcagcatatccctactatcgacaggaatcttggtagtggctcccgtctaactagagatggatttaagttggtttttgagtctaataaaatagtcctgtctaaacatggatatttaattg

SEQ ID NO: 15349 - DNA, 1361 bp, Oryza sativa
  Clone ID: TFbOSC401381j.C1.o2.np
ccctcctagccacttgaagcatgtgaggtggagagaagagggggaacacacgggcgtacttgctcgcctcgctttgctgggcagggcaggcggcgcacgtgcacgacgtacattcgaatggtccgaaaaattggttccttacccttgcgcggatgtagatgaggctactactctctttatgggatacattcttagcgttcttggcgattgtctggtcgaggtgtatatgcatatgacgctaaggagttgtgggatgtgggatgcactgaatactaaattcggtgctactgatgctagcaatgatctgtacgttatggagcagtttcatgactacaggatggctgacaaccgttttgtagttgagcaggctcatgagatacagaccatggctaaagaactcgtggagcagtttcatgactacaggatggctgacaaccgttctgtagttaagcaggctcatgagacagaccatggctaaagaactcgtatactgcactcaaacacaacagacaggaatacaccgttgaggggttgatagcgtctcttgatgttgaggagaaagctcatgaaaaagacttcgcacctaagggcgatggtgggcagtccagtgccaatgttgtgcacaaggcccagaacaagagcaaggggaaatacaaagctcagcagaccaccaacttcaagaagcaaaagaagaacaacaacaatccgaaccaggatgagagaacttgctttgtgtgtggcttgcctggtcatttggccaggaagtgtccacaacgcaaggggatgaaagcacctgcagggtagacttctaaatctgctaatgtgaccattggtaacactagagaaggaacaacttatggtaatttacctactattttttcagttaatcagtctactaattggtggattgatacaggggccaatgtacatgtttgtgctgatatttcgttgttctcttcttatcaagtcgcacgggattccaccgtcctaatggggaatgggtcacatgcttctattcatggtgttggcacggtagatctgaagttacttcgggaaagatcgtacagctgaagaatgtgcaacatgtccctactatcaacaggaattttgttagtggctcccgtctgactagagacagatttaagttggttttcgagtctaataaagtagtcgttgtgaaatcatttcactatgggagaaaatttcttgctatgggagagtttctaaaattgattttgaaagtctttgttttatctgagatagtgtatatagttgctaaaatctctaaagagatgatgttttggcattgtaaacttggatatattgtttttatcatcatggatcggtcgtcatggatgtat

SEQ ID NO: 15350 - DNA, 1413 bp, Oryza sativa
  Clone ID: TFbOSC406456j.C1.o1.fg
atgtcgtggcagagggttggtgccctgctgcttggggctcagtcctgcctgcctgtcccgggggttccggccgtaggcaggattgggtcggtactcttgtttatggctaggatgggttgggaactatgtcacgtcttccgtccgtataccgtggtgatgtttaacagagaaaaaggaaagaatgtcagagggtatgcctccagtaactcaagttttcaactcaatccaccactggcctcaagagagttaaccagggcacacccttggtccattccaagcatgccgcttagttcacagctaccattggttggaagtcaagaccaaaatcagtatgtgtttgatcgagcatttgccacccaggtcaatgagcttccaatgccagaagaggatgtccccttttgtcacgattgtagagaacaaggacactatgccctgaattgtccatgggtatatgccaaagaagccccttcctttggtttaacagggcagacatcgctaaaccagcctcctcgcaccaagtcaagcttgcagcctagtgtgcaaagtagagagcccaatggagagaatccattgaatcccgggaattgctttcctcctagcccttcgtaccacgtggggtcacgtactaagcaagccaaaggcaagaagagtaagaatcagaagagaaaagcgccgatgcgaactgaagaagaagtacgtaagatggctattagcagcaccgaatggcctcccgcagggataactattcctagacgtcaaagaggaaataccttccgaggtgcacgacagttgacccagcaccttctaagccatggtggcagagtatctgatagtgaagggtcagatcaagtctcctcggatgatgaagatgagtctccccgacatctcggtgaggaagagatggaatcaaaagcatgtatccgttgtggagaaattggacacattgctagcatgtgtctcacactctgcgcttattgtgaagaagaccatccaccaggggagtgtcccacccgcaaggtcacatgctttctgtgcgaaggtacaaatcatgtgcccaaggattgccaactcagtgtgttgttgaccaagaccgcagaaatccaacgaacgaccctacgattgtctcgtcagctagtcagctccaacagcaacatcgacgatatcatccacaacaccaatgctcctcctgctccacctaactctgcaataaatcatagcaataatatctttagcaccaaccattctctgcaccgacagcctcagcaaagagttgtcgtcgatggaagaagttgtgtctctccccgacctactccaggccaagcaaagggcaatcaacctcaggagggcgataccaagcagaaaaccgtcatccgcttcaaccagcaatcagaaggaagcttctcctgcgaatga

SEQ ID NO: 15351 - DNA, 2584 bp, Oryza sativa
  Clone ID: TFbOSC18459j.C1.o2.np
gaatctgagttgcttgttcgtgcgccgccgccgccgccgattccgccgcatcccgccgtccccgcgcgcaataaagtggggggaatcattccccgtgattccctctccgttttcccccgcttttccctctctctctccctcggattcgttcggatttaatcccgcaagtttcaccggcgtcattgatggagccgagatctccgcggccgattcctccctctccggccgctctctccctctcccgacgctatataattgttccccgtgcctccctcctccgtttccgccactcgccgctcgctctccccgtcggattcgtgctcgcgccgtcctcctctctctccgccgtcgccgccgagctccggttcgccgccgccgtcgctccggacttcctcccgactcggcgtcacctccatcggcttcgccgcgtcgtcgtcgacctcgtccgctcctccgtttcgcccgccgaccgccggagcaccgtcgtcctcgccgtcccgaaccgcgccgccgctttcctccactccggtcgtcgtttccgccgtcctcgtcgtcccggggtgagccgtggaccgcccctttcgcttccctctcttctccgctctctcgggcgccgctccgccgcgccggtggtcgccggcggtgaccatcggggcgcgggtgcgccgcctcccgtcggccgtgccggcgaggccgccttcgggcgcgccccgcggctgccaagtggggcccggccgtcagccgcccgcgctcgcgggatgtttaacagagaaaaaggaaagaatgtcagcgggtatgcctcaagtaactcaagttttcaactcaatccaccactggcctcaagagagttaaccagggcacacccttggtccattccaagcatgctgcttagttcacagctaccattagttggaagtcaagaccaaaatcagtatgtgtttgatcgagcgtttgccacccaggtcaatgagcttccaatgccagaagaggatgtccccttttgtcacgattgtagagagcaaggacactatgccctgaattgtccatgggtatatgtcaaagaagccccttcctttggtttagcagggcagacatcgctaaaccagcctcctcgcaccaagtcaagtttgcagcctagtgtgcaaagtgaagagcccaatggagacaatccattgaatcctagaaaatgctttcctcctagcctttcgcaccacgtggggtcacgtactaagcaagccaaaggcaggaagagtaagaatcagaagagaaaggcaccgatgcgaactgaagaagaagtacgtaagatgactattaccagcacagaatggcctccaccaggaatgacaaaacgtcagagaagaaataccttccgaggtgcgccacagttgacagagcaacttttagctaatggaggtagagtgtctgatagtgaagattcagatcaagtctcctcagatgatgaagatgagaagtctccccaaggtttcaaccagaataaaatggaacataaggcatgctctcgttgtagagaaatcggtcatgttgccagctcgtgtgccactacatgcgttcattgtgaggaagaccatccacccgacaggtgtccaacgagcaggatcacttgtttcttttgtgaaggaactgatcatgtaccaaaagattgtcaattcagttttctgctgacgaagaagatggccaaccaacccgccagttccaacggagagaagcatcaaggcaacacaaatcctcgccaagattacagtttcagcctgactccagtgccaggacagaggaatcaaaatgagaaaagaaaatgccgagtccgggaagatatctgttgcttcaattgtcaaggaatgggtcatttcgccgacaagtgcccaaaaccgagaaacatagctgccggcacgtcagtccacgtaactccctgcactcagaagcttgctcctcagcgaattgtcatccatgcatcccgaagcagtcctatagcccgcgttgcaacagctccaactccagcgagagcattaccacaaggtgtcaatgctcaatttcagccccagccatcagttgacaagacagaggccagtatcggcattgtacctttggatgttccagcacagcagccaaggaatcaagtacaagatgaagaacctgagcaagaccatccaccaggggagtgtctcacccgcaggtgacatgttttctgtgtgaaggaacaaaccatgtgcccaaggattgccaacttagtgtgttgttgaccaagaccgcagaaatccaacgaacaactctacgattgtctcatcagctagtcagctccaacaacaacatcgatgatatcatccaccgcaccaatgctcctcttgctccacctaactttgcaataaatcatggcaataataccttcagcaccaaccactctctgcatcgacagcctcagcaaagaattgtcgtagatggaagaagttgtgtctctccccgacctactccaggccaagcaaagggcaatcaacctcaggagggcgataccaagcagaaaaccgtcatccgcttcaaacagcaatcagaaggaagcttctcctgtgaa

SEQ ID NO: 15352 - DNA, 1290 bp, Oryza sativa
  Clone ID: TFbOSC400691j.C1.o14.fg
atgtcgtggcagagggttggtgccctgctgctaggggctcagtcctgcctgcctgtcccgggggttccggccgtaggtgggattgggtcggtactcttgtctatggctaggatgggttgggaactatgtcacgtcttccgtccgtataccgtggtgatgtttaacagagaaaaaggaaagaatgtcagagggtatgcctccagtaactcaagttttcaactcaatccaccactggtctcaagagagttaaccagggcacacccttggtccattccaagcatgccgcttagttcacagctaccattggttggaagtcaagaccaaaatcagtatgtgtttgatcgagcatttgccacccaggtcaatgagcttccaatgccagaagaggatgtccccttttgtcacgattgtagagaacaaggacactatgccctgaattgtccatgggtatatgccaaagaagccccttcctttggtttaacagtgcagacatcgctaaaccagcctcctcgcaccaagtcaagcttgcagcctagtgtgcaaagtagagagcccaatggagagaatccgttgaatcccgggaattgctttcctcctagcctttcgtaccacgtggggtcacgtactaagcacgccaaaggcaagaagagtaagaatcagaagagaaaagcgccgatgcgaactgaagaagaagtacgtaagatgactattaccagcaccgaatggcctccagcagggataactattcctagacgtcaaagaggaaataccttccgaggtgcacgacagttgacccagcacctcctaagccatggtggcagagtatctgatagtgaagggtcagatcaagtctcctcggattatgaagatgagtctctccgacgtctcggcgaggaagagatggaatcaaaagcatgcccccgttgtggagaaattggacacattgctagcaggtgtctcacactttgccctcattgtgaagaagaccatccgccaggtgaatgtcccacccgcaaggtcacatgttttctgtgcgaaggtacaaaccatgtgcccaaggattgccaactcagtgtgttgttgaccaagaccgcagaaatccaacgaacaaccctacgattgtctcgtcagctagtcagctccaacagcaacatcgacgatataatccacagcaccaatgctcctcttgctgcacctgattctgcagtaaatcatagcgataataccttcagcaccaaccattctctgcaccgacagcctcagcaaagaatctctccagaatcagaatga

SEQ ID NO: 15353 - DNA, 1293 bp, Oryza sativa
  Clone ID: TFbOSC412750j.C1.o3.fg
atggatgaagtcgggcgtcgatggacattctccagggcaaatgaaggctacacgagctgcggcccggaatggtggccctgggttggcttggaacaagctggaaccccaggtcgggttcccagttcggtccaaatcatggtaggccttgggttaaggcagatgtttaacagagaaaaaggaaagaatgtcagagggtatgcctccagtaactcaagttttcaactcaatccaccactggtctcaagagagttaaccagggcacacccttggtccattccaagcatgccgcttagttcacagctaccattggttggaagtcaagaccaaaatcagtatgtgtttgatcgagcatttgccacccaggtcaatgagcttccaatgccagaagaggatgtccccttttgtcacgattgtagagaacaaggacactatgccctgaattgtccatgggtatatgccaaagaagccccttcctttggtttaacagtgcagacatcgctaaaccagcctcctcgcaccaagtcaagcttgcagcctagtgtgcaaagtagagagcccaatggagagaatccgttgaatcccgggaattgctttcctcctagcctttcgtaccacgtggggtcacgtactaagcacgccaaaggcaagaagagtaagaatcagaagagaaaagcgccgatgcgaactgaagaagaagtacgtaagatgactattaccagcaccgaatggcctccagcagggataactattcctagacgtcaaagaggaaataccttccgaggtgcacgacagttgacccagcacctcctaagccatggtggcagagtatctgatagtgaagggtcagatcaagtctcctcggattatgaagatgagtctctccgacgtctcggcgaggaagagatggaatcaaaagcatgcccccgttgtggagaaattggacacattgctagcaggtgtctcacactttgccctcattgtgaagaagaccatccgccaggtgaatgtcccacccgcaaggtcacatgttttctgtgcgaaggtacaaaccatgtgcccaaggattgccaactcagtgtgttgttgaccaagaccgcagaaatccaacgaacaaccctacgattgtctcgtcagctagtcagctccaacagcaacatcgacgatataatccacagcaccaatgctcctcttgctgcacctgattctgcagtaaatcatagcgataataccttcagcaccaaccattctctgcaccgacagcctcagcaaagaatctctccagaatcagaatga

SEQ ID NO: 15354 - DNA, 2637 bp, Oryza sativa
  Clone ID: TFbOSC401056j.C1.o5.fg
atgtcgacaaccggtgacaacaacaacactggagacaaggacaaggcaatactgcctcaaactccagcggagggccattctcgggttggctttgctgcatccctaaaaccacatgctttcgatggttcaaattataaaagatggaaagcacgtgcacttttgtggttgacggcggtgcattgtttctttgtctcacggggcaaaccaagtgaactgcctctctcacctgaggaggaggctaagttcgaggctgcggattgcttgttccgtggagcattgatcagtgtgctcgccgacaatattgtggacgtgtatatgcacatgccttcaaggaaggacatgtgggatgcttttgaggccaagttcggggtttccgatgccagcagcgagctgtatgtcatggagcagttctatgactacaagatggtcgatggtcgttctgtagtggaacaggctcatgagattcagatgttggcaaaggaacttgagaacaacaactgtgagttgcctgacaagtttgtggcaggtggcattattgccaaattgccaccttcttggacggactttgctacttctctaaaacacaagaggcaagagttcagtgttactgatcttattggctctttgggtgttgaggagaaggcgagggcaaaggacaaccggggcaaaaagatcgagggaggttctagcgccaatttggtgcagaagaagaaccctcacgcatcccacaacaacaacaagaaagtcaaacctgacgtcaaacccaaggctacaaccaattttaagaagaaaggcaagggaaaggcaaaaggaggttgctttgtgtatggcaagtctgggcattgggccaaggattgtcctgagtgcaaggacaagaagtctacaaacatggttattagtgagggcggaggaacatcgaggtatggtaaatttttacctacagttctctctgtctgtcactcacctgattggtgggttgatactggtgctaatattcatgtcgggagaggttcctccttgttgatgggaaacggatcgcttgcggctgttcatggtgttggttatgacagcggaggcttgttccgcttttccttggatgatatgtgtaataaagttgtgaaccatgatgaagcattacattacttcaagatctataaggctgaggtagaaaaccaactggaaaggaaaatcaaacggttgagaattcctactaagcataaggaagtaacaccattcgaggaatgggaaaagaagaaattaaatctctctcacctgcgcacatggggctgtttggccaagagatgccacttttttgagaatgaatttcctatgaaaaatgcacctagtacttctagtcaagaacctattttatcccctgagcactttatgccgatagaacatattgatcaaacgcttgaggaaaatcctaaggaggataacattgtagcaactcgaaagagtaagagacaaaggactgcaaagtcttttggagatgactacattgtatatcttatggatgatactccaagaaccattgaagaggcatattcatctcctgatgctgactattggaaggaagcggtacgcagtgagatggactcaattatgtctaatggtacttgggaagtcgtcgagcgtccatatgggtgcaagcctgtaggatgcaaatgggttttcaagaaaaagcttaggcctgatggtacaattgaaaagtacaaggcaaggcttgtggccaagggttatacccaaaaagaaggcgaggactttttcgacacttattcaccggttgctcgcttgaccacgattcgagtactactcgctctggcagcctctcatggtctactcgtccatcagatggatgttaagacagctttcctcaatgaagagttggaggaggagatctatatggatcaactagatgggtatgtactagaaggtcagaagggaatggtgtgcaagctgttgaagtccttgtatggtctcaaacaagcgcctaagcaatggcatgagaagtttgataataaacttacatctgctggctttgttgtgaacgaagctgacaaatgtgtgtactatcgctatggtgggggagagggagtgatcttgtgtttatatgtcgatgacatattgatctttgggaccaggctcaatgtgattgaggaggtcaaggactttctgtccaaaagcattgaaatgaaggatttgggagtgggtggtgttattcttaacattaaactactgagaggagatgagggtgggattacacttgtgcaatctcactatgtggacaaggtcttgagtcgctttggttatagtgactgcaaagctgctcctactccttatgatcccagtgtgctattaaggaaaaaccgaagaatagcaagggatcaattgagatactctcagatcattggttcattgatgtacttagctagtgcaacgaggcctgacatctcatttgctgtgagcaagttgagccgtgttttttcaaatccgggagatgatcattggcatgctcttgaaagagtaatacgctatctaaaagggacaatgagctatgaaattcactacgccggtacccaaaagtgctggagggctatagtgattcaaattggatatctgatgctgatgagataa

SEQ ID NO: 15355 - DNA, 2065 bp, Oryza sativa
  Clone ID: TFbOSC497j.C1.o1.np
atggcattgcagccatttaccgacgacctcctcgccgagatccttctccgcctcccgtcggcggcctccctccaacgcgccgcgctagcctccaagtgctggctcgccgtcgcctccggccccgacttcctccggcgattccgcgcccgccacacctagtcgcctctcctcggcctgttcgtctcccacgggagctccggcctccccgtgttccaccccgccgcgaccgtccgctccgaccccgacctcggcgccgcggtactcgggggcgacttctcgctcatccgcgtcggggacggcgaggatccccgctggcaactccgggactgccgcaacggccgcctgctcctctgcggaggtagatccgtcgccgtctacgacccggtgtcccgccggcgcgtctccatccgccgcccacaggacgaccccttctcggacgcctacattgccgactgcttgctgcacgggcgcggcgacaacggcgcggcgtcgttccgcgtggtgtccgtgcagcgccatggccggaggatgcgcgccgcggagtacaactccggtactcgagagtggagcttccacccgtgggtggaaaacatgaggcggcctcgccggggccaggcgatgcatgcggcggggattatcttctggaaatgcgaggacaattttgtgatattgcttgacacgctcacgatggaattctccatgctcagtctccctgtaagcttgttccagccttccaagtacgccataggggagatggaggatggcgtgtgctgccttgtatgccttgatggcaccatggacaacgtccacatgcaagtgtggctgctcatggaggaggacggtggtggcaggaggtgggaattggagaaggaaatgccggttagtgaagtgcttgacaggcattccctggtgcgacaagtccgaacagtggctagtggattggttcttgtttcctgggatgaccgctatcctcaatttgccattgacctgaagaatatgaaggtcatggctgagtttaggtgcagcggcgagacttatcttttccaaacgccatggccacccgctttgttggtcgatagcgaggttcaaccagcggatttggctattcctttacaatctgcagaatatgtggagccgcttcagatgatcgctactcagaacatgatgaaacatgttaatcttgctgcagagagaactgatgttgtgaattcagagggcccattggatttggtattggaaccacatggcccactggacgcacaacaagctatggctgctgaagcggagaccttggtggtaacagcagacctgaaattagtcaggtctactgaagcacaaaaccagtcagtagctgaaaaacctgagatcatgaaggggcctgaagtcccagtttcgaaaaggagcatgtcacgtttggaaaaaagaagaggggaaagatatgagagtgctctccacaaggcaatggagaggaaagctcgttacatgggtggtgtggaacagcttagtacttctcttggaagaaactacagaagatcagagaagccaattgttgtggactctagttacgagagatactaccagtgtcgtcaacgtcgagagaagccaattgttgtggactctcgttacggtaaatactaccagcgtcgtcaacgacgaccagccgcaggagttcagggaagcatcaccggactcaacaaagaatccccacgaggtttgtcattgaatctgaggaactttaacaacagccctgtcaatcgaaattgcgcagaagcccggcagtgtgaggcggccggcaagtcggcagcggggctgtcgctgacggcatggcgttcaagcacgatgttctacgcaagtagcatggctatggccgctgccgtcatggagcttgacatcgaggcacccatggcgtctaagagcatggtgcaagaggcgggaggacggaggcaccagcgcgtggagttgggtggtctcctcgagttcgaactcgtcctcatgtccccgttgtcaccgagctggcccaccgccggagctacgatagtgctgttgcatgccattgtcagcgagt

SEQ ID NO: 15356 - DNA, 1671 bp, Oryza sativa
  Clone ID: TFbOSC17441j.C1.o2.gm
atggaggagaaaccgtcaacttcatgtctgttcggaagtcaagtcaagtcaagcctcaagcttcatgcaaggagcgagaagatcagttcaaagtcgtcgttccgcgaagatcaagagtcacgtcaatgtcacccaccgcaggtgccagatcagatgccagcccggaacccgaatcagagtcagagtcaggagttcccaatatcggcaccgaagacccctgtcaaaatgctgtccagatccccgaagataacgacagccaagtcatcgtcagaccaaaggaaagtaagtgctacctgttatgactgtggtgagcaaggtcattatgtaaggaactgtccatggaaggtgttcgccaggtcacctgaaaaagacgagaagcagtgcccagggagtaaccaagctccaagtcagtctaccgacaagaaggatggtactttgcagcccaactctggagcgaacaggaaggtgacatggaagatggataatggcaggaccatgatcatcacaagttcagaatttactcctgaagacgcagcaaggatacccaagcgtcagagaggaagaaataccttccgtggagcacgccagctaacccgacatctcataaagtacggttcgcccagacccgaagatgatgaatcaggagagcagttttctgctgatgacgatgatgatgatactgatgacgatgatgatacgacccttaacagtttcatggaaagaggattggagttcaaagcatatcatgtgcctaaggactgtcagttaaacgcggtcatagctaagaccaagaaagaacaagggacaaccgtgcaacccattcgtcaaccaatgacaatcgacaacagcggtcacaatccttctgctcttcctccaactctagttccagtggaagccaaccatggaagaagcaacgtcaccaaggatgttcataagtctctgcttgttcccgtttcagctgccaaagtgcataatcagaagcctgcaccccgagaccaagcaagtcgattctgtcacaactgtcgtaagccaggacatcgtttcagtgattgtcctcttccaagagcagcaaaggcagttcgtcgtgattcacaagttaccagcactgcccatgacaccaatcgacacctgaatgtgcaacctccgccccaacggattatcgtcaagggcaccgtcaaaggtcacattgttccaccagcaatcgtttcaagcctacagcaccaacgccagcagcgtaagcaatgccaggagaacaacagctcgctacagctacaaagaggcggtacgccccttcgtcagcacccgcggcaagtgttgtcagcaccaggtcgcccaactgttgtcagttctagcaatgcacctcgtattgctccaatctggaggcccatcgacaaatcaccgttcggtaaccccacgggcaagaagatcctacccgttacagctgacaagacagttgcccctccaccatcgaagatcaacaagcagagcaacgttcccggtcatacctacccccactccgccagagacagaggcgacgtgggggcacggccgcccgttcaatcggacgtgaccggcaacaggccggtcacagattggtcacctccgattgacaggggtcagctaggcgcaccgcatgcctgcccttatcgcgttaaatgcagtgagggatag

SEQ ID NO: 15357 - DNA, 5355 bp, Oryza sativa
  Clone ID: TFbOSC400545j.C1.o64.np
atcttggaaacagatgagagaagaactaggaatagagttatccgtttttgcaaggttcaatggagtaatcactcagagggagaatcaacttgggaacgagaagatgaattaaagtcagctcatccccatttgttcgccagttcttccgaatctatttcgacgtttccggagagtccgttttcgcaggagaagaatttgaagagttccaagtccagcaaggcaactcctggtttggaatggttaattcctggtttggagatagaactgtgcagccggggttggttgttcagaatagttgggcctatgcaacaggatgccgcgctacaagcctgagtacttgtttggtactgagggatttgtccaggagttgcgtacgatgtcctttgccataggctttgggactgcccctttgtatgcccagattcctcatgatcatgatgaagagaagtgccgtgtcaaagtcaccttgaacagtaatcgtgaagatatcccatcggtgatgttcgaggctggagggggaaactatattcatgcatgtcaggaggtggcaaggatcgccataggagagctccgtgatcgctacagtgatcagttggccaacactgagtatcgctaccatcctctccaaccccagggaagtgaccgtggcagctaccttgaacctgaggggattgagaatgatgccaccacaaggcatttggttgagatgctgtgggctatggatgagacccgcgcggagattgtgttagcagctcaagatcgtgaagaccggaatcgtggtaagatttgcaaactagaggacaaggtggatcgtttggaaaaggaactagccgcgttgaagggagaagcaccaccacaaaaggccagggttcgtcttaccgcaatgaagagagctctatttgtccctcgctaccagttggcgccaaagatggtgctcactcgcagcaacgggaaaggccccaacatcaacaacaacaacaacaacaatggagagaatcccacgcttgcccaagtcctggctcaacaggcacagcttatgaacatgatgatgcagcaactccagaaccagcagaaccagggaaacaaccatgcacctccccagaacaagttagcagaatttcttcgtgtgaggccgcctactttttctagcactactaatccagttgaggctggtgattggctgcacgccatagagaagaagttggacttgcttcagtgcactgatcaggagaaggtctcatttgcatcacaccaactgcatggccctgcctctgagtggtgggatcacttccgccttaacaggactactgctgaacctatctcttggcttgaattcaccgctgctttccggaagacgcatataccatcgggagtggtgtctctcaagaagaaggaattcaggtcgctcacccagggatcccgcacggtcaccgagtatctgcacgagttcaatcgtctggctcgttatgctccggaagatgtgcacactgatgaagagcgtcaggagaagttcttggaaggacttaatgatgagctttcttacccactcatgactggggattatcatgatttccagaagttagtggataaggctattcgtcaggaggacaagtacaaccgcatggagcagaagaaacgccggattgctcacttcaaggcacaacaggggaatagtcagaggccgcgtcttactttgggaccccagtccatgccacagggaggttcttcatctgttgttcgtccgcagcgtcagttcttcaacaacaacgcgggcaacaacatccgcaaccaagctccacgccctattgcagctctgacacagcaacagcctgccaagaaggagcaaggtagcaagcccggggtgtgcttcaactgtggtgaaccaggccattactctgacaagtgtccaaaaccccgatgcgtgaaggttgtccctgtccagagcaactctaccgcaccagcatcaaaggctcgtgtcaatcatgttgctgctgcagaagctcaaggtgctccagatgtgattttgggtacgttccctgttaactcatttcctgcaatagtgctttttgattctggtgctacacattcatttttatctatgagttttgcggggaatcatgggatggaagtagaagatcttagacgtcctttgatggttagtaccccgagtaatcaagcactctcattgcaacgtagcccctctgtcagaatagagattcaaggagtaccatttctggccaatcttattctgttagaatccaaagaccttgatgtcatcctagggatggactggttagccagatataaaggtgtgatagactgtgccaacagaaaagtaactctcaccagcaatgatggtcgagttgtaactgttcatgcattgtcttctgagcctttaaggtcaagtctgaaccaaatagctttggaagagattcccatagtacaggaatacccggatgtgttcccggacgatttacctggtatgccgcctaaaagagatattgaattcagaatagatctggtaccaggaacaactttgatccataagagaccttatagaatggcagccaatgaattagcagaagtcaagagacaagtagatgatttgcttcagaaaggatacatcagaccaagttcgtctccatggggagctccagttatttttgtggaaaagaaagatcatacccagaggatgtgtgtggactatcgtgcactaaatgatgtgactatcaagaataagtatctgctgcccagaattgatgatttgtttgatcagcttaaaggtgccaccattttctccaagatagatctccgatcagggtatcaccagttgaggatcaaagaggaagatatacctaagacggcttttaccactaggtatgggttgtttgaatgtactgttatgtcttttggacttaccaatgccgccgctttcttcatgaacttgatgaataaggtgtttatggaatacctagataagttcgtggtggtctttattgatgacattcttatctactcccgaaccaaagaagagcatgaagaacatcttcgccttgcactagagaagctacgagaacatcaactgtaggccaagtttagcaagtgtgaattttgattgtctgcagtgaagttccttggtcacgtcatctcagccggaggagttgccgttgatcctagtaatgtggaatccataaccaactggaaacaaccaaagacagtttcagagattcgcagtttcctgggtcttgcgggttattaccggaggtttatagagaatttctccaagattgctaagcccatgacatgactgcttcagaaagatgtgaagtacaagtggtcagaagaatgtgagcagagttttcaagagttgaaaagtcgcttaatatcagcacccattttgattttgcctgatccaaagaagggtttccaagtgtattgcgatgcatctaagcttgggttaggttgtgttctgatgcaagatgggaaggtggttgcctatgcatctcgtcagttacgtccgcatgagaagaactaccctactcatgatcttgagttagctgcagtggttcatgcgctgaagatttggcgtcattatcttttcggtactcgtacagaggtgtacaccaatcacaagagtttaaagtatatctttactcagccagatctgaacatgagacaacggagatggttggaattcattaaggattatgacatgggaattcattatcacccgggaaagactaatgttgtagcagatgctcttagcaggaaaggctattgcaatgctacggaaggacgacagttgccattggagttatgcaaggaatttaaaagattaaatttgggaattgtcagtagaggtcttgttgcagccttagaagcgaagcccactctcatcgatcaggttagagaagcccaaattaatgatcctgatattcaagaaattaagaagaatatgagacgaggaaaagctatcgggtatttggaagatgagcaaggaactgtatggttgggcgagagaatctgcgtcccaaacaacaaagatttaaaagatgcaattctgaaagaagctcatgatactttatactccattcaccctggtagtaccaagatgtaccaagatctcaaggaaagatttttgtgggcaagtatgaagcgtgagatagcggaatatctagctgtgtgtgatgtttgtcagcgggtcaaggtagaacatcagaaatccgccggtttgttgcagcctttgaagataccagaatggaagtgggaggaaatcggtatggatttcatcactggtctacccagaacgtcatcaggccacgactctatttgggtgatagtcgacagacttaccaaagtggctcatttcatcccagtaaagacaacatattccggaagtcggttggcggaattgtatatggcaaggattgtgtgtttgcatggcgttcctaagaaaatagtgtctgatcgaggtagtcagtttacttcaaagttttggaagaagcttcaggaagagatgggttctaagctgaacttcagtactgcttatcatccgcagacagatggacaaaccgaaagggtaaattagattttggaagacatgttgagagcttgtgctttagacttcggtggaagttggaataagaatctgccttacgcggaattctcgtacaacaacagttatcaagctagtcttcaaatggctccttacgaagcactgtatggtcggaagtgccgcactccgcttttgtgggatcaaacgggagaacgtcgggttttcgggactgatatcctaagagaagcagaagagaaggtaaagatcattcaagaaagattgcgtgtggctcagtctcgtcaaaagagttatgccgacaatcgtcgcagagatttgagttttgaagaaggagatcatgtgtaccttcgtgtcacgcctctttgaggagttcatcgttttcgcaccaaaggaaaattggcaccgcgtttcgtgggaccttataaggttgtcagtcgaagaggtgaggttgcttatcagttggagttacctcaatcgttggcaggtgtccataatgtgttccatgtgtcacagttgaaaaagtgtttaagggtacccactgaggaagctaatcttgaacagatagaaatccaagaggatctggcatatgttgagaaaccaatccgtatcttggaatggaaacagatgagagaagaactaggaatagagttatccgtttttgcaaggttcaatggagtaatcactcagaggaagaatcaacttgggaacgagaagatgaattaaagtcagctcatccgcatttgttcgccagttcttccgaatctcgaggacgagattctgtt

SEQ ID NO: 15358 - DNA, 4779 bp, Oryza sativa
  Clone ID: TFbOSC401340j.C1.o25.fg
atggggaagttgaaggaatctgaagaattattggaaagatgccttgaagtcagaaaaaggattttgtctgaggaacattttcagatcacttaccaggtatttgagtttttcaccacaagctctgctttattggcaattaacacagactgggaggtagctgttactttggtacacttggcaaggctaaccatgctaaactttattagtgacaaggaggacagtgacctagcaagatccaaacttgtcagggcaaggctacttgtcaatgattcaatcagcagccccccggaggtgcgccatgtccgacgctcggtctcggcgttcggtcgcctcgagcactcggcgtcagcaggacgccgagctcgccgcagcagaagagcgcaggcgagcaacggctcagaccgctgcagcagcagcgagggcggccagactggcggcagcggagttggcagcagccagggcggaggcggaggcggaggcggaggcggcggaagatgcggcacgtgcggcggagggagcttgaggagctggcaagagaaagggcacgggagcgggcagagcggtgggcagcagcccacctccacggcggcggcggcggcccaagggaccgcgcgcccgccgacgggaacccagacgggcgcgggcgtgccggcggcagcccggagcccgcacgcggccatcgcaggcagcgcggctctctcccctgatcggcgccatggtcaccacgtcgtccagacggtggtcagggactttggtcccgtcggtgggtggcctaccctcaccaaaaccaactacatcgagtgggccgtggtgatgagggtgaggctacaggtgcggcacatgtgggaggcagtccggtacggcgacgtcgactacgacgaggatcggcgggcactggatgccctcatcgctacagtcccgcccgagatgcagttctcgctttcccagaagcggactgccaaggaggcctgggacgccatcgctgcggcacgcatcggcagggaccgcgcccgcaagtccacactgcaggcactccgcaaggagtgggagaacctggccttcaagccaggtgaggatgttgatgactttgctctccgtctcaacactctcttgcagaaaatggtgcagtacggcgacgacacttacgacgaggagagagctgtcgagaagctcttccgctacgtccctgagaagtacaggcagatcgctcgctcgatcgaatctctgctggacctctccacgatgtcgatcgaggaggcgttaggtcgcctcaaggtcgtcgatggtgatgagccacaacctctcttggggcccatcaccatcggcgggaagctccatctcactcgggagcagtgggaggcctctcagggtaacgggaggaagggggagtcatcttccccgacaggcggccgtaagccgcgcaaggcgcggggaggtgtccagctacggtgggcgcgaagacatgccgagggtggcgcccgcagaggcgcccagggcgttgccaccggcaaccacaagccggcacgagacgacgcctgccgcagctgtggcaagcttggccattgggccaaagactgtcgacagccacgacgcggccaggtccacgtcgcacgggtggaggaagagccggctctgctcctagctcatgcaaacattgagctacctccagcggcaccggccgcagcggctttcctccaccttgatgagccgaaggtactcgtctccctctgcaacggctccagcaacgacaaggctgatgggtggtacctcgacaccggctccacccatcacatgaccgaccgacgggagttcttcaccgagttcgactccagcgtccgaggctccgtcaagttcggggacgcctccggcgtcgagatcaagggtgttggctccgtcaccttcactgccaagtccggtgagcacaggctgctcaccggtgtctactacatccccgcgttgaggaattctatcatcagcgtggaacagctggatgagaacggctcacgcgtgttggtcgaggacggactcatgaggatttgggatcgctgtcgtcgccttcttgccaaggtaaccagaggcactaatcgactctacatcctcagcgcgcaagtcgcacaaccagtttgcctcgccgctcgtcgggacgacgaggcgtggcagtggcacgagcgcttcgggcacctccacttcgaggccctgaagcagctcagtgccaaggagatggtccgaggcatgccgtgccttgaccgcgtggagcagctctgcgacgtctgcgtggtgacgaagcagcggcggctcccctttccccagcagacgagctttcgagccaaggagcagctcgagctcgtgcacggggacttgtgtggcccagtgacaccggccacaccaggaggacgacgttacttcctgctgctcgtcgacgacctctcccgctacatgtgggtgatggtcctcggcagcaagggagaggctgcagacgccatcaggcatgcgcaggctgctgcagaggcggagtgcggccgcaagctgcgcgtgctgtgcaccgacaacggcggcgaattcacagcggctgaattcgcgtcgtactgcgctgatgagggcattcagcgccactataccacgccgtacagcccgcagcagaacggcgtcgtcgagcggcgcaaccagatggttgtggggatggctcgggccctcctcaagcagagggggatgccggccatcttctggggggaggcggtggtgacggccgcctacatcctcaaccgctcgcctaccaaggccctcgatggcaggacaccgtacgaggcttggcatgggcgcaagccggcggtctcccacctgcgggtcttcggctgcctcgcgttcgccaaggagcttggccacatcggcaagctcgacgacaggagcaccccaggggtgttcatcggctacgcggagggctcgaaggcttaccgcatcctcgacccggagacagcgtgtgcgcactgcgcgcgacgttgtgttcgacgaaggccgagggtgggtatgggacaaggcggtggacgatggttggacttcaccgtcgagtacgtccacttcgagggagctgggggactaggcagctcttcttcaccgagcgtgtctacccaagcccccgaatctccaccgactccgacaccaacacaccctcgggccacgacttcgactacgacgagctcttcgtcgacaccacctcagccagtgactccacatgctccagcaccaacagccactccaagcacgtctactccgacgccagctcgtgttgagcgcagcccggtggagttcgctactccgctctcccacgacggggagcgcatcgacgcgtaccacgacggcgagcagctacggtaccgtacgatggaggatcttctcggcgaccagccggtgccgggactggtgcctcgcgacctagaggcgcagttgcaccttgcgtgcgacgacggtgagcctcggtcttttgcagaggccgagaaacacgcggcatggcgtgccgcgatgcagtcggagatggacgcggttcaggagaaccgcacctgggagcttgctgacctccctcgtggtcaccgcgcgatcacccttaagtgggtgttcaagctgaagagggatgaagccggagccatcgtcaagcacaaggctcgcttggtggcacgcggtttcgtgcagcaggaggggatcgactacgacgatgcctgcgctcccgtggcatggatggagtccgtgcgactccttcttgcgctggttgctcatgaaggctggggcgtccatcacatggacgtcaagtcggtgtttctgaatgtcgacttgaaggaggaggtctacgtgcaccagccgccgggatttgtgattcccggcaaggagggcaaggtgctacgcttgcacaaggccctctacggcttgcggcaggcaccgagggcgtggaatgccaagttggattccacgctcaaggggatgggctacgagcaaagcctgcacgaggcggccatctaccggcggggcaatggaggaaatgccttgctggtgggtgtctacatcaacgacttggtgatcatcggcaccaaggatgcggaggttgcggcgttcaaggaggagatgaaggccaccttccaaatgagtgatctggggcctctctccttctacctggggatcgaagtgcaccaggacgactccgggatcacgcttcgacagaccgcctacgccaagcgcgtcgttgagctggctgggctcaccgattgcaacccagctctcactccgatggaggagagactgaagctgagccgcgacagcacggcggaggaggtggatgctacacagtaccggcgtcttgtggggagccttcgctacctcacccacacacggccggacttggccttctccgtcggctacgtggtggccctgtccagctgcgaggccgagtacatggcggcctccgccacttcgacccaggcgctctggcttgctcgactgcttagtgatctcctcggcagagacactggaacggtggagctcagggtggatagcaagtccgctctggccctggcaaagaaccccgtttttcacgaacggagcaagcacatccgggtgaggtaccacttcatccgaagctacttggaggaagggagcatcaaggcgagctacatcaacaccaaggaccagcttgcggacttgctcaccaagcctcttgggaggatcaagttcctcgagctctgctctaggatcgggatggcccaacttccccacaagacgacgcacaagacttag

SEQ ID NO: 15359 - DNA, 4872 bp, Oryza sativa
  Clone ID: TFbOSC418119j.C1.o2.fg
atgtgcagccgggatgattgttcagaatggttgggcctaagcaacaggatgccgcgctacaagcctgagtacttgtttggtgttgagcgatttgtccaggagttgcgtacgatgtcctttgccataggatttgggactgcccctttgtatgcccagattcctcatgatcgtgatgaagagaagtgccgagtcaaagtcaccttgaacagtaatagtgaagatatcccatcagtgatgttcgaagttggaggaggaaactacattcatgcatgtcaggaggtggcaaggatcgccataggagagctccgcgatcgctacagtgatcagttggccgacactgagtatcgctaccatcctcgccaaccccagggaggtgaccgtggcagctaccttgagactgaggggattgagaatgatgctaccacaaggcatttggttgagatactgtgggctatggatgagacccgcgcggaggttgtgctagcagctcaagatcgtgaagaccggaatcgtgataagatttgcaagctagaggacaatgtggattctatcagatgtaagtgggcccggcctgggggaggcgggacgttacatggatcgtttgggcccggcctgggggaggcgggacgttacatggatcgtttggagaaggaactagccgcattgaagggagaagcaccaccacaaaaggccagggttcgtcttaccgcaaggaagagagctctattcgtccctcgctaccaattggcgccaaaggttcgtgtggtggaaaaagaagctaccccaaccctagcggatcctccggtcgtcaacgtaagtgatgatgaaggagaagaatcgaagcgcacccactcaaaggtcgaatggggagctactcaagatgatggagacgagccgaacgagccttcaatcaactccgatgccggatctggtgattggctgcacgccatagagaagaagttggatttgcttcagtgcactgatcaggagaaggtctcatttgcatcacaccaactgcatggccccgcctctgagtggtgggatcacttctgccttaataggactactgctgaacctatcacttggcttgaattcaccgctgctttccggaagacgcatataccatcgggagtggtgtctctcaagaagaaggaattcaagtcgctcacccagggatctcgcacggtcaccgagtatctgcacgagttcaatcgtctggctcgttatgctccggaagatgtgcgcactgatgaagagcgccaggagaggttcttggaaggacttaatgatgagctttcttacccactcatgactggggattatcatgatttccagaagttagtggataaggctatttgccaggaggacaagtataaccgcatgaagcagaagaaacgccggattgctcacttcaaggcacaacaggggaatagtcagaagccgcgtcttcctttaggaccccagtccatgccacagggaggttctttgtctgttgttcgtccgcagcgtcagttcttcaacaacaatgctggcaacaacatccgcaatcaagctccactccctgttgcagctccaacacagcaacagcctgccaagaaggagcaaggcagcaagcctggagtgtgcttcaactgtggtgaaccaggccattactctgacaagtgtccgaagccccgacgcgtgaaggttgtccctgcccagagcaactctaccgcaccagcatcaaaggctcgtgtcaatcatgttgctgctgcaaaagctcaaggtgctccagatgtgattttgggtacgttccttgttaactcagttcctgcaacagtgcttttcgattttggtgctacacattcatttttatctatgagttttgcgggaaatcatgggatggaagtagaagatcttagatgtcctttgatggttagtaccccaagtaatcaagcactctctttgcaacgtagcccctcggtcagaatagaaattcaaggagtaccatttctggccaatcttattctgttagaatccaaagaccttgatgtcatcctagggatggactggttagccagatataaaggtgtgatagactgtgccaacagaaaagtaactctcaccagcaatgatggtcgagttgtaactgttcatgcattgtcttctgagtttttaaggtcaagtctgaaccaaatagctttggaagagattcccatagtacaggaatacccggacgtgttcccggacgatttacctgccaatgaattagcagaagtcaagaggcaagtagatgatttgcttcagaaaggatacattagaccaagttcgtctccatggggagctccagttatttttgtggaaaagaaagatcatacccagaggatgtgtgtggactatcgtgcactaaatgatgtgactatcaagaataagtacccgctgcccagaattgatgatttgtttgatcagcttaaaggtgccaccgttttctccaagatagatctccgatcagggtatcaccagttgagaatcaaagaggaagatatacataagacggcttttaccactagatatgggttgtttgaatgtactgttatgtcttttggacttaccaatgcccccgctttcttcatgaacttgatgaataaggtgtttatggaatacctagacaagttcgtggtggtctttattgatgacattctcatttattctcgaaccaaagaagagcatgaagaacatcttcgtcttgcactagagaagctgcgagaacatcaactgtatgccaagtttagcaagtgtgaattttggttgtctgaagtgaagttccttggtcacgtcatcttagccggaggagttgccgttgatcctagtaatgtggaatccgtaaccaactggaaacaaccaaagacagtttcagagattcgcagtttcctgggtcttgcaggttattaccggaggtttatagagaatttctccaagattgctaagcccatgacacggctgcttcagaaagatgtgaagtacaagtggtcagaagaatgtgagcagagttttcaagagttgaaaagtcgcttaatatcagcacccattttgattttgcctgatccaaagaagggtttccaagtgtattgcgatgcatctaagcttgggttaggttgtgttctgatgcaagatgggaaggtggttgcctatacatctcgtcagttacgtccgcatgagaagaactaccctactcatgatcttgagttagctgcagtggttcatgcgttgaagatttggcgtcattatcttttcggtactcgtacagaggtgtacaccgatcacaagagtttaaagtatatctttactcagccagatctgaacatgagacaacggagatggttggaattaattaaggattatgacatgggaattcattatcacccgggaaaggctaatgttgtagcagacgctcttagcaggaaaggctattgcaatgctacggaaggacgacagttgccattggagttatgcaaggaatttgaaatattaaatttgggaattgtcagtagaggtttcgttgcagccttagaagcaaagcccactctaatcgatcaggttagagaagcccaaattaatgatcctgatattcaagaaatcaagaagaatatgagaagaggaaaagctatcgggtatttggaagatgagcaaggaactgtatggttgggcgagagaatctgcgtcccagacaacaaagatttaaaagatgcaattctgaaagaagctcatgatactttatactccattcaccctggtagtaccaagatgtaccaagatctcaaggaaagattttggtgggcaagtatgaagcgtgagatagcggaatatgtagctgtgtgtgatgtttgtcagcgggtcaaggcagaacatcagaaacccgccggtttgttgcagcctttaaagataccagagtggaagtgggaggaaatcggtatggatttcatcactggtctacccagtacgtcatcaggccacgactctatttgggtgatagtcgacagacttaccaaagtggctcatttcatcccagtaaagacaacatattccggaagtcggttggcggaattgtatatggcaaggattgtgtatttgcatggcgttcctaagaaaatagtgtctgatcgagatgaacaaaccgaaagggtaaatcagattttggaagacatgttgagagcttgtgctttagacttcggtggaagttgggataagaatctatcttatgcggaattctcgtacaacaacagttatcaagctagtcttcagatggctccttacgaagcactgtatggtcggaagtgccgcactctgcttttgtgggatcaaacgggagaacgtcaggttttcgggactgatatcttaagggaagcagaagaaaaggtaaaaatcattcaagaaagattgcgtgtggctcagtctcgtcataagagttatgccgacaatcgccgcagagatttgagttttgaagaaggagatcatgtgtaccttcgtgtcacgcctcttcgaggggttcatcgttttcacaccaaaggaaaattggcaccgtgttttgtgggaccttataagattatcaatagaagaggagaggttgcttatcagttggagttacctcaatctctggcaggagtccataatgtgtttcacgtgtcacaattgaaaaagtgtttaagggtacctaccgaagaagctaatcttgaacagatagaagttcaagaggatctgacatatgttgagaagccaatccgtatcttggaaacaaacgagagaagaaccaggaatagagttatccgttttgcaaagtccaatggagtaatcactcggaagaagaatcaacttgggaacgagaagatgaattaa

SEQ ID NO: 15360 - DNA, 4527 bp, Oryza sativa
  Clone ID: TFbOSC8370j.C1.o11.fg
atgatgccgcgctgcaagcctgagtacttgtttggtgttgagggatttgtcaaggagttgcgtacgatgtcctttgccataggatttgggactgcccctttgtatgcccagattcctcgtgatcgtgatgaagagaagtgccgagtcaaagtcaccttgaacagtaatagtgaagatatactatccgtgatgttcgaagctggaggaggaaactacattcatgcatgtcaggaggtggcaaggatcgccataggagagctccgcgatcgctacagtgatcagttggccgacactgagtatcgctaccatcctcgccaaccccagggaagtgaccgtggcagctaccttgagactgaggggattgagaatgatgctaccacaaggcatctggtcgagatgctgtgggctatggataagacccgcgcggagattgtgttagcagctcaagatcgtgaagaccggaatcgtggaaagatttgcaaactagaagacaaggtggatcgtttggagaaggaactagccgcattgaagggagaagcaccaccgcagaaggccagggttcgtcttaccgccaggaagagagctttattcgtccctcgctaccaattggcgccaaaggttcgtgtggtagaaaaagaagctaccccaaccctagcggatcctccgatcgtcaacaacaagttagcagaatttcttcgtgcgaggccgcccactttctctagcaccactaatcctgttgaagctggtgattggctgcatgccatagagaagaagttggatttgcttcagtgcactgatcaggagaagaagacgcatataccatcgggagtggtgtctctcaagaagaaggaattcaggtcgctcacccagggatctcgcacggtcaccgagtatctgcacgagttcaatcgtctggctcgttatgctccggaagatgtgcgcactgatgaagagcgccaggagaggttcttggaaggacttaatgatgagctttcttacccactcatgactggggattatcatgattttcagaagttagtggataaggctattcgccaggaggacaagtacaaccgcatggagcagaagaaatgccggattgctcacttcaaggcacaacaggggaatagtcagaggccgcgtcttactttaggaccacagtccatgccacggggaggttcttcgtctgttgttcgtccgcagcgtcagttcttcaacaacaatgctggcaacaacatccgcaatcaagctccacaccctgttgcagctccaacacagcaacagcctgccaagagggagcaaggcatcaagcccggggtgtgcttcaactgtggtgaaccaggccattactctgacaagtgtccgaagcctcgacgcgtgaaggttgtccctgcccagagcaactctaccgcaccagcatcaaaggctcgtgtcaatcatgttgctgctgcagaagctcaaggtgctccagatgtgattttgggtacgttccttgttaactcagttcctgcaacagtgcttttcgattctggtgctacacattcatttttatctatgagttttgcgggaaatcatgggatggaagtagaagatcttagacgtcctttgatggttagtaccccgagtaatcaagcactctctttgcaacgtagcccctctgtcagaatagaaattcaaggagtaccatttctggccaatcttatcctgttagaatccaaagaccttgatgtcatcctagggatggactggttagccagatataaaggtgtgatagactgtgccaacagaaaagtaactctcaccaacaatgatggtcgagttgtaactgttcatgcattgtcttcggagtctttaaggtcaagtctgaaccaaatagctttggaagagattcgcatagtacaggaatacccggacgtgttcccggacgatttacctggtatgccgcctaaaagagatattgaattcagaatagatctggtaccaggaacaactccgatccataagagaccctatagaatggcagtcaatgaattagcagaagtcaagaggcaagtagatgatttgcttcagaaaggatacatcagaccaagttcgtctctatggggagctccagttatttttgtggaaaagaaagatcatacccagaggatgtgtgtggactatcgtgcactaaatgatgtgactatcaagaataagtacccgctgcccagaattgatgatttgtttgatcagcttaaaggtgccaccgttttctccaagatagatcttcgatcagggtatcaccagttgagaatcaaagaagaagatatacctaagacggcttttaccactaggtatggattgttcgaatgtactgttatgtcttttggacttaccaatgcccccactttcttcatgaacttgatgaataaggtgtttatggaatacctagacaagttcgtggtggtctttattgatgacattcttatctactctcgaacaaaagaagagcatgaagaacatcttcgtcttgcactagagaagctacgagaacatcaattgtatgtcaagtttagcaagtgtgaattttggttgtctgaagtgaagttccttggtcacgtcatctcagccggaggagttactgttgatcctagtaacgtggaatccgtaaccaactggaaacaaccaaagacagtttcagagattcacagtttcctaggtctcgcaggatattatcggaggtttatagagaatttttccaagattgctaagcccataacacgattacttcaaaaggatgtaaagtacaagtggtcagaagaatgtgagcagagttttcaagagttgaagaatcgcttaatatcagctcctattttgattttacctgatccaaagaagggtttccaagtgtattgcgatgcatccaaacttgggttaggttgtgttctgatgcaagatggcaaggtgattgcctatgcatctcgtcagttacgtccacatgagaagaactaccctactcatgatcttgagttagctgcagtggttcatgcattgaagatttggcgtcattatcttttcggtactcgtacagaggattatgacatgggaattcattatcacctgggaaaggttaatgttgtagcagatgcccttagcaggaaaggctattgcaatgctacggaaggacgacagttgccattggagttatgcaaggaatttgaaagattaaatttgggaattgtcagtagagatttcgttgcagccttacaagcaaagcccactctaattgatcaaattagagaagctcaaattaacgacccggatattcaagaaattaagaagaatatgagaagaggaaaagctatcggtttcttggaagatgagcaaggaactcgagtcaaggcagaacatcagaaacccaccgggttgttgcagcctttgaggataccagaatggaagtgggaggaaatcggtatggatttcatcactggtctacccagaacggcatcaggccatgactctatttgggtgatagtcgacagacttaccaaagtagctcatttcatcctagtaaagacaacatattccggaagtcggttggcggaattgtatatggcaaggattgtgtgtttgcatggcgtccctaagaaaatagtgtctgatcgaggtagtcagtttacttcaaagttttggaagaagcttcaggaagagatgggttctaagctgaactttagtactgcttatcatccgcagacagacggacaaaccgaaagggtaaatcagattttggaagacatgttgagagcttgtgctttagacttcggtggaagttgggataagaatttgccttacgccgaattctcgtacaacaacagttatcaagctagtctccaaatggctccttatgaagcactgtatggtcggaagtgccgcactccgcttttgtgggatcaaatgggagaacgtcaggttttcgggacggatatcctgagggaagcagaagaaaaggtgaaaatcattcaagaaagattgcgtgtggcccagtctcgtcataagagttatgccgacaatcgtcgtagagatataagttttgaagaaggagatcatgtgtaccttcgtgtcacgcctcttcgaggagttcatcgtttccacaccaaaggaaaattggcaccgcgtttcgtgggaccttacaagattgtcagtagaagaggagaggtcgcttgtcagttggagttacctcaatctttggcaggagtccataatgtgttctatgtatcgcaattgaaaaagtgtttaagggtacctaccgaagaagctaatcttgaacagatagaagtccaagaggatctgacctatgttgagaaaccaatccgtatcttggaaatagatgagagaagaaccagaaatcgagttatccgtttttgcaaagtccaatggagtaatcactcggaagaagaatcaacttgggaacgagaagatgaattaaagtcagctcatccgcatctgttcgccagttcttccgaatctcgaggacgagattctgtttaa

SEQ ID NO: 15361 - DNA, 2463 bp, Oryza sativa
  Clone ID: TFbOSC8370j.C1.o11.np
atgtcgtcctccgccagtccgtccgtggcgccatcggccgaatacgtagagcacttgtccaatctggtcgtgatccttgtcacatgagcaccactattttcttggtccgatcggcaatcttgatcccactgagttcatcatcgccaaaaccaataggatcccttttagattggccaatccaaatctaggccactgaaagaataccctcaaatcttggccttctcttgagaaaacttctcctgagaaaagttgtgctgtgtggtataagcgcgtatcggctagcaagcaggtccattgggatgaaccaggaatcggccaagcgcttgctcttactttggcaaattcggctaaggatgaacccctgatggcctctgccgcttatttttggtccaataccctcaatgcttttctgttaaaccaagggccgatgaccccaactctgatcgacatcactatgattaccggattagatgtaatttcatcggctaaccccatgagcttgaacaacaagaaccagtttgactttaggaccaaaagcatagggggctggtctggctatgtagcaacatacatgggcaagggatctgtcacccctcgagaacacactacctttctcatgatgtggctcgagaagtttctcttttatggatcgagctatggtccgactaccaactggcaattcttagccgaagcccttgaaactaagaggcaacttcctttgggcaaaatcctcctcgactatctgtatcagatgttgagtaatgcatcggccaagatagccaccggttcagtagtgggtgcgggttgtgaattggccacccctgacagaagctgaattcccgaggctggaacccactacagtttctatgaaggcttccagagagatgcttgagtttggttcccttatgaggactcagtgaattttgatcacccggcagacttcaggtttgaggatatcaactctgaaaagtataaaaaatccacagaagtcttctcggctgccattagtccatgcattcttcctattggcatccaccaagggagaaatatacacgtgtcctatgagttctatcatccgatgagctcagctaggcaatttggaatgggacagatgccaattagcttattctttgccgataaaatccaatgcagaggggagatctcatccacactaatgatggatcggctgctcaatatcccaggaccctctctgggtagcattgataacatagagttggcaaggtttaggagcagaaactttgacagatggtggggtgaatggaagcaacatatattccattagccggcctctacgtacatgacagttctgtttcctgatgttgtccctcagacaacataatctccccctcctcgcaagagtaacagtggaagggacatagaatatgctctaggacttttaccaaatggaggcaggaagagaaagaccaaggcaccggcagttgatccatcagctctggttcacaaaaagaaagccaagaagcataaacccaagctagccgacgacttgcctgccttagatccatccatcgagcaagctctggatgaagaagaaattgaggaagacgtcgatcaagcggcagccgaactgagcgatgaaggagaaaaaacaccattagcttcacccaagcaaactcctccaactcctgctgccccgactcacttctcaaggaaaaagaagactgctgtgaggaagaaatcgacagcaacaacacttaaaccagctccaccacaaatgtcaattgaccgtaccccatcggctacaggaagtcatcatgttgaagaagaggaacaaccagccgctcctgccatcctaaccttagccgatctattctcctttgacatcaaagattactttgataaagaagtagaagaagaatccacaagcaaggctctagcccctctggatgaaaatgtcaagaaaacactcgaagatatatcccttcggctagagtcatcattagacaacttggtggccgactgcggttccatccgggcacggtttgctgaaatccaagccttaatcccggatgatctggcaaataccattactccagctgtgtcactcgagcaacatcaattcaagctggagaaggctaagcaacggattgccgatcagcaggtgcgaaaagatattgaagccactatccaagccaatcggcaactttcgaacatagatcggcttgaagcccacaagattgatcttatagctcaacttgaagaatgcaatgccgaattagatcatgaaaagcaaaagctagccaatcttccaagtgctgttgaagaacagagtctagattgagatcggctatcaaaaatgtggctgacatgaccaagtccctcaaagtcatctctggaaccgacgcccaagacatccaagccatcgaagaagtagatcaaattagacaacgggctgtgttggctatccagcgttacttgtctgga

SEQ ID NO: 15362 - DNA, 4191 bp, Oryza sativa
  Clone ID: TFbOSC900207j.C1.o2.fg
atggtgcactgctttgaattgtgttatgcggagggtattgtcacaatctctattcggtggtacacctctggccagagtaaaactattcgaatagccgtgcccgcgtatttattgaatgccatttatacaaatgagactatattatgccatcctttgttatcccctgcacttgcatatttgctgcatggcttgttgagtatgtcatatactctccttgcaatcattcatcagaggaggagttctaaagtgatgctgaagatgccgcgcttcaagcctgagtacttgttcggtattgagggatttgtccaagagctgcgtgcgatgtcctttaccataggattcgggactgcccctttgtatgcccagattccacatgatcgtgatgaagagaagtgccgtgtcaaggtcaccttgaacagtgatcgtgaagatatcccatcggtgatgttcaaggctggagggggaagctatccacatgcttgtcaggaggtggcaaggatcgccataggagagctccgcggccgttacaatgatctgttggccgacactgagtatcgctaccatcctcgtcagccacagggaagtgaccgtgcgagctatgttgatcctgaaggaattgagaatgatgctaccacaagacatttggtcgagatgctgtgggccatggatgagtcccgcgttgaaatcgtgtcagctgctcaagctcgtgaagaccggaaccgtggtaagatctgcaagctagagggcaaggttgatcgtctggagaaggaattggccgaattgaagggagaagcgccaccacagaaggccagggttcgtcttaccgctaggaagagagctctttttgttccccgctaccagttggcgcccaaggttcatgtggtgtcaagagaagctgtcccagtggatcctcctgtcgttaatttaagcgatgatgaggaagaagattcaaagcgcacccattcaaagaaccaacagaaccaggggaacaatcatgctcctcctcagaacaagtttgcagaatttcttcgcgtgaggccacctactttttctagcactaccaatctggttgaggccggtgattggctgcacaccatagaaaagaagttggacctgcttcagtgcactgaccaagaaaaagtctcctttgcttcacatcagcttcatggccctgcctttgagtggtgggatcatttccgtctcaacagggctactgctgaaccaatcacttggcttgagttcactgctgctttcaggaagactcatgtaccatcgagagtggtgtctctcaagaagaaggagttcagggcgctcactcagggatcccgttctgtcaccgagtacatgcatgaattcaatcgtctggcccgttatgctccgaaggatgtgcgtacaaatgaagagcatcaagagaagttcttggaagggttgaatgatgagctttcttacccgctgatgactggagattattctgatttccaggagttgcgtcagttctacaacaacaataacaaccgcaaccaagctccacgtcctgttgcaactccagtccagcaccagcctgtcaagagggagcaagaaaacaagccaggggtgtgcttcaactgtggtgaaccaggtcattattctgacaagtgtccgaagcctcgacgtgtgaagaccattcctgtgcagaataactccaatgcaccaacgtcaaaggctcatgtcaatcatgttgctgttgcagaagcccaaggtgctacagatgtgattttggagattcaaggtgttccatttccggccaaccttattctgttagaatccaaagaccttgatgtcatcctagggacggactggttagacagatataaacgtgtgattgactatgccaatagaaaagtaactctcaccagcaatgatggtcaagttgtaactgttcatgcattgccttctgaacctttaaggtcaagtctgaaccaaataactttggaagagattcccatagtacgggactacccggatgtgttcccggatgacttacctgcaaaggtcaagagacaagtagatgatttgcttcagaaaggatacattcgaccaagttcatctccatggggagctccagtcatttttgtggagaaaaaagatcatacccagaggatgtgtgtggattatcgtgcactaaatgatgtgaccatcaagaacaagtaccctctgcctagaattgatgatttgtttgatcaacttaaaggtgccaccgttttctccaagattgatcttcgatcagggtatcaccagttgaggattaaagacgaagatatacctaagacgtcttttaccactcggtatgggttatttgaatgtactgtcatgtctttcggacttactaatgcccctgctttcttcatgaacctgatgaataaggtgtttatggagtacctggacaagttcatggtggtctttattgatgacattcttatttactcccaaaccaaagaagagcatgaagaacatcttcgccttgcactagagaagctacgagaacatcaactgtatgtcaagtttagcaaatgcgaattttggttgtctgcagtaaagtttcttgggcacgtcatctcagccggaggagttgccgtcgaccctagctattaccggaggttcatagagaatttttccaagattgcaaagcccatgacacgcctgcttcagaaagacgtgaagtacaagtggtcagaagaatgtgagcagagttttcaagagctgaagagtcgcttaatatcagcgcccattctgattttgccagatccaaagaagggtttccaagtgtattgcgatgcatctaagcttgggttaggttgtgttctaatgcaagatgggaatgtggttgcctatgcatctcatcagttacgtccccatgagaagaattatcctacccatgatcttgagttagccgcagtgattcatgcattgaagatttggcgtcactatctctttggtactcgtacggaggtgtacacagatcacaagagtttgaagtatatcttcatccagccagatctgaacatgagacagcggagatggttggaattaattaaggattatgacatgggaattcattatcaccctggaaaggctaatgatgtagcagatgttctcagtaggaaaggctattgcaatgctacggaaggacgacagttgccgtgggagttatgcaaggaatttgaaaggctgaatttgggaattgtcagtagaggttttgttgtagctttagaagcgaagcccactctcatcgatcaggttagagaagctcaaatcaatgatcttaatatccaagagattaagaagaatatgagaagaggaaaggctatcggttatttggaagatgagcaaggaactgtatggttgggtgagagaatttgtgtcccagacaacaaggagttgaaagatacaatcttgaaggaagcccatgacactttatactccattcaccctggtagtaccaagatgtaccaagatctcaaggagaaattttggtgggcaagtatgaagcatgagatagcagagtatgtagctgtgtgtgatgtatgtcaacgagtcaaggcagaacatcagaaacccgcaggagaacgtcaggtttttgggactgatattctgagggaagcagaagagaaagtaaagatcattcaagaaagattgcgtatagcccagtctcgtcataagagctatgctgacaatcgccgcagggatttaagttttgaggaaggagatcatctgtaccttcgtgtcatgcctcttcggggagctcatcgttttcgcaccaaagggaaattggcaccgtgttttgtgggaccatataagattatcagtagaagaggtgaggtcgcctatcagttggagttacctcaatccttggcaggtgttcataatgtgttccatgtgtcacagctaaaaaagtgtttgagggtacccactgaagaagctaatcctgagcagatagaaattcaggaggatctgacttatgttgagaaaccaatccgtatcttggagacagatgagaaaagaaccaggaatcgagttatccgtttctgtaaggtccaatggagtaatcactcagaagaagaagctacctgggaacgagaagatgaattaaagtcagctcatccgcatcttttcgtcatctcttccgaatctcgaggacaagattctgtttaa

SEQ ID NO: 15363 - DNA, 4515 bp, Oryza sativa
  Clone ID: TFbOSC900380j.C1.o12.fg
atgccgcgctacaagcctgagtacttgtttggtactgagggatttgtccaggagttgcgtacgatgtccttcgccataggatttgggactgctcctttgtatgcccagattcctcatgatcgtgatgaagagaagtgctgtatcaaagtcaccttgaacagtaatcgtgaagatatcccatcggtgatgttcgaggctggagggggaagctacattcatgcttgtcaggaggtggcaaggatcaccataggagagctccgagaaagctacaatgatcagttggccgacactgagtatcgctaccatcctcgtcaaccccagggaaacgaccgtggtagctatcttgaacctgcagggattgagaatgatgctaccaccagacatttggttgagatgctgtgggccatggatgagacccgcgttgagattgtgttagcagctcaagatcgcgaagaccggaatcgtggtaagatttgcaagctggaggacaaggtggatcgtttggagaaggaactagccgcgttgaagggagaagcaccaccacaaaaggccagggttcgtcttaccgcaaggaagggagctctttttgtccctcgctaccagttggcgcctaaggttcgtgtggtggaaaaagaagctgccccagccccagcggatcctccggttgtcaactgcactgatcaagagaaagtctcctttgcttcacatcaccttcatggccctgcctctgagtggtgggatcacttccgtttcaacaggactactgctgaaccaatcacttggcttgagttcaccgctgctttccggaaaacgcacataccctcaggagttgtgtctctcaagaaggagttcagggtgctcactcagggatctcgctttgtcactaaatacttggatgagttcaatcgtctgcctcgctatactccggaagatgtgtgcaccgatgaagagcgccaagagaaattcttggaaggactgaatgatgagctttcttacccactaatgactggggattatcatgatttccagaagttggtggataaggctattcgccaggaggacaagtacaaccgtatggagaagaagaaacaccggattgctcacttcaaagctcagcaggggaatagtcagaggccgcgtcttgctatgggacctcaggcagtgtcacaaggagggtcttcgtctgttgttcgtccgcagcgtcagttattcaacaacaatgctagcaacaacaatcgcagccaagctccacgtcctgttgcaactccaactcagcatcagcctgccaagagggagcaagggaacaagccaggagtgtgctttaattgtggtgaaccaggacattactctgacaagtgtccgaagccccgccgcgtgaagattgtccctgcccagaacaactcctccgcaccagcgtcaaaggctcatgtcaatcatgtggctgctgcagaagctcaaagtgctccagatgtgattttgggtacgttccctgttaactcagttcctgcaacagtgcttttcgattctggtgctacacattcctttttatctatgagttttgcgggaaatcatgggatggaggtagaagatcttagacgtcctttgatggttagtaccccgagtaaccaagcactctcatcgcaacgtagcccctccgtcagaatagagattcagggtgtaccatttctggccaaccttattctgttagaatccaaagaccttgatgtcatcctagggatggactggttagccaaatataatggtgtgatagactgtaccaatagaaaagtaactctcaccagcaatgacggtcaagttgtaactgttcattcattgccttacgggcctttaaggtcaagtctgaaccaaataactttggaagagattcccatagtacgggagtacccagatgtgttcctggatgatttacctggtatgccgcccaagagagatatagaattcagaatagatctggtaccaggaacaactccaatccataagagaccttatagaatggcagccaacgaattagcagaggtcaagaggcaagtagatgatttgcttcagaaaggatacatcagaccaagctcgtctccatggggagctccggtcatttttgtggaaaagaaagatcatacccagaggatgtgtgtggactatcgtgcactaaatgatgtgactatcaagaataagtaccctctgcctagaattgatgacttgtttgatcagcttaaagatgccaccgttttctccaagatcgatcttcgatcaaggtatcaccagttgaggatcaaagaggaagatatacctaagacggcttttaccactcggtatgggttgtttgaatgtactgttatgtctgttggacttaccaatgcccccgctttcttcatgaacttgatgaataaggtgtttatggaatacctagacaagttcgtggtagtctttattgatgacattcttatctactcccgaaccaaagaagagcatgaagaacatcttcgccttgcattggagaagctacgagagcatcaattgtatgccaagtttagcaaatgtgaattttggttgtccgaagtaaagtttcttggtcacgtcatctcagccggaggagttgccattgatcctagtaatgtggaatccgtaaccaactggaaacaaccaaagacagtctcagagattcgtagtttcctgggtcttgcaggctattaccggaggtttatagagaatttctccaagattcctaagcccatgacacgactgcttcagaaagacgtaaagtacaagtggtcagaagaatgtgagcagagttttcaagagctgaaaagtcgcttaatatcagcacccattttgattttgcctgatcctaagaagggtttccaagtgtactgcgacgcatctaagcttgggttaggttgtgttctgatgcaagatgggaaggtggtttcctatgcatcttgtcagttacgtccgcatgagaactaccctactcatgatcttgagttagctgcagtggttcatgcgttgaagatttggcgtcattatcttttcggtactcgtacagaggtgtacacggatcacaagagtttgaagtatatctttacccagccgaatctgaacatgagacaacggagatggttggaattgattaaggattatgacatgggaattcataatcaccacggaaaggctaatgttgtagcagatgctctcagcaggaaaggctattgcaatgctacggaaggacaacagttgccatgggaattatgcaaggaatttgaaagactgaatttgggaattgtcagtagaggttttgttgcaactttagaagcgaagcccactctcattgaccaggttagagaagctcaaatcaatgatcctgatattcaagagatcaagaagaatatgagaagaggaaaggctatcgggtatttggaagatgagcaaggaaccgtatggttgggtgagagaatctgtgtcccagagaacaaggagttgaaagatgcaattctgaaggaagctcacgacactttatactccatttaccctggtagtaccaagatgtaccaagatctcaaggaaaaattttggtgggcaagtatgaagtatgaacgagtcaaggcagaacatcagaaacccgcaggtttgttgcagcctttgaagataccagaatggaagtgggaggaaatcggtatggatttcatcactggtctacccagaacgtcatcgggccatgactctatttgggtgatagtcgacagacttaccaaagtggctcatttcatcccggtgaggacaacatatttcggaagccgtttggcagaattgtatatggcaaggattgtgtgtttgcatggcgttcctaagaaaatagtatccgatcgaggtagccagtttacttcaaagttttggaagaagcttcaggaagagatgggttccaagttgaacttcagtaccgcttatcatccgcagatagacggacaaaccgaaagggtaaatcagattttggaagacatgttaagagcttgtgctttagacttcggtggaagttgggataagaatctgccttacgcggaattctcgtacaacaacagttatcaagctagtcttcaaatggctccttatgaagcgttgtatggtcggaagtgccgcactccgcttttgtgggatcaaacgggagaacgtcaagttttcgggactgatattctgagggaagcagaagagaaggtaaagatcattcaagaaagattgcgtatagctcagtctcgtcataagagttatgccgacaatcgccgcagtgatttaagttttgaggaaggagatcatgtgtaccttcgtgtcacgcctctccgaggggttcatcgtttccacaccaaaggaaaattggcaccacgtttcgtgggaccttataagattgtcagtcaaagaggtgaggttgcttatcagttggagttacctcaatccttggcaggtgttcataatgtgatccatgtgtcaaagttgaaaaagtgttaa

SEQ ID NO: 15364 - DNA, 3249 bp, Oryza sativa
  Clone ID: TFbOSC401728j.C1.o15.fg
atgtctggagttgccgccgctgctggaggagatggcggaggtggtgcgccgccaacaggagccggagctagtgcgccaggaggaggtgccgtgaacgacaacaacaacggaggcaattctgcctcaccatccagcggagggccattctcgggcgctattcctgttccattattagcgctatcgctatactatgtgcgctatgttcttgttcctgttcttcatgatgcctctatgcgttactgttatgttcctgttcctgacattcatgatgcgcatagtatgctactggttatgttaagatcgccctacactgcttatgccatgattattgctttaacattttggattaaaatatgccgattaatgactatatttccaacaatccaaaaacttgataggtcattttcggtagttggctttgctgctgcactgaaaccacatgcttttgatggttcaaactataaaagatggaaagcacgtgcactattgtggttgacagcgatgcagtgcttctatgtttcacggggcaaacgaagtgaaccacctctttctcctgaggaagaggctaagttcgaggcttcagattgcctgttccgtggaacattgatcagtgtactcgctgacaacatagtggacgtatacatgcacatgccttctgggaaggacatgtgggatgctcttgaggccaagttcggagtttctgacgccgacagtgagctatatgtcatggagcagttctatgactacaagatggtcgatgaccgttctgtagtagaacaagctcatgagattcagatgctggttaaggaacttgagaacaacaactgtgagttgccggacaagtttgtggcgggtggcattattgccaaactaccaccttcttggtcggactttgccacttctctaaagcacaagagacaagagttcagtgtttctgatctcattggctctttgggtgttgaggagaaggcgagggcaaaggacgtccggggcaaaaaggttgagggaggttctagtgccaatatggtacagaagaagaaccctcatgcatcccacgataacaagaaagttaagcctgatgtcaaatccaaggctacaaccaattttaagaagaaagacaagggaaaggcaaaggtagactgctttgtgtgtgacaagtctgggcattgggccaaggactgtcctgagcgcaaagacagaaagtctgccaacatggtcattagcgagggcggaggaacatcggggtacggtaaaatattatctacagttctctctgtttttcattcacctgattggtgggtggacactggtgctaatattcatgtcgggagaggttcctccttgttgatgggaaacgggtcgcttgcggctgttcatggtgttggttccaagtgccatacttgcgttcaatcgaaacaacctcgcaagcctcacaaggcatctgaggcgaggaatttggcacctctagaacttgttcattccgatttgtgcgaaatgaacggcgtgttgactaaagggggaaagaaatatttcatgacactgatagataattgcactagattttgctatgtgtatctattgaaaacaaaggatgaggcattgtattactttaaaatctataaagctgaggaagtaacaccattcgaggaatgggaaaggaagaaattaaatctctcatacctacaaacatggggctgtttggccaaggtaaatgtacctatagccaaaaagtggaaatttggaccaaatactgttgattgtgtgttccttggttatgctatccacagtgtggtttatagattcttaatagtaaactctggagtacctgacatgcatgttggtacaattcttgagtccagaggtgctacattctttgagaatgaatttcctatgaaacatacacctagcacttctagtaaagaaactgtcatgccccatgagcacttggcaccgatagaacacaatgatcaaacgcctaaggaaaatcctgaggaggacaacattgtagatactcgcaagagtaagagacaaagggttgcaaaatcctttggagatgactacattgtatacctcgtggatgacaccccaagaaccatagaagagacatattcatctcctgacgctgactactggaaggaagcagtacgcagtgaaatggactcgattatgtctaatggtacttgggaagtcgttgagcgtccatatgggtgcaagcccgtaggatgcaaatgggttttcaagaaaaagcttaggcctgatggtacaatcgaaaagtacaaggcaaggcttgtggccaagtgttatacccaaaaggaaggcgaggacttcttcgacacatactcaccagttgctcgcttgaccacgattcgagtactacttgctctggcagcctctcttggtcttctcgtccatcagatggacgttaagacagctttcctaaacggagagctagaggaggagatctatatggatcaaccagacgggtatgtactagaaggtcaggagggaatggtgtgtaaactattgaaatccttgtatggcctcaagcaagcacctaagcaatggcatgagaagtttgacaccacgcttacatctgcaggctttgttgtgaacgaagctgacaaatgtgtatactatcgctatggtgggggagaaggggtgatcttatgcttatatgtcgatgacatattgatctttgggaccagccttaatgtgattgaggaggtcaaagactatctgtccaagagttttgaaatgaaggatttgggagaggctgatgttattcttaacatcaaactacaaagaggagatgagggtgggattacacttgtgcaatcccactatgtggacaaggttttgagtcgctttggatatagtgactgcaagccagctcctactccttatgatcccagcgtgctattaaggaaaaaccgaagaatagcaagggatcaactgagatactctcaaatcattggttcattgatgtacttggctagcgcaacgaggcctaacatctcatttgctgtaagcaagctgagccggtttgtctcaaatccgggagatgatcattggcaggctctagaaagagtaatgcgctatctaaagggcactatgagctatggaattcactataccgggtatccaaaagtactagaagggtatagtgactcaaactggatatctgatgctgatgagataaaagccacaagtggatatgtgttcacacttggaggtggcgctgtttcctag

SEQ ID NO: 15365 - DNA, 1917 bp, Oryza sativa
  Clone ID: TFbOSC401847j.C1.o19.fg
atgtcgacaaccggcgacaacaacaacactagagacaaggaggagcctcccgtcaacaccaacggaggcaatactgtctcaaactccagcggagggccattttcggggtataacgtttcactcttaccgttcgttcttcgtttcctacaactgtcggtcgcaatattattgcgttctcttgtctatgttgatgcttattctatattaagcacactcaagttgtatacatctagcactgtcactagatctactcatattgcaaatgtcatgtttattgtcttaatattttggattaaaatatgtcgaattatgaccaaatttccaacaatccaaaaacttgatagtgtgcacgccgacagtattgtggacgtttatatgcacatgccttcagggaaggacatgtgggattctcttgaggccaagttcggggtttccgacgccgacagcgagctgtatgtcatggagcagttctatgactacaacatggtcgatgaccgttctgtagtggaacatgctcatgaaattcagatgctggcaaaggaacttgagaacaacaactgcgagttgccggacaagtttgtggcgggtggcattattgccaaattgccaccttcttggtcagactttggtacttctctaaaacacaagaggcaagagttcagcgttactgatctcattggctctttgggtgttgaggagaagacgagggcaaaggacaaccgggacaaaaagatcgagggaggttctagcgctaatttggtacagaagaagaaccctcacgcatcccacaacaagaacaagaaagtcaaacctgacgtcaaacccaaggctacaatcaattttaagaataaagacaagggaaaggcaaaaggagattgctttgtgtgtggcaagcctaggcattgggccaaggactgtcctgagtgcatggacaagaagtctgcaaacatggttattagtgagggcggaggaacatcggggtatggtcgggagaggttcctccttgttgatgggaaacggatcgtttgcggttgttcatggtgtagattctgctatgtgtacctattgaaaacaaaggacgaagcattacattactttaagatctataaggctgaggtagaaaaccaactagaaaggaaaatcaaacggttgaggtctggtaggggtggagagtatttttccaatgagtttacttctttatgcgaagagtatggaattattcatgagaggacgcctccctattcaccccagtcaaacggggtagccgaaaagaagaaccgcactctaactgaaatggtgaatgccatgttagacactgcaagactttccaaggaatggtggggtgaggcaatattgactgcgtgtcatgtcctgaatagaattcctactatgcataaagaactaacaccattcgaggaatgggaaaggaagaaattaaatctccctcacctgcgcacatggggctgtttggccaaggtaaatgtatctatagccaaaaagcgtaaacttggaccaaagaccgtagattgtgtgttccttggttatgctatccatagtgtgggatataggttcttaacagtaaattctggagtacccgacatgcgtgttggtataattactgagtccagagatgccacattttttgagaatgaatttcctatgaaaaatgcacctagcacttctagtcaagaacctattttatcccctgagcactttgtgccgatagaacacattgatcaaatgcttgaggaaaattctgaggaggataacattgtagcaactcaaaagagtaagagacaaaggactgcaaagtcttttggagatgactacgttgtatatcttgtggatgatactccaagaaccattgaagaggcatattcatctcctgacactgactattggaaggaagcggtatga

SEQ ID NO: 15366 - DNA, 395 bp, Oryza sativa
  Clone ID: TFbOSC423289j.C1.o1.gm
cacaagagacaagagttcagtgtttctgatctcattggctctttgggtgttgaggagaaggcgagggcaaaggacgtccggggcaaaaaggttgagggaggttctagtgccaatatggtacagaagaagaaccctcatgcatcccacgataacaagaaagttaagcctgatgtcaaatccaaggctacaaccaattttaagaagaaagacaagggaaaggcaaaggtagactgctttgtgtgtgacaagtctgggcattgggccaaggactgtcctgagcgcaaagacagaaagtctgccaacatggtcattagcgagggcggaggaacatcggggtacggtcgggagaggttcctccttgttgatgggaaacgggtcgcttgcggctgttcatg

SEQ ID NO: 15367 - DNA, 2256 bp, Oryza sativa
  Clone ID: TFbOSC12493j.C1.o1.fg
atgtctggagttgctggcggaggtggtgcgccgccgccgacaggagctggatccggagctggtgcgccgccgccgacaggagctggatccggagctggtgcgccaggaggaggtgccgtgaacgactacaacaacggaggcaattctgcctcaccatccagcggagggccattctcggggtataatcttctcctcctactactgttgttagcgctatactgtgtgagctatgttcttgttcctgttctacatgatgcctctagcatgttatcgcattactggtatgttcctgtttctgacattcatgatgcgcatagtatgctactggttatgttaagatcaccctacactgcttatgccatgatcattgtttcaatttcttggattaaaatatgccgaataatgactatatttccaacaatccaaaaacctgataggtcattttcggtagttggctttgctgctgcactgaaaccacatgcttttgatggttcaaactataagagatggaaagcacgtgcactattatggttgacagcgatgcagtgcttctatgtttcacggggcaaacgaagtgaaccacctctctctcctgaggaagaggctaagttcgaggcttcggattgcctgttccgtggagcattgatcagtgtactcgctgacaacatagtggacgtgtacatgcacatgccttctgggaaggacatgtgggatgcacttgaggctaagttcggagtttctgacgctggcagtgagctgtatgtcatggagcagttctatgactataagatggtcgatgaccgttctgtagtagaacaagctcatgagattcagatgctggctaaggaacttgagaacaacaactgtgagttgccagacaagtttgtggcgggtggcattattgccaaactgccaccttcttggtcggactttgccacttctctaaagcacaagagacaagagttcagtgttcctgatctcattggctctttgggtgttgaggagaaggcgagggcaaaggacgtgcggggcaaaaaggttgagggaggttctagtgccaatatggtacagaagaagaaccctcatgcatcccacaacaacaagaaagtcaagcctgatgtcaaacccaaagctgcaaccaattttaagaagaaaggcaagggaaaggcaaaaggagactgctttgtgtgtggcaagtctgggcattgggccaaggactgtcctgagcgcaaagacaggaagtctgccaacatgatcattagcgagggcggaggaacatcggggtacggtaaaatattacctacagttctctctgtttttcattcacctgattggtgggtggatactggtgctaatattcatgtcgggagaggttcctccttgttgatgggaaacgggtcgcttgcggctgttcatggtgttggtacggtcgatctgaagtttacttcgggaaagaccgtgcagctgaagaacgtgcagcatgtcccttcaataaagaagaatctagttagcggctctctattgtgtagagaaggttttagacttgtgtttgagtccaataaatgtgtcgtatctaaatatgggacttttgttggaaaaggttatgacagcggaggcttgttccgcttttctttgaatgacatgtgtaataatcataatgctgtgaaccatattagcgagaatgatgagtctaatgtgtggcattcgcgactctgtcatgtgaatttcggttgtatgacgcgcttagctaacatgagtttaattccaaaattcactttggtcaaaggttccaagtgccatacttgtgttcaatcgaaacaacctcgcaagcctcacaaggcatctgaggcgaggaatttggcacctctagaacttgttcattccgatttgtgcgaaatgaacggcgtgttgactaaagggggaaagaaatatttcatgacactgatagatgattgcactagattttgctatgtgtatctattgaaaacaaaggatgaggcattgcattacttcaaaatctataaagctgaggtagaaaaccaacttgaaaggaaaatcaaacggttgaggtctgatagaggtggggagtatttttccaatgagtttgcatctttttgcgaagagtttggaattattcatgagatgacgcctccctattcaccccaatcaaatggggtgcccgaaagaaagaaccgtactgtcgcgtcccaaaacgactctaaaactcatcctcgaaattgtgcaaagaataattaa

SEQ ID NO: 15368 - DNA, 2415 bp, Oryza sativa
  Clone ID: TFbOSC1305j.C1.o1.fg
atgtctggagttgctgccgccgctaccggcggaggtggtgcgccgccgccgacaggagctggtgcgccgccgccgacaggagctggatccggagctggtgcgccaggaggaggtgccgtgaacgactacaacaacggaggcaattctgcctcaccatccagcggagggccattctcggggtataatcttctcctcctgctactgctgttagcgctattcctgttcccattgttagcgctatactgtgtgcgctatgttcttgttcctgttctacatgatgcctctagcatgttatcgcgttactggtatgttcctgtttctgacattcatgatgcgcatagtatgctactggttatgttaagatcaccctacactgcttatgccatgatcattgtttcaatttcttggattaaaatatgccgaataatgactatatttccaacaatccaaaaacctgataggtcattttcggtagttggctttgctgctgcactgaaaccacatgcttttgatggttcaaactataagagatggaaagcacgtgcactattgtggttgacagcgatgcagtgcttctatgtttcacggggcaaacgaagtgaaccacctctttctcctgaggaagaggctaagttcgaggcttcggattgcctgttccgtggagcattgatcagtgtactcgctgacaacatagtggacgtgtacatgcacatgccttctgggaaggacatgtgggatgcacttgaggccaagttcggagtttctgacgccggcagtgagctgtatgtcatggagcagttctatgactacaagatggtcgatgaccgttctgtagtagaacaagctcatgagattcagatgctggctaaggaacttgagaacaacaactgtgagttgccggacaagtttgtggcgggtggcattattgccaaactaccaccttcttggtcggactttgccacttctctaaagcacaagagacaagagttcagtgttcctgatctcattggctctttgggtgttgaggagaaggcgagggcaaaggacgtccggggcaaaaaggttgagggaggttctagtgccaatatggtacagaagaagaaccctcatgcatcccacaacaacaagaaagtcaagcctgatgtcaaacccaaggttgcaaccaattttaagaagaaaggcaagggaaaggcaaagggagactgctttgtgtgtggcaagtctgggcattgggccaaggactgtcctgagcgcaaagacaggaagtctgccaacatgatcattagcgagggcggaggaacatcggggtacggtaaaatattacctacagttctctctatttttcattcacctgattggtgggtggatactggtgctaatattcatgtcgggagaggttcctccttgttgatgggaaacgggtcacttgcggctgttcatggtgttggtacggtcgatctgaagtttacttcgggaaagaccgtgcagctgaagaacgtgcagcatgtcccttcaataaagaagaatctagttagcggctctctattgtgtagagaaggttttagacttgtgtttgagtccaataaatgtgtcgtatctaaatatgggacttttgttggtaaaggttatgacagcggaggcttgttccgtttttctttgaatgacatgtgtaataatcataatgctgtgaaccatattagcaagaatgatgagtctaatgtgtggcattcgcgactctgtcatgtgaatttcggttgtatgacgcgcttagctaacatgagtttaattccaaaattcactttggtcaaaggttccaagtgccatacttgtgttcaatcgaaacaacctcgcaagcctcacaaggcatctgaggcgaggaatttggcacctctagaacttgttcattccgatttgtgcgaaatgaacggcgtgttgactaaagggggaaagaaatatttcatgacactgatagatgattgcactagattttgctatgtgtatctattgaaaacaaaggatgaggcattgcattactttaaaatctataaagctgaggtagaaaaccaacttgaaaggaaaatcaaacggttgaggtctgatagaggtggggagtatttttctaatgagtttgcatccttttgcgaagagtttggaattattcatgagatgacgcctccctattcaccccaatcaaatggggtggccgaaagaaagaaccgtactctaactgagatggtgaatgccatgttagacactgcggggctttccaaggaatggtggggtgaggcagttttgactgcatgtcatgtcttgaataaaattccaatgaagcataaggaagtaacaccattcgaggaatgggaaaggaagaaattaaatctctcatacctacgaacatggtgctgtatggccaag

SEQ ID NO: 15369 - DNA, 3561 bp, Oryza sativa
  Clone ID: TFbOSC1309j.C1.o6.fg
atgtctggagttgctgccgccgctaccggcggaggtggtgcgccgccgccgacaggagctggtgcgccgccgccgacaggagctggatccggagctggtgcgccaggaggaggtgccgtgaacgactacaacaacggaggcaattctgcctcaccatccagcggagggccattctcggggtataatcttctcctcctgctactgctgttagcgctattcctgttcccattgttagcgctatactgtgtgcgctatgttcttgttcctgttctacatgatgcctctagcatgttatcgcgttactggtatgttcctgtttctgacattcatgatgcgcatagtatgctactggttatgttaagatcaccctacactgcttatgccatgatcattgtttcaatttcttggattaaaatatgccgaataatgactatatttccaacaatccaaaaacctgataggtcattttcggtagttggctttgctgctgcactgaaaccacatgcttttgatggttcaaactataagagatggaaagcacgtgcactattgtggttgacagcgatgcagtgcttctatgtttcacggggcaaacgaagtgaaccacctctttctcctgaggaagaggctaagttcgaggcttcggattgcctgttccgtggagcattgatcagtgtactcgctgacaacatagtggacgtgtacatgcacatgccttctgggaaggacatgtgggatgcacttgaggccaagttcggagtttctgacgccggcagtgagctgtatgtcatggagcagttctatgactacaagatggtcgatgaccgttctgtagtagaacaagctcatgagattcagatgctggctaaggaacttgagaacaacaactgtgagttgccggacaagtttgtggcgggtggcattattgccaaactaccaccttcttggtcggactttgccacttctctaaagcacaagagacaagagttcagtgttcctgatctcattggctctttgggtgttgaggagaaggcgagggcaaaggacgtccggggcaaaaaggttgagggaggttctagtgccaatatggtacagaagaagaaccctcatgcatcccacaacaacaagaaagtcaagcctgatgtcaaacccaaggttgcaaccaattttaagaagaaaggcaagggaaaggcaaagggagactgctttgtgtgtggcaagtctgggcattgggccaaggactgtcctgagcgcaaagacaggaagtctgccaacatgatcattagcgagggcggaggaacatcggggtacggtaaaatattacctacagttctctctatttttcattcacctgattggtgggtggatactggtgctaatattcatgtcgggagaggttcctccttgttgatgggaaacgggtcacttgcggctgttcatggtgttggtacggtcgatctgaagtttacttcgggaaagaccgtgcagctgaagaacgtgcagcatgtcccttcaataaagaagaatctagttagcggctctctattgtgtagagaaggttttagacttgtgtttgagtccaataaatgtgtcgtatctaaatatgggacttttgttggtaaaggttatgacagcggaggcttgttccgtttttctttgaatgacatgtgtaataatcataatgctgtgaaccatattagcaagaatgatgagtctaatgtgtggcattcgcgactctgtcatgtgaatttcggttgtatgacgcgcttagctaacatgagtttaattccaaaattcactttggtcaaaggttccaagtgccatacttgtgttcaatcgaaacaacctcgcaagcctcacaaggcatctgaggcgaggaatttggcacctctagaacttgttcattccgatttgtgcgaaatgaacggcgtgttgactaaagggggaaagaaatatttcatgacactgatagatgattgcactagattttgctatgtgtatctattgaaaacaaaggatgaggcattgcattactttaaaatctataaagctgaggtagaaaaccaacttgaaaggaaaatcaaacggttgaggtctgatagaggtggggagtatttttctaatgagtttgcatccttttgcgaagagtttggaattattcatgagatgacgcctccctattcaccccaatcaaatggggtggccgaaagaaagaaccgtactctaactgagatggtgaatgccatgttagacactgcggggctttccaaggaatggtggggtgaggcagttttgactgcatgtcatgtcttgaataaaattccaatgaagcataaggaagtaacaccattcgaggaatgggaaaggaagaaattaaatctctcatacctacgaacatggtgctgtatggccaagtccagagatgctacattctttgagaatgaatttcctatgaaatatacacctagcacttctagtaaagaaactgtcatgccccatgagcactttgcaccgatagaacacaatgatcaaacgcctgaggaaaatcctgaggaggacaacattgtagatactcgcaagagtaagagacaaagggttgcaaaatcctttggagatgactacattgtatacctcgtggatgacaccccaagaaccatagaagaggcatattcatctcctgacgctgactactggaaggaagcagtacgcagtgaaatggactcgattatgtctaatggtacttgggaagtcgttgagcgtccatatgggtgcaagcccgtaggatgcaaatgggttttcaagaaaaagcttaggcctgatggtacaatcgaaaagtacaaggcaaggcttgtggccaagggttatacccaaaaggaaagcgaggatttcttcgacacatattcaccagttgctcgcttgactacgattcgacaagcacctaagcaatggcatgagaagtttgacaccacgcttacatctgcaggctttgttgtgaacgaagctgacaaatgtgtatactatcgctatggtgggggagaaggggtgatcttgtgcttgtatgtcgatgacatactgatctttgggaccagccttaatgtgattgaggaggtcaaagactatctgtccaagagttttgaaatgaaggatttgggagaggctgatgttattcttaacatcaaactacaaagaggagatgagggtgggattacacttgtgcaatcccactatgtggacaaggttttgagtcgctttggatatagtgactgcaagccagctcctactccttatgatcccagtatgctattaaggaaaaaccgaagaatagcaagggatcaactaagatactctcaaatcattggttcattgatgtacttggctagcgcaacgaggcctgacatctcatttgctgtaagcaagctgagccggtttgtctcaaatccgggagatgatcattggcaggctctggaaagagtaatgcgctatctaaagggcactatgagctatggaattcactataccgggtatccaaaagtactagaagggtatagtgactcaaactag

SEQ ID NO: 15370 - DNA, 879 bp, Oryza sativa
  Clone ID: TFbOSC14746j.C1.o5.gm
atggtgctccaccacctgcggtcgcacaacggcccttcatggagactggtcctcaaactccaaaatgctccgatgaacggccaaatctcagcgacgttgaacgcgttgtgcgtcgggctcgtcaccgccagctcaattagcactgagaatagcgtgggatatctagtcgtggggaagcaaagggcccctgatcagccgtggagaagcagaagccaaaccctgacacccctcttctcgttctacgctactccaaggcctcgctacaccagccccgtgcactgccgggagggtgccgtcctcctcatagctaaagctcttgccgtagtgagatcaagggagaagttggtgctcgctagctccctgtttgcccaccacagtgccactgccacctgctccaccccggctgcttctggtgttgttgcttctcgcatgctagatcgagggcgtcatctggagctcgagcccttcgtcacggcgagcgactcggagtggacaggggagatcacagtggcgagtgaatcgaggctccggctcccggcgcgccatctccaggtgcgggagcagcagcggcggcggaagacatggtgtagcagacgacgacgacgacgaacagaagacgaggagcagtcgtgcggaagcactccccaaaaacctgatcactcgcctacccggtgcagatctcgggcgaaggtgtggttccggaggccctgcttgttccgatctctcgtgcacgcaagcgatcagaagtggggaagcagaacagtagcagcaccaggcgcgcgcgaggaggaggaggaagaacaccagatggaaatggagactgttaagttgaacttccacctaggaaatgagctacatcagaccacaactaaacaatga

SEQ ID NO: 15371 - DNA, 4149 bp, Oryza sativa
  Clone ID: TFbOSC16536j.C1.o8.fg
atgtcgaacactggagacaaggagaaggagactcccgtcaacaccaacggaggcaatactgcctcaaactccagcggaagaccattcttggggtataaccttattacattatttcaattagaagttttactgttaatgttcatcgcaatgtcaacattgtgtcattatgtgattgttgatgcttattcaatgttaagcatgctcatgttgattacattcaccactatcactggatcaaatcctattgtaaatatcatgtttattatcttgttattttggattaaaatatgccgaattatgaccaaatttctaacaatccaaaaacctgataggtcattttcggtagttggctttgctgctacactgaaaccacatgcctttgatggttcaaactataagagatggaaagcacgtgcactattgtggttgacagcgatgcagtgcttctatgtttcacggggcaaacgaagtgaaccacctctttctcctgaggaagaggctaagttcgaggcttcggattgcctgttccgtggagcattgatcagtgtactcgctgacaacatagtggacgtgtacatgcacatgccttctgggaaggaaatgtgggatgcacttgaggccaagttcggagtttctgacgccggcagtgagctgtatgttatggagcagttctatgactacaagatggtcgatgaccgttctgtagttgaacaagctcatgagattcagatgctggctaaggaacttgagaacaacaactgtgagttgccggacaagtttgtggcaggtggcattattgccaaactaccaccttcttggtcggactttgccacttctctaaagcacaagagacaagagttcagtgttcctgatctcattggctctttgggtgttgaggagaaggcgagggcaaaggacgtccggggcaaaaaggttgagggaggttctagtgccaatatggtacagaagaagaaccctcatgcatcccacaacaacaagaaagtcaagcctgatgtcaaacccaaggctgcaaccaattttaagaagaaaagcaagggaaaggcaaagggagactgctttgtgtgtggcaagtctgggcattgggccaaggactgtcctgagcgcaaagacaggaagtctgccaacatgatcattagcgagggcggaggaacatcggggtacggtaaaatattacctacagttctctctgtttttcattcacctgattggtgggtggacactggtgctaatattcatgtcgggagaggttcctccttgttgatgggaaacgggtcgcttgcggctgttcatggtgttggtacggtcgatctgaagtttacttcgggaaagaccgtgcagctgaagaacgtgcagcatgtcccttcaataaagaagaatctagttagcggctctctattgtgtagagaaggttttagacttgtgtttgagtccaataaatgtgtcgtatctaaatatgggacttttgttggaaaaggttatgacagcggaggcttgttccgcttttctttgaatgacatgtgtaataatcataatgctgtgaaccatattagcgagaatgatgagtctaatgtgtggcattcacgactctgtcatgtgaatttcggttgtatgacgcgcttagctaacatgagtttaattccaaaattcactttggtaaaaggttccaagtgccatacttgtgttcaatcgaaacaacctcgcaagcctcacaaggcatctgaggcgaggaatttggcacctctagaacttgttcattccgatttgtgcgaaatgaacggcgtgttgactaaagggggaaagaaatatttcatgacactgatagatgattgcactagattttgctatgtgtatctattgaaaacaaaggatgaggcattgcatttctttaaaatctataaagccgaggtagaaaaccaacttgaaaggaaaatcaaacggttgaggtctgatagaggtggggagtatttttccaatgagtttgcatccttttgcgaagagtttggaattattcatgagatgacgcctccctattcaccccaatcaaatggggtggccgaaagaaagaaccgtactctaactgagatggtgaatgccatgttagacactgcggggctttccaaggaatgcataaggaaaacaccattcgaggaatgggaaaggaagaaattaaatctctcatacctacgaacatggggctgtttggccaaggtaaatgtacctatagccaaaaagcggaaacttggaccaaaaactgttgattgtgtgtttcttggttatgctatccacagtgtgggttatagattcttaatagtaaactctggagtacccgacatgcatgttggtacaattcttgagtccagagatgctatattctttgagaatgaatttcctatgaaatatacacctagcacttctagtaaagaaactgtcatgccccatgagcactttgcaccgatagaacacaatgatcaaacgcctgaggaaaatcctgaggaggacaacattgtagatactcgcaagagtaagagacaaagggttgcaaaatcctttggagatgactacattgtatacctcgtggatgacaccccaagaaccatagaagaggcatattcatctcctgacgctgactactggaaggaagcagtacgcagtgaaatggactcgattatgtctaatggtacttgggaagtcgttgagcgtccatatgggtgcaagcccgtaggatgcaaatgggttttcaagaaaaagcttaggcctgatggtacaatcgaaaagtacaaggcaaggcttgtggccaagggttatacccaaaaggaaggcgaggacttcttcgacacatactcaccagttgctcgcttgaccacgattcgagtactacttgctctggcagcctctcatggtcttctcgtccatcagatggacattaagacagctttcctaaacggagagctggaggaggagatctatatggatcaaccagacgggtatgtactagaaggtcaggagggaatggtgtgtaaactattgaaatccttgtatggcctcaagcaagcacctaagcaatggcatgagaagtttgacaccacgcttacatctgcaggctttgttgtgaacgaagctgacaaatatgtatactatcgctatggtgggggagaaggggtgatcttgtgcttatatgtcgatgacatactgatctttgggaccagccttaatgtgattgaggaggtcaaagactatctgtccaagagttttgaaatgaaagatttgggagaggctgatgttattcttaacatcaaactacaaagaggagatgagggtgggattacacttgtgcaatcccactatgtggacaaggttttgagtcgctttggatatagtgactgcaagccagctcctactccttatgatcccagcgtgctattaaggaaaaaccgaagaatagcaagggatcagctgagatactctcaaatcattggttcattgatgtacttggctagcgcaacgaggcctgacatctcatttgctgtaagcaagctgagccggtttgtctcaaatccgggagatgatcattggcaggctctggaaagagtaatgcgctatctaaagggtactatgagctatggaattcactataccgggtatccaaaagtactagaagggtatagtgactcaaactggatatctgatgctgatgagataaaagccacaagtggatatgtgttcacacttggaggtggcgctgtttcctggaagtcttgcaagcagaccatcttaacgaggtcaacaatggaagcagaacttacagcactagatattgcgacagttgaggccgagtggcttcgtgaactcctgatggatttgccggtggttgaaaaaccagtgccagctatcctaatgaactgcgataatcaaacagtgattattaaagtgaacagttcaaaggacaacatgaagtcatctagacacatcaagagaagactgaaatctgtcagaaagcagaaaaactctggagtgatagcattggactatgtccaaacggctagaaatctggcagatcagtttaccaaggggctaccacgtaatgtgatagacagtgcatcgagggaaatgggcttgatacccacctaa

SEQ ID NO: 15372 - DNA, 3561 bp, Oryza sativa
  Clone ID: TFbOSC18107j.C1.o5.fg
atgtctgcgcctggagccggagcttccgatggtgcgcctggagctggagccggagatggtgcgcctggagctgcgaacgtcaacaccaacggaggcaattttgcctcacaatccagcggagggccattctcgggtgaaccacctctttctcctgaggaagaggctaagttcgaggcttcggattgcctgttccgtggagcattgatcagtgtactcgctgacaacatagtggacgtgtacatgcacatgccttccgggaaggacatgtgggatgcacttgaggccaaattcggagtttccgacgccggcagtgagctgtatgtcatggagcagttctatgactacaagatggtcgatgaccgttctgtagtagaacaaactcatgagattcggatgctggctaaggaacttgagaacaacaactatgagttgccggacaagtttgtggcaggtggcattattgccaaattgccaccttcttggtcagactttgccacttctctaaagcacaagagacaagagttcagtgtttctgatttcattggctctttgggtgttgaggagaaggcgagggcaaaggacgtccggggcaaaaaggttgagggaggttctagtgccaatatggtacagaagaagaaccctcatgcatcccacaataacaagaaagtcaagcatgatgtcaaacccaaggctgcaaccaactttaagaagaaaggcaagggaaaggcaaagggagactgctttgtgtgtggcaagtctgggcattgggccaaggactgtcctgagcgcaaagacaagaagtctgccaacatggtcattagcgagggaggaggaatatcggggtacggtaaaatattacctacagttctctttgtttttcactcacctgattggtgggtggatactagtgctaatattcatgtcgggagaggttcctccttgttgatgggaaacgggtcgcttgcggctgttcatggtgttggtatggtcgatctgaagtttacttcgggaaagaccgtgcagctgaagaacgtgcagcatgtcccttcaataaagaagaatcttgttagcggctctctactgtgtagagaaggttttagacttgtgtttaaatccaataaatgtgtcgtatctaaatatgggacttttgttggaaaaggttatgacagcggaggcttgttccgcttttctttgaatgacatgtgtaataatcataatgttgtgaaccatattagcgagaatgatgagtctaatgtgtggcattcacgactctgtcatgtgaatttcggttgtatgacgcgcttagctaacatgagtttaattccaaaattcactttggtgaaaggttctaagtgccatacttgtgttcaatcgaaacaacctctcaagcctcacaaggcatctgaggcgaggaatttggcacctcttgaacttgttcattccaatttgtgcgaaatgaatggcgtgttgactaaagggggaaagaaatatttcatgacaccgatagatgattgcactaggttttgctgtgtgtatctattgaaaacaaaggatgaagcattgcatttctttaagacctataaagctgaggtagaaaaccaacttgaaaggaaaatcaaacggttgaggtctgatagaggtggggagtatttttccaatgaattttcatccttttgcgaagagtttggaattattcatgagaggacgcctccctattcaccccaatcaaatggggtggccgaaagaaagaatcgtactctaactgagatggtgaatgccatgttagacattgtagagctttccaaggaatggtggggtaaggcagttttgactgcatgtcatgtcctgaataaaattccaatgaagcataaggaagtaaatgtacctatagccaaaaagtggaaacttggaccaaatactgttgattgtgtgttccttggttatgctattcacagtgtgggttatagattcttaatagtaaactctggagtacccggcatgcatcttggtacaattattgagtgtagagatgctacattctttgagaatgaatttcccatgaaacatacacctagcacctctagtcaagaaactgtcatgccccatgagcactttgcaccgatagaacacaatgatcaaacgcctgaggaaaatcctgaggaggacaacattgtagatactcgtaagaaagaggcatattcatctcctgacgctgactactggaaggaagcagtacgcagtgaaatggactcgattatgtctaatggtacttgggaagtcattgagcatccatatgggtgcaagcccgtaggatgcaaatgggttttcaagaaaaagcttaggcttgatggtacaattgaaaagtacaaggcaaggcttgtggcaagggttatacccaaaaggaaggcgaggactttttttgacacatactcaccagttgctcgcttgaccacgattcgagtactacttgctctggcagcctctcatggtcttctcgtccatcagatggacgttaagacagctttcgtaaacagagagctggaggaggagatctatatggatcaaccatacggatatgtactagaaggtcaggagggaatggtgtgtaaactgttgaaatccttgtatggcctaaagcaagctcctaagcaatgtcatgagaagtttgacaccacgcttacatctgcaggctttgttgtgaacgaaactgacaaatgtgtgtactatcactatagtgggggagaaggagtgatcttgtgcttatatgtcgatgacatattgatctttgggaccagcctcaatgtgattgaggaggtcaaggactatctgtccaagagttttgaaatgaaggatttgggagaggctgatgttattcttaacattaaactacaaagaggagatgagggtgggattacacttgtgcaatcgcactatgtggacaaggttttgagtcgctttggatatagtgactgcaagccagctcctactccttatgatcccagcgtgctattaagaaaaaaccgaagaatagcaagggatcaactgagatactctcaaatcattggttcattgatgtacttggctagtgcaacgaggccagacatctcatttgctgtaagcaagctgagccggtttgtctcaaatccaggagatgatcattggcaggctctggaaagagtaatgcgctatctaaagggcactgtgagctatgggattcactataccgggtatccaaaagtactagaagggtatagtgactcaaactggatatctgatgctgatgagataaaagccacaggtggatatgtgttcacacttggaggtggcgctgtttcctggaagtcttgcaagcagaccatcttaacgagttcaaaggacaacatgaagtcatctaggcatatcaagagaagactgaaatctgtcagaaagcagaaaaactccggagtgatagcattggactatgtccaaacggctagaaatctggcagatcagtttaccaagaggctaccacgtaatgtgatagacagtgcatcgagggaaatgggcttgatacccacctaa

SEQ ID NO: 15373 - DNA, 937 bp, Oryza sativa
  Clone ID: TFbOSC21802j.C1.o1.fg
gcctgatgtcaaacccaaggctgcaaccaattttaagaagaaaggcaagggaaagacaaagggagactgctttgtgtgtggcaagtctgggcattgggccaaggactgtcctgagtgcaaagacaggaagtctgccaacatgatcattagcgagggcggaggaacatcggggtatggtaaaatattacctacagttctctctgtttttcattcacctgattggtgggtggatactggtgctaatattcatgtcgggagaggttcctccttgttgatgggaaacgggtcacttgcggctgttcatggtgttggtacggtcgatctgaagtttacttcgggaaagaccgtgcagctgaagaacgtgcagcatgtcccttcaataaagaagaatctagttagcggctctctattgtgtagagaaggttttagacttgtgtttgagtccaataaatgtgtcgtatctaaatatgggacttttgttggaaaaggttatgacagtggaggcttgttccgcttttctttgaatgacatgtgttataatcataatgctgtgaaccatattagcgagaatgatgagtctaatgtgtggcattcgcgactctgtcatgtgaatttcggttgtatgacgcgcttagctaacatgagtttaattccaaaattcactttggtcaaaggttccaagtgccatacttgtgttcaatcgaaacaacctcgcaagcctcacaaggcatctgaggcgaggaatttggcacctctagaacttgttcattccgatttgtgcgaaatgaacggcgtgttgactaaagggggaaagaaatatttcatgacactgatagatgattgcactagattttgctatgtgtatctattgaaaacaaaggatgaggcattgcattactttaaaatctataaagctgaggtagaaaaccaactttga

SEQ ID NO: 15374 - DNA, 2607 bp, Oryza sativa
  Clone ID: TFbOSC22139j.C1.o3.fg
atgtctgcgcctggagccggtgccgctactgctgctggaggagatggcggaggtggtgcgccaccaggagctggagctggagctggaggtggtgcgccaggagctagagccggtgccgcgaacaacaacaccaacggaggcaattctgcctcacaatccagcggagggccattctcaagatcaccctacactgtttatgccatgattattgtcttaacattttggattaaaatatgccgatttatgaccatattttcaactatccaaaaacctgataggtcattttcggtagttggctttgctgctacattgaaaccacatgcttttgatggttctaactataagagatggaaagcacgtgcactattgtggttgacagcgatgcaatgcttctatgtttcacggggcaaacgaagtgaaccacctctttctcctgaggaagaggctaagttcgaggcttcggattgtctgttccgtggagcattgatcagtgtactcgctgacaacatagtggacgtgtacatgcacatgccttctgggaaggacatgtgggatgcacttgaggccaagttcggagtttctgacgctggcagtgcgctgtatgtcatggagcagttctatgactataagatggtcgatgaccgttctgtagtagaagctcatgagattcagatgctggctaaggaacttgagaacaacaactgcgagttgccggacaagtttgtggtgggtggcattattgccaaattgccaccttcttggtcggacttcgccacttctctaaagcacaagagacaagagttcagtgtttctgatttcattggttctttgggtgttgaggagaaggcgagggcaaaggacgtccggggcaaaaaggttgagggaggttctagtgccaatatggtacagaagaagaaccctcatgtatcccacaacaacaagaaagtcaagcctgatgtcaaatccaaggctgcaaccaactttaagaagaaaggcaagagaaaggcaaagggagactgctttgtgtgtggcaagtctgggcattgggctaaggactgtcctgagcgcaaagacaggaagtctgcgaacatggtcattagcgagggcggaggaacatcggggtacggtcggaagaggttcctccttgttgatgggaaacgggtcgcttgcggctgttcatggtgttgtgtgggttatagattcttaatagtaaactctggagtacccgacatgcatgttggtacaatttttgagtccagagatgctacattctttgagaatgaatttcccatgaaacatacacctagcacttctagtcaagaaactgtcatgccccatgagcactttgcaccgatagaacacaatgatcaaacgcctgaggaaaatcctgaggaggacaacattgtagatactcgcaagagtaagagacaaagggttacaaaatcctttggagatgactacattgtatacctcgtggatgacaccccaagaaccatagaagaggcatattcatctcctgacgctgactactggaaggaagcagtacgcagtgagatggactcgattatgtctaatggtacttgggaagtcgttgagcgtccatatgggtgcaagcccatggacgttaagacaactttcctaaacggagagctagaggaggagatctatatggatcaaccagacgggtatgtactagaagatcagaagggaatggtgtgtaaactgttgaaatccttgtatggcctcaagcaagcacctaagcaatggcatgagaagtttgacaccacgcttacatctgcaggcttcgttgtgaacgaagctgacaaatgtgtgtactatcgctatgatgggggagaaggagtgatcttgtgcttatatgtcgatgacatattgatctttgggaccagcctcaatgtgattgaggaggtcaaggactatctgtccaagagttttgaaatgaaggatttgggagaggctgatgttattcttaacatcaaactacaaagaggagatgagggtgggattgcacttgtgcaatcccactatgtggacaaggctctggaaagagtaatgcgctatctaaagggcactatgagctatggaattcactataccgggtatccaaaagtactagaagggtatagtgactcaaactggatatctgatgctgatgagataaaagccacaagtggatatgtgttcacacttggaggtggcgctgtttcctggaagtcttgcaagcagaccatcttaacgaggtcaacaatggaagcagaacttacagcactagatactgcgacagttgaggccgagtggcttcgtgaactcctgatggatttgccggtggttgaaaagccagtgtcagctatcctaatgaactgtgataatcaaacagtgattattaaagtgaacagttcaaaggacaacacgaagtcatctaggcatatcaagagaagactgaaatctgtcagaaagcagaaaaactccggagtgatagcattggactatgtccaaacggctagaaatctggcagatcagtttaccaaggggctaccacgtaatgtgatagacagtgcatcaaggaaaatgggcttgatacccacctaa

SEQ ID NO: 15375 - DNA, 3990 bp, Oryza sativa
  Clone ID: TFbOSC23901j.C1.o2.fg
atgtctggagttgctgccgccgctactggcccgccgacaggagctggtgatacgccgccgccgacaggagctggatccggagctggtgcgccaggaggaggtgtcgtgaacgactacaacaacggaggcaattctgcctcaccatccagcggagggccattctcggggtataatcttctcctcctgctactgctgttagcgctattcctgttcctgttcccattgttagcgctatactatgtgcgctatgttcttgttcctgttctacataatgcctctagcatgttatcgcgttactgtgcttctatggtttcacggggcaaacgaagtgaaccacctctttctcctgaggaagaggctaagttcgaggcttcggattgcctgttccgtggagcattgatcagtgtactcgctgacaacatagtggacgtgtacatgcacatgccttctgggaaggacatgtgggatgcacttgaggccaagttcggagtttctgacgccggcagtgagctgtatgtcatggagcagttctatgactacaagatggtcgatgaccgttctgtagtagaacaagctcatgagattcagatgctggctaaggaacttgagaacaacaactgtgagttgccggacaagtttgtggcgggtggcattattgccaaactaccaccttcttggtcggactttgccacttctctaaagcacaagagacaagagttcagtgttcctgatctcattggctctttgggtgttgaggagaaggcgagggcaaaggacgtccggggcaaaagggttgagggaggttctagtgccaatatggtacagaagaagaaccctcatgcatcccacaacaataagaaagtcaagcctgatgtcaaacccaaggctgcaaccaattttaagaagaaaggcaagggaaaggcaaagggagactgctttgtgtgtggcaagtctgggcattgggccaaggactgtcctgagcgcaaagacaggaagtctgccaacatgatcattagcgagggcggaggaacatcggggacggtcgggagaggttccttcttgttgatgggaaacgggtcgcttgcggctgttcatggtattggtacggtcgatctgaagtttacttcgggaaagaccgtgcagctgaagaacgtgcagcatgtcccttcaataaagaagaatctagttagcggctctctattgtgtagagaaggttttagacttgtgtttgagtccaataaatgtgtcgtatctaaatatgggacttttgttggaaaaggttatgacagcggaggcttgttccgcttttctttgaatgacatgtgtaataatcataatgctgtgaaccatattagcgagaatgatgagtctaatgtgtggcattcgcgactctgtcatgtgaatttcggttgtatgacgcgcttagctaacatgagtttaattccaaaattcactttggtcaaaggttccaagtgccatacttgtgttcaatcgaaacaacctcgcaagcctcacaaggcatctgaggcgaggaatttggcacctctagaacttgttcattccgatttgtgcgaaatgaacggcgtgttgactaaagggggaaagaaatatttcatgacactgatagatgattgcactagattttgctatgtgtatctattgaaaacaaaggatgaggcattgcattactttaaaatctataaagctgaggtagaaaaccaacttgaaatgaaaatcaaacggttgaggtctgatagaggtggggagtatttttctaatgagtttgcatccttttgcgaagagtttggaattattcatgagatgacgcctccctattcaccccaatcaaatggggtggccgaaagaaagaaccgtactctaactgagatggtgaatgccatgttagatactgcggggctctccaaggaatggtggggtgaggcagttttgactgcgtgtcatgtcctgaataaaattccaatgaagcataaggaagtaacaccattcgaggaatgggaaaggaagaaattaaatctctcatacctacgaacatggggctgtttggccaaggtaaatgtacctatagccaaaaagcggaaacttggaccaaaaactgttgattgtgtgttccttggttatgctatccacagtgtgggttatagattcttaatagtaaactctggtgtacccgacatgcatgctggtacaattcttgagtccagagatgctacattctttgagaatgagtttcctatgaaatatacacctagcacttctagtaaagaaactgtcatgccccatgagcactttgcaccgatagaacacgatgatcaaacgcctgaggaaaatcctgaggaggacaacattgtagatactcgcaagagtaagagacaaagggttgcaaaatcctttggagatgactacattgtatacctcgtggatgacaccccaagaaccatagaagaggcatattcatctcctgacgctgactactggaaggaagcagtacgcagtgaaatggactcgattatgtctaatggtacttgggaagtcgttgagcgtccatatgggtgcaagcccgtaggatgcaaatgggttttcaagaaaaagcttaggcctgatggtacaatcgaaaagtacaaggcaaggcttgtggccaagggttatacccaaaaggaaggcgaggacttcttcaacacatactcaccagttgctcgcttgaccacgattcgagtactacttgctctggcagcctctcatggtcttctcgtccatcagatggacgttaagacagctttcctaaacggagagctggaggaggagatctatatggatcaaccagacgggtatgtactagaaggtcaggagggaatggtgtgtaaactattgaaatccttgtatggcctcaagcaagcacctaagcaatggcatgagaagtttgacaccacgcttacatctgcaggctttgttgtgaacgaagctgacaaatgtgtatactatcgctatggtgggggagaaggggtgatcttgtgcttgtatgtcgatgacatactgatctttgggaccagccttaatgtgattgaggaggtcaaagactatctgtccaagagttttgaaatgaaggatttgggagaggctgatgttattcttaacatcaaacttcaaagaggagatgagggtgggattacacttgtgcaatcccactatgtggacaaggttttgagtcgctttggatatagtgactgcaagccagctcctactccttatgatcccagcgtgctattaaggaaaaaccgaagaatagcaagggatcaactaagatactctcaaatcattggttcattgatgtacttggctagcgcaacgaggcctgacatctcatttgctgtaagcaagctgagccggtttgtctcaaatccgggagatgatcattggcaggctctggaaagagtaatgcgctatctaaagggcactatgagctatggaattcactataccgggtatccaaaagtactagaagggtatggtgactcaaactggatatctgatgctgatgagataaaagccacaagtggatatgtgttcacacttggaggtggcgctgtttcctggaagtcttgcaagcagaccatcttaacaaggtcaacaatggaagcagaacttacagcactagatactgcgacagttgaggccgagtggcttcgtgaactcctgatggatttgccggtggttgaaaaaccagtgccagctatcctaatgaactgcgataatcaaacagtgattattaaagtgaacagttcaaaggacaacatgaagtcatctagacacatcaagagaagactgaaatctgtcagaaagcagaaaaactccggagtgatagcattggactatgtccaaacggctagaaatctggcagatcagtttaccaaggggctaccacgtaatgtgatagacagtgcatcgagggaaatgggcttgatacccacctaa

SEQ ID NO: 15376 - DNA, 323 bp, Oryza sativa
  Clone ID: TFbOSC2785j.C1.o1.hg
accacttttaagaagaaaggcaagggaaaggcaaagggcgactgctttgtgtgtggcaagtctgggcattgggccaaggactgtcctgagcgcaaagacaggaagtgtgccaacatggtcattagcgagggcggaggaacatcggggtacggtcaggagaggttcctccttgttgatgggaaacgggtcgcttacggctgtttatggtgttggtacggtcgatctgaagtttacttcgggaaagaccgtgcagctgaagaacgtgcaacatagtttggaattggggatcttctagagtcgtcagacgggcacctcgggcagct

SEQ ID NO: 15377 - DNA, 540 bp, Oryza sativa
  Clone ID: TFbOSC30194j.C1.o1.gm
atgctggctaaggaacttgagaacaacaactgtgagttgccggacaagtttgtggcgggtggcattattgccaaactaccaccttcttggtcggactttgccacttctctaaagcacaagagacaagagttcagtgtttctgatctcattggctctttgggtgttgaggagaaggtgagggcaaaggacgtccggggcaaaaaggttgagggaggttctagtgccaatatggtacagaagaagaactctcatgcatcccacaacaacaagaaagtcaagcctgatgtcaaacccaaggctgcaaccaattttaagaagaaaggcaagggaaaggcaaagggagactgctttgtgtgtggcaagtctgggcattgggccaaggactgtcctgagcgcaaagacaggaagtctgccaacatggtcgggagaggttcctccttgttgatgggaaacgggtcgcttgcggctgttcatggtgttggtacggttgatctgaagtttacttcgggaaagaccgtgcagctgaagaacgtgcagcat

SEQ ID NO: 15378 - DNA, 2721 bp, Oryza sativa
  Clone ID: TFbOSC31402j.C1.o3.fg
atggcggaggtggtgcgccgccgccaggagctggagccggtggcgcgaacaacaacatcaacggaggcaattctgcctcataatccagcggagggccattctcgggtggacgtgtacatgcacatgccttctgggaaggacatgtgggatgcacttgaggccaagttcggagtttctaacgccggcagtgagctgtatgtcatggagcagttctatgactacaagatgttgccggacaagtttgtggcgggtggcattattgccaaattgccaccttcttggtcggactttgccacttctctaaagcacaagagacaagagttcagtgtttctgatctcattggctctttgggtgttgaggagaaggcgagggcaacggacatccgggaaaaaaaggttgagggaggttctagtgccaatatggtacagaaaaagaaccctcatgcatcctacaacaacaagaaagtcaagcctgatgtcaaacccaaggctgcaaccaactttaagaagaaaggcaagggaaaagcaaagggagactgctttgtgtgtggcaagtctgggcattgggccaaggactgtcctgagcgcaaagacaggaagtctgccaacatggtcattggcgagggcggaggaacatcggggtacggtaaaatattacctacagttctctctgtttttcactcacctgattggtgggtggacactggtgctaatattcatgtcgggagaggttcctccatgttgatgggaaacgggtcgcttgcggctgttcatggtattggtacggtcgatcagaagtttacttcgggaaagaccgtgcagctgaagaacgtgcagcatgtcccttcaataaagaagaatcttgttagcggctctctactttgtagagaaggttttagacttgtgtttgagtccaataaatgtgtcgtatctaaatatgggacttttgttagaaaaggttatgacagcggaggcttgttccgcttttctttgaatgacatgtgtaataatcataatgttgtgaaccatattagcgagaatgatgagtctaatgtgtggcattcgcgactctgtcatgtgaatttcagttgtatgacgcgcttagctaacatgagtttaattccaaaattcactttgatcaaaggttccaagtgccatacttgtgttcaatcgaaacaacctcgcaagcctcacaaggcatctgaggcgaggaatttggcacctctagaacttgttcattccgatttgtgcgaaatgaacggcgtgttgactaaagggggaaagaaatatttcatgacactgatagatgattacactagattttgttatgtgtatatattgaaaagaaaggatgaagcattgcattactttaaaatctataaagctgaggtagaaaaccaacttgaaaggaaaatcaaacggttgaggtctgatagaggtgaggagtatttttctaatgagtttgcatccttttgcgaagagtttggaattatttatgagaggatgcctccctattcaccccaatcaaatggggtggccgaaagaaagaaccgtactctaactgagatggtgaatgccatgttagagactgcggggctttccaaggaatggtggggtgaggcagttttgactgcgtgtcatgtcctgaataaaatttcaatgaagcataaggaagtaacaccattcgaggaatgggaaaggaagaaattaaatctctcatacctacgaacatggggctgtttggccaagcactttgcaccgatagaacacaatgatcaaacgcctgagaaaaatcctgaggaggacaacattgtagacactcacaagagtaagagacaaagggttgcaaaatcctttggagatgactacattgtataccttgtggatgacaccccaagaaccatagaagagacatattcatctcctgacgctgactactggaaggaaataatggatgttaagacagctttcttaaacggagagctggaggaggagatctatatggatcaaccagacggccttaatgtgattgaggaggtcaaggactatctgtacaagagttttgaaatgaaggatttgggagaggctaatgttattcttaacatcaaactacaaagaggagatgagggtgggattacacttgtgcaatctcactatgtggacaaggttttgagtcgctttggatatagtgactgtaagccagctcctactccttgtgatcctagcgtgctattaaggaaaaaccgaagaatagtaagggatcaactgagatactctcaaatcattggttcattgatgtacttggctagtgcaacgaggcctgacatctcatttgctgtaagcaagctgagccggtttgtctcaaatccgggagatgatcattggcaggctctggaaagagtaatgcgctatctaaagggcactatgagctatggaattcactataccgggtattcaaaagtactagaagggtatattgactcaaactggatatctgatgctgatgagataaaagtcacaagtggatatgtgttcacacttggaggtggtgttgtttcctggaagtcttgcaagcagaccatcttaacaaggtcaacaatggaagcagaacttacagcactagatactgcgacagttgaggccgagtggcttcgtgaactcctgatggatttgccggtggttgaaaaaccagtgcgcgccagctatcctaatgaactatga

SEQ ID NO: 15379 - DNA, 897 bp, Oryza sativa
  Clone ID: TFbOSC33128j.C1.o1.fg
atgcagtgcttctatgtttcacggggcaaacgaagtgaaccacctctttctcctgaggaagaggctaagttcgaggcttcggattgcctgttccgtggagcattgatcagtgtactcgctgacaacatagtggacgtgtacatgcacatgccttctgggaaggacatgtgggatgcacttgaggccaagttcggagtttctgacgccggcagtgagctgtatgtcatggagcagttctatgactacaagatggtcgataaccgttctgtagtagaacaagctcatgagattcagatgctggctaaagaacttgagaacaacaactgtgagttgccggacaagtttgtggcgggtggcattattgccaaactaccaccttcttggtcggactttgccacttctctaaagcacaagagacaagagttcagtgtttctgatctcattggctctttgggtgttgaggagaaggcgagggcaaaggacgtgcggggcaaaaaggttgagggatgttctagtgccaatatggtacagaagaagaaccctcatgcatcccacaacaacaagaaagtcaagcctgatgtcaaacccaaggctgcaaccaattttaagaaaaaaggcaagggaaaggcaaagggagactgctttgtgtgtggcaagtctgggcattgggccaaggactgtcctgagcgcaaagacaggaagtctgccaacatggtcattagcgagggcggaggaacatcggggtacggttgggagaggttcctccttgttgatgggaaacgggtcgcttgcggctgttcatggtgttggtacggtcgatctgaagtttacttcgggaaagaccgtgcagctgaagaacgtgcagcatgtcccttcaataaagaagaatctagttag

SEQ ID NO: 15380 - DNA, 1419 bp, Oryza sativa
  Clone ID: TFbOSC400211j.C1.o1.fg
atgtctgcgcctggagccggtgccgctgctgctgctggaggagatggcggagatggtgcgccacctggagctgctgctggaggtggtgcaccaggagctggagccggtgccgcgaacaacaacaccaacggaggcagttctgcctcacaatccagcggagggccattctcagggtatatccttctcctattcctgttcttgttgttagcgctttattgctatgttcctgttcctgatattcatgatgcctctagcatgctaccgcgttactgctatgttcttcttcctgatattcataatgttgttcatgatgcctttagtatgctactggtaatgttacatgctgtcactagatcaccctacactgtttatgccatgattattgtcttaacattttggattaaaatatgccgatttatgaccatatttccaacaatccaaaaacctgataggtcattttcggtagttggctttgctgctgcactgaaaccacatgcttttgatggttctaattataagagatggaaagcacgtgcactattgtggttgacagcgatgcaatgcttctatgtttcacggggcaaacgaagtgaaccacctctttctcctgaggaagaggctaagttcgaggcttcggattatctgttccgtggagcattgatcagtgtacttactgacaacatagtggacgtgtatatgcacatgccttctgggaaggacatgtgggatgcacttgaggccaagttcggagtttctgacgccggcagtgagctgtatgtcatagagcagttctatgactacaagatggtcgatgaccgttctgtagtagaacaaactcatgagattcagatgctggctaaggaacttgagaacaacaactgtgagttgccggacaagtttgtggcaggtggcattattgccaaactgccaccttcttggtcggactttgccacttttctaaagcacaagagacaagagttcagtgagaaggcgagggcaaaggacgtccggggcaaaaaggttgagggaggttctagtgccaatatggtacagaagaagaaccctcatgcatcccgcaacaacaagaaagtcaagcctgatgtcaaacctaaggctgcaaccaactttaagaagaaaggcaagggaaaggcaaagggagactgctttgtgtgtggcaagtctgggcattgggccaaggactgtcctgagcgcaaagacaggaagtctgccaacatggtcattagcgagggcggaggaacatcggggtacggttgggagaggttcctccttgttgatgggaaacgggtcgcttgcggctgttcatggtgttggtacggtcgatctgaagtttacttcgggaaataccgtgcagctgaagaacgtgcagcatgtcccttcaataaagaagaatcttgttag

SEQ ID NO: 15381 - DNA, 3381 bp, Oryza sativa
  Clone ID: TFbOSC400297j.C1.o2.fg
atgcagtgcttctatgtttcacggggcaaacgaagtgaaccacctctttctcctgaggaagaggctaagttcgaggcttcggattgcctgttccgtggagcattgatcagtgtactcgctgacaacatagtggacgtgtacatgcacatgccttctgggaaggacatgtgggatgcacttgaggccaagttcggagtttctgacgccggcagtgagctgtatgttatggagcagttctatgactacaagatggtcgatgaccgttctgtagttgaacaagctcatgagattcagatgctggctaaggaacttgagaacaacaactgtgagttgccggacaagtttgtggcaggtggcattattgccaaactaccaccttcttggtcggactttgccacttctctaaagcacaacagacaagagttcagtgttcctgatctcattggctctttgggtgttgaggagaaggcgagggcaaaggacgtccagggcaaaaaggttgagggaggttctagtgccaatatggtacagaagaagaaccctcatgcatcccacaacaacaagaaagtcaagcctgatgtcaaacccaaggctgcaaccaattttaagaagaaaagcaagggaaaggcaaagggagactgctttgtgtgtggcaagtctgggcattgggccaaggactgtcctgagcgcaaagacaggaagtctgccaacatgatcattagcgagggcggaggaacatcggggtacggtaaaatattacctacagttctctctgtttttcattcacctgattggtgggtggacactggtgctaatattcatgtcaggagaggttcctccttgttgatgggaaacgggtcgcttgcggctgttcatggtgttggtacggtcgatctgaagtttacttcgggaaagaccgtgcagctgaagaacgtgcagcatgtcccttcaataaagaagaatctagttagcggctctctattgtgtagagaaggttttagacttgtgtttgagtccaataaatgtgtcgtatctaaatatgggacttttgttggaaaaggttatgatagcggaggcttgttccgcttttctttgaatgacatgtgtaataatcataatgctgtgaaccatattagcgagaatgatgagtctaatgatgaggcattgcatttctttaaaatctataaagctgagatagaaaaccaacttgaaaggaaaatcaaacggttgaggtctgatagaggtggggagtatttttccaatgagtttgcatccttttgcgaagagtttggaattattcatgagatgacgcctccctattcaccccaatcaaatggggtggccgaaagaaagaaccgtactctaactgagatggtgaatgccatgttagacactgcggggctttccaaggaatggtggggtgaggcagttttgactgcgtgtcatgtcctgaataaaattccaatgaagcataaggaagtaacaccattcgaggaatgggaaaggaagaaattaaatctctcatacctacgaacatggggctgtttggccaaggtaaatgtacctatagccaaaaaacggaaacttggaccaaaaactgttgattgtgtgtttcttggttatgctatccacagtgtgggttatagattcttaatagtaaactctggagtacccgacatgcatgttggtacaattcttgagtccagagatgctacattctttgagaatgaatttcctatgaaatatacacctagcacttctagtaaagaaacaatcatgccccatgagcactttgcaccgatagaacacaatgatcaaacgcctgaggaaaatcctgaggaggacaacattgtagatactcgcaagagtaagagacaaagggttgcaaaatcctttggagatgactacattgtatacctcgtggatgacaccccaagaaccatagaagaggcatattcatctcctgacgctgactactggaaggaagcagtacgcagtgaaatggactcgattatgtctaatggtacttgggaagtcgttgagcgtccatatgggtgcaagcccgtaggatgcaaatgggttttcaagaaaaagcttaggcctgatggtacaatcgaaaagtacaaggcaaggcttgtggccaagggttatacccaaaaggaaggcgaggacttcttcgacacatactcaccagttgctcgcttgaccacgattcgagtactacttgctctggcagcctctcatggtcttctcgtccatcagatggacgttaagacagctttcctaaacggagagctggaggaggagatctatatggatcaaccagacgggtatgtactagaaggtcaggagggaatggtgtgtaaactattgaaatccttgtatggcctcaagcaagcacctaagcaatggcatgagaagtttgacaccacgcttacatctgcaggctttgttgtgaacgaagctgacaaatgtgtatactatcgctatggtgggggagaagtggtgatcttgtgcttatatgtcgatgacatactgatctttgggaccagccttaatgtgattgaggaggtcaaagactatctgtccaagagttttgaaatgaaagatttgggagaggctgatgttattcttaacatcaaactacaaagaggagatgagggtgggattacacttgtgcaatcctactatgtggacaaggttttgagtcgctttggatatagtgactgcaagccagctcctactccttatgatcccagcgtgctattaaggaaaaaccgaagaatagcaagggatcagttgagatactctcaaatcattggttcattgatgtacttggctagcgcaacgaggcctgacatctcatttgctgtaagtaagctgagccggtttgtctcaaatccgggagatgatcattggcagactctggaaagagtaatgcgctatctaaagggtactatgagctatggaattcactataccgggtatccaaaagtactagaagggtatagtgactcaaactggatatctgatgctgatgagataaaagccacaagtggatatgtgttcacacttggaggtggcgctgtttcctggaagtcttgcaagcagaccatcttaacgaggtcaacaatggaagcagaacttacagcactagatactgcgacagttgaggccgagtggcttcgtgaactcctgatggatttgccggtggttgaaaaaccagtgccagctatcctaatgaactgcgataatcaaacagtgattattaaagtgaacagttcaaaggacaacatgaagtcatctagacacatcaagagaagactgaaatctgtcagaaagcagaaaaactccggagtgatagcattggactatgtctaa

SEQ ID NO: 15382 - DNA, 3894 bp, Oryza sativa
  Clone ID: TFbOSC400466j.C1.o5.fg
atgtctggagttgccaccgccactgctggcggaggtggtacgccgccgacaggagctcgatccggagctggtgcgccaggaggtgccgtgaacgacaacaacaacggaggcaattctgcctcaccatccagcggagggagtgcctcccgtacgactgctcatcgccatgtctggagttgccaccgccactgctggcggaggtggtcattttcggtagttggctttgctgctgcactgaaaccacatgcttttgatggttcaaactataagagatggaaagcacgtgcactattgtggttgacagcgatgcagtgcttctatgtttcacggggcaaacgaagtgaaccacctctttctcctgaggaagaggctaagttcgaggcttcggattgcctgttccgtggagcattgatcagtgtactcgctgacaacatagtggacgtgtacatgcacatgccttctgggaaggacatgtgggatgcacttgaggccaagttcggagtttctgacgccggcagtgagctgtacgtcatggagcagttctatgactacaagatggtcgatgaccattctgtagtggaacaagctcatgagattcagatgctggctaaggaacttgagaacaacaactgtgagttgccggacaagtttgtggcgggtggcattattgccaaactaccaccttcttggtcggactttgccacttctctaaagcacaagagacaagagttcagtgttcctgatctcattggctctttgggtgttgaggagaaggcgagggcaaaggacgtccggggcaaaaaggttgagggaggttctagtgccaatatggtacagaagaagaaccctcatgcatcccacaacaacaagaaagtcaagcctgatgtcaaacccaaggctgcaaccaattttaagaagaaaggcaagggaaaggcaaagggagactgctttgtgtgtggcaagtctgggcattgggccaaggactgtcctgagcgcaaagataggaagtctgccaacatggtcattagcgagggcggaggaacatcggggtacggtaaaatgttacctacagttctctctgtttatcattcacctgattggtgggtggacactggtgctaatattcatatatgtgctgacatttctctgttttcttcttatcaggtcgggagaggttcctccttgttgatgggaaacgggtcgcttgcggctgttcatggtgttggtacggtcgatctgaagtttacttcgggaaagaccgtgcagctgaagaacgtgcagcatgtccctttaataaagaagaatctagttagcggctctctattgtgtagagaaggttttagacttgtgtttgagtccaataaatgtgtcgtatctaaatatgggacttttgttggaaaatgttatgacagcggaggcttgttccgcttttctttgaatgacatgtgtaataatcataatgctgtgaaccatattagcgagaatgatgagtctaatgtgtggcattcgcgactctgtcatgtgaatttcggttgtatgacgcgcttagctaacatgagtttaattccaaaattcactttggtaaaaggttccaagtgccatacttgtgttcaatcgaaacaacctcgcaagcctcacaaggcatctgaggcgaggaatttggcacctctagaacttgttcattccgatttgtgcgaaatgaacggcgtgttgactaaagggggaaagaaatatttcatgacactgatagatgattgcactagattttgctatgtgtatctattgaaaacaaaggatgaggcattgcattactttaaaatctataaagctgaggtagaaaaccaacttgaaaggaaaatcaaacggttgaggtctgatagaggtggggagtatttttccaatgagtttgcatccttttgcgaagagtttggaattattcatgagatgacgcctccctattcaccccaatcaaatggggtggccgaaagaaagaaccgtactctaactgagatggtgaatgccatgttagacactgcggggctttccaaggaatgtgtgggttatagattcttaatagtaaactctggagtacccgacatgcatgctggtacaattcttgagtccagagatgctacattctttgagaatgaatttcctatgaaatatacacctagcacttctagtaaagaaactgtcatgccccatgagcactttgcaccgatagaacacaatgatcaaacgcctgaggaaaatcctgaggaggacaacattgtagatactcgcaagagtaagagacaaagggttgcaaaatcctttggagatgactacattgtatacctcgtggatgacaccccaagaaccatagaagaggcatattcatctcctgacgctgactactggaaggaagcagtacgcagtgaaatggactcgattatgtctaatggtacttgggaagtggttgagcgtccatatgggtgcaagcccgtaggatgcaaatgggttttcaagaaaaagcttaggcctgatggtacaatcgaaaagtacaaggcaaggcttgtggccaagggttatacccaaaagaaaggcgaggacttcttcgacacatactcaccagttgctcgcttgaccacgattcgagtactacttgctctggcagcctctcatggtcttctcgtccatcagatggacgttaagacagctttcctaaacggagagctggaggaggagatctatatagatcaaccagacgggtatgtactagaaggtcaggagggaatggtgtgtaaactattgaaatccttgtatggcctcaagcaagcacctaagcaatggcatgagaagtttgacaccacgcttacatctgcaggctttgttgtgaacgaagctgacaaatgtgtatactatcgctatggtgggggagaaggggtgatcttgtgcttatatgtcgatgacatactgatctttgggaccagccttaatgtgattgaggaggtcaaagactatctgtccaagagttttgaaatgaaggatttgggagaggctgatgttattcttaacatcaaactacaaagaggagatgagggtgggattacacttgtgcaatcccactatgtggacaaggttttgagtcgctttggatatagtgactgcaagccagctcctactccttatgatcccagcgtgctattaaggaaaaaccgaagaatagcaagggatcagctgagatactctcaaatcattggttcattgatgtacttggctagcgtaacgaggcctgacatctcatttgctgtaagcaagctgagccggtttgtcacaaatccgggagatgatcattggcaagctttggaaagagtaatgcgctatctaaagggcactatgagctatggaattcactataccgggtatccaaaagtactagaagggtatagtgactcaaactggatatctgatgctgatgagataaaagccacaagtggatatgtgttcacacttggaggtggcgctgtttcctggaagtcttgcaagcagaccatcttaacgaggtcaacaatggaagcagaactaacagcactagatactgcgacagttgaggccgagtggcttcgtgaactcctgatggatttgccggtggttgaaaaaccagtgccagctatcctaatgaactgcgataatcaaacagtgattattaaagtgaacagttcaaaggacaacatgaagtcatctagacacatcaagagaagactgaaatctgtcagaaagcagaaaaactccggggtgatagcattggactatgtccaaacggctagaaatctggcatatcagtttaccaaggggctaccacgtaatgtgatagacagtgcatcgagggaaatgggcttgatacccacctaa

SEQ ID NO: 15383 - DNA, 4362 bp, Oryza sativa
  Clone ID: TFbOSC400483j.C1.o5.fg
atgtctggagttgctgctgccgccgctaccggcggaggtggtacgccgccgccgacaggagctggtgcgccgccgccgacaggagctggtgcgccaggaggaggtgccgtgaacgactacaacaacggaggcaattctgcctcaccatccagcggagggccattctcggggtataatcttctcctcctgctactgctgttagcgctattcctgttcccattgttagcgctatactgtgtgcgctatgttcttgttcctattctacgtgatgcctctagcatgttatcgcgttactggtatgttcctgtttctgacattcatgatgcgcatagtatgctactggttatgttaagattaccctacactgcttatgccatgatcattgtttcaatttcttggattaaaatatgccgaataatgactatatttccaacaatccaaaaacctgataggtcattttcggtagttggctttgctgctgcactgaaaccacatgcttttgatggttcaaactataagagatggaaagcacgtgcactattgtggttgacagcgatgcagtgcttctatgtttcacggggcaaacgaagtgaaccacctctttctcctgaggaagaggctaagttcgaggcttcggattgcctgttccgtggagcattgatcagtgtactcgctgacaacatagtggacgtgtacatgcacatgccttctgggaaggacatgtgggatgcacttgaggccaagttcggagtttctgacgccggcagtgagctgtatatcatggagcagttctatgactacaagatggtcgatgaccgttctgtagtagaacaagctcatgagattcagatgctggctaaggaacttgagaacaacaactgtgagttgccggacaagtttgtggcgggtggcattattgccaaactaccaccttcttggtcggactttgccacttctctaaagcacaagagacaagagttcagtgttcctgatctcattggctctttgggtgttgaggagaaggcgagggcaaaggacgtccggggcaaaaaggttgagggaggttctagtgccaatatggtacagaagaagaaccctcatgcatcccacaacaacaagaaagtcaagcctgatgtcaaacccaaggctgcaaccaattttaagaagaaaggcaagggaaaggcaaagggagactgctttgtgtgtggcaagtctgggcattgggccaaggactgtcctgagcgcaaagacaggaagtctgccaacatgatcattagcgagggcggaggaacatcggggtacggtaaaatattacctacagttctctctgtttttcattcacctgattggtgggtggatactggtgctaatattcatgtatgtgctgacatttctctgttttcttcttatcaggtcgagagaggttcctccttgttgatgggaaacgggtcgcttgcggctgttcatggtgttggtacggtcgatctgaagtttacttcgggaaagaccgtgcagctgaagaacgtgcagcatgtcccttcaataaagaagaatctagttagcggctctctattgtgtagagaaggttttagacttgtgtttgagtccaataaatgtgtcgtatctaaatatgggacttttgttggtaaaggttatgacagcggaggcttgttccgcttttctttgaatgacatgtgtaataatcataatgctgtgaaccatattagcaagaatgatgagtctaatgtgtggcattcgcgactctgtcatgtgaatttcggttgtatgacgcgcttagctaacatgagtttaattccaaaattcactttggtcaaaggttccaagtgccatacttgtgttcaatcgaaacaacctcgcaagcctcacaaggcatctgaggcgaggaatttggcacctctagaacttgttcattccgatttgtgcgaaatgaacggcatgttgactaaagggggaaagaaatatttcatgacactgatagatgattgcactagattttgctatgtgtatctattgaaaacaaaggatgaggcattgcattactttaaaatctataaagctgaggtagaaaaccaacttgaaaggaaaatcaaacggttgaggtctgatagaggtggggagtatttttctaatgagtttgcatccttttgcgaagagtttggaattattcatgagatgacgcctccctattcaccccaatcaaatggggtggccgaaagaaagaaccgtattctaactgagatggtgaatgccatgttagacactgcggggctttccaaggaatggtggggtgaggcagttttgactgcgtgtcatgtcctgaataaaattccaatgaagcataaggaagtaacaccattcgaggaatgggaaaggaagaaattaaatctctcatacctacgaacatggggctgtttggccaaggtaaatgtacctatagtcaaaaagcggaaacttggaccaaaaactgttgattgtgtgtttcttggttatgctatccacagtgtgggttatagattcttaatagtaaactttggagtacccgacatgcatgctgctacaatttttgagtccagagatgctacattctttgagaatgaatttcttatgaaatatacacctagcacttctagtaaagaaactgtcatgctccatgagcactttgcaccgatagaacacaatgatgaaacgcctgaggaaaatcctgaggaggacaacattgtagatactcgcaagagtaagagacaaagggttgcaaaatcctttggagatgactacattgtatacctcgtggatgacaccccaagaaccatagaagaggcatattcatctcctgacgctgactactggaaggaagcagtacgcagtgaaattgactcgattatatctaatggtacttgggaagtcgttgagcgtccatatgggtgcaagcctgtaggatgcaaatgggttttcaagaaaaagcttaggcctgatggtacaatcgaaaagtacaaggcaaggcttgtggccaagggttatacccaaaaggaaggcgaggatttcttcgacacatattcaccagttgctcgcttgactacgattcgagtactacttgctctggcagcctctcatggtcttctcgtccatcagatggacgttaagacagctttcctaaacggagagctggaggaggagatctatatggatcaaccagacgggtatgtactagaaggtcaggagggaatggtgtgtaaactattgaaatccttgtatggcctcaagcaagcacctaagcaatggcatgagaagtttgacaccacgcttacagctgcaggctttgttgtgaacgaagctgacaaatgtgtatactatcgctatggtgggggagaaggggtgatcttgtgcttgtatgtcgatgacatactgatctttgggaccagtcttaatgtgattgaggaggtcaaagactatctgtccaagagttttgaaatgaaggatttgggagaggctgatgttattcttaacatcaaattacaaagaggagatgagggtgggattacacttgtgcaatcccactacgtggacaaggttttgagtcgctttggatatagtgactgcaagccagctcctactccttatgatcccagcgtgctattaaggaaaaatcgaagaatagcaagggatcaactgagatactctcaaatcattggttcattgatgtacttggctagcgcaacgaggcctgacatctcatttgctgtaagcaagctgagctggtttgtctcaaatccgggagatgatcattggcaggctctggaaagagtaatgcgctatctaaagggcactatgagctatggaattcactataccgggtatccaaaagtactagaagggtatagtgactcaaactggatatctgatgctgatgagataaaagccacaagtggatatgtgttcacacttggaggtggcgctgtttcctggaagtcttgcaagcagaccatcttaacgaggtcaacaatggaagcagaacttacagcactagatactgcgacagttgaggccgagtggcttcgtgaactcctgatggatttgccggtggttgaaaaaccagtgccagctatcctaatgaactgcgataatcaaacagtgattattaaagtgaacagttcaaaggacaacatgaagtcatctagacacatcaagagaagactgaaatctgtcagaaagcagaaaaactccggagtgatagcattggactatgtccaaacggctagaaatctggcagaccagtttaccaaggggctaccacgtaatgtgatagacagtgcatcgagggaaatgggcttgatacccacctaa

SEQ ID NO: 15384 - DNA, 3867 bp, Oryza sativa
  Clone ID: TFbOSC400500j.C1.o54.fg
atggcgcacctggagctggagccggagccggtgccgggaacgtcaacaccaatggaggcaattctgcctcacaatccagtagagggccattctcggggtatatccttcctcctgctcctgttgttagcgctattaatcttgttagtcgcaacttgctatgttcctgttcctgatgttcatgatgcctatagcatactagttatgttacatgttcctgttcctgatgttcatgcctttagcatactactggttatgttatatgttgtcactagatcatcctacactgttcatgccatgattattgtcttaacgttttggattaaaatatgccaatatatgaccatatttccaacaatccaaaaacctgataagtcattttcggtagttggctttgatgctgcactgaaaccacatgcttttgatggttctaactataagagatgtaaagcacgtgcactattgtggttgacagcgatgcaatgcttctatgtttcacggggcaaacgaagtgaaccacctctttctcctgaggaagaggctaagttcgaggcttcggattgcctgttctgtggagcattgatcagtgtactcgctgacaacatagtggacgtgtacatgcacatgccttccgagaaggacatgtgggatgcacttgaggccaagttcggagtttctgacgccggcagtgagctgtatgtcatggagcagttctatgactacaagatagtcgatgaccgttctgtacacaagagacaagagttcagtgtttctgatctcattggctctttgggtgttgaggagaaggcgagggcaaaggacgtccggggcaaaaaggttgagggaggttctagtgctaatatggtacagaggaagaaccctcatgcatcccacaacaacaagaaagtcaagcctgatgtcaaacccaaggctgcaaccaactgtaagaagaaaggcaagggaaaggcaaagggagactgctttgtgtgtggcaagtctgggcattgggccaaggactgtcctgagtgcaaagacaggaagtctgccaacatggtcattagcgagggcggaggaacatcggggtacggtaaaatattacctacagttctctctgtttttcacccacctgattggtgggtggatactggtgctaatattcatgtcgagagaggttcctccttgttgatgggaaacgggtcgcttgcggctgttcatggtgttggtacggtcaatctgaagtttacttcgggaaagaccgtgcagctgaagaacgtgcagcatgtcccttcaataaagaagaatcttgttagcggctctctattgtgtagagaaggttttagacttatgtttgagtccaataaatgtgtcgtatctaaatatgagacttttgttggaaaaggttatgacagcggaggcttgttccgcttttttttgaatgacatgtgtaataatcataatgttgtgaaccatattagcgagaatgatgagtctaatgtgtggcattcgcgactctgtcatgtgaatttcggttgtatgacgcgcttagctaacattagtttaattccaaaattcactttggtcaaaggttccaagtgccatacttgtgttcaatcgaaacaacctcgcaagactcacaaggcatctgaggcgaggaatttggcacctctagaatttgttcattccgatttgtgcgaaatgaacggcgtgttgactaaaggtggaaagaaatatttcatgacactgatagatgattgcactagattttgttatgtgtatgtattgaaaacaaaggatgaaacattgcattactttaagatctataaagctgaggtagaaaaccaacttgaaaggaaaatcaaacggttgaggtttgatagaggtggggagtatttttccaataagtttgcatccttttgcgaagagtttggaattattcatgagaggacgcctccctattcaccccaatcaaatggggtggccgaaagaaagaaccgtactctaactaagatggtgaatgccatgttaggcactgcggggctttccaaggaatggtggggtgaggcagttttgactgtgtgtcatgtcctgaacaaaattccaatgaagcataaggaagtaacaccattcgaggaatgggaaaggaagaaatcaaatctctcatacctacgaacatggggctgtttggctaaggtaaatgtacctatagccaaaaagcgaaaacttggaccaaatactgttgattgtgtgttccttggttatgctattcacagtgtgggttatagattcttaatagtaaactctggagtacctgacatgcatgttggtacaattattgagtccagagatgctacattcttcgagaatgaatttcccatgaaacatacacctagcacctctagtcaagaaactgtcatgtcccatgagtactttgcaccgatagaacacgatgatcaaacgcctgaggaaaatcctaatgaggacaacattatagatactcgcaagagtaagagacaaagggttgcaaaatcctttggagatgactacattgtatacctcgtggatgacaccctaagaaccatagaagaggcatattcatctcctgacgctgactactggaaggaagcagtacacagtgaaatggactcgattatgtctaatggtacttgggaagtcgttgagcgtccatatgggtgcaagcccgtaggatgcaaatgggttttcaagaaaaagcttaggcctatgatggacgttaagacagctttcctaaacgaagagctggaggaggagatctatatggatcaaccagacgggtatgtactagaaggtcaggagggaatggtgtgtaaactgttgaaatccttgtatggcctcaagcaagcacctaagcaatggcatgagaagtttgacactacgcttacatctgcaggctttgttgtgaatgaagctgacaaatgtgtgtactatcgctatggtgggggagaaggagtaatcttgtgcttatatgtcgatgacatattgatctttggaaccagcttcaatgtgattgaggaggtcaaggactatctgttcaagagttttgaaatgaaggatttgggagaggctgatgttattcttaacatcaaactacaaagaggagatgagggtgggattacacttgtgcaatcccactatgtggacaaggttttgagtcgctttggatatagtgactgcaagccagctcctactccttatgatcccaacgtgctattgagaaaaagccgaagaatagcaagggatcaactgagatactctcaaatcattggttcattgatgtacttggctagtgcaacgaggcctgacatctcatttgctgtaagcaagctgagccggtttgtctcaaatccgggagatgatcattggcaggctctggaaagagtaatgcgctatctaaagggcactatgagctatggaattcactataccgggtatctaaaagtactagaagggtatagtgactcaaactggatatctgatgctgatgagataaaagccacaagtggatatgtgttcacacttggaggtggcgttgtttcctggaagtcttgcaagcagaccatcttaacgaggtcaacaatagaagcagaacttatagcactagatactgcgatagttgaggccgagtggcttcgtgaactcctgatagatttgccggtggttgaaaaaccagtgccagctatcctaatgaactgtgataatcaaacagtgattattaaagtgaacaattcaaaggacaatatgaagtcatctaggcatatcaagagaagactgaaatctgtcagaaagcaaaaaaaactccggagtgatagcattggactatgtccaaacggctaa

SEQ ID NO: 15385 - DNA, 2898 bp, Oryza sativa
  Clone ID: TFbOSC400506j.C1.o17.gm
atggctcttcttggcaagactagttgcaaggctgccgtgttcttggcagctctagtggtcatggctactgctttttcatcctctcatgctgcccaaggacaagacgggcgggcgatcaggtttttggggagcgcaaggcgcgactactcactgttcgtcaacatctacttcatcttcaccaacatgtcgaacactggagacaaggagaaggagactccctgcttctatgtttcacggggcaaacgaagtgaaccacctctttctcctgaggaagaggctaagttcgaggcttcggattgcctgtttcgtggagcattgatcagtgtactcgctgacaacatagtggacgtgtacatgcacatgccttctgggaaggacatgtgggatgcacttgaggccaagttcggaatttctgacgccggcagtgagctgtatgttatggagcagttctatgattacaagatggtcgatgaccgttctgtagttgaacaagctcatgagattcagatgctggctaaggaacttgagaacaacaactgtgagttgccggacaagtttgtggcaggtgacattattgccaaactaccaccttcttggtcggactttgccacttctctaaagcacaagagacaagagttcagtgttcctgatctcattggctctttgggtgttgaggagaaggcgagggcaaaggacgtccggggcaaaaaggttgagggaggttctagtgccaatatggtacagaagaagaaccctcatgcatcccacaacaacaagaaagtcaagcctgatgtcaaacccaaggctgcaaccaattttaagaagaaaagcaagggaaaggcaaagggagactgctttgtgtgtggcaagtctgggcattgggccaaggactgtcctgagcgcaaagacaggaagtctgccaacatgatcattagcgagggcggaggaacatcggggtacggtcgggagaggttcctccttgttgatgggaaacgggtcgcttgcggctgttcatgtgtgggttatagattcttaatagtaaactctggagtacccgacatgcatgttggtacaattcttgagtccagagatgctacattctttgagaatgaatttcctatgaaatatacacctagcacttctagtaaagaaactgtcatgccccatgagcactttacaccgatagaacataatgatcaaacgcctgaggaaaatcctgaggaggacaacattgtagatactcgcaagagtaagagacaaagggttgtaaaatcctttggagatgactacattgtatacctcgtggatgacaccccaagaaccatagaagaggcatattcatctcctgacgctgactactggaaggaagcagtacgcagtgaaatggactcgattatgtctaatggtacttgggaaatcgttgagcgtccatatgggtgcaagcccgtaggatgcaaatgggttttcaagaaaaagcttaggcctgatggtacaatcgaaaagtacaaggcaaggcttgtggccaagggttatacccaaaaggaaggcgaggacttcttcgacacatactcaccagttgctcgcttgaccacgattcgagtactacttgctctggcagcctctcatggtcttctcgtccatcagatggacgttaagacagctttcctaaacggagagctggaggaggagatctatatggatcaaccagacgggtatgtactagaaggtcaggagggaatggtgtgtaaactattgaaatccttatatggcctcaagcaagcacctaagcaatggcatgagaagtttgacaccacgcttacatctgcaggctttgttgtgaacgaagctgacaaatgtgtatactatcgctatggtgggggagaaggggtgatcttgtgcttatatgtcgatgacatactgatctttgggaccagccttaatgtgattgaggaggtcaaagactatctgtccaagagttttgaaatgaaggatttgggagaggctgatgttattcttaacatcaaactacaaagaggagatgagggtgggattacacttgtgcaatcccactatgtggacaaggttttgagtcgctttggatatagtgactgcaagccagctcctactccttatgatcccagcgtgctattaaggaaaaaccgaagaatagcaagggatcagctgagatactctcaaatcattggttcattgatgtacttggctagcgcaacgaggcctgacatctcatttgctgtaagcaagctgagccggtttgtctcaaatccgggagatgatcattggcaggctctggaaagagtaatgcgctatctaaagggtactatgagctatggaattcactataccgggtatccaaaagtactagaagggtatagtgactcaaactggatatctgatgctgatgagataaaagccacaagtggatatgtgttcacacttggaggtggcgctgtttcctggaagtcttgcaagcagaccatcttaacgaggtcaacaatggaagcagaacttacagcactagatactgcgatagttgaggccgagtggcttcgtgaactcctgatggatttgccggtggttgaaaaaccagtgccagctatcctaatgaactgcgataatcaaacagtgattattaaagtgaacagttcaaaggacaacatgaagtttttggggagcgcaaggcgcgactactcactgttcgtcaacatctacttcatcttcaccaacatgtcgaacactggagacaaggagaaggagactcccgtcaacaccaacggaggcaatactgcctcaaactccagcggaggaccattcttgggctttgcctccacggcggttaaacaatgcaatgcgtgcgtcgagtgtggggagtcgaggtag

SEQ ID NO: 15386 - DNA, 3807 bp, Oryza sativa
  Clone ID: TFbOSC400569j.C1.o8.fg
atgcagtgcttctatgtttcacggggcaaacgaagtgaaccacctctttctcctgaggaagaggctaagttcgaggcttcggattgcctgttccgtggagcattgatcagtgtactcgctgacaacatagtggacgtgtacatgcacatgccttctgggaaggacatgtgggatgcacttgaggccaagttcggagtttctgatgccggcagtgagctgtatgttatggagcagttctatgactacaagatggtcgatgaccgttctgtagttgaacaagctcatgagattcagatgctggctaaggaacttgagaacaacaactgtgagttgccggacaagtttgtggcaggtggcattattgccaaactaccaccttcttggtcggactttgccacttctctaaagcacaagagacaagagttcagtgttcctgatctcattggctctttgggtgttgaggagaaggcgagggcaaaggacgtccgggggaaaaaggttgagggaggttctagtgccaatatggtacagaagaagaaccctcatgcatcccacaacaacaagaaagttaagcctgatgtcaaacccaaggctgcaaccaattttaagaagaaaagcaagggaaaggcaaagggagactgctttgtgtgtggcaagtctgggcattgggccaaggactgtcctgagcgcaaagacaggaagtctgccaacatgatcattagcgagggcggaggaacatcggggtacggtaaaatactacctacagttctctctgtttttcattcacctgattggtgggtggacactggtgctaatattcatgtatgtgctgacatttctctattttcttcttatcaggtcgggagaggttcctccttgttgatgggaaacgggtcgcttgcggctgttcatggtgttggtacggtcgatctgaagtttacttcgggaaagaccgtgcagctgaagaacgtgcagcatgtcccttcaataaagaagaatctagttagcggctctctattgtgtagagaaggttttagacttgtgtttgagtccaataaatgtgtcgtatctaaatatgggacttttgttggaaaaggttatgacagcggaggcttgttccgcttttctttgaatgacatgtgtaataatcataatgctgtgaaccatattagcgagaatgatgagtctaatgtgtggcattcgcgactctgtcatgtgaatttcggttgtatgacgcgcttagctaacatgagtttaattccaaaattcactttggtaaaaggttccaagtgccatacttgtgttcaatcgaaacaacctcgcaagcctcacaaggcatctgaggcgaggaatttggcacctctagaacttgttcattccgatttgtgcgaaatgaacggcgtgttgactaaagggggaaagaaatatttcatgacactgatagatgattgcactagattttgctatgtgtatctattgaaaacaaaggatgaggcattgcatttctttaaaatctataaagctgaggtagaaaaccaacttgaaaggaaaatcaaacggttgaggtctgatagaggtggggagtatttttccaatgagtttgcatccttttgcgaagagtttggaattattcatgagatgacgcctccctattcaccccaatcaaatggggtggccgaaagaaagaaccgtactctaactgagatggtgaatgccatgttagacagtgcggggctttccaaggaatggtggggtgaggcagttttgactgcgtgtcatgtcctgaataaaattccaatgaagcataaggaagtaacaccattcgaggaatgggaaaggaagaaattaaatctctcatacctacgaacatggggctgtttggccaaggtaaatgtacctatagccaaaaagcggaaacttggaccaaaaactgttgattgtgtgtttcttggttatgctatccacagtgtgggttatagattcttaatagtaaactctagagtacccgacatgcatgttggtacaattcttgagtccagagatgctacattctttgagaatgaatttcctatgaaatatacacctagcacttctagtaaagaaactgtcatgccccatgagcactttgcaccgatagaacacaatgatcaaacgcctgaggaaaatcctgaggaggacaacattgtagatactcgcaagagtaagagacaaagggttgcaaaatcctttggagatgactacattgtatacctcgtggatgacaccccaagaaccatagaagaggcatattcatctcctgacgctgactattggaaggaagcagtacgcagtgaaatggactcgattatgtctaatggtacttgggaagtcgttgagcgtccatatgggtgcaagcccgtaggatgcaaatgggttttcaagaaaaagcttaggcctgatggtacaatcgaaaagtacaaggcaaggcttgtggccaagggttatacccaaaaggaaggcgaggacttcttcgacacatactcaccagttgctcgcttgaccacgattcgagtactacttgctctggcagcctctcatggtcttctcgtccatcagatggacgttaagacagctttcctaaacggagagctggaggaggagatctatatggatcaaccagacgggtatgtactagaaggtcaggagggaatggtgtgtaaactattgaaatccttgtatggcctcaagcaagcacctaagcaatggcatgagaagtttgacaccacgctttcatctgtaggctttgttgtgaacgaagctgacaaatgtgtatactatcgctatggtgggggagaaggggtgatcttgtgcttatatgtcgatgacatactgatctttgggaccagccttaatgtgattgaggaggtcaaagactatctgtccaagagttttgaaatgaaagatttgggagaggctgatgttattcttaacatcaaactacaaagaggagatgagggtgggattacacttgtgcaatcccactatgtggacaaggttttgagtcgctttggatatagtgactgcaagccagctcctactccttatgatcccagcgtgctattaaggaaaaaccgaagaatagcaagggatcagctgagatactctcaaatcattggttcattgatgtacttggctagcgcaacgaggcctgacatctcatttgctgtaagcaagctgagccggtttgtctcaaatccgggagatgatcattggcaggctctggaaagagtaatgcgctatctaaagggtactatgagctatggaattcactataccgggtatccaaaagtactagaagggtatagtgactcaaactggatatctgatgctgatgagataaaagccacaagtggatatgtgttcacacttggaggtggcgctgtttcctggaagtcttgcaagcagaccatcttaacgaggtcaacaatggaagcagaacttatagcactagatactgcgacagttgaggccgagtggcttcgtgaactcctgatggatttgccggtggttgaaaaaccagtgccagctatcctaatgaactgcgataatcaaacagtgattattaaagtgaacagttcaaaggacaacatgaagtcatctagacacatcaagagaagactgaaatctgtcagaaagcagaaaaactccggagtgatagcattggactatgtccaaacggctagaaatctagcagatcagtttaccaaggggctaccacgtaatgtgatagacagtgcatcgagggaaatgggcttgatacccacctaa

SEQ ID NO: 15387 - DNA, 4158 bp, Oryza sativa
  Clone ID: TFbOSC400615j.C1.o31.fg
atgtctggagttgctgccgccactgctggcggaggtggtacgccgccgccgacaggagctggatctggatccggagctggtgcgccaggaggaggtgccgtgaacgactacaacaacggaggcaattctgcctcaccatccagcggagagccattctcggggtataatcttctcctcctgctactgctgttagcgctattcatgttcccattgttagcgctatactatgtgcgctatgttcttgttcctgttctacatgatgcctctagcatgttatcgcgttactggtatgttcctgttcctgacattcatgatgcgcatagtatgctactggttatgttaagatcaccctacactgcttatgccatgatcattgtttcattttcttggattaaaatatgtcgattaatgactatatttccaacaatccaaaaacctgataggtcattttcggtagttggctttgctgctgcactgaaaccacatgcttttgatggttcaaactataagagatggaaagcacgtgcactattgtggttgacagcgatgcagtgcttctatgtttcacggggcaaacgaagtgaaccacctctttctcctgaggaagaggctaagttcgaggcttcggattgcctgttccgtggagcattgatcagtgtactcgctgacaaaatagtggacgtgtacatgcacatgccttctgggaaggacatgtgggatgcacttgaggccaagttcggagtttctgacgccggcagtgagctgtatgtcatggagcagttctatgactacaagatggtcgatgaccgttctgtagtagaacaatctcatgagattcagatgctggctaaggaacttgagaacaacaactgtgagttgccggacaagtttgtggcgggtggcattattgccaaactaccaccttcttggtcggactttgccacttctctaaagcacaagagacaagagttcagtgttcctgatctcattggctctttgggtgttgaggagaaggcgagggcaaaggacgtccggggcaaaaaggttgagggaggttctagtgccaatatgaagaaaggcaagggaaaggcaaagggagactgctttgtgtgtggcaagtctgggcattgggccaaggactgtcctgagcgcaaagacaggaagtctgccaacatgatcattagcgagggcggaggaacatcggggtatgtcgggagaggttcctccttgttgatgggaaacgggtcgcttgcggctgttcatagtgttggtatggtcgatctgaagtttacttcgggaaagaccgtgcagctgaagaacgtgcagcatgtcccttcaataaagaagaatctagttaacggctctctattgtgtagagaaggttttagacttgtgtttgagtccaataaatgtgtcgtatctaaatatgggacttttgttggaaaaggttatgacagcggaggcttgttccgcttttctttgaatgacatgtgtaataatcataatgctgtgaaccatattagcgagaatgatgagtctaatgtgtggcattcgcgactctgtcatgtgaatttcggttgtatgacgcgcttagctaacatgagtttaattccaaaattcactttggtcaaaggttccaagtgccatacttgtgttcaatcaaaacaacctcgcaagcctcacaaggcatctgaggcgaggaatttggcacctctagaacttgttcattccgatttgtgcgaaatgaacggcgtgttgactaaagggggaaagaaatatttcatgacactgatagatgattgcactagattttgctatgtgtatctattgaaaacaaaggatgaggcattgcattactttaaaatctataaagctgaggtagaaaaccaacttgaaaggaaaatcaaacggttgaggtctgatagaggtggggagtatttttccaatgagtttgcatccttttgcgaagagtttgaaattattcatgagatgacgcctccctattcaccccaatcaaatggggtggccgaaagaaagaaccgtactctaactgagatggtgaatgccatgttagatactgcggggctttccaaggaatggtggggtgaggcagttttgactgcgtgtcatgtcctgaataaaattccaatgaagcataaggaagtaacaccattcgaggaatgggaaaggaagaaattaaatctctcatacctacgaacatggggctgtttggccaaggtaaatgtacctatagccaaaaagcagaaacttggaccaaaaactgttgattgtgtgtttcttggttatgctatccacagtgtgggttatagattcttaatagtaaactctggagtacccgacatgcatgctggtacaattcttgagtccagagatgctacattctttgagaatgaatttcctatgaaatatacacctagcacttctagtaaagaaactgtcatgccccatgagcactttgcaccgatagaacacgatgatcaaacgcctgaggaaaatcctgaggaggacaacattgtagatactcgcaagagtaagagacaaagggttgcaaaatcttttggagatgactacattgtatacctcgtggatgacaccccaagaaccatagaagaggcatattcatctcctgacgctgactactggaaggaagcagtacgcagtgaaatgaactcgattatgtctaatggtacttgggaagtcgttgagcgtccatatgggtgcaagcccgtaggatgcaaatgggttttcaagaaaaagcttaggcctgatggtacaatcgaaaagtacaaggcaaggcttgtagccaagggttatacccaaaaggaaggcgaggacttcttcgacacatactcaccagttgctcgcttgaccacgattcgagtactacttgctctggcagcctctcatggtcttctcgtccatcagatggacgttaagacagctttcctaaacggagagctggaggaggagatctatatggatcaaccagacgggtatgtactagaaggtcaggagggaatggtgtgtaaactattgaaatccttgtatggcctcaagcaagcacctaagcaatggcataagaagtttgacaccacgcttacctctgcaggctttgttgtgaacgaagctgacaaatgtgtatactatcgctatggtgggggagaaggggtgatcttgtgcttatatgtcgatgacatactgatctttgggaccagccttaatgtgattgaggaggtcaaagactatctgtccaagagttttgaaatgaaggatttgggagaggctgatgttattcttaacatcaaactacaaagaggagatgagggtgggattacacttgtgcaatcccactatgtggacaaggttttgagtcgctttggatatagtgactgcaagccagctcctactccttatgatcccagcgtgctattaaggaaaaaccgaagaatagcaagggatcaactgagatactctcaaatcattggttcattgatgtacttggctagcgcaacgaggcctgacatctcatttgctgtaagcaagctgagccggtttgtctcaaatccgggagatgatcattggcaggctctggaaagagtaatgcgctatctaaagggcactatgagctatggaattcactataccgggtatccaaaagtactagaagggtatagtgactcaaactggatatctgatgctgatgagataaaagccacaagtggatatgcgttcacacttggaggtggcgctgtttcctggaagtcttgcaagcagaccatcttaacgaggtcaacaatggaagcagaacttacagcactagatactgcgacagttgaggccgagtggcttcgtgaactcctgatggatttgccggtggttgaaaaaccagtgccagctatcctaatgaactgcgataatcaaacagtgattattaaagtgaacagttcaaaggacaacatgaagtcatctagacacatcaagagaagactgaaatatgtcagaaagcagaaaaactccggagtgatagcattggactatgtccaaacggctagaaatctggcagatcagtttaccaaggggctaccacgtaatgtgatagacagtgcatcgagggaaatgggcttgatacccacctaa

SEQ ID NO: 15388 - DNA, 3513 bp, Oryza sativa
  Clone ID: TFbOSC400694j.C1.o10.fg
atgtctgccgcacctggagccgccgccgccgctgctgccgcacctggagacgcgccgggagccggagccgctgcgaacgacaacgtcaacggaggcagttctgcctcacaatccagcggagggacatttacagggtcattttcggtagttggctttgcttctgcactgaaaccacatgcatttgatggttctaactataagagatggaaagcacgtgcactattgtggttgacagcgatgcaatgcttctatgtttcacggggtaaacgaagtgaaccacctctctctcctgaggaagaggttaagttcaaggcttcggattggctgttccgtggagcattgatcagtgtactcgctgacaacatagtggacgtgtacatgcacatgcctttcgggaaggacatgtgggatgcacttgaggccaagttcggagtttccgacgccggcagtgagctgtatgtcatggagcagttctatgactacaagatggtcgatgaccgttctgtagtagaacaagctcatgagattcagatgctggctaaggaacttgagaacaacaactgtgagttgccggacaagtttgtggcgggtggcattattgccaaattgccaccttcttggtcggactttgccacttctctaaagcacaagagacaagagttcagtgtttctgatctcattggctctttgggtgttgaggagaaggcgagggcaaaggacaaccggggcaaaaaggttgagggaagttctagtgccaatatggtacagaagaagaaccctcatgcatcccacaacaacaagaaagtcaagcttgatgtcaaacccaaggctacaaccaattttaagaagaaaggcaagggaaaggcaaagggagactgctttgtgtgtggcaagtctgggcactgggccaaggattgtcctgagcgcaaagacaggaagtctgccaacatggtcattagcgagggcggaggaacatcggggtacggtaaattattacctacagttctctctgtttttcattcacctgattggtgggttgatactggtgctaatattcatgtcgggagaggttcctccttgttgatgggaaacgggtcgcttgcagctgttcatggtgttggtacggtcgatctgaagtttacttcaggaaagaccgtgcagctgaagaacatgcagcatgtctcttcaataaagaagaatcttgttatcggctctctattgtgtagagaaggttttagacttgtgtttgaatccaataaatgtgtcgtatctaaatatggaacttttgttggaaaaggttatgacagcggaggcttgttccgcttttctttagatgacatgtgtaataatcataatgttgtgaaccatattagcgagaatgatgagtctaatgtgtggcattcgcgactctgtcatgtgaatttcggttgtatgacgcgcttagctaacatgagtttagttccaaaattcactttggtcaaagattctaagtgccatacttgtgttcaatcgaaacaacctcgcaagcctcacaaggcatctgaggcgaggaatttggcacctctagaacttgttcattccgatttgtgcgaaatgaacggcgtattgactaaagggggaaagaaatatttcatgacactgatagatgattgcactagagtttgttatgtgtatctattgaaaacaaaggatgaagcattgcattactttaagacctataaaactgaggtagaaaaccaacttgaaaggaaaatcaaacggttgaggtctgatagaggtggggagtatttttccaatgagtttacatcattttgcgaagagtttggaattattcatgagaggacgcctccctattcaccccaatcaaatggggtggccgaaagaaagaaccgtactctaactgagatggtgaatgccatgttagacactgcggggctttccaaggaatggtggggtgaggcagttttgactgcgtgtcatgtcctgaataaaattccaatgaagcataaggaaatgacactatttgaggaatgggaaaggaagaaattaaatctctcatacctacgaacatggggctgtttggccaagggaaatcctgaggaggacaacattgtagatactcgtaagagtaagcgacaaagggttgcaaaatcctttggagatgactacattgtatacctcgtggataacaccccaagaaccatagaagaggcatatttatctccttacgctgactactggaaggaagcagtacacagtgagatggactcgattatgtctaatggtacttgggaagtcgttgagcgtccatatgggtgcaagcctgtaggatgcaaatgggttttcaagaaaaagcttaggcttgatggtacaattgaaaagtacaaggcaagacttgtggccaagggttatacccaaaaggaaggcgaggattttttcgacacatactcaccagttgctcgcttgaccacgattcgagtactacttgctctggcagcttctcatggtcttctcgtccatcagatggacgttaagacagctttcctaaacggagagctggaggaggagatctatatggatcaaccagacggcctcaatgtgattgaggaggtcaaggactttctgtccaagagttttgaaatgaaggatttgggagaggctgatgttattcttaacattaagctactaagaggagatgagggtgggattccacttgtgcaatcccactatgtggacaaggttttgagtcgctttggatatagtgactgcaagccagctcctactccttatgatcccagcgtgctattaaggaaaaaccgaagaatagcaagggatcaactgagatattctcaaatcattggttcattgatgtacttggctagtgcaacgaggcctgacatctcatttgctgtaagcaagctgagccggtttgtctcaaatccaggagatgatcattggcaggctctggaaagagtaatgcgctatctaaagggcactatgagctatggaattcactataccgggtacccaaaagtagtagaagggtatagtgactcaaactggatatctgatgctgatgagataaaagccacaagtggatatgtgttcacacttggaggtggcactgtttcctggaagtctagcaagcagaccatcttaacgaggtcaacaatggaagcagaacttacagcactggatactgcgacagttgaggccgagtggctttgtgaactcctgatggatttgccggtggttgaaaaaccagtgccagctatcctaatgaactgtgataatcaaacagtgattattaaagtgaacagttcaaaggacaatatgaagtcatctaggcatatcaagagaagactgaaatctgtcagaaagcagaaaaactccggagtgatagcattggactatgtccaaacggctaaaaatctagcagatcagtttaccaaggggctaccacgtaatgtgatagacagtgcatcgagggaaatgggcttgatacccacctaa

SEQ ID NO: 15389 - DNA, 4005 bp, Oryza sativa
  Clone ID: TFbOSC400718j.C1.o100.np
catgagaacatgctaaattactgagcgcctgaatctaacacgaacgtcaacaccaagggaggcaattctgcctcacaatccagcggagggccattctcggggtcattttcggtagttggctttgctgctgcactgaaaccacatgcttttgatggttctaactataagagatggaaagcacgtgcactattgtggttgacagcgatgcaatgcttctatgtttcatggggcaaacgaagtgaaccacctctttctcctggggaagaggctaagttcgaggcttcggattgcctgttccgtggagcattgatcagtgtactcgctgacaacatagtggacgtgtacatgcacatgccttctgggaaggacatgtgggatgcacttgaggccaagttcggattttctgacgccggcagtgagctgtatgtcatggagcagttctatgactacaagatggtcgatgactgttctgtagtagaacaagctcatgggattcagatgctggctaaggaacttgagaacaacaactgtgagttgccggacaagtttgtggcgggtggcattattgccaaattgccacctgcttggtcggactttgccacttctctaaagcacaagagacaagagttcagtgtttctgatctcattggctctttgggtgttgaggagaaggcaagggcaaaggacgtccggggcaaaaaggttgagggaggttctagtgccaatatggtacagaagaagaaccctcatgcatcccacaacaacaagaaagtcaagcctgatgtcaaacccaaggctgcaaccaactttaagaagaaaggcaagggaaaggcaaaaggagactgctttgtgtgtggcaagtctgggcattgggccaaggactgtcctgagcgcaaaaacaggaagtctgccaacatggtcgttagcgagggcagaggaacatcgaggtacggtaaaatattacctacagttctctctgtttttcactcacctgattggtgggtggatactggtgctaatattcatgtatgtgctgacatttctctgttttcttcttatcaggtcgggagaggttccttgttgatgggaaacaggtcgcttgcggctgttcatggtgttggtacggtcgatctgaagtttacttcgggaaagaccatgcagctgaagaacgtgcagcatgttccttcaataaagaagaatcttgttagcggctctctattgtgtagagaaggttttagacttgtgtttgaatccaataaatgtgtcgtatctaaatatgagacttttgttggaaaaggttatgacagcggaggcttgttccgcttttctttgaatgacatgtgtaataatcataatgttgtgaaccatattagcgagaatgatgagtctaatgtgtggcattcacgactctgtcatgtgaatttcggttgtatgacgcgcttagctaacatgagtttaattccaaaattcactttggtcaaaggttccaagtgccatacttgtgttcaatcgaaacaacctcgcaagcctcacaaggcatctgaggcgaggaatttggcacctctagaacttgtttattccgatttgtgcgaaataaacggcgtgttgactaaagggggaaagaaacatttcatgacactgatagatgattgcactagattttgttatgtgtatctattgaaaacaaaggatgaagcattgcattactttaagacctataaagctgaggtagaaaaccaacttgaaaggaaaatcaaacggttgaggtctgatagaggtggggagtattttttcaatgagtttgcatctttttgcaaagagtttggaattattcatgagaggacgcctccctattcaccccaatcaaatggggtggccgaaagaaagaactgtactctaactgagatggtgaatgccatgttagacattgcggggctttccaaggaatggtgggttgaggcagttttgattgcgtgtcatgtcctgaataaaatgccaatgaagcataaggaagtaacaccattcgaggaatgggaaaggaagaaattaaatctctcatacctacgaacatggggctgtttggccaaggtaaatgtacctatagccaaaaagcggaaacttggaccaaatactgttgattgtgtgttccttagttatgctattcacagtgtgggttatagattcttaataataaactctggagtacccgacatgcatgttggtacaattattatgtccagagatgctacattctttgagaatgaatttcccatgaaacatacacctagcacctctagtcaagaaactgtcacgccccatgagcactttacaccgatagaacacaatgatcaaacgcctgaggaaaatcctgaggaggacaacattgtagatactcgcaagagtaagagacaaagggttgcaaaatcctttggagatgactacattgtatacctcgtggatgacaccccaagaaccatagaagaggcatattcatctcctgacgctgactactggaaggaagcagtacgcagtgaaatggactcgattatgtctaatggtacttgggaagtcgttgagcgtccatatgggtgcaagcccgtaggatgcaaatgggttttcaagaaaaagcttaggcctgatggtacaattgaaaagtacaaggcaaggcttgtggccaagggttatacccaaaaggaaggcgaggacttttttaacacatactcaccagttgctcgcttgaccacgattcgagtactacttgctctggcagcctctcatggtcttctcgtccatcagatggacgttaagacagctttcctgaatggagagctggaggaggagatctatatggatcaaccagacgggtatgtactagaaggtcaggagggaatggtgtgtaaactgttgaaatccttgtatggcctcaagcaagcacctaagcaatggcatgagaagtttgataccacgcttacatctgcaggctttgttgtgaacgaagctgacaaatgtgtgtactatcgctatggtgggggagaaggagtgatcttgtgcttatatgtcgatgacatattgatctttgggaccagcctcaatgtgattgaggaggtcaaggactatctgtccaagagttttgaaataaaggatttgggacaggctgatgttattcttaacatcaaactacaaagaggagatgagggtgggattacacttgtgcaatcccactatgtggacaaggttttgagtcgctttggatatagtgactgcaagccagctcctactccttatgatcccagcgtgctattaaggaaaaaccgaagaatagtaagggatcaactaagatactctcaaatcattggttcattgatgtacctggctagtgcaacgaggcctgacatctcatttgctgtaagcaagctgagtcggtttgtctcaaatccgggagatgatcattggtaggctcgggaaaaagtaatgcgctatctaaagggcactatgagctatggaattcactataccgggtatccaaaagtactagaagggtatagtgactcaaactggatatctgatgctgatgagataaaagccacaagtggatatgtgttcacacttgcaggtggcgctgttttctggaagtcttgcaagcagaccatcttaacgaggtcaacaatggaagcagaacttacagcactagatactgcgacagttgaggccgagtagcttcatgaactcttgatggatttgccggtggttgaaaaaccagtgccagctatcctaatgaactgtgataatcaaacagtgattattaaagtgaacagttcaaaggacaacatgaagtcatctaggcatatcaagagaagactgaaatctgtcagaaagcagaaaaactccggagtgatagctttggactatatccaaacggttagaaatctagcagatcagtttaccaaggggctaccacgtaatgtgatagacagtgcatcgagggaaatgggcttgatacccacc

SEQ ID NO: 15390 - DNA, 4116 bp, Oryza sativa
  Clone ID: TFbOSC400758j.C1.o22.fg
atgtctggagttgccgccgccgctgctggaggagatggcagaggtggtgcgccgccaggagctggagctggaggtggtgcgccaggagctggagccggtgccgcgaacgacaacatcaacggaggcaattctgcctcacaatccagcggagggccatcctcggagtatatccttctcctattccctttgttagcgctatcgctttactgttatgtgctctatgttcctgttcctgacattcatgatgcctctagcatgttattgcgttactgtaatgttcctgttcctgacattcatgatgcgcatggtatgctactggttatgttaagagcaccctacaccgcttatgccatgattattgctttaacattttggattaaaatatgccgattcatgactatatttccaacaatccaaaaatctgataggtcatttttggtagttggctttgctgctgcactgaaaccacatgcttttgatgattctaactataagagatggaaagcacgtgcactactgtggttgacagcgatgcagtgcttctatgtttcacggggcaaacgaagtgaaccacctctttctcctgaggaagaggctaagttcgaggcttcggattgcctgttccgtggagcattgatcagtgtactcactgacaacatagtggacgtgtacatgcacatgccttccgggaaggatatgtgggatgcacttgaggccaagttcagagtttctgacgctggcagtgagctgtatgtcatggagcagttatatgactacaagatggtcgatgaccgttctgtagtagaacaagctcatgagattcaaatgctggctaaggaacttgagaacaacaactgtgagttgccggacaagtttgtggcgggtggcattattgccaaactgccaccttcttggtcggactttgccacttctctaaagcacaagagacaagagttcagtgtttctgatctcattggctctttgggtgttgaggagaaggcgagggcaaaggacgtccggggcaaaaaggttgagggaggttctagtgccaatatggtacagaagaagaaccctcatgcatcccacaacaacaagaaagtcaagcctgatgtcaaacccaaggctgcaaccaacattaagaagaaaggtaagggaaagtcaaagggagactgctttgtgtgtggcaagtctgggcattgggccaaggactgtcctgagcgcaaagacaggaagtctgccaacatggtcattagcgagggcggaggaacatcagggtacggtaaaatattacctacagttctctctgttcttcactcacctgattggtgggtggacactggtgctaatattcatgtcgggagaggttcctccttgttgatgggaaacgggtcgcttgcggctgttcatggtgttggtacggtcgatctgaagtttacttcgggaaagaccgtgcagctgaagaatgtgcagcatgtcccttcaataaagaagaatcttgttagcggctctctattgtgtagagaaggttttagacttgtgtttgagtccaataaatgtgccgtatctaaatatgggacttttgttggaaaaggttccaagtgccatacttgcgttcaatcgaaacaaactcgcaagcctcacaaggcatctgaggcgaggaatttggcacctctagaacttgttcattccgatttgtgcgaaatgaacggcgtgttgactaaaaggggaaagaaatatttcatgacactgatggatgattgcactagattttgctatgtgtatctattgaaaacaaaggatgaggcattgcattactttaaaatctataaagctgagatagaaaaccaacttgaaaggaaaatcaaacggttgaggtctgatagaggtggggagtatttttccaatgagtttgcatctttttgcgaagagtttagaattattcatgaaaggacgcctccctattcaccccaatcaaatgggatggccgaaagaaagaaccatactctaattgagatggtgaatgctatgttagacactgcggggctttccaaggaatggtggggtgaggcagttttgaccgcctgtcatgtcctgaataaaattccaatgaagcataaggaagtaacaccattcgaggaatggcaaaggaagaaattaaatctctcatacctacaaacatggggctgtttggccaaggtaaatgtacctatagccaaaaagcggaaacttggaccaaatactgttgattgtgtgttccttggttatgctattcacagtgtgggttatagattcttaatagtaaactttggtgtacccgacatgcatgttggtacaattcttgagtccagagatgctacattctttgataatgaatttcccatgaaacatacacctagcacttctagtaaagaaactgtcatgccccatgagcactttgcaccgatagaacacaatgatcaaacgcctgaggaaaatcctgaggaggacaacattgtagatactcgcaagagtaagagaaaaagggttgcaaaatcctttggagatgactacattgtatacctcgtggatgacaccccaagaaccatagaagaggcatattcatctcctgacgctgactactggaaggaagcagtacgcagtgaaatggactcgattatgtctaatggtacttgggaagtcgttgagcatccatatgggtgcaagcccctaggatgtaaatgggttttcaagaaaaagcttagacctgatggtacaattgaaaagtacaaggcaaggtttgtggccaagggttatacccaaaaggaaggcgaggacttcttcgacacatactcaccagttgctcgcttgaccacgattcgagtactacttgctctggcagcctctcatggtcttctcgtccatcagatggacgttaagacaactttcctaaacggagagctggaggaggagatctatatggatcaaccagatgggtatatactaaaaggtcaggagggaatggtgtgtaaattgttgaaatccttgtatggcctcaagcaagcacctaagcaatggcatgagaagtttgacaccacgcttacatctgcaggctttgttgtgaacgaagctgacaaatgtgtgtactatcgctatggtgggggagaagaagtgatcttgtgcctatatgtcgatgacatattgatctttgggaccagccttaatgtgattgaggaggtcaaggactatctgtccaagagttttgaaatgaaggatttgggagaggctgatgttattcttaacatcaaactacaaagaggagatgagggtgggattacacttgtgcaatcccactatgtggacaaggttttgagttggtttggatatagtgaccgcaagccagctcctactccttatgatcccagcgtgctattaaggaaaaaccgaaaaatagcaagggatcaactgagatactctcaaatcattggttcattgatgtacttggctagtgcaatgaggcctgacatctcatttgctgtaagcaagctgagccggtttgtcttaaatccgggagatgatcattggcaggctctggaaagagtaatgcgctatataaagggcactatgagctatggaattcactataccgggtatccaaaagtactagaagggtatagtgactcaaactggatatctgatgctgatgagataaaagccacaagtggatatgtgttcacacttggagggggcgctgtttcctgcaagtcttgcaagcagaccatcttaacgaggtcagcaatgaaagcagaacttacagcactagatactgcgacagttgaggccgagtggcttcgtgaactcctgatggatttgccggtggttgaaaaaccagtgccagctatcctaatgaactgtgataatcaaacagtgattattaaagtgaacagttcaaaggacaacatgaagtcatctaggcacatcaagagaagactgaaatctgtcagaaagcagaaaaactccgaagtgatagcattggactatgtccaaacggctagaaatctgacagatcagtttactaaggggctaccacgtaatgtgatagacagtgcatcgagggaaatgggcttgatacccacctaa

SEQ ID NO: 15391 - DNA, 3762 bp, Oryza sativa
  Clone ID: TFbOSC400993j.C1.o11.fg
atgcagtgcttttatgtttcacggggcaaacgaagtgaaccacctctttttcctgaggaagaggccatgttcgaggcttcggattgcctgttccgtggagcattgatcagtgtactcgctgacaacatagtggacgtgtacatgcacatgccttctgggaaggacatgtgggatgcacttgaggccaagttcggagtctctgacgccggcagtgagctgtatgtcatggagcagttctatgactacaagatggtcgatgatcgttctgtagtagaacaagctcatgagattcagatgctggctaaggaacttgagaacaacaactgtgagttgccggacaagtttgtggcgggtggcattattgccaaactaccaccttcttggtcggactttgccacttctctaaagcacaagagacaagagttcagtgttcctgatctcattggctctttgggtgttgaggagaaggcgagggcaaaggacgtccggggcaaaaaggttgagggaggttctagtgccaatatggtacagaagaagaaccctcatgcatcccacaacaacaagaaagtcaagcctgatgtcaaacccaaggctgcaaccaattttaagaagaagggcaagggaaaggcaaagggagactgctttgtgtgtggcaagtctgggcattgggccaaggactgtcctgagcgcaaagacaggaagtctgccaacatgatcattagcgagggcggaggaacatcggggtacggtaaaatattacctacagttctctctgtttttcattcacctgattggtgggtggatactggtgctaatattcatgtatgtgctgatatttctctgttttcttcttatcaggtcgggagaggttcctccttgttgatgggaaacgggtcgcttgcggctgttcacggtgttggtacggtcgatctaaagtttacttcgggaaagaccgtgcagctgaagaacgtgcagcatgtcccttcaataaagaagaatctagttagcggctctctattgtgtagagaaggttttagacttgtgtttgagtccaataaatgtgtcgtatctaaatatgggacttttgttgaaaaaggttatgacagcggaggcttgttccgcttttctttgaatgacatgtgtaataatcataatgctgtgaaccatattagcgagaatgatgagtctaatgtgtggcattcgcgactctgtcatgtgaatttcgggtgtatgacgcgcttagctaacatgagtttaattccaaaattcactttggtcaaaggttccaagtgccatacttgtgttcaatcgaaacaacctcgcaagcctcacaaggcatctgaggcgaggaatttggcacctctagaacttgttcattctgatttgtgcgaaatgaacggcgtgttgactagattttgctatgtgtatctattgaaaacaaaggatgaggcattgcattactttaaaatctataaagctgagatagaaaaccaacttgaaaggaaaatcaaacagttgaggtctgatagaggtggggagtatttttccaatgagtttgcatccttttgcgaagagtttggaattattcatgagatgacgcctccctattcaccccaatcaaatggggtggccgaaagaaagaaccatactctaactgagatggtgaatgccatgttagacactgcggggctttccaaggaatggtggggtgaagcagttttgactgcgtgtcatgtcctgaataaaattccaatgaagcaaaaggaagtaacaccattcgaggaatgggaaaggaagaaattaaatctctcatacctacgaatatggggctgtttggccaaggtaaatgtacctatagccaaaaagcggaaacttggaccaaaaactgttgattgtgtgtttcttggttatgctatccacagtgtgggttatagattcttaatagtaaactctggagtacccgacatgcatgctggtacaattcttgagtccagagatgctacattctttgagaatgaatttcctatgaaatatacacctagcacttctagtaaagaaactgtcatgccccatgagcactatgcaccgatagaacacaatgatcaaacgcctgaggaaaatcctgaggaggacaacattgtagatactcgcaagagtaagagacaaagggttgcaaaatcctttggagatgactacattgtatacctcgtagatgacaccccaagaaccatagaagaggcatattcatctcctgacgctgactactggaaggaagcagtacgcagtgaaatggactcgattatgtctaatggtacttgggaagtcgttgagcgtccatatgggtgcaagcccgtaggatgcaaatgggttttcaagaaaaagcttaggcctgatggtacaatcgaaaagtacaaggcaaggcttgtggccaagggttatacccaaaaagaaggcgaggacttcttcgacacatactcaccagttgctcgcttgaccacgattcgagtactacttgctctggcagcctctcatagtcttctcgtccatcagatggacgttaagacagctttcctaaacggagagctggaggaggagatctatatggatcaaccagacgggtatgtactagaaggtcaggagggaatggtgtgtaaactattgaaatccttgtatggcctcaagcaagcacctaagcaatggcatgagaagtttgacaccacgcttacatctgcaggctttgttgtgaacgaagctgacaaatgtgtatactatcgctatggtgggggagaaggggtgatcttgtgcttatatgtcgatgacatactgatctttgggaccagccttaatgtgattgaggaggtcaaagactatctgtccaataattttgaaatgaaggatttgggagaggctgatgttattcttaacatcaaactacaaagaggagatgagggtgggattacacttgtgcaatcccactatgtggacaaggttttgagtcgctttggatatagtgactgcaagccagctcctactccttacgatcccagcgtgctattaaggaaaaaccgaagaatagtaagagatcaactgagatactctcaaatcattggttcattgatgtacttggctagcgcaacgaggcctgacatctcatttgctgtaagcaagctgagccggtttgtctcaaatccgggagacgatcattggcaggctctggaaagagtaatgcgctatctaaagggcactttgagctatggaattcactataccgggtatccaaaagtactagaagggtatagtgactcaaactggatatctgatgctgatgagataaaagccacaagtggatatgcgttcacacttggaggtggcgctgtttcctggaagtcttgcaagcagaccatcttaacgaggtcaacaatggaagcagaacttacagcactagatactgcgacagttgagaccgagtggcttcgtgaactcctgatggatttgccggtggttgaaaaaccagtgccagctatcctaatgaactgcgataatcaaacagtgattattaaagtgaacagttcaaaggacaacatgaagtcatctagacacatcaagagaaaactgaaatctgtcagaaagcagaaaaactccggagtgatagcattggactatgtccaaacggctagaaatctggcagatcagtttaccaaggggctaccacgtaatgtgatagacagtgcatcgagggaaatgggcttgatacccacctaa

SEQ ID NO: 15392 - DNA, 4314 bp, Oryza sativa
  Clone ID: TFbOSC400993j.C1.o82.np
atgtctggagttgccgccgctactgctggcggaggtggtacgccgccgacaggagctggatctggagctggtgcgccaggaggtgccgtgaacgacaacaacaacggagtcaattctgcctcaccatccagcggagggccattctcggggtatactcttctcctcctgctactgttgttagcgctattcctgttcccattgttagcgctatcgctatactatgtgcgctatgttcttgttcctgttctacatgatgcctctagcatgttatcgcgttactggtatgttcctgttcctgacattcatgatgcgcatagtatgctactggttatgttaagatcaccctacactgcttatgccatgatcattgctttaactttttggattaaaatatgccgattaatgactatatttccaacaatccaaaaacctgataggtcattttcggtagttggctttgctgctgcactgaaaccacatgcttttgatggttcaaactataagagatggaaagcacgtgcactattgtggttgacagcgatgcagtgcttctatgtttcacggggcaaacgaagtgaaccacctctttctcctgaggaagaggctaagttcgaggcttcggattgcctgttccgtggagcattgatcagtgtactcgctgacaacatagtggacgtgtacatgcacatgccttctgggaaggacatgtgggatgcacttgaggccaagttcggagtttctgacgccggcagtgagctgtatgtcatggagcagttctatgactacaagatggtcgatgaccgttctgtagtagaacaagctcatgagattcagatgctggctaaagaacttgagaacaacaactgtgagttgccggacaagtttgtggcgggtggcattattgccaaactaccaccttcttggtcggactttgccacttctctaaagcacaagagacaagagttcagtgttcctgatctcattggctctttgggtgttgaggagaaggcgagggcaaaggacgtgcggggcaaaaaggttgagggaggttctagtgccaatatggtacagaagaagaaccctcatgcatcccacaacaacaagaaagtcaagcctgatgtcaaacccaaggctgcaaccaattttaagaagaaaggcaagggaaaggcaaagggagattgctttgtgtgtggcaagtctgggcattgggccaaggactgtcctgagcgcaaagacaggaagtctaccaacatggtcattagcgagggcagaggaacatcggggtacggtaaaatattacctacagttctctctgtttttcattcacctgattggtgggtggatactggtgctaatattcatgtatgtgctgacatttctctgttttcttcttatcaggtcgggagaggttcctccttgttgatgggaaacgggtcgcttgcggctgttcatggtgttggtacggtcgatctgaagtttacttcgggaaagaccgtgcagctgaagaacgtgcagcatgtcccttcaataaagaagaatctagttagctgctctctattgtgtagagaaggttttagacttgtgtttgagtccaataaatgtgtcgtttctaaatatgggacttttgttggaaaaggttatgacagcggaggcttgttccgcttttctttgaatgacatgtataataatcataatgctgtgaaccatattagcgagaatgatgagtctaatgtgtggcattcgcgactctgtcatgtgaatttcgggtgtatgacgcgcttagctaacatgagtttaattccaaaattcactttggtcaaaggttccaagtgccatacttatgttcaatcgaaacaacctcgcaagcctcacaaggcgtctgaggcgaggaatttggcacctctagaacttgttcattccgatttgtgcgaaatgaacggcgtgttgactaaagggggaaagaaatatttcatgacactgatagatgattgcactagattttgctatgtgtatctattgaaaacaaaggatgagacattgcattactttaaaatctataaagctgaggtagaaaaccaacttcaaaggaaaatcaaactgttgaggtctgatagaggtggggagtatttttccaatgagtttgcatccttttgccaagagtttggaattattcatgagatgacgcctccctattcacccctatcaaatggggtggccgaaagaaagaaccgtactctaactgagatggtgaatgccatgttagacactgcggggctttccaaggaattgtggggtgaggcagttttgactgcgtgtcatatcctgaataaaattccaatgaagcataaggaagtaacaccattcgaggaatgggaaaggaagaagttaaatctctcatacctacgaacatggggctgtttggccaaggtaaatgtacctatagccaaaaggcggaaacttggaccaaaaactgttgattgtgtgtttcttggttatgctatccacagtgtgggttatagattcttaatagtaaactctggagtacccgacatgcatgctggtacaatttttgagtccagagatgctacattctttgagaatgaatttcctatgaaatatacacctagcacttctagtaaagaaactgtcatgccccatgagcactttgcaccgatagaacacaatgatcaaacgcctgaggaaaatcctgaggaggacaacattgtagatgctcgcaagagtaagagacaaagggttgcaaaatcctttggagatgactacattgtatacctcgtagatgacaccccaagaaccatagaagaggcatattcatctcctgacgctgactactggaaggaagcagtacgcagtgaaatggactcgattatgtctaatggtacttgggaagtcgttgagcgtccatatgggtgcaagcccgtaggatgcaaatgggttttcaagaaaaagcttaggcctgatggtacaatcgaaaagtacaaggcaaggcttgtggccaagggttatacccaaaaggaaggcgaggacttcttcgacacatactcaccagttgctcgcttgaccacgattcgagtactacttgctctggcagcctctcatggtcttctcgtccatcagatggacgttaagacagctttcctaaacggagagctggaggagaagatctatatggatcaaccggacgggtatgtactagaaggtcaggagggaatggtgtgtaaactattgaaatccttgtatggcctcaagcaagcacctaagcaatggcatgaaaagtttgacaccacgcttacatctgcaggctttgttgtgatcgaagctgacaaatgtgtatactatcgctatggtgggggagaaggggtgatcttgtgcttatatgtcgatgacatactgatctttgggaccagccttaatgtgattgaggaggtcaaagactatctgtccaagagttttgaaatgaaggatttgggagaggctgatgttattcttaacatcaaactacaacgaggagatgagggtgggattacacttgtgcaatcccactatgtggacaaggttttaactcctactccttatgatcccagcgtgctattaaggaaaaaccgaagaatagtaagggatcaactgagatactctcaaatcattggttcattgatgtacttggctagcgcaacgagacctgacatctcatttgctgtaagcaagctgagccggtttgtctaaaatccgggagatgatcattggcaggctctggaaagagtaatgcgctatctaaagggcactatgagctatggaattcactataccgggtatccaaaagtactagaagggtatagtgactcaaactggatatctaatgctgatgagataaaagccacaagtggataagtgttcacacttggaggtggcgctgtttcctggaagtcttgcaagcagaccatcttaacgaggtcaacaatggaagcagaacttacagcactagatactgcgacagttgaggccgagtggcttcgtgaactcctgatggatttgccggtggttgaaaaaccagtgccagctatcctaatgaactgcgataattaaacagtgattattaaagtgaacaattcaaaggacaacatgaagtcatctagacacatcatgagaagactgaaatctgtcagaaagcagaaaaactccggagtgatagcattggactatgtccaaacggctagaaatctggcagatcagtttaccaaggggctaccacgtaatgtgatagacagtgcatcgagagaaatgggcttgatacccacc

SEQ ID NO: 15393 - DNA, 4314 bp, Oryza sativa
  Clone ID: TFbOSC401126j.C1.o85.np
atgtctggagttgccgccgccactgctggcggaggtggtacgccgccgccgccgacaggagctggatctggatctggagttggtgcgccaggaggtgccgtgaacgacaacaacaacggaggcaattctgcctcaccatccagcggagggccattctcggggtataatcttctcctcctgctactgttgttagcgctattcctgttcccattgttagcgctatcgctatattatgtgcgctatgttcttgttcctgttctacatgatgcctctagcatgttatcgcgttactggtatgttcctgttcctgacattcatgatgcgcatagtatgctactggttatgttaagatcaccctacactgcttatgccatgatcattgtttcaatttcttggattaaaatatgccgattaatgactatatttccaacaatccaaaaacctgataggtcattttcggtagttggctttgctgctgcactgaaaccacatgcttttgatggttcaaactataagagatggaaagcacgtgcactattgtggttgacagcgatgcagtgcttctatgtttcacggggcaaacgaagtgaaccacctctttctcctgaggaagaggccaagttcgaggcttcggattgcctgttccgtggagcattgatcagtgtactcgctgacaacatagtggacgtgtacatgcacatgccttctaggaaggacatgtgggatgcacttgaggccaagttcggagtctctgacgccggcagtgagctgtatgtcatggagcagttctatgactacaagatggtcgatgaccgttctatagtagaacaagctcatgagattcagatgctggctaaggaacttgagaacaacaactgtgagttgccggacaagtttgtggcgggtggcattattgccaaactaccaccttcttggtcggactttgccacttctctaaagcacaagagacaagagttcagtgttcctgatctcattggctctttgggtgttgaggagaaggcgagggcaaaggacgtccggggcaaaaaggttgagggaggttctagtgccaatatggtacagaagaagaaccctcatgcatcccacaacaacaagaaagtcaagcctgatgtcaaacccaaggctgcaaccaattttaagaagaagggcaagggaaaggcaaagggagactgctttgtgtgtggcaagtctgggcattgggccaaggactgtcctgagcgcaaagacaggaagtctgccaacatgatcattagcgagggcggaggaacatcggggtacggtaaaatattacctacagttctctctgtttttcattcacctgattggtgggtggatactggtgctaatattcatgtatgtgctgacatttctttgttttcttcttatcaggtcgggagaggttcctctttgttgatgggaaacgggtcgcttgcggctgttcatggtgttggtacggtcgatctgaagtttacttcgggaaagaccgtgcagctgaagaacgtgcagcatgtcccttcaataaagaagaatctagttagcggctctctattgtgtagagaaggttttagacttgtgtttgagtccaataaatgtgtcgtatctaaatataggacttttgttggaaaaggttatgactgcggaggtttgttccgcttttctttgaatgacatgtgtaataatcataatgctgtgaaccatattagcgagaatgatgagtctaatgtgtggcattcgcgactctgtcatgtgaatttcgggtgtatgacgcgcttagctaacatgagtttaattccaaaattcactttggtcaaaggttccaagtgctatacttgtgttcaatcgaaacaacctcgcaagcctcacaaggcatctgaggcgaggaatttggcacctctagaacttgttcattccgatttgtgcgaaatgaacggcgtgttgactaaagggggaaaaaaatatttcatgacactgatagatgattgcactagattttgctatgtgtatctattgaaaacaaaggatgaggcattgcattactttaaaatctatagagctgaggtagaaaaccaacttgaaaggaaaatcaaacggttgaggtctgatagaggtggggagtatttttccaatgagtttgcatccttttgcgaagagtttggaattattcatgagatgacgcctccctattcaccccaatcaaatggggtggccgaaagaaagaaccgtactctaactgagatggtgaatgccatgttagacactgcggggctttccaaggaatggtggggtgaggcagttctgactgcgtgtcatgtcctgaataaaattccaatgaagcataaggaggtaacacaattcgaggaatgggaaaggaagaaattaaatctctcatacctacgaacatggggctgtttggccaaggtaaatgtacctatagccaaaaagcggaaacttggaccaaaaactgttgattgtgtgtttcttggttatgctatccacagtgtgggttatagattcttaatagtaaactctggagtacccgacatgcatgctggtacaattcttgagtccagagatgctacattctttgagaatgaatttcctatgaaatatacacctagcacttctagtaaagaaactgtcatgccccgtgagcactttgcaccgatagaacacaatgatcaaacgcctgaggaaaatcctgaggaggacaacattgtagatactcgcaagagtaagagacaaagggttgcaaaatcctttggagatgactacattgtatacctcgtagatgacaccccaagaaccatagaagaggcatattcatctcctgacgctgactactggaaggaagcagtacgcagtgaaatggactcgattatgtctaatggtacttgggaagtcgttgagcgtccatatgggtgcaagcccgtaggatgcaaatgggttttcaagaaaaagcttaggcctgatggtacaatcgaaaagtataaggcaaggcttgtggccaagggttatacccaaaaagaaggcgaggacttcttcgacacatactcaccagttgctcgcttgaccacgattcgagtactacttgctctggcagcctctcatggtcttctcgtccatcagatggacgttaagacagctttcctaaacggagagctggaggaggagatctatatggatcaaccagacgggtatgtactagaaggtcaggagggaatggtgtgtaaactattgaaatccttgtatggcctcaagcaagcacctaagaaatggcatgagaagtttgacaccacgcttacatctgcaggctttgttgtgaacgaagctgacaaatgtgtatactatcgctatggtgggggagaaggggtgatcttgtgcttatatgtcgatgacatactgatctttgggaccagccttaatgtgattgaggaggtcaaagactatctgtccaagaattttgaaatgaaggatttgggagaggctgatgttattcttaacatcaaactacaaagaggagatgagggtgggattacacttgtgcaatcccactatgtggacaaggacgtgacacctactccttatgatcccagcgtgctattaaggaaaaaccgaagaatagcaagggatcaactaagatactctcaaattattggttcattgatgtacttgtatagcgcaacgaggcctgacatctcatttgctgtaagcaagctgagccggtttgtctcaaatccgggagatgatcattggcaggctctggaaagagtaatgcgctatctaaagggcactatgagctatggaattcactataccgggtatccaaaagtactagaagggtatagtgactcaaactggatatctgatgctgatgagataaaagccacaagtggatatgcgttcacacttggaggtggcgctgtttcctggaagtcttgcaagcagaccatcttaacgaggtcaacaatggaagcagaacttacagcactagatactgcgacagttgaggccgagtggcttcgtgaactcctgatggatttgccggtggttgaaaaaccagtgccagctatcctaatgaactgcgataatcaaacagtgattattaaagtgaacagttccaaggacaacatgaagtcatctagacacatcaagagaagactgaaatctgtccactccggagtgatagcattggactatgtccaaacggctagaaatctggcagatcagtttaccaaggggctaccacgtaatgtgatagacagtgcatcgagggaaatggacttgatacccacc

SEQ ID NO: 15394 - DNA, 4059 bp, Oryza sativa
  Clone ID: TFbOSC401217j.C1.o36.fg
atgtcgaacactggagacaaggagaaggagactcccgtcaacaccaacggaggcaatactgcctcaaactccagcggaggaccattcttggggtataaccttattacattatttcaattagaagttttactgttaatgttcatcgcaatgtcaacattgtgtcattatgtgattgttgatgcttattcaacgttaagcatgctcatgttgattacattcaccactatcactggatcaaatcctattgtaaatatcatgtttattatcttgttattttggattaaaatatgccgaattatgaccaaatttccaacaatccaaaaacctgataggtcattttcggtagttggctttgctgctgcactgaaaccacatgcttttgatggttcaaactataagagatggaaagcacgtgcactattgtggttgacagcgatgcagtgcttctatgtttcacggggcaaacgaagtgaaccacctctttctcctgaggaagaggctaagttcgaggcttcggattgcctgttccgtggagcattgatcagtgtactcgctgacaacatagtggacgtgtacatgcacatgccttctggaaaggacatgtgggatgcacttgaggccaagttcggagtttctgacgccggcagtgagctgtatgttatggagcagttctatgactacaagatggtcgatgaccgttctgtagttgaacaagctcatgagattcagatgttggcaaaggaacttgagaacaacaactgtgagttgcctgacaagtttgtggcaggtggcattattgccaaactaccaccttcttggtcggactttgccacttctctaaagcacaagagacaagagttcagtgttcctgatctcattggctctttgggtgttgaggagaaggcgagggcaaaggacgtccggggcaaaaaggttgagggaggttctagtgccaatatggtacagaagaagaaccctcatgcatcccacaacaacaagaaagtcaagcctgatgtcaaacccaaggctgcaaccaattttaagaagaaaagtaagggaaaggcaaagggagactgctttgtgtgtggcaagtctgggcattgggccaaggactgtcctgagcgcaaagacaggaagtctgccaacatgatcattagcgagggcggaggaacatcggggtacggtaaaatattacctacagttctctctgtttttcattcacctgattggtgggtggacactggtgctaatattcatgtcgggagaggttcctccttgttgatgggaaacgggtcgcttgcggctgttcatggtgttggtacggtcgatctgaagtttacttcgggaaagaccgtgcagctgaagaacgtgcagcatgtcccttcaataaagaagaatctagttagcggctctctattgtgtagagaaggttttagacttgtgtttgagtccaataaatgtgtcgtatctaaatatgggacttttgttggaaaaggttatgacagcggaggcttgttccgcttttctttgaatgacatgtgtaataatcataatgctgtgaaccatattagcgagaatgatgagtctaatgtgtggcattcgcgactctgtcatgtaaatttcggttgtatgacgcgcttagctaacatgagtttaattccaaaattcactttggtaaaaggttccaagtgccatacttgtgttcaatcgaaacaacctcgcaagcctcacaaggcatctgaggcgaggaatttggcacctctagaacttgttcattccgatttgtgcgaaatgaacggcgtgttgactaaaggggtaaagaaatatttcatgacactgatagatgattgcactagattttgctatgtgtatctattgaaaacaaaggatgaggcattgcattgctttaaaatctataaagctgaggtagaaaaccaacttgaaaggaaaatcaaacggttgaggtctgatagaggtggggagtatttttccaatgagtttgcatccttttgcgaagagtttggaattattcatgagatgacgcctccctattcaccccaatcaaatggggtggccgaaagaaagaaccgtactctaactgagatggtgaatgccatgttagacactgcggggctttccaaggaatggtggggtgaggcagttttgactgcgtgtcatgtcctgaataaaattccaatgaagcataaggaagtaacaccattcgaggaatgggaaaggaagaaattaaatctctcatacctacgaacatggggctgtttggccaagtccagagatgctacattctttgagaatgaatttcctatgaaatatacacctagcacttctagtaaagaaactgtcatgccccatgagcactttgcaccgatagaacacaatgatcaaacgcctgaggaaaatcctgaggaggacaacattgtagatactcgcaagagtaagagacaaagggttgaaaaatcctttggagatgactacattgtatacctcgtggatgacaccccaagaaccatagaagaggcatattcatctcctgacgctgactactggaaggaagcagtatgcagtgaaatggactcgattatgtctaatggtacttgggaagtcgttgagcgtccatatgggtgcaagcccgtaggatgcaaatgggttttcaagaaaaagcttaggcctgatagtacaatcgaaaagtacaaggcaaggcttgtggccaagggttatacccaaaaggaaggcgaggacttcttcgacacatactcaccagttgctcgcttgaccacgattcgagtactacttgctctggcagtctctcatggtcttctcgtccatcagatggacgttaagacagctttcctaaacggagagctggaggaggagatctatatggatcaaccagacgggtatgtactagaaggtcaggagggaatggtgtgtaaactattgaaatccttgtatggcctcaagcaagcacctaagcaatggcatgagaagtttgacaccacgcttacatctgcaggctttgttgtgaacgaagctgacaaatgtgtatactatcgctatggtgggggagaaggggtgatcttgtgcttatatgtcgatgacatactgatctttgggaccagccttaatgtgattgaggaggtcaaagactatctgtccaagaattttgaaatgaaggatttgggagaggctgatgttattcttaacatcaaactacaaagaggagatgagggtgggattacacttgtgcaatcccactatgtggacaaggttttgagtcgctttggatataatgactgcaagccagctcctactccttatgatcccagcgtgctattaaggaaaaaccgaagaatagtaagggatcagctgagatactctcaaatcattggttcattgatgtacttggctagcgcaacgaggcctgacatctcatttgctgtaagcaagctgagccggtttgtctcaaatccgggagatgatcattggcaggctctggaaagagtaatgcgctatctaaagggcactatgagctatggaattcactataccgggtatccaaaagtactagaagggtatagtgactcaaactggatatctgatgctgatgagataaaagccacaagtggatatgtgttcacacttggaggtggcgctgtttcctggaagtcttgcaagcagaccatcttaacgaggtcaacaatggaagcagaacttacagcactagatactgcgacagttgaggccgagtggcttcgtgaactcctgatggatttgccggtggttgaaaaaccagtgccagctatcctaatgaactgcgataatcaaacagtgattattaaagtgaacagttcaaaggacaacatgaagtcatctagacacatcaagagaagactgaaatctgtcagaaagcagaaaaactccggagtgatagcattggactatgtccaaacggctagaaatatggcagatcagtttaccaaggggctaccacgtaatgtgatagacagtgcatcgagggaaatgggcttgatacccacctaa

SEQ ID NO: 15395 - DNA, 3123 bp, Oryza sativa
  Clone ID: TFbOSC401279j.C1.o23.gm
atgcagtgcttctatgtttcacggggtaaacgaagtgaaccacctctttctcctgaggaagaggctaagttcgaggcttcggattgcctgttccgtggagcattgatcagtgtactcgctgacaacatagtggacgtgtacatgcacatgccttctgggaaggacatgtgggatgcacttgaggccaagttcggagtttctgacgccggcagtgagctgtatgtcatggagcagttctatgactacaagatggttgatgaccgttctgtagtagaacaagctcatgagattcagatgctggctaaggaacttgagaacaacaactgtgagttgccggacaagtttgtggcgggtggcattattgccaaactaccaccttcttggtcggactttgccacttctctaaagcacaagagacaagagttcagtgttcctgatctcattggctctttgggtgttgaggagaaggcgagggcaaaggacgtccggggcaaaaaggttgagggaggttctagtgccaatatggtacagaagaagaaccctcatgcatcccacaacaacaagaaagtcaagcctgatgtcaaacccaaggctgcaaccaattttaagaagaaaggcaagggaaaggcaaagggagactgctttgtgtgtggcaagtctgggcattgggccaaggactgtcctgagcgcaaagacaggaagtctgccaacatgatcattagcgagggcggaggaacatcgggagatgctactttctttgagaatgaatttcctatgaaatatacacctagcacttctagtaaagaaactgtcatgccccatgagcactttgcaccgatagaacacaatgatcaaacgcctgaggaaaatcctgaggaggacaacattgtagatactcgcaagagtaagagacaaagggttgcaaaatcctttggagatgactacattgtatacctcgtggatgacaccccaagaaccatagaagaggcatatttatctcctgacgctgactactggaaggaagcagtacgcagtgaaatggactcgattatgtctaatggtacttgggaagtcgttgagcgtccatatggatgtaagcccgtaggatgcaaatgggttttcaagaaaaagcttaggcctgatggtacaatcgaaaagtataaggcaaggcttgtggccaagggttatacccaaaaggaaggcgaggatttcttcgacacatattcaccagttgctcgcttgactacgattcgagtactacttgctctggcagcctctcatggtcttctcgtccatcagatggacgttaagacagctttcctaaatggagagctggaggaggagatctatatggatcaaccagacgggtatgtactagaaggtcaggagggaatggtgtgtaaactattgaaatccttgtatggcctcaagcaagcacctaagcaatggcatgagaagtttgacaccacgcttacatctgcaggctttgttgtgaacgaagctgacaaatgtgtatactatcgctatggtgggggagaaggggtgatcttatgcttgtatgtcgatgacatactgatctttgggaccagccttaatgtgattgaggaggtcaaagactatctgtccaagagtgatttgggagaggctgatgttattcttaacatcaaactacaaagaggagatgagggtgggattacacttgtgcaatcccactatgtggacaaggttttgagtcgctttggatatagtgactgtaagccagctcctactccttatgatcccagcgtgctattaaggaaaaaccgaagaatagcaagggatcaactgagatactctcaaatcattggttcattgatgtacttggctagcgcaacgaggcctgacatctcatttgctgtaagcaagctgagccggtttgtctcaaatccgggagatgatcattggcaggctctggaaagagtaatgcgctatctaaagggcactatgagctatggaattcactataccgggtatccaaaagtactagaagggtatagtgactcaaactggatatctgatgctgatgagataaaagccacaagtggatatgcgttcacacttggaggtggcgctgtttcctggaagtcttgcaagcagaccatcttaacgaggtcaacaatggaagcagaacttacagcactagatactgcgacagttgaggctgagtggcttcgtgaactcctgatggatttgccggtggttgaaaaaccagtgccagctatcctaatgaactgcgataatcaaacagtgattattaaagtgaacagttcaaaggacaacatgaagtcatctagacacatcaagagaagactgaaatctgtcagaaagcagaaaaactccggagtgatagcattggactatgtccaaacggctagaaatctggcagatcagtttaccaaggggctaccacccactaacccacgttcccacgattccctccgcaacagcgcgtccacgttctttctcctgatagataaggaggccgcgagtctgatccgagttcctcgcttctttcccggtttttggggagtgcctcctgcacgactgctcatcgccatgtctggagttgctgccgccgctattggcggaggtggtgcgccgccgccgacgccgacaggagctggatccggagctggtgcgccaggaggaggtgccgtgaacgactacaacaacggaggcaattctgcctcaccatccagtggagggccattctcgggcaccacctttcgctttcggagagcaaactatgttacacgcaattttgcaattgccgctgtgacagttttcttcccccgtccagaagaaggcccttcagcgcttgtcaatagtgctcatcatcagtttgatcgtgtccggaggtgtgaggtcgtcggcgagatgagctccggcggcgaggaggggaagacgtcgtggccggaggtggtggggctgcgggcggaggaggcgaagaaggtgatcctcaaggacatgcccgacgccgacatcgtcgtggttccggtggggacgccggtgaccatggacttccgccccaaccgcgtccgcatcttcgtcgacaccgtcgccggcacccccaccatcggctag

SEQ ID NO: 15396 - DNA, 3807 bp, Oryza sativa
  Clone ID: TFbOSC401325j.C1.o27.fg
atgcagtgcttctatgtttcacggggcaaacgaagtgaaccacctctttctcctgaggaagaggctaagttcgaggcttcggattgcctgttccgtggagcattgatcagtgtactcgctgacaacatagtggacgtgtacatgcacatgccttctgggaaggacatgtgggatgcacttgaggccaagttcggagtttctgacgccggcagtgagctgtatgttatggagcagttctatgactacaagatggtcgatgaccgttctgtagttgaacaagctcatgagattcagatgctggctaaggaacttgagaacaacaactgtgagttgccggacaagtttgtggcaggtggcattattgccaaactaccaccttcttggtcggactttgccacttctctaaagcacaagagacaagagttcagtgttcttgatctcattggctctttgggtgttgaggagaaggcgagggcaaaggacgtccggggcaaaaaggttgagggaggttctagtgccaatatggtacagaagaagaaccctcatgcatcccacaacaacaagaaagtcaagcctgatgtcaaacccaaggctgcaaccaattttaagaagaaaagcaagggaaaggcaaatggagactgctttgtgtgtggcaagtctgggcattgggccaaggactgtcctgagcgcaaagacaggaagtctgccaacatgatcattagcgagggcggaggaacatcggggtacggtaaaatattacctacagttctctctgtttttcattcacctgattggtgggtggacactggtgctaatattcatgtatgtgctgacatttctctattttcttcttatcaggtcgggagaggttcctccttgttgatgggaaacgggtcgcttgcggctgttcatggtgttggtacggtcgatctgaagtttacttcgggaaagaccgtgcagctgaagaacgtgcagcatgtcccttcaataaagaagaatctagttagcggctctctattgtgtagagaagattttagacttgtgtttgagtccaataaatgtgtcgtatctaaatatgagacttttgttggaaaaggttatgacagcggaggcttgttccgcttttctttgaatgacatgtgtaataatcataatgctgtgaaccatattagcgagaatgatgagtctaatgtgtggcattcgcgactctgtcatgtgaatttcggttgtatgacgcgcttagctaacatgagtttaattccaaaattcactttggtaaaaggttccaagtgccatacttgtgttcaatcgaaacaacctcgcaagcctcacaaggcatctgaggcaaggaatttggcacctctagaacttgttcattccgatttgtgcgaaatgaacggcgtgttgactaaagggggaaagaaatatttcatgacactgatagatgattgcactagattttgctatgtgtatctattgaaaacaaaggatgaggcattgcatttctttaaaatctataaagctgaggtagaaaaccaacttgaaaggaaaatcaaacggttgaggtctgatagaggtggggagtatttttccaatgagtttgcatccttttgcgaagagtttggaattattcatgagatgacgcctccctattcaccccaatcaaatggggtggccgaaagaaagaaccgtactctaactgagatggtgaatgccatgttagacactgcggggctttccaaggaatggtggggtgaggcagttttgactgcgtgtcatgtcctgaataaaattccaatgaagcataaggaagtaacaccattcgaggaatgggaaaggaagaaattaaatctctcatacctacgaacatggggctgtttggccaaggtaaatgtacctatagccaaaaagcggaaacttggaccaaaaactgttgattgtgtgtttcttggttatgctatccacagtgtgggttatagattcttaatagtaaactctggagtacccgacatgcatgttggtacaattcttgagtccagagatgctacattctttgagaatgaatttcctatgaaatatacacctagcacttctagtaaagaaactgtcatgccccatgagtactttgcaccgatagaacacaatgatcaaacgcctgaggaaaatcctgaggaggacaacattgtagatactcgcaagagtaagagacaaagggttgcaaaatcctttggagatgactacattgtatacctcgtggatgacaccccaagaaccatagaagaggcatattcatctcctgacgctgactactggaaggaagcagtacgcagtgaaatggactcgattatgtctaatggtacttgggaagtcgttgagcgtccatatgggtgcaagcccgtaggatgcaaatgggttttcaagaaaaagcttaggcctgatggtacaatcgaaaagtacaaggcaaggcttgtggccaagggttatacccaaaaggaaggcgaggacttcttcgacacatactcaccagttgctcgcttgaccacgattcgagtactacttgctctggcagcctctcatggtcttctcgtccatcagatggacgttaagacagctttcctaaacggagagctggaggaggagatctatatggatcaaccagacgggtatgtactagaaggtcaggagggaatggtgtgtaaactattgaaatccttgtatggcctcaagcaagcacctaagcaatggcataagaagtttgacaccacgcttacatctgcaggctttgttgtgaacgaagctgacaaatgtgtatactatcgctatggtgggggagaaggggtgatcttgtgcttatatgtcgatgacatactgatctttgggaccagccttaatgtgattgaggaggtcaaagactatctgtccaagagttttgaaatgaaagatttgggagaggctgatgttattcttaacatcaaactacaaagaggagatgagggtgggattacacttgtgcaatcccactatgtggacaaggttttgagtcgctttggatatagtgactgcaagccagctcctactccttatgatcccagcgtgctattaaggaaaaaccgaagaatagcaagggatcagctgagatactctcaaatcattggttcattgatgtacttggctagcgcaacgaggcctgacatctcatttgctgtaagcaagctgagccggtttgtctcaaatccgggagatgatcattggcaggctctggaaagagtaatgcgctatctaaagggtactatgagctatggaattcactataccgggtatccaaaagtactagaagggtatagtgactcaaactggatatctgatgctgatgagataaaagccacaagtggatatgtgttcacacttggaggtggcgctgtttcctggaagtcttgcaagcagaccatcttaacgaggtcaacaatggaagcagaacttacagcactagatactgcgacagttgaggccgagtggcttcgtgaactcctgatggatttgccggtggttgaaaaaccagtgccagctatcctaatgaactgcgataatcaaacagtgattattaaagtgaacagttcaaaggacaacatgaagtcatctagacacatcaagagaagactgaaatctgtcagaaagcagaaaaactccggagtgatagcattggactatgtccaaacggctagaaatctggcagatcagtttaccaaggggctaccacgtaatgtgatagacagtgcatcgagggaaatgggcttgatacccacctaa

SEQ ID NO: 15397 - DNA, 1278 bp, Oryza sativa
  Clone ID: TFbOSC401432j.C1.o16.gm
atggcggagatggtgcgccacctggagctgctgctggaggtggtgcaccaggagctggagccggtgccgcgaacaacaacaccaacggaggcagttctgcctcacaatccagcggagggccattctcaggcgatgcaatgcttctatgtttcacggggcaaacgaagtgaaccacctctttctcctgaggaagaggctaagttcgaggcttcggattatctgttccgtggagcattgatcagtgtacttactgacaacatagtggacgtgtatatgcacatgccttctgggaaggacatgtgggatgcacttgaggccaagttcggagtttctgacgccggcagtgagctgtatgtcatagagcagttctatgactacaagatggagaaggcgagggcaaaggacgtccggggcaaaaaggttgagggaggttctagtgccaatatggtacagaagaagaaccctcatgcatcccgcaacaacaagaaagtcaagcctgatgtcaaacctaaggctgcaaccaactttaagaagaaaggcaagggaaaggcaaagggagactgctttgtgtgtggcaagtctgggcattgggccaaggactgtcctgagcgcaaagacaggaagtctgccaacatggtcattagcgagggcggaggaacatcggggtacgaacacaatgatcaaacgcctgaggaaaatcctgaggaggacaacattgtagatactcgcaagagtaagagacaaagggttgcaaaatcctttggagatgactacattgtatacctcgtggatgacaccccaagaaccatagaagagacatattcatctcctgacgctgactactggaaggaagcagtacacagtgaaatggactcgatgatgtctaatggtacttgggaagtcgttgagcgtccatatgggtgcaagcccgtaggatgcaaatgggttttcaagaaaaagcttaggcctgatggtacaattgaaaagtacaaggcaagacttgtggccaaggcctctcatgatcttctcgtccatcagatggacgttaagacagctttcctaaacggagagctggaggaggagatctatatggatcaaccagacagcctcaatgtgattgaggaggtcaaggactatctgtccaagagttttgaaatgaaggatttgggagaggctgatgttattcttaacatcaaactacaaagaggatatgaggaccatcttaacgaggtcaacaatggaagcagaacttacagcactagatactgcgacagttga

SEQ ID NO: 15398 - DNA, 3048 bp, Oryza sativa
  Clone ID: TFbOSC401539j.C1.o47.gm
atggaccatgttgtttatctaagtgctgataagctgctcaccgaacagtttgctgacaatgttgctatggcaagaccttcggatatcagggctgttcttgcgtcctatcaaggccgtgatatacctgctgagtttattgagcgttcaaaggagcaccagagagcctcgctcccggctagcactgccagaacgaatacaagtggacgctcgcccgaccaaccagaagcagagcccgtgcagattgtggcggcgatgcggcctcgtgcttttgctcccccttgcctgccgggcagtggcccgctgcctggcctggcggtccccgggcgcggcgacctcttcccggctgccggcagcgtcgtcggcaggagggccgctcccgctcccgccggccggggcgccgtcgctcgcgcagtggacgggccgtccgccgctgcggccgttgccgccgcggcggcgtccgccgcggcggacgtcccgcccccgcagatcacgtggcagatcgtcgtcggcgctgtagctggagtgactcccttcgtcgtcgccggggtcgagttcggcaagagaattattgcacagaagaaatgtgaaatctgtggaggctctgggcttgtgatgaagaaggattactacgttcgctgccaaggtcgttcacggcacctcctcctggcgcaccagctccggatccagctcctgtcggcgtcggcggcggcgcagctcctgtcggcggcggcgcaccaccgccgccattttgaggtgggggtcggaatgccacacgcgcgcgcgcgcgccgggccgtgggcgtggccgaggcgtggcgtggctggcggcgggcgggtgtcacgtcgctatccttttgcagccactaacccacgttcccacgattccctccgcaacaacgcgtccacgttctttctcctgatagataaggaggccgcgagtttttggggagtgcctcctgcacgactgctcatcgccatgtctggagttgctgccgccgctattggcggaggtggtgcgccgccgccgacaggagctgcgccgccgccgacgccgacaggagctggatccggagctgcgatgcagtgcttctatgtttcacggggtaaacgaagtgaaccacctctttctcctgaggaagaggctaagttcgaggcttcggattgcctgttccgtggagcattgatcagtgtactcactgacaacatagtggacgtgtacatgcacatgccttctgggaaggacatgtgggatgcacttgaggccaagttcggagtttctgacgccggtagtgagctgtatgtcatggagcagttctatgactacaagatggtcgatgaccgttctgtagtagaacaagctcatgagattcagatgctggctaaggaacttgagaacaacaactgtgagttgccggacaagtttgtggcgggtggcattattgccaaactaccaccttcttggtcggactttgccacttctctaaagcacaagagacaagagttcagtgttcctgatctcattggctctttgggtgttgaggagaaggtgagggcaaaggacgtccggggcaaaaaggttgagggaggttctagtgccaatatggtacagaagaagaaccctcatgcatcccacaacaacaagaaagtcaagcctgatgtcaaacccaaggctgcaaccaattttaagaagaaaggcaagggaaaggcaaagggagactgctttgtgtgtggcaagtctgggcattgggccaaggactgtcctgagcgcaaagacatgaagtctgccaacatgatcattagcgagggcggaggaacatcggggtacggtcgggagaggttcctccttgttgatgggaaacgggtcgcttgcggctgttcatgtgtgggttatagattcttaatagtaaactctggagtacccgacatgcatgctggtacaatttttgagtccagagatgctactttctttgagaatgaatttcctatgaaatatacacctagcacttctagtaaagaaactgtcatgccccatgagcactttgcaccgatagaacacaatgatcaaacgcctgaggaaaatcctgaggaggacaacattgtagatactcgcaagagtaagagacaaagggttgcaaaatcctttggagatgactacattgtatacctcgtggatgacaccccaagaaccatagaagaggcatattcatctcctgacgctgactactggaaggaagcagtacgcagtgaaatggactcgattatgtctaatggtacttgggaagtcgttgagcgtccatatggatgtaagcccgtaggatgcaaatgggttttcaagaaaaagcttaggcctgatggtacaatcgaaaagtataaggcaaggcttgtggccaagggttatacccaaaaggaaggcgaggatttcttcgacacatattcaccagttgctcgcttgactacgattcgagtactacttgctctggcagcctctcatggtcttctcgtccatcagatggacgttaagacaactttcctaaacggagagctggaggaggagatctatatggatcaaccagacgggtatgtactagaaggtcaggagggaatggtgtgtaaactattgaaatccttgtatggcctcaagcaagcacctaagcaatggcatgagaagtttgacaccacgcttacatctgcaggctttgttgtgaacgaagctgacaaatgtgtatactatcgctatggtgggggagaaggggtgatcttatgcttgtatgtcgatgacatactgatctttgggaccagccttaatgtgattgaggaggtcaaagactatctgtccaagagttttgaaatgaaggatttgggagaggctgatgttattcttaacatcaaactacaaagaggagatgagggtgggattacacttgtgcaatcccactatgtggacaaggatggcttatgtcttaatgtgatccgagtggcttttccaagcagagatgttgacctgcagaacatctcagaaggaacacacctatatgagttcgactgctag

SEQ ID NO: 15399 - DNA, 4167 bp, Oryza sativa
  Clone ID: TFbOSC401643j.C1.o14.fg
atgtctggagttgccgccgccactgctggcggaggtggtgcgccgccgccgacaggagctagatctggatctggagctggtgcgccaggaggtgccgtgaacgacaacaacaacggaggcaattctgcctcaccatccagcggagggccattctcggggtataatcttctcctcctgctactgttgttagcgctatcgctatactatgtgcgctatgttcttgttcctgttctacatgatgcctctagcatgttatcgcgttactggtatgttcctgttcctgacatttatgatgcgcatagtatgctactggttatgttaagatcaccttacactgcttatgtcatgatcattgtttcaatttcttggattaaaatatgccgattaatgactatatttccaacaatccaaaaacctgataggtcattttcggttgttggctttgctgctgcactgaaaccacatgcttttgatggttcaaactataagagatggaaagcacgtgcactattgtggttgacagcgatgcagtgcttctatgtttcacggggcaaacgaagtgaaccacctctttctcctgaggaagaggctaagttcgaggcttcggattgcctgttccgtggagcattgatcagtgtactcgctgacaacatagtggacgtgtacatgcacatgccttctgggaaggacatgtgggatgcacttgaggccaagttcggagtttctgacgccggcagtgagctgtatgtcatggagcagttctatgactacaagatggtcgatgaccgttctgtagtagaacaagctcatgagattcagatgctggctaaggaacttgagaacaacaactatgagttgccggacaagtttgtggcgggtggcattattgccaaactaccacattcttggtcggactttgccacttctctaaagcacaagagacaagagttcagtgttcctgatctcattggctctttgggtgttgaggagaaggcgagggcaaaggacgtccggggcaaaaaggttgagggaggttctagtgccaatatggtacagaagaagaaccctcatgcatcccacaacaacaagaaagtcaagcctgatgtcaaacccaaggctgcaaccaattttaagaagaaaggcaagggaaaggcaaagggagactgctttgtgtgtggcaagtctgggcattgggctaaggactgtcctgagcgcaaagacaggaagtctgccaacatgatcattagcgagggcggaggaacatcggggtacggtaaaatattacctacagttctctctgtttttcattcacctgattggtgggtggatactggtgctaatattcatgtcgggagaggttcctccttgttgatgggaaacaggtcgcttgcggctgttcatggtgttggtacggtcgatctgaagtttacttcgggaaagaccgtgcagctgaagaacgtgcatcatgtcccttcaataaagaagaatctagttagcggctctgtattgtgtagagaaggttttagacttgtgtttgagtccaataaatgtgtcgtatctaaatatgggacttttgttggaaaaggttatgacaacggaggcttgttccgcttttctttgaatgacatgtgtaataatcataatgctgtgaaccatattagcgagaatgatgagtctaatgtgtggcattcgcgactctgtcatgtgaatttcgattgtatgacgcgcttagctaacatgagtttaattccaaaattcactttggtcaaaggttccaagtgccatacttgtgttcaatcgaaacaacctcgcaagcctcacaaggcatctaaggcgaggaatttggcacctctagaacttgttcattccgatttgtgcgaaatgaacggcgtgttgactaaagggggaaagaaatatttcatgacactgatagatgattgcactagattttgctatgtgtatctattgaaaacaaaggatgaggcattgcattactttaaaatctataaagctgaggtagaaaaccaacttgaaaggaaaatcaaacggttgaggtctgatagaggtggggagtatttttccaatgagtttgcatccttttgcgaagagtttggaattattcatgagatgacgcctccctattcaccccaatcaaatggggtggccgaaagaaaaaaccgtactctaactgagatggtgaatgccatgttagatactgcggggctttccaaggaatggtggggtgaggcagttttgactgcgtgtcatgtcctgaataaaattccaatgaagcataaggaagtaacaccattcgaggaatgggaatggaagaaattaaatctctcatacctacgaacatggggctgtttggccaaggtaaatgtacctatagccaaaaagcggaaacttggaccaaaaactgttgattgtgtgtttcttggttatgctatccacagtgtgggttatagattcttaatagcaaactccggagtacccgacatgcatgctggtacaatttttgagtccagagatgctacattctttgagaatgaatttcctatgaaatatacacctagcacttctagtaaagaaactgtcatgccccatgagcactttgcaccgatagaacacaatgatcaaatgcctgaggaaaatcctgaggaggacaacattgtagatactcgcaagagtaagagacaaagggttgcaaaatcctttggagatgactacattgtatacctcgtggatgacaccccaagaaccgtagaagaggcatattcatctcctgacgctgactactggaaggaagcagtacgcagtgaaatggactcgattatgtctaatggtacttgggaagtcgttgagcgtccatatgggtgcaagcccataggatgcaaatgggttttcaagaaaaagcttaggcctgatggtacaatcgaaaagtacaaggcaaggcttgtggccaagagttatacccaaaaggaaggcgaggacttctttgacacatactcaccagttgctcgcttgaccacgattcgagtactacttgctctggcagcctctcatggtcttctcgtccatcagatggacgttaagacagctttcctaaacggagagctggaggaggagatctatatggatcaaccagacgggtatgtactagaaggtcaggagggaatggtgtgtaaactattgaaatccttgtatggcctcaagcaagcacctaagcaatggcatgagaagtttgacaccacgcttacatctgcaggctttgttgtgaacgaagctgacaaatgtgtatactatcgctatggtgggggagaaggggtgatcttgtgcttatatgtcgatgacatactgatctttgggaccagccttaatgtgattgaggaggttttgagtcgctttggatatagtgactgcaagccagctcctactccttatgatcccagcgtgctattaaggaaaaaccgaagaatagcaagggatcaactgagatactctcaaatcattggttcattgatgtacttggctagcgcaacgaggcctgacatctcatttgctgtaagcaagctgagccggtttgtctcaaatccgggagatgatcattggcaggctctggaaagagtaatgcgctatctaaagggcactatgagctatggaattcactataccgggtatccaaaagtactagaagggtatagtgactcaaactggatatctgatgctgatgagataaaagccacaagtggatatgcgttcacacttggaggtggcgctgtttcctggaagtcttgcaagcagaccatcttaacgaggtcaacaatggaagcagaacttacagcactagatactgcgacagttgaggccgagtggcttcgtgaactcctgatggatttgccggtggttgaaaaaccagtgccagctatcctaatgaactgcgataatcaaacagtgattattaaagtgaacagttcaaaggacaacatgaagtcatctagacacatcaagagaagactgaaatctgtcagaaagcagaaaaactccggagtgatagcattggactatgtccaaacagctagaaatctggcagatcagtttatcaaggggctaccacgtaatgtgatagacagtgcatcgagggaaatgggcttgatacccacctaa

SEQ ID NO: 15400 - DNA, 3987 bp, Oryza sativa
  Clone ID: TFbOSC401685j.C1.o115.fg
atgtctggagttgccaccgccgctgctggaggagatggcagaggtggtgcgccaggagctggagccggtgccgcgaacgacaacatcaacggagacaattctgcctcacaatccagcggagggccattcttggggtatatccttctcctgttccctttgttagcgctatcgctttattattatgtgcgctatgttcctgttcctgacattcatgatgcctctagtatgttattgcgttactgtaatgttcctgtttctgacattcatgatgcgcatagtatgctacttcatgatgcctctagcatgttattgcgttactgtaatattcctgttcctgacattcatgatacgcatagtatgctactggttatgttaagatcaccctacaccgcttatgccatgattattgttttaacattttggattaaaatatgccgattcatgactatatttccaacaatccaaaaacctgataggtcattttcggtagttggctttgctgctgcactgaaaccacatgcttttgatggttctaactataagagatggaaagcatgtgcactattgtggttgacagcgatgcagtacttctatgtttcacggggcaaacgaagtgaaccacctctttctcctgaggaagaggctaagttcgaggctttggattgcctgttccgtggagcattgatcagtgtactcgctgacaatatagtggacgtgtacatgcacatgccttccgggaaggacatgtgggatgcacttgaggccaagttcggagtttctgacgccggcagtgagctgtatgtcatggagcagttctatgactacaagatggtcgatgaccgttctgtagtagaccaacctcatgagattcagatgctggctaagaaacttgagaacaacaactgtgagttgccggacaagtttgtggcgggtggcattattgccaaactgccaacttcttggtcggactttgccacttctctaaagcacaagagacaagagttcagtgtttctgatctcattggctctttgggtgttgagaagaaggcgagggcaaaggacgttcggggcaaaaaggttgagggaggttctagtgccaatatggtacagaagaagaaccctcatgcatcccacaacaacaagaaagtcaaacctgatgtcaaacccaaggctgcaaccaactttaagaagaaaggcaagggaaaggcaaagggagactgctttgtgtgtggcaagtcagggcattgggccaaggactgtcctgagcgcaaagacaggaagtctgccaacatggtcattagcgagggcggaggaacatcggggtacggtaaaatattacctacagttctctctgttcttcacttacctgattggtgggtggacactggtgctaatattcatgtcgggagaggttcctccttgttgatgggaaacgggtcgcttgcggctgttcatggtgttggttccaagtgccatacttgcatccaatcgaaacaacctcgcaagcctcacaagtcatctgaggcgaggaatttggcacctctagaacttgttcattccgatttgtgcgaaatgaacgacgtgttgactaaagggggaaagaaatatttcatgacactgatagatgattgcactagattttgctatgtgtatctattgaaaacaaaagataaggcattgcattactttaaaatctataaagctgaggcagaaaaccaacttgaaaggaaaatcaaacggttgaggtctgatagaagtggggagtatttttccaatgagtttgcatcattttgcgaagagtttggaattattcatgagaggacacctccctattcaccccaatcaaatggggtggccgaaagaaagaaccgtactctaactgagatggtgaatgccatgttagacacttcagggctttccaaggaatggtggggtgaggcagttttgaccacctatcatgtcctgaataaaattccaatgaagcataaggaagtaacaccattcgaggaatgggaaaggaagaaattaaatctctcatacctacgaacatggggctgtttggccaaggtaaatgtacctatagccaaaaagcggaaacttggaccaaatactgttgattgtgtgttccttggttatgctattcacagtgtgggttatagattcttaatagtaaactttggtgtacccgacatgcatgttggtacaattcttgagtccagagatgctacattctttgagaatgaatttcccatgaaacatacacctagcacttctagtaaagaaactgtcatgccccatgagcactttgcaccggtagaacacaatgatcaaacgcctgaggaaaatcctgaggaggacaacattgtagatactcgcaagagtaagagacaaagggttgcaaaatcctttggagatgactacattgtatacctcgtggatgacacctcaagaaccatagaagaggcatattcatctcctgacgctgactactggaaggaagcagtacgcagtgaaatggactcgattatgtctaatggtacttgggaagtcgttgagctttcatatgggtgcaagcccgtaggatgcaaatgggttttcaagaaaaagcttatacctgatggtacaattgaaaagtacaaggcaagacttgcggccaagggttatacccaaaaggaaggcgaggacttcttcgacacatactcaccagttgctcgcttgaccacgattcgagtactacttgctctggcagcctctcatggtcttctcgtctatcagatggacgttaagacagctttcctaaacggagagctagaggaggagatctatatggatcaactagacgggtatgtactagaaggtcaggagggaatggtgtgtaaattgttgaaatccttgtatggcctcaagcaagcacctaagcaatggcatgagaagtttgacaccacgcttacatctgcaggctttgttgtgaatgaaactgacaaatgtgtgtactatcgctatggtgggggagaaggagtgatcttgtgcctatatgtcgatgacatattgatctttgggaccagccttaatgtgattgaggaggtcaaggactatctgtccaagagttttgaaataaaggatttgggagaggctgatgttattcttaacatcaaactacaaataggagatgagggtgggattacacttgtgcaatcccactatgtggacaaggttttgagtcgctttggatatagtgactgcaagccagctcctactccttatgatcccagcgtgctattaaggaaaaaccgaagaatagcaagggatcaactgagatactctcaaatcattggttcattgatgtacttggctagtgcaacgaggcctgacatctcatttgctgtaagcaagctgagccggtttgtctcaaatccgggacatgatcattggcaggctctggaaagagtaatgcgctatctaaagggcactatgagctatggaattcactataccgggtatccaaaagtactagaagggtatagtgactcaaactggatatctgatgctgatgagataaaagccacaagtggatatgtgttcacacttggaggtggcgctgtttcctggaagtcttgcaagcagaccatcttaacgaggtcaacaatggaagcagaacttacagcactagatactgcgacagttgaggccgagtggcttcatgaacttctgatggatttgccggtggttgaaaaatcagtgccagctatcctaatgaactgtgataatcaaacagtgattattaaagtgaacagttcaaaggacaacacgaagtcatctaggcacatcaagagaagactgaaatctgttagaaagcagaaaaactccggagtgatagcattggactatgtccaaacggctagaaatctggcagatcagtttaccaagggactaccacgtaatgtgatagacaatgcatcgagggaaatgggcttgatacccacctaa

SEQ ID NO: 15401 - DNA, 4086 bp, Oryza sativa
  Clone ID: TFbOSC401706j.C1.o4.fg
atgtccgcctctgttggcggaggtggtacgccaccgccgacaggagctggagctggatccggagttggtgcgccaggaggaggtgccgtgaacgactacaacaacggagacaattctgcctcaccatccagcggagggccattctcggggtataatcttctcctcctgttcccattgttagcgctatactatgttcctgttcctgttctacatgatgcctctagcatattatcgtgttactggtatgctcctgttcctgacattcatgatgcgcatagtatgctactggttatgttaagatcaccctacactgcttatgccatgatcattgtttctttttcttggattaaaatatgccgattaatgactatatttccaacaatccaaaaacctgataggtcattttcggtagttggctttgctgctgcactgaaaccacatgcttttgatggttcaaactataagagatggaaagcacgtgcactattgtggttgacagcgatgcagtgcttctatgtttcacggggcaaacgaagtgaaccacctctttctcctgaggaagatgccaagttcgaggcttcggattgcctgttccgtggagcattgatcagtgtactcgctgacaacatagtggacgtgtacatgcacatgccttctgggaaggacatgtgggatgcacttgaggccaagttcggagtctctgacgccggcagtgagctgtatgtcatggagcagttctatgactacaagatggtcgatgaccgttctgtagtagaacaagctcatgagattcagatgctggctaaggaacttgagaacaacaactgtgagttgccggacaagtttgtggcgggtggcattattgccaaactaccaccttcttggtcggactttgccacttctctaaagcacaagagacaagagttcagtgttcctgatctcattggctctttgggtgttgaggagaaggcgagggcaaaggacatccggggcaaaaaggttgagggaggttctagtgccaatatggtacagaagaagaaccctcatgcatcccacaacaacaagaaagtcaagcctgatgtcaaacccaaggctgcaaccaattttaagaagaaaggcaagggaaaggcaaagggagactgctttgtgtgtggcaagtctgggcattgggccaaggactgtcctgagcgcaaagacaggaagtctgccaacatgatcattagcgagggcggaggaacatcggggtacggtaaaatattacctacagttctttctgtttttcattcacctgattggtgggtggatactggtactaatattcatgtatgtgctgacatttctctgttttcttcttatcaggtcgggagaggttcctccttgttgatgggaaacgggttgcttgcggctgttcatggtgttggtacggtcgatctgaaatttacttcgggaaagaccgtgcagctgaagaacgtgcagcatgtcccttcaataaagaagaatctagttagcggctctctattgtgtagagaaggttttagacttgtgtttgagtccaataaatgtgtcgtatctaaatatgggacttttgttggaaaaggttatgacagcggaggcttgttccgcttttctttgaatgacatgtgtaataatcataatgctgtgaaccatattagcgagaatgatgagtctaatgtgtggcattcgcgactctgtcatgtgaatttcgggtgtatgacgcgcttagctaacatgagtttaattccaaaattcactttggtcaaaggttccaagtgccatacttgtgttcaatcgaaacaacctcgcaagcctcacaaggcatctgaggcgaggaatttggcacctctagaacttgttcattccgatttgtgcgaaatgaacggcgtgttgactaaagggggaaagaaatatttcatgacactgatagatgattgcactagattttgctatgtgtatctattgaaaacaaaggatgaggcattgcattactttaaaatctataaagctgaggtagaaaaccaacttgaaaggaaaatcaaacggttgaggtctgatagaggtggggagtatttttccaatgagtttgcatccttttgcgaagagtttggaattattcatgagatgacgcctccctattcaccccaatcaaatggggtggccgaaagaaagaaccgtactctaactgagatggtgaatgccatgttagacactgcggggctttcgaaggaatggtggggtgaggcagttttgactgcgtgtcatgtcctgaataaaattccaatgaagcataaggaagtaacaccattcgaggaatgggaaaggaagaaattaaatctctcatacctacgaacatggggctgtttggccaaggtaaatgtacctatagtcaaaaagcggaaacttggaccaaaaactgttgattgtgtgtttcttggttatgctatccacagtgtgggttatagattcttaatagtaaactctggagtacccgacatgcatgctggtacaatttttgagtccagagatgctatattctttgaaaatgaatttcctatgaaatatacacctagcacttctagtaaagaaactgtcatgccccatgagcactttgcaccgatagaacacaatgatgaaacgcctgaggaaaatcctgaggaggacaacattgtagatactcgcaagagtaagagacaaagggttgcaaaatcctttggagatgactacattgtatacctcgtggatgacaccccaagaaccatagaagaggcatattcatctcctgacgctgactactggaaggaagcagtacgcagtgaaatggactcgattatgtctaatggtacttgggaagtcgttgagcgtccatatgggtgcaagcccgtaggatgcaaatgggttttcaagaaaaagcttaggcctgatggtacaatcgaaaagtacaaggcaaggcttgtggccaagggttatacccaaaaggaaggcgaggatttcttcgacacatattcaccagttgctcgcttgactacgattcgagtactacttgctctggcagcctctcatggtcttctcgtccatcagatggacgttaagacagctttcctaaatggagagctggaggaggagatctatatggatcaaccagacgggtatgtactagaaggtcaggagggaatggtgtgtaaactattgaaatccttgtatggcctcaagcaagcacctaagcaatggcatgagaagtttgacatcacgcttacatctgcaggctttgttgtgaacgaagctgacaaatgtgtatactatcgctatggtgggggagaaggggtgatcttgtgcttgtatgtcgatgacatactgatctttgggaccagccttaatgtgattgaggaggtcaaagactatctgtccaagaattttgaaatgaaggatttgggagaggctgatgttattcttaacatcaaactacaaagaggagatgagggtgggattacacttgtgcaatcccactatgtggacaaggctctggaaagagtaatgcgctatctaaagggcactatgagctatggaattcactataccgggtatccaaaagtattagaagggtatagtgactcaaactggatatctgatgctgatgaaataaaagccacaagtggatatgtgttcacacttggaggtggcgctgtttcctggaagtcttgcaagcagaccatcttaacgaggtcaacaatggaagcagaacttacagcactagatactgcgacagttgaggctgagtggcttcgtgaactcctgatggatttgccggtggttgaaaaaccagtgccagctatcctaatgaactgcgataatcaaacagtgattattaaagtgaacagttcaaaggacaacatgaagtcatctagacacatcaagagaagactgaaatctgtcagaaagcagaaaaactccggagtgatagcattggactatgtccaaacggctagaaatctggcagatcagtttaccaaggggctaccacgtaatgtgatagacagtgcatcgagggaaatgggcttgatacccacctaa

SEQ ID NO: 15402 - DNA, 3333 bp, Oryza sativa
  Clone ID: TFbOSC401762j.C1.o8.fg
atgtctgcgcctggagccggtgccgctactgctgctggaggagatggcggaggtggtgcgccaccaggagctggagctggagctggaggtggtgcgccaggagctagagccggtgccgcgaacaacaacaccaacggaggcaattctgcctcacaatccagcggagggccattctcaagatcaccctacactgtttatgccatgattattgtcttaacattttggattaaaatatgccgatttatgaccatattttcaactatccaaaaacctgataggtcattttcggtagttggctttgctgctacattgaaaccacatgcttttgatggttctaactataagagatggaaagcacgtgcactattgtggttgacagcgatgcaatgcttctatgtttcacggggcaaacgaagtgaaccacctctttctcctgaggaagaggctaagttcgaggcttcggattgtctgttccgtggagcattgatcagtgtactcgctgacaacatagtggacgtgtacatgcacatgccttctgggaaggacatgtgggatgcacttgaggccaagttcggagtttctgacgctggcagtgcgctgtatgtcatggagcagttctatgactataagatggtcgatgaccgttctgtagtagaagctcatgagattcagatgctggctaaggaacttgagaacaacaactgcgagttgccggacaagtttgtggtgggtggcattattgccaaattgccaccttcttggtcggacttcgccacttctctaaagcacaagagacaagagttcagtgtttctgatttcattggttctttgggtgttgaggagaaggcgagggcaaaggacgtccggggcaaaaaggttgagggaggttctagtgccaatatggtacagaagaagaaccctcatgtatcccacaacaacaagaaagtcaagcctgatgtcaaatccaaggctgcaaccaactttaagaagaaaggcaagagaaaggcaaagggagactgctttgtgtgtggcaagtctgggcattgggctaaggactgtcctgagcgcaaagacaggaagtctgcgaacatggtcattagcgagggcggaggaacatcggggtacggtaaaatattacctacagttctctctgtttttcactcacctgattggtgggtggatactggtgctaatattcatgtcggaagaggttcctccttgttgatgggaaacgggtcgcttgcggctgttcatggtgttggtacggttgatctgaagtttacttcgggaaagaccatgcagctgaagaacgtgcagcatgtctcttcaataaagaagaatctagttagcggctctctattgtgtagagaaggttttagacttgtgtttgagtgcaataaatgtgtcgtatctaaatatgggacttttgttggaaaatgttatgacaacggagctgaggtagaaaaccaacttgaaaggaaaatcaaacggttgaggtctgatagaggtggggagtatttttccaatgagtttgcatccttttgcgaagagtttggaattattcatgagaggacgcctccctattcaccccaatcaaatggggtggccgaaagaaagaaccgtactctaactgagatggtgaatgccatgttagacactgcggggctttccaaggaatggtggggtgaggcagttttgactgcgtgtcatgtcctgaataaaattcgaatgaagcataaggaagtaacaccattcaaggaatgggaaaggaagaaattaaatctctcatacctacgaacatggggctgtttggccaaggtaaatgtacctataaccaaaaagcggaaacttggaccaaatattgttgattgtgtgttcctttgttatgctattcacagtgtgggttatagattcttaatagtaaactctggagtacccgacatgcatgttggtacaatttttgagtccagagatgctacattctttgagaatgaatttcccatgaaacatacacctagcacttctagtcaagaaactgtcatgccccatgagcactttgcaccgatagaacacaatgatcaaacgcctgaggaaaatcctgaggaggacaacattgtagatactcgcaagagtaagagacaaagggttacaaaatcctttggagatgactacattgtatacctcgtggatgacaccccaagaaccatagaagaggcatattcatctcctgacgctgactactggaaggaagcagtacgcagtgagatggactcgattatgtctaatggtacttgggaagtcgttgagcgtccatatgggtgcaagcccatggacgttaagacaactttcctaaacggagagctagaggaggagatctatatggatcaaccagacgggtatgtactagaagatcagaagggaatggtgtgtaaactgttgaaatccttgtatggcctcaagcaagcacctaagcaatggcatgagaagtttgacaccacgcttacatctgcaggcttcgttgtgaacgaagctgacaaatgtgtgtactatcgctatgatgggggagaaggagtgatcttgtgcttatatgtcgatgacatattgatctttgggaccagcctcaatgtgattgaggaggtcaaggactatctgtccaagagttttgaaatgaaggatttgggagaggctgatgttattcttaacatcaaactacaaagaggagatgagggtgggattgcacttgtgcaatccccactatgtggacaagatgatcattggcaggctctggaaagagtaatgcgctatctaaagggcactatgagctatggaattcactataccgggtatccaaaagtactagaagggtatagtgactcaaactggatatctgatgctgatgagataaaagccacaagtggatatgtgttcacacttggaggtggcgctgtttcctggaagtcttgcaagcagaccatcttaacgaggtcaacaatggaagcagaacttacagcactagatactgcgacagttgaggccgagtggcttcgtgaactcctgatggatttgccggtggttgaaaagccagtgtcagctatcctaatgaactgtgataatcaaacagtgattattaaagtgaacagttcaaaggacaacacgaagtcatctaggcatatcaagagaagactgaaatctgtcagaaagcagaaaaactccggagtgatagcattggactatgtccaaacggctagaaatctggcagatcagtttaccaaggggctaccacgtaatgtgatagacagtgcatcaaggaaaatgggcttgatacccacctaa

SEQ ID NO: 15403 - DNA, 3729 bp, Oryza sativa
  Clone ID: TFbOSC401880j.C1.o5.fg
atgtctggagttgccgccgccgctgctggaggagatggcggaggtggtgcgccgccgccgggagctggagccggaggtggtgcgccaggaggtgccgcgaacgacaacatcaacggaggcaattctgcctcacaatccagcggagggccattctcgggtgtactcgctgacaacatagtagacgtgtacatgcacatgccttctgggaaggacatgtgggatacacttgaggccaagttcggagtttctgacgccggcagtgagctgtatgtcatggagcagttctatgactacaagatggtcgatgaccgttctgtagtagaacaagctcatgagattcagatgctggctaaggaacttgagaacaacaactgtgcgttgccggacaagtttgtggcgggtggcattattgccaaactaccaccttcttggtcgaactttgccacttctctaaagcacaagagacaagagttcagtgtttctgatctcattggctctttgggtgttgaggagaaggcgagggcaaaggacgtccggggcaaaaaggttgagggaggttctagtgccaatatggtacagaataagaaccctcatgcatcccacaacaacaagaaagtcaagcctgatgtcaaacccaaggctgcaaccaactttaagaagaaaggcaagggaaaggcaaagggagactgctttgtgtgtggcaagtctgggcattgggccaaggactgtcctgagcgcaaagacaggaagtctgccaacatagtcattagcgagggcggaggaacatcggggtacggtaaaatattacctacagttctctctgtttttcactcacctgattggtcgcttgcgtcttttcatggtgttggtacggtcgatctgaagtttacttcgggaaagaccgtgcagctgaagaacgtgcagcatgtcccttcaataaagaagaatctagttagcggctctctattgtatagagaaggttttagacttgtgtttgagtccaataaatgtgtcgtatctaaatatgggacttttgttggaaaaggttatgacagcggaggcttgttccgcttttctttgaatgacatgtgtaataatcataatgctgtgaaccatattagcgagaatgatgagtctaatgtgtggcattcgcgactctgtcatgtgaatttcggttgtatgacgcgcttagctaacatgagtttaattccaaaattcactttggtcaaaggttccaagtgctatacttgcgttcaatcgaaacaacctcgcaagcctcacaaggcatctgaggcgaggaatttggcacctctagaacttgttcattccgatttgtgcgaaatgaacggcgtgttgactaaagggggaaagaaatatttcatgacactgatagatgattgcactagattttgctatgtgtatctattgaaaacaaaggatgaggcattgcattactttaaaatctataaagctgaggtagaaaaccaacttgaaaggaaaatcaaacggttgaggtctgatagaggtgggcagtatttttccaatgagtttgcatccttttgcgaagagtttggaattattcatgagaggacgcctccctattcaccccaatcaaatggggtggccgaaagaaagaaccgtactctaactgagatgatgaatgccatgttagacactgcggggctttccaaggaatggtggggtgaggcagttttgactgcgtgtcatgtcctgaataaaattccaatgaagcataaggaagtagcaccattcgaggaatgggaaaggaagaaattaaatctctcatacctacgaacatggggctgtttggccaaggtaaatgtacctataaccaaaaagcggaaacttggaccaaatactgttgattgtgtgttccttggttatgctattcacagtgtgggttatagattcttaatagtaaactctggagtacccgacatgcatgttggtacaattcttgagtccagagatgctacattctttgagaatgaatttcccatgaaacatacacctagcacttctagtaaagaaactgtcatgccccatgagcactttgcaccgacagaacacaatgatcaaacgcctgaggaaaatcctgaggaggacaacattatagatactcgcaagagtaagagacaaagggttgcaaaatcctttggagatgactacattgtatacctcgtggatgacaccccaagaaccatagaagaagcatattcatctcctgacgctgactactggaaggaagcagtatgcagtgaaatggactcgattatgtctaatggtacttgggaagtcgttgagcgtccatatgggtgcaagcccgtaggatgcaaatgggttttcaagaaaaagcttaggcctgatggtacaatcgaaaagtacaaggcaaggcttgtggccaagggttatacccaaaaggaaggcgaggacttcttcgacacatactcaccagttgctcgcttgaccacgattcgagtactacttgctctggcagcctctcatggtcttctcatccatcagatggacgttaagacagctttcctaaacggagagctggaggaggagatctatatggatcaaccagacgggtatgtactagaaggtcaggagggaatggcgtgtaaactgttgaaatccttgtatggcctcaagcaagcacctaagcaatggcatgagaagtttgacaccatgcttacatttgcaggctttgttgtgaacgaagctgacaaatgtgtatactatcgctatggtgggggagaaggggtgatcttgtgcttatatgtcgatgacatattgatctttgggaccagccttaatgtgattgaggaggtcaaggactatctgtccaagagttttgaaatgaaggatttgggagaggctgatgttatttttaacatcaaactacaaagaggagatgagggtgggattacacttgtgcaatcccactatgtggacaaggttttgagtcgctttggatatagtgactgcaagccagctcctactccttatgatcctagcgtgctattaaggaaaaaccgaagaatagcaagggatcaactgagatactctcaaatcattggttcattgatgtacttggctagcgcaacgaggcttgacatctcatttgctgcaagcaagctgagccggtttgtctcaaatccgggagatgatcattggcaggctctggaaagagtaatgcgctatctaaagggcactatgagctatggaattcactataccgggtatccaaaagtactagaagggtatagtgactcaaactggatatctaatgctgatgagataaaagccacaagtggatatgtgttcacacttggaggtggcgctgtttcctggaattcttgcaagcagaccatcttaacgaggtcaacaatggaagcagaacttacagcactagatactgcgacagttgaggccgagtggcttcgtgaactcctgatggatttgccagtggttgaaaaaccagtgccagctatcctaatgaactgtaataatcaaacagtgattattaaaatgaacagttcaaaggacaacatgaagtcatctaggcacatcaagagaagactgaaatccgtcagaaagcagaaaaactccggagtgatagcattggactatgtccaaactgctagaaatctggcagatcagtttaccaaggggctaccacgtaatgtgatagaaagtgcatag

SEQ ID NO: 15404 - DNA, 3807 bp, Oryza sativa
  Clone ID: TFbOSC401918j.C1.o5.fg
atgcagtgcttctatgtttcacggggcaaacgaagtgaaccacctctttctcctgaggaagaggctaagttcgaggcttcggattgcctgttccgtggagcattgatcagtgtactcgctgacaacatagtggacgtgtacatgcacatgccttctgggaaggacatgtgggatgcactcgaggccaagttcggagtctctgacgccggcagtgagctgtatgtcatggagcagttctatgactacaagatggtcgatgaccgttctgtagtagaacaagctcatgagattcagatgctggctaaggaacttgagaacaacaactgtgagttgccggacaagtttgtggcgggtggcattattgccaaactaccaccttcttggtcggactttgccacttctctaaagcacaagagacaagagttcagtgttcctgatctcattggctctttgggtgttgaggagaaggcgagggcaaaggacatccggggcaaaaaggttgagggaggttctagtgccaatatggtacagaagaagaaccctcatgcatcccacaacaacaagaaagtcaagcctgatgtcaaacccaaggctgcaaccaattttaagaagaaaggcaagggaaaggcaaaaggagactgctttgtgtgtggcaagtctgggcattgggccaaggactgtcctgagcgcaaagacaggaagtctgccaacatgatcattagcgagggcggaggaacatcggggtacggtaaaatattacctacagttctctctgtttttcattcacctgattggtgggtggatactggtgctaatattcatgtatgtgctgacatttctctgttttcttcttatcaggtcgggagaggttcctccttgttgatgggaaacgggtcgcttgcggctgttcatggtgttggtacggtcgatctgaagtttacttcgggaaagaccgtgcagctgaagaacgtgcagcatgtcccttcaataaagaagaatctagttagcggctctctattgtgtagagaaggttttagacttgtgtttgagtccaataaatgtgtcgtatctaaatatgggacttttgttggaaaaggttatgacagcggaggcttgttccgcttttctttgaatgacatgtgtaataatcataatgctgtgaaccatattagcgagaatgatgagtctaatgtgtggcattcgcgactctgtcatgtgaatttcggttgtatgacgcgcttagctaacatgagtttaattccaaaattcactttggtcaaaggttccaagtgccatacttatgttcaatcgaaacaacctcgcaagcctcacaaggcatctgaggcgaggaatttggcacctctagaacttgttcattccgatttgtgcgaaatgaacggcgtgttgactaaagggggaaagaaatatttcatgacactgatagatgattgcactagattttgctatgtgtatctattgaaaacaaaggatgaggcattgcattactttaaaatctataaagctgaggtagaaaaccaacttgaaaggaaaatcaaacggttgaggtctgatagaggtggggagtatttttccaatgagtttgcatctttttgcgaagagtttggaattattcatgagatgacgcctccctattcaccccaatcaaatggggtggccgaaagaaagaaccgtactctaactgagatggtgaatgccatgttagacactgcggggctttcgaaggaatggtggggtgaggcagttttgactgcgtgtcatgtcctgaataaaattccaatgaagcataaggaagtaacaccattcgaggaatgggaaaggaagaaattaaatctctcatacctacgaacatggggctgtttggccaaggtaaatgtacctatagtcaaaaagcggaaacttggacaaaaaaccgttgattgcgtgtttcttggttatgctatccacagtgtgggttatagattcttaatagtaaactctggagtacccgacatgcatgctggtacaatttttgagtccagagatgctacattctttgagaatgaatttcctatgaaatatacacctagcacttctagtaaagaaactgtcatgccccatgagcactttgcaccgatagaacacaatgatgaaacgcctgaggaaaatcctgaggaggacaacattgtagatactcgcaagagtaagagacaaagggttgcaaaatcctttggagatgactacattgtatacctcgtggatgacaccccaagaaccatagaagaggcatattcatctcctgacgctgactactggaaggaagcagtacgcagtgaaatggactcgattatgtctaatggtacttgggaagtcgttgagcgtccatatgggtgcaagcccgtaggatgcaaatgggttttcaagaaaaagcttaggcctaatggtacaatcgaaaagtacaaggcaaggcttgtggccaagggttatacccaaaaggaaggcgaggatttcttcgacacatattcaccagttgctcgcttgactacgattcgagtactacttgctctggcagcctctcatggtcttctcgtccatcagatggacgttaagacagctttcctaaacagagagctggaggaggagatctatatggatcaaccagacgggtatgtactagaaggtcaggagggaatggtgtgtaaactattgaaatccttgtatggcctcaagcaagcacctaagcaatggcatgagaagtttgacatcacgcttacatctgcaggctttgttgtgaacgaagctgacaaatgtgtatactatcgctatggtgggggagaaggggtgatcttgtgcttgtatgtcgatgacatactgatctttgggaccagccttaatgtgattgaggaggtcaaagactatctgtctaagaattttgaaatgaaggatttgggagaggctgatgttattcttaacatcaaactacaaagaggagatgagtgtgggattacacttgtgcaatcccactatgtggacaaggttttgagtctctttggatatagtgactgcaagccagctcctactcctgatgatcccagcgtgctattcaggaaaaaccgaagaatagcaagggatcagctgagatactctcaaatcattggttcattgatgtacttggctagcgcaacgaggcctgacatctcatttgctgtaagcaagctgagccggtttgtctcaaatccgggagatgatcattggcaggctctggaaagagtaatgcgctatctaaagggcactatgagctatggaattcactataccgggtatccaaaagtactagaagggtatagtgactcaaactggatatctgatgctgatgagataaaagccacaagtggatatgtgttcacacttggaggtggcgctgtttcctggaagtcttgcaagcagaccatcttaacgaggtcaacaatggaagcagaacttacagcactagatactgcgacagttgaggccgagtggcttcgtgaactcctgatggatttgccggtggttgaaaaaccagtgccagctatcctaatgaactgcgataatcaaacagtgattattaaagtgaacagttcaaaggacaacatgaagtcatctagacacatcaagagaagactgaaatatgtcagaaagcagaaaaactccggagtgatagcattggactatgtccaaacggctagaaatctggcagatcagtttaccaaggggctaccacgtaatgtgatagacagtgcatcgagggaaatgggcttgatacccacctaa

SEQ ID NO: 15405 - DNA, 4242 bp, Oryza sativa
  Clone ID: TFbOSC401921j.C1.o13.fg
atgtcgaacactggagacaaggagaaggagactcccgtcaacaccaacggaggcaatactgcctcaaactccagcggaggaccattcttggggtataaccttattacattatttcaattagaagttttactgttaatgttcatcgcaatgtcaacattgtgtcattatgtgattgttgatgcttattcaacgttaagcatgctcatgttgattacattcaccactatcactggatcaaatcctattgtaaatatcatgtttattatcttgttattttggattaaaatatgccgaattatgaccaaatttccaacaatccaaaaacctgataggtcattttcggtagttggctttgctgctacactgaaaccacatgcctttgatggttcaaactataagagatggaaagcacgtgcactattgtggttgacagcgatgcagtgcttctatgtttcacggggcaaacgaagtgaaccacctctttctcctgaggaagaggctaagttcgaggcttcggattgcctgttccgtggagcattgatcagtgtactcgctgacaacatagtggacgtgtacatgcacatgccttctgggaaggaaatgtgggatgcacttgaggccaagttcggagtttctgacgccggcagtgagctgtatgttatggagcagttctatgactacaagatggtcgatgaccgttctgtagttgaacaagctcatgagattcagatgccggctaaggaacttgagaacaacaactgtgagttgccggacaagtttgtggcaggtggcattattgccaaactaccgccttcttggtcggactttgccacttctctaaagcacaagagacaagagttcagtgttcctgatctcattggctctttgggtgttgaggagaaggcgagggcaaaggacgtccggggcaaaaaggttgagggaggttctagtgccaatatggtacagaagaagaaccctcatgcatcccacaactacaagaaagtcaagcctgatgtcaaacccaaggctgcaaccaattttaagaagaaaagcaagggaaaggcaaagggagactgctttgtgtgtggcaagtctgggcattgggccaaggactgtcctgagcgcaaagacaggaagtctgccaacatgatcattagcgagggcggaggaacatcggggtacagtaaaatattacctacagttctctctgtttttcattcacctgattggtgggtggacactggtgctaatattcatgtatgtgctgacatttctctattttcttcttatcaggtcgggagaggttcctccttgttgatgggaaacgggtcgcttgcggctgttcatggtgttggtacggtcgatctgaagtttacttcgggaaagaccgtgcagctgaagaacgtgcagcatgtcccttcaataaagaagaatctagttagcggctctctattgtgtagagaaggttttagacttgtgtttgagtccaataaatgtgtcgtatctaaatatgggacttttgttggaaaaggttatgacagcggaggcttgttccgcttttctttgaatgacatgtgtaataatcataatgctgtgaaccatattagcgagaatgatgagtctaatgtgtggcattcgcgactctgtcatgtgaatttcagttgtatgacgcgcttagctaacatgagtttaattctaaaattcactttggtaaaaggttccaagtgccatacttgtgttcaatcgaaacaacctcgcaagcctcacaaggcatctgaggcgaggaatttggcacctctagaacttgttcattccgatttgtgtgaaatgaacggcgtgttgactaaagggggaaagaaatatttcatgacactgatagatgattgcactagattttgctatgtgtatttattgaaaacaaaggatgaggcattgcatttctttaaaatctataaagctgaggtagaaaaccaacttgaaaggaaaatcaaacggttgaggtctgatagaggtggggagtatttttccaatgagtttgcatccttttgcgaagagtttggaattattcatgagatgacgcctccctattcaccccaatcaaatggggtggccgaaagaaagaaccgtactctaactgagatggtgaatgccatgttagacactgcggggctttccaaggaatggtggggtgaggcagttttgactgcgtgtcatgtcctgaataaaattccaatgaagcataaggaaataacaccattcgaggaatgggaaaggaagaaattaaatctctcatacctacgaacatggggctgtttggccaaggtaaatgtacctatagccaaaaagcggaaacttggaccaaaaactgttgattgtgtgtttcttggttatgctatccacagtgtgggttatagattcttaatagtaaactctggagtacccgacatgcatgttggtacaattcttgagtccagagatgctacattctttgagaatgaatttcctatgaaatatacacctagcacttctagtaaagaaactgtcatgccccatgagcactttgcaccgatagaacacaatgatcaaacgcctgaggaaaatcctgaggaggacaacattgtagatactcgcaagagtaagagacaaagggttgcaaaatcctttggagatgactacattgtatacctcgtggatgacaccccaagaaccatagaagaggcatattcatctcctgacgctgactactggaaggaagcagtacgcagtgaaatggactcgattatgtctaatggtacttgggaagtcgttgagcgtccatatgggtgcaagcccgtaggatgcaaatgggttttcaagaaaaagcttaggcttgatggtacaatcgaaaagtacaaggcaaggcttgtggccaagggttatacccgaaaggaaggcgaggacttcttcgacacatactcaccagttgcttgcttgactacgattcgagtactacttgctctggcagcctctcatggtcttctcgtccatcagatggacgttaagacagctttcctgaacggagagctggaggaggagatctatatggatcaaccagacgggtatgtactagaaggtcaggagggaatggtgtgtaaactattgaaatccttgtatggcctcaagcaagcacctaagcaatggcatgagaagtttgacaccacgcttacatctgcaggctttgttgtgaacgaagctgacaaatgtgtatactatcgctatggtgggggagaaggggtgatcttgtgcttatatgtcgatgacatactgatctttgggaccagccttaatgtgattgaggaggtcaaagactatctgtccaagagttttgaaatgaaagatttgggagaggctgatgttattcttaacatcaaactacaaagaggagatgagggtgggattacacttgtgcaatcccactatgtggacaaggttttgagtcgctttggatatagtgactgcaagccagctcctactccttatgatcccagcgtgctattaaggaaaaaccgaagaatagcaagggatcagctgagatactctcaaatcattggttcattgatgtacttggctagcgcaacgaggcctgacatctcatttgctgtaagcaagctgagccggtttgtctcaaatccgggagatgatcattggcaggctctggaaagagtaatgcgctatctaaagggtactatgagctatggaattcactataccgggtatccaaaagtacaagaagggtatagtgactcaaactggatatctgatgctgatgagataaaagccacaagtggatatgtgttcacacttggaggtggcactgtttcctggaagtcttgcaagcagaccatcttaacgaggtcaacaatggaagcagaacttacagcactagatactgcgacagttgaggccgagtggcttcgtgaactcctgatggatttgccggtggttgaaaaaccagtgccagctatcctaatgaactgcgataatcaaacagtgattattaaagtgaacagttcaaaggacaacatgaagtcatctagacacatcaagagaagactgaaatctgtcagaaagcagaaaaactccggagtgatagcattggactatgtccaaacggctagaaatctggcagatcagtttaccaaggggctaccacgtaatgtgatagacagtgcatcgagggaaatgggcttgatacccacctaa

SEQ ID NO: 15406 - DNA, 3090 bp, Oryza sativa
  Clone ID: TFbOSC401925j.C1.o1.fg
atgtcgaacactggagacaaggagaaggagactcccgtcaacaccaacggaggcaatactgcctcaaactccagcggaggaccattcttggggtataaccttattacattatttcaattagaagttttactgttaatgttcatcgcaatgtcaacattgtgtcattatgtgattgttgatgcttattcaacgttaagcatgctcatgttgattacattcaccactatcactggatcaaatcctattgtaaatatcatgtttattatcttgttattttggattaaaatatgccgaattatgaccaaatttccaacaatccaaaaacctgataggtcattttcggtagttggctttgctgctacactgaaaccacatgcctttgatggttcaaactataagagatggaaagcacgtgcactattgtggttgacagcgatgcagtgcttctatgtttcacggggcaaacgaagtgaaccacctctttctcctgaggaagaggctaagttcgaggcttcggattgcctgttccgtggagcattgatcagtgtactcgctgacaacatagtggacgtgtacatgcacatgccttctgggaaggaaatgtgggatgcacttgaggccaagttcggagtttctgacgccggcagtgagctgtatgttatggagcagttctatgactacaagatggtcgatgaccgttctgtagttgaacaagctcatgagattcagatgccggctaaggaacttgagaacaacaactgtgagttgccggacaagtttgtggcaggtggcattattgccaaactaccgccttcttggtcggactttgccacttctctaaagcacaagagacaagagttcagtgttcctgatctcattggctctttgggtgttgaggagaaggcgagggcaaaggacgtccggggcaaaaaggttgagggaggttctagtgccaatatggtacagaagaagaaccctcatgcatcccacaactacaagaaagtcaagcctgatgtcaaacccaaggctgcaaccaattttaagaagaaaagcaagggaaaggcaaagggagactgctttgtgtgtggcaagtctgggcattgggccaaggactgtcctgagcgcaaagacaggaagtctgccaacatgatcattagcgagggcggaggaacatcggggtacagtaaaatattacctacagttctctctgtttttcattcacctgattggtgggtggacactggtgctaatattcatgtcgggagaggttcctccttgttgatgggaaacgggtcgcttgcggctgttcatggtgttggtacggtcgatctgaagtttacttcgggaaagaccgtgcagctgaagaacgtgcagcatgtcccttcaataaagaagaatctagttagcggctctctattgtgtagagaaggttttagacttgtgtttgagtccaataaatgtgtcgtatctaaatatgggacttttgttggaaaaggttatgacagcggaggcttgttccgcttttctttgaatgacatgtgtaataatcataatgctgtgaaccatattagcgagaatgatgagtctaatgtgtggcattcgcgactctgtcatgtgaatttcagttgtatgacgcgcttagctaacatgagtttaattctaaaattcactttggtaaaaggttccaagtgccatacttgtgttcaatcgaaacaacctcgcaagcctcacaaggcatctgaggcgaggaatttggcacctctagaacttgttcattccgatttgtgtgaaatgaacggcgtgttgactaaagggggaaagaaatatttcatgacactgatagatgattgcactagattttgctatgtgtatttattgaaaacaaaggatgaggcattgcatttctttaaaatctataaagctgaggtagaaaaccaacttgaaaggaaaatcaaacggttgaggtctgatagaggtggggagtatttttccaatgagtttgcatccttttgcgaagagtttggaattattcatgagatgacgcctccctattcaccccaatcaaatggggtggccgaaagaaagaaccgtactctaactgagatggtgaatgccatgttagacactgcggggctttccaaggaatggtggggtgaggcagttttgactgcgtgtcatgtcctgaataaaattccaatgaagcataaggaaataaccccattcgaggaatgggaaaggaagaaattaaatctctcatacctacgaacatggggctgtttggccaaggtaaatgtacctatagccaaaaagcggaaacttggaccaaaaactgttgattgtgtgtttcttggttatgctatccacagtgtgggttatagattcttaatagtaaactctggagtacccgacatgcatgttggtacaattcttgagtccagagatgctacattctttgagaatgaatttcctatgaaatatacacctagcacttctagtaaagaaactgtcatgccccatgagcactttgcaccgatagaacacaatgatcaaacgcctgaggaaaatcctgaggaggacaacattgtagatactcgcaagagtaagagacaaagggttgcaaaatcctttggagatgactacattgtatacctcgtggatgacaccccaagaaccatagaagaggcatattcatctcctgacgctgactactggaaggaagcagtacgcagtgaaatggactcgattatgtctaatggtacttgggaagtcgttgagcgtccatatgggtgcaagcccgtaggatgcaaatgggttttcaagaaaaagcttaggcttgatggtacaatcgaaaagtacaaggcaaggcttgtggccaagggttatacccgaaaggaaggcgaggacttcttcgacacatactcaccagttgcttgcttgactacgattcgagtactacttgctctggcagcctctcatggtcttctcgtccatcagatggacgttaagacagctttcctgaacggagagctggaggaggagatctatatggatcaaccagacgggtatgtactagaaggtcaggagggaatg

SEQ ID NO: 15407 - DNA, 3586 bp, Oryza sativa
  Clone ID: TFbOSC402516j.C1.o2.np
tggttgttgcggcgcaatatgattataggcaattttcctctatttcgtccataggtgccaaatttgggtgtaaacagctggctaaggaacttgagaacaacaactgtgagttgctggacaagtttgtggcgggtggcattattgccaaattgccaccttcttgctcggactttgccacttgtctaaagcacaagagataagagttcagtgtttctgatctcattggctctttgggtgttgaggagaaggcgagggcaaaggacgtccagggcaaaaagattgagggaggttctagtgccaatatggtacagaagaagaaccctcaagcatcccacaacaacaagaaagtcaagcctgatgtcaaacccaaggctgcaaccaactttaagaagaaaggcaagggaaaggcaaagggagactgctttgtgtgtggcaagtctgggcattgggccaaggattgtcctgagcgcaaagacaggaagtctgctaacatggtcattagcgagggcggaggaacatcggggtacggtaaaatattacctacagttctctctgtttttcactcacctgattggtgggtggatactgtgctaatattcatgtatgtgctgacatttctctgttttcttcttatcaggtcgggagaggttcctccttgttgatgggaaacgggtcgcttgcggctgttcatggtgttggtacgatcgatctgaagtttacttcgggaaataccgtgcagctgaagaacgtgcagcatgtcccttcatatataaagaagaatcttgttagcggctctctattgtgtagagaaggttttagacttgtgtttgagtccaataaatgtgtcgtatctaaatatgagacttttgttggaaaaggttatgacagcggaggcttgtttcgctttgctttgaatgacatgtgtaataatcataatgctgtgaaccatattagcgagaatgatgagtctaatgtgtggcattcgcgactctgtcatgtgaatttcggttgtatgacgcgcttagctaacatgagtttaattccaaaattcactttggtcaaaggttccaagtgccatacttgtgttcaatcgaaacaacctcgtaagcctcacaaggcatctgaggcgaggaatttggcacctctagaacttgttcattccgatttgtgcgaaatgaacagcgtgttgactaaagggggaaagaaatatttcatgacactgacagatgattgcactagattttgctatgtgtatctattgaaaagaaaggatgaagcattgcattactttaaaatctataaagctgaggtagaaaaccaacttgaaaggaaaatcaaacggttgaggtctgatagaggtagggagtatttttccaatgagtttgcatccttttgcgaagagtttggaattattcatgagagaacgcctccctatttaccccaatcaaatggggtggccgaaagaaagaaccgtactctagctgagatagtgaatgctatgttagacactacggggctttgcaaggaatggtggggtgaggcagttttgactgcgtgttatgtcctgaataaaattccaatgaagcataagaaagtaacaccattcgaggaatgggaaaggaagaaattaaatctctcatacctacgaacatggggctgtttggccaaggtaaatgtacctatagccaaaaagcggaaacttggaccaaatactgttgattgtgtgttccttggttatgctattcacagtgtgggttatagattcttaatagtaaactctggagtacccgacatgcatgttggtacaatttttgagtccagagatgctatattctttgagaatgaatttcccatgaaacatacacctagcacttctagtcaagaaactgtcatgccccatgagcactttgcaccgatagaacacaatgatcaaacgcctaagaaaaatcctgaggaggacaacattgtagatactcgcaagagtaagagacaaagggttgcaaaatcctttggagatgactacattgtatacctcgttgatgacaccccaagaaccatagaagaggcatattcatctcctgacgctgactactggaaggaagcagtacgtagtgaaatggacccgattatgtctaatggtagttgggaagtcgttgagcgtccatatggctgcaagcccataggatgcaaatgggttttcaagaaaaagtttaggcctaatggtacaattgaaaagtacaaggcaaggcttgtgcccaagggttatacccaaaaggaaggcgaggacttctttgacatatactcaccagttgctcgcttgaccacgattcgagtactacttgctctggcagcctctcatggtcttctcgtccatcagatggacgttaagacagctttcctaaacggagagctggaggaggagatctatatggatcaactagacgggtatgtactagaaggtcgggagggaatggtgtgtaaactgttgaaatccttgtatggcatcaagcaagcacctaagcaatggcatgaaaagtttgacaccacgcttacatctgtaggctttgttgtgaacgtagttgacaaatgtatgtactatcgctatggtgggggagaaggagtgatcttgtgcttatatgtcgatgacatattgatctttgggatcagccttaatgtgattgaggaggtcaaggactatctgtccaagagttttgaaatgaaggatttgggagaggctgatgttatccttaacatcaaactacaaagaggagatgagggtgggattacacttgtgcaatcccactatgtggacaaggttttgagtcgctttggatatagtgactgcaagccagctcctactccttatgatcccagcgtgctattaagaaaaaaccgaagaatagtaagggatcaactgagatactctcaaatcattggttcattgatatacttggctagtgcaacgaggcctgacatctcatttgctgtaagcaagctgagccggtttgtctcaaatccgggagatgatcattggcaggctctggaaagagtaatgcgctatctaaagggcactatgagctatggaattcactataccgggtatccaaaagtactagaagggtatagtgactcaaactggatatctgatgctgatgagataaaagtcacaagtggatatgtgttcacacttggaggtggcgctgtttcctggaagtcttgcaagcagaccatcttaacgaggtcaacaatggaagtagaacttacagcactagatactgcgacagttgaggccgagtggcttcgtgaactcctgatggatttgtcggtggttgaaaaaccagtgccagctatcctaatgaactgtgataatcaaacagtgattattaaattgaacagttcaaaggacaacatgaagttatctaggcatatcaagagaagactgaaatctgtcagaaagtagaaaaactccggagtgatagcattggactatgtccaaacggctagaaatctggcagatcagtttaccaaggggctaccacgtaatgtgatagatagtgcatcgagggaaatgggcatgatacctacc

SEQ ID NO: 15408 - DNA, 3906 bp, Oryza sativa
  Clone ID: TFbOSC402776j.C1.o10.gm
atgcagtgcttctatgtttcacggggcaaacgaagtgaaccacctctttctcctgaggaagaggctaagttcgaggcttcggattgcctgttccgtggagcattgatcagtgtactcgctgacaacatagtggacgtgtacatgcacatgccttctgggaaggacatgtgggatgcacttgaggccaagttcggagtttctgacgccggcagtgagctgtatgtcatggagcagttctatgactacaagatggtcgatgaccgttctgtagtagaacaagctcatgagattcagatgctggctaaggaacttgagaacaacaactgtgagttgccggacaagtttgtggcgggtggcattattgccaaactaccaccttcttggtcggactttgccacttctctaaagcacaagagacaagagttcagtgttcctgatctcattggctctttgggtgttgaggagaaggcgagggcaaaggacgtccggggcaaaagggttgagggaggttctagtgccaatatggtacagaagaagaaccctcatgcatcccacaacaataagaaagtcaagcctgatgtcaaacccaaggctgcaaccaattttaagaagaaaggcaagggaaaggcaaagggagactgctttgtgtgtggcaagtctgggcattgggccaaggactgtcctgagcgcaaagacaggaagtctgccaacatagtcattagcgagggcggaggaacatcggggacggtcgggagaggttccttcttgttgatgggaaacgggtcgcttgcggctgttcatggtattgccaaaaagcggaaacttggaccaaaaactgttgattgtgtgttccttggttatgctatccacagtgtgggttatagattcttaatagtaaactctggtgtacccgacatgcatgctggtacaattcttgagtccagagatgctacattctttgagaatgagtttcctatgaaatatacacctagcacttctagtaaagaaactgtcatgccccatgagcactttgcaccgatagaacacgatgatcaaacgcctgaggaaaatcctgaggaggacaacattgtagatactcgcaagagtaagagacaaagggttgcaaaatcctttggagatgactacattgtatacctcgtggatgacaccccaagaaccatagaagaggcatattcatctcctgacgctgactactggaaggaagcagtacgcagtgaaatggactcgattatgtctaatggtacttgggaagtcgttgagcgtccatatgggtgcaagcccgtaggatgcaaatgggttttcaagaaaaagcttaggcctgatggtacaatcgaaaagtacaaggcaaggcttgtggccaagggttatacccaaaaggaaggcgaggacttcttcaacacatactcaccagttgctcgcttgaccacgattcgagtactacttgctctggcagcctctcatggtcttctcgtccatcagatggacgttaagacagctttcctaaacggagagctggaggaggagatctatatggatcaaccagacgggtatgtactagaaggtcaggagggaatggtgtgtaaactattgaaatccttgtatggcctcaagcaagcacctaagcaatggcatgagaagtttgacaccacgcttacatctgcaggctttgttgtgaacgaagctgacaaatgtgtatactatcgctatggtgggggagaaggggtgatcttgtgcttgtatgtcgatgacatactgatctttgggaccagccttaatgtgattgaggaggtcaaagactatctgtccaagagttttgaaatgaaggatttgggagaggctgatgttattcttaacatcaaacttcaaagaggagatgagggtgggattacacttgtgcaatcccactatgtggacaaggttttgagtcgctttggatatagtgactgcaagccagctcctactccttatgatcccagcgtgctattaaggaaaaaccgaagaatagcaagggatcaactaagatactctcaaatcattggttcattgatgtacttggctagcgcaacgaggcctgacatctcatttgctgtaagcaagctgagccggtttgtctcaaatccgggagatgatcattggcaggctctggaaagagtaatgcgctatctaaagggcactatgagctatggaattcactataccgggtatccaaaagtactagaagggtatggtgactcaaactggatatctgatgctgatgagataaaagccacaagtggatatgtgttcacacttggaggtggcgctgtttcctggaagtcttgcaagcagaccatcttaacaaggtcaacaatggaagcagaacttacagcactagatactgcgacagttgaggccgagtggcttcgtgaactcctgatggatttgccggtggttgaaaaaccagtgccagctatcctaatgaactgcgataatcaaacagtgattattaaagtgaacagttcaaaggacaacatgaagtcatctagacacatcaagagaagactgaaatctgtcagaaagcagaaaaactccggagtgatagcattggactatgtccaaacggctagaaatctggcagatcagtttaccaaggggctaccacgtttttggggagtgcctcctgcacgactgctcatcgccatgtctggagttgctgccgccgctactggcccgccgacaggagctggtggtacgccgccgccgacaggagctggatccggagctggtgcgccaggaggaggtgccgtgaacgactacaacaacggaggcaattctgcctcaccatccagcggagggccattctcgggggacggctatgcatttgcatccacagagaacagcatggttatctacaacattaatgtggctcctctgataaaaagtaacaaatacacgcttttggctgagcggacgaggaagtgggaggaggagaagaggcaggagcgccgtgagggcaaggccccggcggctcccgccggcaaccggcgaggtgaggccaagcagaaggccaccgccgaggacatcgacgatggcgacgaggacttggggttccaggagcctgaggccaccgtcgccaccgtcgatgggggagcgtgcgctcacgcttctcgctggagcctcaaggccatgaagcgcgagcttctggccgcggcccctacccatgaggcgacgcggcgggcgcggtggtcggaggttgccctcaccttcgaccagaccgaccacccgccgtgcgttgcccggggaggacagatcgcgatggtggtttcccccaccgtttgcaatgtgaagttggggcgtgtcctcatagacgggggtgcagccctcaacatcctttcccccgtagcctttgacgccatcaaggccctggggatggtgctccggccgtcccagccgatcatcggtgtgacgctggggcacacctggccgctgggtcatatcgacctcccggtcaccttcggtggttccgccaacttccgcacggagcgggtggacttcgatgtggcggacctcagtctgccctacaacgcggtcctggggaggcccgcgttggtgaagttcatggcggcggtccactacgcctatctccagatgaagatgccgggccccggtggccccatcaccgtccatggcgacctcaaagttgcgcttgcttgtatggagcagcacgcggaccacctcgccgcggcgtccaagcccgcgggtggcgacgagaggctcagcgcctccgtcccggccgccccgaggcagcggatggtcacgtgcgacgaggtcccggtcaaggaggttgccctgggcgacggcccgtccaagaccacacgaatcggtggtcttctggacgacaaatag

SEQ ID NO: 15409 - DNA, 4317 bp, Oryza sativa
  Clone ID: TFbOSC406028j.C1.o4.fg
atgtctggaggtgcgccgccgccgacaggagctggatccggagctggtgcgccaggaggaggtgccgtgaacgactacaacaacggaggcaattctgcctcaccatccagcggagggccattctcggggtataatcttctccttctactgctgttagcgctactcctgttcccattgttagcgctatactgtgtgcgctatgttcttgttcctgttctacatgatgcctctagcatgttatcgcattactggtatgttcctgtttctgacattcatgatgcgcatagtatgctactggttatgttaagatcaccctacactgcttatgccatgatcatagttttaatttctaggattaaaatatgccgaataatgactatatttccaacaatccaaaaacctgataggtcattttcggtagttggctttgctgctgcactgaaaccacatgcttttgatggttcaaactataagagatggaaagcacgtgcactattgtggttgacagcgatgcagtgcttctatgtttcacggggtaaacgaagtgaaccacctctttctcctgaggaagaggctaagttcgaggcttcggattgcctgttccgtggagcattgataagtgtactcgctgacaacatagtggacgtgtacatgcacatgccttctgggaaggacatgtgggatgcacttgaggccaagttcggagtttctgacgccggcagtgagctgtatgtcatggagcagttctatgactacaagatggtcgatgaccgttctgtagtagaacaagctcatgagattcagatgctggctaaggaacttgagaacaacaactgtgagttgccggacaagtttgtggcgggtggcattattgccaaactaccaccttcttggtcggactttgccacttctctaaagcacaagagacaagagttcagtgttcctgatctcattggctctttgggtgttgaggagaaggcgagggcaaaggacatccggggcaaaaaggttgagggaggttctagtgccaatatggtacagaagaagaaccctcatgcatcccacaacaacaagaaagtcaagcctgatgtcaaacccaaggctgcaaccaattttaagaagaaaggcaagggaaaggcaaagggagactgctttgtgtgtggcaagtctgggcattgggccaaggactgtcctgagcgcaaagacaggaagtctgccaacatgatcattagcgagggcggaggaacatcggggtacggtaaaatattacctacagttctctctgtttttcattcacctgattggtgggtggatactggtgctaatattcatgtatgtgctgacatttctctgttttcttcttatcaggtcgggagaggttcctccttgttgatgggaaacgggtcgcttgcggctgttcatggtgttggtacggtcgatctgaagtttacttcgggaaagaccgtgcagctgaagaacgtgcagcatgtcccttcaataaagaagaatctagttagcggctctctattgtgtagagaaggttttagacttgtgtttgagtccaataaatgtgtcgtatctaaatatgggacttttgttggaaaaggttatgacagcggaggcttgttccgcttttctttgaatgacatgtgtaataatcataacgctgtgaaccatattagcgagaatgatgagtctaatgtgtggcattcgcgactctgtcatgtgaatttcggttgtatgatgcgcttagctaacatgagtttaattccaaaattcactttggtcaaaggttccaagtgccatacttgtgttcaatcgaaacaacctcgcaagcctcacaaggcatctgaggcgaggaatttggcacctctagaacttgttcattccgatttgtgcgaaatgaacggcgtgttgactaaagggggaaagaaatatttcatgacactgatagatgattgcactagattttgctatgcatatctattgaaaacaaaggatgaggcattgcattactttaaaatctataaagctgaggtagaaaaccaacttgaaaggaaaatcaaacggttgaggtctgatagaggtggggagtatttttccaatgagtttgcatccttttgcgaagagtttggaattattcatgagatgatgcctccctattcaccccaatcaaatggggtggccgaaaaaaagaaccgtactctaactgagatggtgaatgccatgttagacactgcggggctttccaaggaatggtggggtgaggcagttttgactgcgtgtcatgtcctgaataaaattccaatgaagcacaaggaagtaacaccattcgaggaatgggaaaggaagaaattaaatctctcatacctacgaacatggggctgtttggccaaggtaaatgtacctatagtcaaaaagcggaaacttggaccaaaaactgttgattgtgtgtttcttggttatgctatccacagtgtgggttatagattcttaatagtaaactctggagtacccgacatgcatgctggtacaatttttgagtccagagatgctactttctttgagaatgaatttcctatgaaatatacatctagcacttctagtaaagaaactgtcatgccccatgagcactttgcaccgatagaacacaatgatcaaacgtctgaggaaaatcctgaggaggacaacattgtagatactcgcaagagtaagagacaaagggttgcaaaatcctttggagatgactacattgtatacctcgtggatgacaccccaagaaccatagaagaggcatattcatctcctgacgctgactactggaaggaagcagtacgcagtgaaatggactcgattatgtctaatggtacttgggaagtcgttgagcgtccatatggatgtaagcccgtaggatgcaaatgggttttcaagaaaaagcttaggcctgatggtacaatcgaaaagtataaggcaaggcttgtggccaagggttatacccaaaaggaaggcgaggatttcttcgacacatattcaccagttgctcgcttgactacgattcgagtactacttgctctggcagcctctcatggtcttctcgtccatcagatggacgttaagacagctttcctaaacggagagctggaggaggagatctatatggatcaaccagacgggtatgtactagaaggtcaggagggaatggtgtgtaagctattgaaatacttgtatggcctcaagcaagcacctaagcaatggcatgagaagtttgacaccacgcttacatctgcaggctttgttgtgaacgaagctgacaaatgtgtatactatcgctatggtgggggagaaggggtgatcttatgcttgtatgtcgatgacatactgatctttgggaccagccttaatgtgattgaggaggtcaaagactatctgtccaagagttttgaaatgaaggatttgggagaggctgatgttattcttaacatcaaactacaaagaggagatgagggtgggattacacttgtgcaatcccactatgtggacaaggttttgagtcgctttggatatagtgactgtaagccagctcctactccttatgatcccagcgtgctattaaggaaaaaccgaagaatagcaagggatcaactgagatactctcaaatcattggttcattgatgtacttggctagcgcaacgaggcctgacatctcatttgctgtaagcaagctgagccggtttgtctcaaatccgggagatgatcattggcaggctctggaaagagtaatgcgctatctaaagggcactatgagctatggaattcactataccgggtatccaaaagtactagaagggtatagtgactcaaactggatatctgatgctgatgagataaaagccacaagtggatatgcgttcacacttggaggtggcgctgtttcctggaagtcttgcaagcagaccatcttaacgaggtcaacaatggaagcagaacttacagcactagatactgcgacagttgaggctgagtggcttcgtgaactcctgatggatttgccggtggttgaaaaaccagtgccagctatcctaatgaactgcgataatcaaacagtgattattaaagtgaacagttcaaaggacaacatgaagtcatctagacacatcaagagaagactgaaatctgtcagaaagcagaaaaactccggagtgatagcattggactatgtccaaacggctagaaatctggcagatcagtttaccaaggggctaccacgtaatgtgatagacagtgcatcgagggaaatgggcttgatacccacctaa

SEQ ID NO: 15410 - DNA, 4149 bp, Oryza sativa
  Clone ID: TFbOSC408407j.C1.o3.fg
atgtcgaacactggagacaaggagaaggagactcccgtcaacaccaacggaggcaatactgcctcaaactccagcggaggaccattcttggggtataaccttattacattatttcaattagaatttttactgttaatgttcatcacaatgtcaacattgtgtcattatgtgattgttgatgcttattcaacgttaagcatgctcatgttgattacattcaccactatcactggatcaaatcctattgtaaatatcatgtttattatcttgttattttggattaaaatatgccgaattatgaccaaatttccaacaatccagaaacctgataggtcattttcggtagttggctttgctgctgcactgaaaccacatgcttttgatggttcaaactataagagatggaaagcacgtgcactattgtggttgacagcgatgcagtgcttctatgtttcacggggcaaacgaagtgaaccacctctttctcctgaggaagaggctaagttcgaggcttcggattgcctgttccgtggagcattgatcagtgtactcgctgacaacatagtggacgtgtacatgcacatgccttctgggaaggacatgtgggatgcacttgaggccaagttcggagtttctgacgccggcagtgagctgtatgttatggagcagttctatgactacaagatggtcgatgaccgttctgtagttgaacaagctcatgagattcagatgctggctaaggaacttgagaacaacaactgtgagttgccggacaagtttgtggcaggtggcattattgccaaactaccaccttcttggtcggactttgccacttctctaaagcacaagagacaagagttcagtgttcctgatctcattggctctttgggtgttgaggagaaggcgagggcaaaggacgtccggggcaaaaaggttgagggaggttctagtgccaatatggtacagaagaagaaccctcatgcatcccacaacaacaagaaagtcaagcctgatgtcaaacccaaggctgcaaccaattttaagaagaaaagcaagggaaaggcaaagggagactgctttgtgtgtggcaagtctgggcattgggccaaggactgtcctgagcgcaaagacaggaagtctgccaacatgatcattagcgagggcggaggaacatcggggtacggtaaaatattacctacagttctctctgtttttcattcacctgattggtgggtggacactggtgctaatattcatgtatgtgctgacatttctctattttcttcttatcaggtcgggagaggttcctctttgatgatgggaaacgggtcgcttgcggctgttcatggtgttggtacggtcgatctgaagtttacttcgggaaagaccgtgcagctgaagaacgtgcagcatgtcccttcaataaagaagaatctagttagcggctctctattgtgtagagaaggttttagacttgtgtttgagtccaataaatgtgtcgtatctaaatatgggacttttgttggaaaaggttatgacagcggaggcttgttccgcttttctttgaatgacatgtgtaataatcataatgttgtgaaccatattagcgagaatgatgagtctaatgtgtggcattcgcgactctgtcatgtgaatttcggttgtatgacgcgcttagctaacatgagtttaattccaaaattcactttggtaaaaggttccaagtgccatacttgtgttcaatcgaaacaacctcgcaagcctcacaaggcatctgaggcgaggaatttggcacctctagaacttgttcattccgatttgtgcgaaatgaacggcgtgttgactaaagggggaaagaaatatttcatgacactgatagatgattgcactagattttgctatgtgtatctattgaaaacaaaggatgaggcattgcatttctttaaaatctataaagctgaggtagaaaaccaacttgaaaggaaaatcaaacggttgaggtctgatagaggtggggagtatttttccaatgagtttgcatccttttgcgaagagtttggaattattcatgagatgacgcctccctattcaccccaatcaaatggggtggccgaaagaaagaaccgtactctaactgagatggtgaatgccatgttagacactgcggggctttccaaggaatggtggggtgaggcagttttgactgcgtgtcatgtcctgaataaaattccaatgaagcataaggaagtaacaccattcgaggaatgggaaaggaagaaattaaatctctcatacctacgaacatggggctgtttggccaaggtaaatgtacctatagccaaaaagcggaaacttggaccaaaaactgttgattgtgtgtttcttggttatgctatccacagtgtgggttatagattcttaatagtaaactctggagtacccgacatgtatgttggtagaattcttgagtccagagatgctacattctttgagaatgaatttcctatgaaatatacacctagcacttctagtaaagaaactgtcatgccccatgagcactttgcaccgatagaacacaatgatcaaacgcctgaggataatcctgaggaggacaacattgtagatactcgcaagagtaagagacaaagggttgcaaaatcctttggagatgactacattgtatacctcgtggatgacaccccaagaaccatagaagaggcatattcatctcctaacgctgactactggaaggaagcagtacgcagtgaaatggactcgattatgtctaatggtacttgggaagtcgttgagcgtccatatgggtgcaagcccgtaggatgcaaatgggttttcaagaaaaagcttaggcctgatggtacaatcgaaaagtacaaggcaaggcttgtggccaagggttatacccaaaaggaaggcgaggacttcttcgacacatactcaccagttgctcgcttgaccacgattcgagtactacttgctctggcagcctctcatggtcttctcgtccatcagatggacgttaagacagctttcctaaacggagagctggaggaggagatctatatggatcaaccagacgggtatgtactagaaggtcaggagggaatggtgtgtaaactattgaaatccttgtatgtcctcaagcaagcacctaagcaatggcatgagaagtttgacaccacgcttacatctgcaggctttgttgtgaacgaagctgacaaatgtgtatactatcgctatggtgggggagaaggggtgatcttgtgcttatatgtcgatgacatactgatctttgggaccagccttaatgtgattgaggaggtcaaagactatttgtccaagagttttgaaatgaaggatttgggagaggctgatgttattcttaacatcaaactacaaagaggagatgagggtgggattacacttgtgcaatcccactatgtggacaaggttttgagtcgctttggatatagtgactgcaagctagctcctactccttatgatcccagcgtgctattaaggaaaaaccgaagaatagcaagggatcagctgagatactctcaaatcattggttcattgatatacttggctagcgcaacgaggcctgacatctcatttgctgtaagcaagctgagccggtttgtctcaaatccggcagatgatcattggcaggctctggaaagagtaatgcgctatctaaagggtactatgagctatggaattcactataccgggtatccaaaagtactagaagggtatagtgactcaaactggatatctgatgctgatgaggtaaaagccacaagtggatatgtgttcacacttggaggtggcgctgtttcctggaagtcttgcaagcagaccatcttaacgaggtcaacaatggaagcagaacttacagcactagatactgcgacagttgaggccgagtggcttcgtgaactcctgatagatttgccggtggttgaaaaaccagtgccagctatcctaatgaactacgataatcaaacagtgattattaaagtgaatagttcaaaggacaacatgaagtcatctagacacatcaagagaagactgaaatctgtcagaaagcagaaaaactccggagtgatagcattggactatgtctaa

SEQ ID NO: 15411 - DNA, 4374 bp, Oryza sativa
  Clone ID: TFbOSC408508j.C1.o21.fg
atgtctggagttgctgccgccactgctggcggaggtggtacgccgccgccgacaggagctggatctggatccggagctggtgcgccaggaggaggtgccgtgaacgactacaacaacggaggcaattctgcctcaccatccagcggagggccattctcggggtataatcttctcctcctgctactgctgttagcgctattcctgttcccattgttagcgctatactatgtgcgctatgttcgctatgttcttgttcctgttctacatgatgcctctagcatgttatcgagcatgttatcgcgttactggtatgttcctgttcctgacattcatgatgcgcatagtatgctactggttatgttaagatcaccctacactgcttatgccatgatcattgtttcattttcttggattaaaatatgccgattaatgactatatttccaacaatccaaaaacctgataggtcattttcggtagttggctttgctgctgcactgaaaccacatgcttttgatggttcaaactataagagatggaaagcacgtgcactattgtggttgacagcgatgcagtgcttctatgtttcacggggcaaacgaagtgaaccacctctttctcctgacgaagaggctaagttcgaggcttcggattgcctgttccgtggagcattgatcagtgtactcgctgacaacatagtggacgtgtacatgcacatgccttctgggaaggacatgtgggatgcacttgaggccaagttcggagtttctgacgccggcagtgagctgtatgtcatggagcagttctatgactacaagatggtcgatgaccgttctgtagtagaacaagcttatgagattcagatgctggctaaggaacttgagaacaacaactgtgagttgccggacaagtttgtggcgggtggcattattgccaaactaccaccttcttggtcggaccttgccacttctctaaagcacaagagacaagagttcagtgttcctgatctcattggctctttgggtgttgaggagaaggcgagggcaaagtacgtccggggcaaaaaggttgagggaggttctagtgccaatatggtacagaagaagaaccctcatgcatcccacaacaacaagaaagtcaagcctgatgtcaaacccaaggctgcaaccaattttaagaagaaaggcaagggaaaggcaaagggagactgctttgtgtgtggcaagtctgggcattgggccaaggactgtcctgagcgcaaagacaggaagtctgccaacatgatcattagcgagggcggaggaacatcggggtatggtaaaatattacctacagttctctctgtttttcattcacctgattggtgggtggatactggtgctaatattcatgtatgtgctgacatttctctgttttcttcttatcaggtcgggagaggttcctccttgttgatgggaaacgggtcgcttgcggctgttcatggtgttggtacggtcgatctgaagtttacttcgggaaagaccgtgcagctgaagaacgtgcaacatgtcccttcaataaagaagaatctagttagcggctctctattgtgtagagaaggttttagacttgtgtttgagtccaataaatgtgtcgtatctaaatatgggacttttgttggaaaaggttatgacagcggaggcttgttccgcttttctttgaatgacatgtgtaataatcataatgctgtgaaccatattagcgagaatgatgagtctaatgtgtggcattcgcgactctgtcatgtgaatttcggttgtatgacgcgcttagctaacatgagtttaatttcaaaattcactttggtcaaaggttccaagtgccatacttgtgttcaatcgaaacaacctcgcaagcctcacaaggcatctgaggcgaggaatttggcacctctagaacttgttcattccgatttgtgcgaaatgaacggcgtgttgactaaagggggaaagaaatatttcatgacactgatagatgattgcactagattttgctatgtgtatctattgaaaacaaaggatgaggcattgcattactttaaaatctataaagctgaggtagaaaaccaacttgaaaggaaaatcaaacggttgagatctgatagaggtggggagtatttttccaatgagtttgcatccttttgcgaagagtttggaattattcatgagatgtcgcctccctattcaccccaatcaaatggggtggccgaaagaaagaaccgtactctaactgagatggtgaatgccatgttagatactgcggggctttccaaggaatggtggggtgaggcagttttgactgcgtgtcatgtcctgaataaaattccaatgaagcataaggaagtaacaccattcgaggaatgggaaaggaagaaattaaatctctcatacctacgaacatggggctgtttggccaaggtaaatgtacctatagccaaaaagcggaaacttggaccaaaaactgttgattgtgtgtttcttggttatgctatccacagtgtgggttatagattcttaatagtaaactctggagtacccgacatgcatgctggtacaattcttgagtccagagatgctacattctttgagaatgaatttcctatgaaatatacacctagcacttctagtaaagaaactgtcatgccccatgagcactttgcaccgatagaacacgatgatcaaacgcctgaggaaaatcctgaggaggacaacattgtagatactcgcaagagtaagagacaaagggttgcaaaatcctttggagatgactacattgtatacctcgtggatgacaccccaagaaccatagaagaggcatattcatctcctgacgctgactactggaaggaagcagtacgcagtgaaatggactcgattatgtctaatggtacttgggaagtcgttgagcatccatatgggtgtaagcccgtaggatgcaaatgggttttcaagaaaaagcttaggcctgatggtacaatcgaaaagtacaaggcaaggcttgtagccaagggttatacccaaaaggaaggcgaggacttcttcgacacatactcaccagttgctcgcttgaccacgattcgagtactacttgctctggcagcctctcatggtcttctcgtccatcagatggacgttaagacagctttcctaaacggagagctggaggaggagatctatatggatcaaccagacgggtatgtactagaaggtcaggagggaatggtgtgtaaactattgaaatccttatatggcctcaagcaagcacctaagcaatggcatgagaagtttgacaccacgcttacatctgcaggctttgttgtgaacgaagctgacaaatgtgtatactatcgctatggtgggggagaaggggtgatcttgtgcttatatgtcgatgacatactgatctttgggactagccttaatgtgattgaggaggtcaaagactatctgtccaagagttttgaaatgaaggatttgggagaggctgatgttattcttaacatcaaactacaaagaggagatgagggtgggattacacttgtgcaatcccactatgtggacaaggttttgagtcgctttggatatagtgactgcaagccagctcctactccttatgatcctaacgtgctattaaggaaaaaccgaagaatagcaagggatcaactgagatactctcaaatcattggttcattgatgtacttggctagcgcaacgaggcctgacatctcatttgctgtaagcaagctgagccggtttgtctcaaatccgggagatgatcattggcaggctctggaaagagtaatgcgctatctaaagggcactatgagctatggaattcactataccgggtatccaaaagtactagaagggtatagtgactcaaactggatatctgatgctaatgagataaaagccataagtggatatgcgttcacacttggaggtggcgctgtttcctggaagtcttgcaagcagaccatcttaacgaggtcaacaatggaagcagaacttacagcactagatactgcgacagttgaggccgagtggcttcgtgaactcctgatggatttgccggtggttgaaaaaccagtgccagctatcctaatgaactgcgataatcaaacagtgattattaaagtgaacagttcaaaggacaacatgaagtcatctagacacatcaagagaagactgaaatctgtcagaaagcagaaaaactccggagtgatagcattggactatgtccaaacggctagaaatctggcagatcagtttaccaaggggctaccacgtaatgtgatagacagtgcatcgagggaaatgggcttgatacccacctaa

SEQ ID NO: 15412 - DNA, 3102 bp, Oryza sativa
  Clone ID: TFbOSC410626j.C1.o4.gm
atggggagccactggtcatcgccgccggtcaccgccgccagagccgccgccgccgtcgccggtggggaggccaggagggaggaagagacctgcaccggcagcttattcctcgtcgccgatgcactacatgagcatcatcatgggcggccaaatattgccggcgcgacctgcgtgccgcacgagagggacgcgctgctggccttcaaggaaggtgtcgtcggcgaccccgtgggccgcctcgcttcgtggcgtaccggagaagactgcttccgccattggagaggtgtcaggtgcagcaacctcaccggccatgtccttaagctccacctccgcaacacggatggtggagaggcagctatgtccggcaaggcgggtgatcaagtttttggggactgcttcccgcacgactgctctgttcgtccaccatgtctgcgcctggagccggagctgccgccggcgccgctgctgcctctggagatggcgcgccgggagccggagccgttcgagccggagctgccgctggcgccgttgctgcctctggagatggcacgccgggagccggaggcgttgcgaacgtcaactccaacggaggcaattctgcctcacaatccagcggagggccattctcgggcgatgcaatgcttctatgtttcacggggcaaacgaagtgaaccacctctttctcctgaggaagaggctaaattcaaggcttcggattgcctgttccgtggagcattgatcagtgtactcgctgacaatatagtggacgtgtacatgcacatgcctttcgggaaggacatgtgggatgcacttgaggccaagttcggagtttccgacgccggcagtgagctgtatgtcatggagcagttttatgactacaagatggtcgatgaccgttctgtagtagaacaagctcatgagattcagatgctgactaaggaacttgagaacaacaactgtgagttgccggacaagtttgtggcgggtggcattattgccaaattgccaccttcttggtcggactttgccacttctctaaagcacaagaggcaagagttcagtgtttctgatctcattggctctttgggtgttgaggagaaggcgagggcaaaggacaactggggcaaaaaggttgagggaggttctagtgccaatatggtacagaagaagaaccgtcatgcatcccacaacaacaacaagaaagtcaagcctgatgtcaaacccaaggttgcaaccaactttaagaagaaaggcaagggaaaggcaaagggcgactgctttgtgtgtggcaagtctgggcattgggccaaggactgtcctgagcgcaaagacaggaagtgtgccaacatggtcattagcgagggcggaggaacatcgggagatgctacattctttgagaatgaattttccatgaaacatacacctagcacttctagtcaagaaactgtcatgccccataagcactttgcaccgatagaacacaatgatcaaacgcctgaggaaaatcctgaggaggacaacattgtagatactcgtaagagtaagagacaaagggttgcaaaatcctttggagatgactacattgtatacctcgtggatgacaccccaagaaccatagaagaggcatattcatctcctgacgctgactactggaaggaagcagtacgcagtgagatggactcgattatgtctaatgatacttgggaagtcgttgagcgtccatatgggtgcaagcctataggatgcaaatgggttttcaagaaaaagcttagccctgatggtacaatcgaaaagtacaaggcaagacttgtggccaagggttatacccaaaaggaaggcaaggattttttcgacacatactcaccagttgctcacttgacaatgattcgagtactacttgctctggcagcctctcatggtgttctcgtccatcagatgaacgttaagacagctttcctaaacggagagctggaggaggagatctatatggatcaaccagacgggtatgtactagaaggctttgttgtgaacggagctgacaaatgtgtgtactatcgctatggtgggggagaaggagtgatcttgtgcttatatgtcgatgacatattgatctttgggaccaacctcaatgtgattgagggggtcaaggactatctgtccaagagttttgaaatgaaggatttgggagaggctgatgttattcttaacattaaactacaaagaggagatgagggtgagattacacttgtgcaatcccactatgtggacaagattttgagtcactttggatatagtggctgcaagccagcttctactccttatgatcccagcgtgctattaaggaaaaaccgaagaatagcaagggatcaactgagatactcccaaataattggttcattgatgtacttggctagtgcaacgaggcctgacatctcatttgctgtaagcaagctgagccggtttgtcttaaatccgggagatgatcattggcaggctctggaaagagtaatgcgctatctaaagggcattatgagttatggaattcactataccaggtatccaaaagtactagaagggtatagtgactcaaactggatatctgatgctgataagataaaagccacaagtggatatgtgttcgcacttggaggtggcactgtttcctggaagccttgcaagcagaccatcttaacgaggtcaacaatggaagtagaacttacagcactagatactgcgacagttgaggccgagtggcttcgtgaactcctgatggatttgccggtggttggaaaaccagtgccagctatcctaatgaactgtgacaatcaaacaatgattattaaagtgaacagttcaaaggacaacatgaagtcatctaggcatatcaagagaagactgaaatctgtcagaaagcagaaaaactccggagtgatagcattggactatgtccaaacggctagaaatctggcagatcagtttaccaaggggctaccacgtaatgatggctcaaaccttaatgtgatccgagtggcttttccaagcagagatgttgacctgcagaacatctcagaaggaacacacctatatgagttcgactgctag

SEQ ID NO: 15413 - DNA, 3705 bp, Oryza sativa
  Clone ID: TFbOSC411338j.C1.o6.fg
atgtcgaacactggagacaaggagaaggagactcccgtcaacaccaacggaggcaatactgcctcaaactccagcggaggaccattcttggggtataaccttattacattatttcaattagaagttttactgttaatgtacatcgcaatgtcaacattgtgtcattatgtgattgttgatgcttattcaacgttaagcatgctcatgttgattacattcaccactatcactggatcaaatcctattgtaaatatcatgtttattatcttgttattttggattaaaatatgccgaattatgaccaaatttccaacaatccaaaaacctgataggtcattttcggtagttggctttgctgctgcactgaaaccacatgcctttgatggttcaaactataagagatggaaagcacgtgcactattgtggttgacagcgatgcagtgcttctatgtttcacggggcaaacgaagtgaaccacctctttctcctgaggaagaggctaagttcgaggcttcggattgcctgttccgtggagcattgatcagtgtactcgctgacaacatagtggacgtgtacatgcacatgccttctgggaaggacatgtgggatgcacttgaggccaagttcggagtttctgacgccggcagtgagctgtatgttatggagcagttctatgactacaagatggtcgatgaccgttctgtagttgaacaagctcatgagattcagatgctggctaaggaacttgagaacaacaactgtgagttgccggacaagtttgtggcaggtggcattattgccaaactaccaccttcttggtcggactttgccacttctctaaagcacaagagacaagagttcagtgttcctgatctcattggctctttgggtgttgaggagaaggcgagggcaaaggacgtccggggcaaaaaggttgagggaggttctagtgccaatatggtacagaagaagaaccctcatgcatcccacaacaacaagaaagtcaagcctgatgtcaaacccaaggctgcaaccaattttaagaagaaaagcaagggaaaggcaaagggagactgctttgtgtgtggcaagtctgggcattgggccaaggactgtcctgagcgcaaagacaggaagtctgccaacatgatcattagcgaggacggaggaacatcggggtacggcaaaatattacctacagttctctctgtttttcattcacctgattggtgggtggacactggtgctaatattcatgtcgggagaggttcctccttgttgatgggaaacgggtcgcttgcggctgttcatggtgttggtacggtcgatctgaagtttacttcgggaaagaccgtgcagctgaagaacgtgcagcatgtcctttcaataaagaagaatctagttagcggctctctattgtgtagagaagattttagacttgtgtttgagtccaataaatgtgtcgtatctaaatatgggacttttgttggaaaaggttatgacagcggaggcttgttccgcttttctttgaatgacatgtctaataatcataatgctgtgaaccatattagcgagaatgatgagtctaatgaaaatcaaacggttgggtctgatagaggtggggagtatttttccaatgagtttgcatccttttgcgaagagtttggaattattcatgagatgacgcctccctattcaccccaatcaaatggggtggccgaaagaaagaaccgtactctaactgagatggtgaatgccatgttagacactgcggggctttccaaggaatggtggggtgaggcagttttgactgcgtgtcatgtcctgaataaaattccaatgaagcataaggaagtaacaccattcgaggaatgggaaaggaagaaattaaatctctcatacctacgaacatggggctgtttggccaaggtaaatgtacctatagccaaaaagcggaaacttggaccaaaaactgttgattgtgtgtttcttggttatgctatccacagtgtgggttatagattcttaatagtaaactctggagtacccgacatgcatgttggtacaattcttgagtccagagatgctacattctttgagaatgaatttcctatgaaatatacacctagcacttctagtaaagaaactgtcatgccccatgagcactttgcaccgatagaacacaatgatcaaacgcctgaggaaaatcctgaggagggcaacattgtagatactcgcaagagtaagagacaaagggttgcaaaatcctttggagatgactacattgtatacctcgtggatgacaccccaagaaccatagaagaggcatattcatctcctgacgctgactactggaaggaagcagtacgcagtgaaatggactcgattatgtctaatggtacttgggaagtcgttgagcgtccatatgggtgcaagcccgtaggatgcaaatgggttttcaagaaaaagcttaggcctgatggtacaatcgaaaagtacaaggcaaggcttgtggccaagggttatacccaaaaggaaggcgaggacttcttcgacacatactcaccagttgctcgcttgaccacgattcgagtactacttgctctggcagcctctcatggtcttctcgtccatcagatggacgttaagacagctttcctaaacggagagctggaggaggagatctatatggatcaaccagacgggtatgtactagaaggtcaggagggaatggtgtgtaaactattgaaatccttgtatggcctcaagcaagcacctaagcaatggcatgagaagtttgacaccacgcttacatctgcaggctttgttgtgaacgaagctgacaaatgtgtatactatcgctatggtgggggagaaggggtgatcttgtgcttatatgtcgatgacatactgatctttgggaccagccttaatgtgattgaggaggtcaaagactatctgtccaagagttttgaaatgaaagatttgggagaggctgatgttattattaacatcaaactacaaagaggagatgagggtgggattcacttgtgcaatcccactatgtggacaagcgcaacgaggcctgacatctcatttgctgtaagcaagctgagccggtttgtctcaaatccgggagatgatcattggcaggctctggaaagagtaatgcgctatctaaagggtactatgagctatggaattcactataccgggtatccaaaagtactagaagggtatagtgactcaaactggatatctgatgctgatgagataaaagccacaagtggatatgtgttcacacttggaggtggcgttgtttcctggaagtcttgcaagcagaccatcttaacgaggtcaacaatggaagcagaacttacagcactagatactgcgacagttgaggccgagtggcttcgtgaactcctgatagatttgccggtggttgaaaaaccagtgccagctatcctaatgaactgcgataatcaaacagtgattattaaagtgaacagttcaaaggacaacatgaagtcatctagacacatcaagagaagactgaaatctgtcagaaagcagaaaaactccggagtgatagcattggactatgtccaaacggctagaaatctggcagatcagtttaccaaggggctaccacgtaatgtgatagacagtgcatcgagggaaataggcttgatacccacctaa

SEQ ID NO: 15414 - DNA, 3514 bp, Oryza sativa
  Clone ID: TFbOSC415168j.C1.o9.fg
atgtctggagttgctaccgccgctattggcggaggtggtgcgccgccaccgacaggagctgcgccgccgccgacgccgacaggagctggatccggagctggtgcgccaggaggaggtgctgtgaacgactacaacaacggaggcaattctgcctcaccatccagcggagggccattctcggggtataatcttctccttctactgctgttagcgctactcctgttcccattgttagcgctatactgtgtgcgctatgttcttgttcctgttctacatgatgcctctagcatgttatcgcattactggtatgttcctgtttctgacattcatgatgtgcatagtatgctactggttatgttaagatcaccctacactgcttatgccatgatcatagtttcaatttcttggattaaaatatgccgaataatgactatattttcaacaatccaaaaacctgataggtcattttcggtagttggctttgctgctgcactgaaaccacatgcttttgatggttcaaactataagaaatggaaagcacgtgcactattgtggttgacagcgatgcagtgcttctatgtttcacggggtaaacgaagtgaaccacctctttctcctgaggaagaggctaagttcgaggcttcggattgcctgttccgtggagcattgatcagtgtactcgctgacaacatagtggacgtgtacatgcacatgccttctgggaaggacatgtgggatgcacttgaggccaagttcggagtttctgacgccggcagtgagctgtatgtcatggagcagttctatgactacaagatggtcgatgaccgttctgtagtagaacaagctcatgagattcagatgctggctaaggaacttgagaacaacaactgtgagttgccggacaagtttgtggcgggtggcattattgccaaactaccaccttcttggtcggactttgccacttctctaaagcacaagagacaagagttcagtgttcctgatctcattggctctttgggtgttgaggagaaggcgagggcaaaggacgtccggggcaaaaaggttgagggaggttctagtgccaatatggtacagaagaagaaccctcatgcatcccacaacaacaagaaagtcaagcctgatgtcaaacccaaggctgcaaccaattttaagaagaaaggcaagggaaaggcaaagggagactgctttgtgtgtggcaagtctgggcattgggccaaggactgtcctgagcgcaaagacaggaagtctgccaacatgatcattagcgagggcggaggaacatcggggtacggtaaaatattacctacagttctctctgtttttcattcacctgattggtgggtggatactggtgctaatattcatgtcgggagaggttcctccttgttgatgggaaacgggtcgcttgcggctgttcatggtgttggtacggtcgatctgaagtttacttcgggaaagaccgtgcagctgaagaacgtgcagcatgtcccttcaataaagaagaatctagttagcggctctctattgtgtagagaaggttttagacttgtgtttgagtccaataaatgtgtcatatctaaatatgggacttttgttggaaaaggttatgacagcggaggcttgttccgcttttctttgaatgacatgtgtaataatcataacgctgtgaaccatattagcgagaatgatgagtctaatgtgtggcattcgcgactctgtcatgtgaatttcggttgtatgatgcgcttagctaacatgagtttaattccaaaattcactttggtcaaaggttccaagtgccatacttgtgttcaatcgaaacaacctcgcaagcctcacaaggcatctgaggcgaggaatttggcacctctagaacttgttcattccgatttgtgcgaaatgaacggcgtgttgactaaagggggaaagaaatatttcatgacactgatagatgattgcactagattttgctatgtgtatctattgaaaacaaaggatgaggcattgcattactttaaaatctataaagctgaggtagaaaaccaacttgaaaggaaaatcaaacggttgaggtctgatagaggtggggagtatttttccaatgagtttgcatccttttgcaaagagtttggaattattcatgagatgacgcctccctattcaccccaatcaaatggggtggccgaaagaaagaaccgtactctaactgagatggtgaatgccatgttagacactgcgaggctttccaaggaatggtggggtgaggcagttttgactgcgtgtcatgtcctgaataaaattccaatgaagcacaaggaagtaaatgtacctatagtcaaaaagcggaaacttggaccaaaaactgttgattgtgtgtttcttggttatgctatccacagtgtgggttatagattcttaatagtaaactctggagtacccgacatgcatgctggtacaatttttgagtccagagatgctactttctttgagaatgaatttcctatgaaatatacatctagcacttctagtaaagaaactgtcatgccccatgagcactttgcaccgatagaacacaatgatcaaacgcctgaggaaaatcctgaggaggacaacattgtagatactcgcaagagtaagagacaaagggttgcaaaatcctttggagatgactacattgtatacctcgtggatgacaccccaagaaccatagaagaggcatattcatctcctgacgctgactactggaaggaagcagtacgcagtgaaatggactcgattatgtctaatggtacttgggaagtcgttgagcgtccatatggatgtaagcccgtaggatgcaaatgggttttcaagaaaaagcttaggcctgatggtacaatcgaaaagtataaggcaaggcttgtggccaagggttatacccaaaaggaaggcgaggatttcttcgacacatattcaccagttgctcgcttgactacgattcgagtactacttgctctggcagcctctcatggtcttcttgtccatcagatggacgttaagacagctttcctaaacggagagctggaggaggagatctatatggatcaaccagacgggtatgtactagaaggtcaggagggaatggtgtgtaaactattgaaatccttgtatggcctcaagcaagcacctaagcaatggcatgagaagtttgacaccacgcttacatctgcaggctttgttgtgaacgaagctgacaaatgtgtatactatcgctatggtgggggagaaggggtgatcttatgcttgtatgtcgatgacatactgatctttgggaccagccttaatgtgattgaggaggtcaaagactatctgtccaagagttttgaaatgaaggatttgggagaggctgatgttattcttaacatcaaactacaaagaggagatgagggtgggatcacacttgtgcaatcccactatgtggacaaggttttgagtcgctttggatatagtgact

SEQ ID NO: 15415 - DNA, 2424 bp, Oryza sativa
  Clone ID: TFbOSC417635j.C1.o8.gm
atgcagtgcttctatgtttcacggggtaaacgaagtgaaccacctctttctcctaaggaagagactaagttcgaggcttcggattgcctgttccgtggagcattgatcagtgtactcgctgacaacatagtggacgtgtacatgcacatgccttctgggaaggacatgtgggatgcacttgaggccaagttcggagtttctgacgccggcagtgagctgtatgtcatggagcagttctatgactacaagatgcacaagagacaagagttcagtgttcctgatctcattggctctttgggtgttgaggagaaggcgagggcaaacgacgtccggggcaaaaaggttgagggaggttctagtgccaatatggtacagaagaagaaccctcatgcatcccacaacaacaagaaagtcaagcctgatgtcaaacccaaggctgcaaccaattttaagaagaaaggcaagggaaaggcaaagggagactgctttgtgtgtggcaagtctgggcattgggccaaggactgtcctgagcgcaaagacaggaagtctgccaacatgatcattagcgagggcggaggaacatcgggagatgctactttctttgagaatgaatttcctatgaaatatacacctagcacttctagtaaagaaactgtcatgccccatgagcactttgcaccgatagaacacaatgatcaaacgcctgagaaaaatcctgaggaggacaacattgtagatactcgcaagagtaagagacaaagggttgcaaaatcctttggagatgactacattgtatacctcgtggatgacaccccaagaaccatagaagaggcatattcatctcctgacgctgactactggaaggaagcagtacgcagtgaaatggactcgattatgtctaatggtacttgggaagtcgttgagcgtccatatggatgtaagcccgtaggatgcaaatgggttttcaagaaaaagcttaggcctgatggtacaatcgaaaagtataaggcaaggcttgtggccaagggttatacccaaaaggaaggcgaggatttcttcgacacatattcaccagttgctcgcttgactacgattcgagtactacttgctctggcagcctctcatggtcttctcgtccatcagatggacgttaagacagctttcctaaacggagagctggaggaggagatctatatggatcaaccagacgggtatgtactagaaggtcaggagggaatggtgtgtaaactattgaaatccttgtatggcctcaagcaagcacctaagcaatggcatgagaagtttgacaccacgcttacatctgcaggctttgttgtgaacgaagctgataaatgtgtatactatcgctatggtgggggagaaggggtgatcttatgcttgtatgtcgatgacatactgatctttgggaccagccttaatgtgattgaggaggtcaaagactatctgtccaagagttttgaaatgaaggatttgggagaggctgatgttattcttaacatcaaactgcaaagaggagatgagggtttttggggagtgcctcctgcacgactgctcatcgccatgtctggagttgctgccgccgctattggcggaggtggtgcgtcgccgccgacaggagctgcgccgctgccgacgccgacaggagctgcgccgctgccgatgccgacaggagctggatccggagctggtgcgccaggaggaggtgccgtgaacgactacaacaacggaggcaattctgcctcaccatccagcggagggccattctcggggcggatagaggagtacgagctgaggcgagaggaggctgatcggagaactagagctgatatacggtctctcatagatgtggttgaagcatgcacaccggaagttgggaagaaggcaaaagacttgccagcgtcaattaagaaagagcagtcaaaggtgacgcccaccacatgttcgacgaaatgctctagtcccgacatcgagcccaatctcaccgtggttgcggtggacaaatgtgccaccactgccatggcctccatgaagttggtagctgatgatggtgcaaccagcaccaccaaaattcccaccactgactattccaaggagacgcacgccaagtgttcgatgttgggcttcgatgtcaagtgggacgccaacaaagccgacatcacgttcctgaccaagacggttgtacttgaaaccgttccagcatccattgcatcattgagcgccttctcaccaaggatgatcgccgacatcaagcagtacacattgatgcccaccagaaaggacaactgctacttaagttggagacacttacttcttgcaagagtgatggttgtggagctgagcagtactgggcaatttggttctgagaacatttccatcaaaggaaaacatgttgacaagctgtga

SEQ ID NO: 15416 - DNA, 3261 bp, Oryza sativa
  Clone ID: TFbOSC420545j.C1.o5.fg
atggcccttttctgctaccgccgcgcatccgacttcctccccgatcacgccgcgcacgcctatgggatacagaccgcgccgctgctggccttctacgccttggctaattcggcgctcgtcacgctgtatgcgatgtgttggaaggggcggcggcgtttgctcgccggagaagaagctggtggtgccggagagcgtgtgcgggcggccgctggggctgcagttccaccacgcctccggcgacctgtacgtggccgacgcgtacctaggcctcctgagggcgccggcgcgcagcgggctggccgagaggtggtgacgacggaggccgccggcgtgccgttcaacttcctcaacggccttgacatcgaccagaggaccagcgacatctacttcaccgatagcagcagcacgtactggaggagacctctggtgaacttattcctttccaagtcaaattattatccttcacctaagttccttttctcatgggccgattcacatgagccaacccttctcaaaccgaagtccaatatacctacccctcaaaacacagtatcagtactggatcttcccatggacccattccaacaaaatgtctctcctgctttacccccaaagcccaaaaggagggctgggaaggtgatcttgatggatttagaaaggaggagaagtgcaagtatcaacaaactttctgatggatttatgtcccctgatccaaacttgggtgtgggaaagccaaggggaaaggatagggcaaagagtaccaagaagcttaaaatgttggctcaagaaagtggtatcttactctctcttaaccctttgcctctggaacttaacgatcctaatgcttcagatgatgagattgatgcccctctcgccgattgttctatacggctccttcaacagattggcactgagcgatgcaatgtttcatggggaaaacgaagtgaaccacctttctctcctgaggaagaggttaagttcgaggcttcggatttcctgttccgtggagcattgatcagtgtactcgctgacaatatagtggacgtgtatatgcacacgccttcagggaaggacatgtgggatgcacttgaggccaagttcggagtttccgacgccggcatggaacaagctcatgagattcagatgttggctaaggaacttgagaacaacaactgtgagttgccggacaagtttgtggcgggaggcattattgccaaattgccaccttcttggtcagattttgccacttctttgaagcacaagagacaagagttcagtgtatctgatctcattggctctttgggtgttgaggagaaggcgagggcaaaggacaacggggcaaaaaggtcgagggagaaagtcaagcctgatgtcaaacccaaggctacaaccaattttaagaagaaaggcaagggaaaggcaaagggagactgctttgtgtgtggcaagtctgggcattgggctaaggactgtcctgagcgcaaagacaggaagtctgccaacatggtcatttgcgaggcggaggaatattggggtacggatttacagttgacacctccctattcaccccaatcaaatggggcagccgaaagaaagaactgtactctaactgagatggtgaatgccatgttagacactgcgggactttccaaggaaaggtggggtgaggcaattttgactgcttgtcatgtcctgaataaaattccaacgaagcataaagaagtaacaccattcgaggaatgggaaaggaagaaattaaatctctcatacttacgaataaggggctgtttggccaaggtaaatgtacctatagccaaaaagcgtaaacttggaccgaatactgttgattgtgtgttccttagttatgctattcacagcgtgggttatagattcttaatagtaaactctggagtacccgacatgcgagttggtacaattattgagtctagagatgctacattctttgataatgaatttcccatgaaaaatatacctagcacttctagtcaagaaactgtcataccccatgagcactttgcaccgatacaacataatgatcaagcgcctgagggaaatcctgaggaggataacattgcagatactcgtaagagtaagagacaaagggttgcaaaatcctttggagatgactacattgtatacttcgtggatgacactccaagaacaatagaagaggcatattcatctcctgatgctgactactggaaggaagcagtacgcagtgagatggactcaattatgtctaatggtacttgggaagtcgttgagcgtccatatgggtgcaagcctgtaggatgcaaatgggttttcaagaaaaagcttaggcctgatggtacaattgaaaagtacaaggcaaggcttgtggccaagggttatacccaaaaagaaggcgaggatttttttgacacctactcaccagttgctcgcctgaccacgattcgagtactacttgctctggcagcctctcatggtcttctcgtccatcagatggacgttaagacagctttccttaacggagagctagacgaggagatctatatggaccaaccagacgggtatgtactagaaggtcaggagggaatggtgtgtaaattgttgaaatccttatatggccttaagcaagcacctaagcaatggcataagaagtttgacaccacacttacatctgtcggctttgttgtgaacgaagctgacaaatgtgtgtactatcgctatggtgggggagaaggagtgatcttgtgtttatatgtcgatgacatattgatctttgggaccagcctcaatgtgaatgaggaggtcaaggactttctgtccaagagttttgaaatgaaggatttgggaaaggctgatgttattcttaacattaagctactgaaaggagatgagggggggattacacttgtgcaatcccactatgtagacaaggttttaagtggctttggatacagtgactgcaagccagctcctactccttatgatcccaacgtgctattaaggaaaaaccgaagaatagcaagggatcaactgagatactcccaaatcattggttcattgatgtacttggctagtgcaacgaggcctgatatctcatttgctgtaagcaagctgagccggtttgtctcaaatccgggagatgatcattggcaggctctggaaagagtaatgcgctatctaaagggcactatgagctatggaattcactataccgggtatccaaaagtactggaagggtatagtgactaa

SEQ ID NO: 15417 - DNA, 4371 bp, Oryza sativa
  Clone ID: TFbOSC420787j.C1.o19.gm
atgcagtgcttctatgtttcacggggcaaacgaagtgaaccacctctttctcctgaggaagaggctaagttcgaggcttcggattgcttgttccgtggagcattgatcagtgtactcgctgacaacatagtggacgtgtacatgcacatgccttctgggaaggacatgtgggatgcacttgaggccaagttcggagtttctgacgccggcagtgagctgtatgttatggagcagttctatgactacaagatggtcgatgaccgttctgtagttgaacaagctcatgagattcagatgctggctaaggaacttgagaacaacaactgtgagttgccggacaagtttgtggcaggtggcattattgccaaactaccaccttcttggtcggactttgccacttctctaaagcacaagagacaagagttcagtgttcctgatctcattggctctttgggtgttgaggagaaggcgagggcaaaggacgtccggggcaaaaaggttgagggaggttctagtgccaatatggtacagaagaagaaccctcatgcatcccacaacaacaagaaagtcaagcctgatgtcaaacccaaggctgcaaccaattttaagaagaaaagcaagggaaaggcaaagggagactgctttgtgtgtggcaagtctgggcattgggccaaggactgtcctgagcgcaaagacaggaagtctgccaacatgatcattagcgagggcggaggaacatcgggagatgctacattctttgagaatgaatttcctatgaaatatacacctagcacttctagtaaagaaactgtcatgccccatgagcactttgcaccgatagaacacaatgatcaaacgcctgaggaaaatcctgaggaggacaacattgtagatactcgcaagagtaagagacaaagggttgcaaaatcctttggagatgactacattgtatacctcgtggatgacaccccaagaaccatagaagaggcatattcatctcctgacgctgactactggaaggaagcagtacgcagtgaaatggactcgattatgtctaatggtacttgggaagtcgttgagcgtccatatgggtgcaagcccgtaggatgcaaatgggttttcaagaaaaagcttaggcctgatggtacaatcgaaaagtacaaggcaaggcttgtggccaagggttatacccaaaaggaaggcgaggacttcttcgacacatactcaccagttgctcgcttgaccacgattcgagtactacttgctctggcagcctctcatggtcttctcatccatcagatggacgttaagacagctttcctaaacggagagctggaggaggagatctatatggatcaaccagacgggtatgtactagaaggtcaggagggaatggtgtgtaaactattgaaatccttgtatggcctcaagcaagcacctaagcaatggcatgagaagtttgacaccacgcttacatctgcaggctttgttgtgaacgaagctgacaaatgtgtatactatcgctatggtgggggagaaggggtgatcttgtgcttatatgtcgatgacatactgatctttgggaccagccttaatgtgattgaggaggtcaaagactatctgtccaagagttttgaaatgaaagatttgggagaggctgatgttattcttaacatcaaactacaaagaggagatgaggacgggcgggcgatcaggtttttggggagcgcaaggcgcgactactcactgttcgtcaatatctacttcatcttcaccaacatgtcgaacactggagacaaggagaaggagactcccgtcaacaccaacggaggcaatactacctcaaactccagcggaggaccattcttggggactattcatttccacttgtttgagtcggggttcatgccaagctataattgttggacatcccacggagagcaaggtgttgaaatggaagaggatgaagtggaagacgacaatattccggactttgctcagtatgttggatttgaaggaaatcaaacgggcgaggaggaaatagctgctgatggtaacgacgttgcggatgatcttggtcagatgttgcaggacgccagggaagacagcgaaagtgaaaaggaggcccataaattggacaagatgttggaggaccacagaacttcgttgtacccaggttgcgagcaggggcacaaaaagttggataccactctggatttgttgcaatggaaggcaaaaaatggggacgggatcctgagacaccccgccgatggttcgcagtggcgaaacatcgacagaaaatttaaagaatttggaaaggacgcacgaaacatacggtttggccccaagcaacctggtaacgacatcgacgtgtacctaagaccactggtcgaagatcttaaacagttgtggaagaaggaaggtgtccccgtgtgggacgaggacaaacaggaggagtttaacctacgagcgctgctgttcgtaaccatcaacgattggcctgcacttagcaacctatccggacagtccaacaagggttacaaggcttgcactcactgtatggatgaaacagaaagtacgtatcttaagcactgtaggaaggttgtatacatgggtcatcgtcgattccttgcagcaaaccacccggtacggaagaaagacaagcacttcgaacataaggccgaccaccgtacgaagcctaaacatcgcagcgggaaaacagtgtttgctatggttaaagatcttaaagtagtgttcggaaaggggcctggaagccagcatatagagagcgaagatggtcacgcggcgatgtggaaaaagaactctatattttgggagttaccatattgggaattcttggacgtacgccacgcaatcgacgtgatgcacctcactaagaacctttgcgtaaaccttcttggcttcctaggtgtatacggaaagtcgaaagatacactggaagcacgtaatgatctgaagcatatggaacaacgtagcgaccttcacccggaaccaaaggagaaaggaagccattacttgagtccagccagctacactcttagcaaggcagagaaggaaagtatgtttgaatgcttggagagcataaaggtaccgtctggatactccacgaatatcaagcgaataataagcacgaaggagaagaagttcacaaacctaaagtctcatgactgtcacgtgttgatgacacaactgctaccagttgtaataaggggtatccttccagacaatgtccgggcaacaataacaaagctatgtgcattcatgaacgcaatttcgcagaaggtcatcgatccggatagattagaagcccttcagaatgaagtggtgcaatgtctcgtcagttttgagttgatatttccaccttcatttttcaatataatgacgcatctgctttgtcaccttgtgaaagagatccgtattctcggacctatgtacctacacaacatgtttcctttcgagaggtacatgggcgttctgaagaagtatgttcgtaaccgtgctcgtccagaggcaagcatcgccaagggttatggaacagaggaggtcatcgaattttgcgtagaatttatcgaagaccttcgcccaatcggggtacctaaatcacgccatgaagggagactacagggaaagggaactctcggaaggaaagcaataacgacggtagacaacaatttattccgtaaagcccatttcactgttctgcaacactcttcattggtagctccttacatcgaggagcacttggctctagttcgcgcaaggaacatcggtaagtccgatgcatggattacacggcatcacattgatactttccccgcgtggctacgacaacatctcatgggtaacgagtcgatcaaccaacaacttgccttcctggcgtggggaccgtctgggtcgatcgcgacattccagggatatgagatcaatgggtacacattctacacgagagcccaagacatgaagagcacgaaccaaaacagcgctgttcgtgtcgatgccatgggacacgatggaacaactgccacgtattacggttccatcgaggacatatgggaacttgactatggtcctctcaaggttcctctgttccggtgccaatgggttaggttgactggtggaggcgtaatgattgatgacagtgggatgacaactgttgaccttaacaaggttggatactcggacgaaccttttgtccttgccaatgatgtaacgcaagtctttttcgtgaaggacatgtctagcaaaggaaagaagggcagagggcctgatgagcctaagcgtcaagtggttctcccaggcaaaagaaaaatcgtcggagttgaggacaagactgacgaggattacgattag

SEQ ID NO: 15418 - DNA, 1077 bp, Oryza sativa
  Clone ID: TFbOSC423002j.C1.o1.fg
atggcgatgatcttcctcctggccgcgctctccaccacccacctcgcctcctccctccgccccggcgccgtcgccggcggcgcgtgccgtcccagcggctacctcccggggaagtcctacgggcgggcgatcatgtttttggggagcgcaaggcgcgactactcactgttcgtcaacatctacttcatcttcaccaacatgtcgaacactggagacaaggagaaggagactcccgtcaacaccaacggaggcaatactgcctcaaactccagcggaggaccattcttgggtgtactcgctgacaacatagtgaaggtgtacatgcacatgccttctgggaaggacatgcgggatgcacttgaggccaagttcggagtttctgacgccggcagtgagctgtatgttatggagcagttctatgactacaagatggtcgatgaccgttctgtagttgaacaagctcatgagattcagatgctggctaaggaacttgagaacaacaactgtgagttgccggacaagtttgtggcaggtggcattattgccaaactaccaccttcttggtcggactttgccacttctctaaagcacaagagacaagagttcagtgttcctgatctcattggctctttgggtgttgaggagaaggcgagggcaaaggacgtccggggcaaaaaggttgagggaggttctagtgccaatatggtacagaagaagaaccctcatgcatcccacaacaacaagaaagtcaagcctgatgtcaaacccaaggctgcaaccaattttaagaagaaaagcaagggaaaggcaaagggagactgctttgtgtgtggcaagtctgggcattgggccaaggactgtcctgagcgcaaagacaggaagtctgccaacatgatcattagtgagggcggaggaacatcggggtacggtcgggagaggttcctccttgttgatgggaaacgggtcgcttgcggctgttcatggtgttggtacggtcgatctgaagtttacttcgggaaagaccgtgcagctgaagaatgtgcagcatgtcccttcaataaagaagaatctagttag

SEQ ID NO: 15419 - DNA, 2368 bp, Oryza sativa
  Clone ID: TFbOSC423019j.C1.o2.np
atatcatgattattatcttgttattttggattaaaatatgccgaattatgaccaaatttccaacattccaaaaacctgataggtcattttcggtagttggctttgctgctgcactgaaaccacatgcttttgatggttcaaactataagagatggaaagcacgtgcactattgtggttgacagcgatgcagtgcttctatgtttcacggggcaaacgaagtgaaccacctctttctcctgaggaagaggctaagttcgaggcttcggattgcctgttccgtggagcattgatcagtgtactcgctgacaacatagtggacgtgtacatgcacatgccttctgggaagaacatgtgggatgcacttgaggccaagttcggagtttctgatgccggcagtgagctgtatgttatggagcagttctatgactacaagatggtcgatgaccgttctgtagttgaacaagctcatgagattcagatgctggctaaggaacttgagaacaacaactgtgagttgccggacaagtttgtggcaggtggcattattgccaaactaccaccttcttggtcggactttgccacttctctaaagcacaagagacaagagttcagtgttcctgatctcattggctctttgggtgttgaggagaaggcgagggcaaaggacgtccgggggaaaaaggttgagggaggttctagtgccaatatggtacagaagaagaaccctcatgcatcccacaacaacaagaaagttaagcctgatgtcaaacccaaggctgcaaccaattttaagaagaaaagcaagggaaaggcaaagggagactgctttgtgtgtggcaagtctgggcattgggccaaggactgtcctgagcgcaaagacaggaagtctgccaacatgatcattagcgagggcggaggaacatcggggtacggtaaaatactacctacagttctctctgtttttcattcacctgattggtgggtggacactggtgctaatattcatgtatgtgctgacatttctctattttcttcttatcaggtcgggagaggttcctccttgttgatgggaaacgggtcgcttgcggctgttcatggtgttggtacggtcgatctgaagtttacttcgggaaagaccgtgcagctgaagaacgtgcagcatgtcccttcaataaagaagaatctagttagcggctctctattgtgtagagaaggttttagacttgtgtttgagtccaataaatgtgtcgtatctaaatatgggacttttgttggaaaaggttatgacagcggaggcttgttccgcttttctttgaatgacatgtgtaataatcataatgctgtgaaccatattagcgagaatgatgagtctaatgtgtggcattcgcgactctgtcatgtgaatttcggttgtatgacgcgcttagctaacatgagtttaattccaaaattcactttggtaaaaggttccaagtgccatacttgtgttcaatcgaaacaacctcgcaagcctcacaaggcatctgaggcgaggaatttggcacctctagaacttgttcattccgatttgtgcgaaatgaacggcgtgttgactaaagggggaaagaaatatttcatgacactgatagatgattgcactagattttgctatgtgtatctattgaaaacaaaggatgaggcattgcatttctttaaaatctataaagctgaggtagaaaaccaacttgaaaggaaaatcaaacggttgaggtctgatagaggtggggagtatttttccaatgagtttgcatccttttgcgaagagtttggaattattcatgagatgacgcctccctattcaccccaatcaaatggggtggccgaaagaaagaaccgtactctaactgagatggtgaatgccatgttagacagtgcggggctttccaaggaatggtggggtgaggcagttttgactgcgtgtcatgtcctgaataaaattccaatgaagcataaggaagtaacaccattcgaggaatgggaaaggaagaaattaaatctctcatacctacgaacatggggctgtttggccaaggtaaatgtacctatagccaaaaagcggaaacttggaccaaaaactgttgattgtgtgtttcttggttatgctatccacagtgtgggttatagattcttaatagtaaactctagagtacccgacatgcatgttggtacaattcttgagtccagagatgctacattctttgagaatgaatttcctatgaaatatacacctagcacttctagtaaagaaactgtcatgccccatgagcactttgcaccgatagaacacaatgatcaaacgcctgaggaaaattctgagaaggacaacat
